United States Patent Application Publication US 2022/0096574 A1 - sequence listing, part 19

SEQ ID NO: 84952 - protein, 497 aa, Phenylobacterium sp.
  misc_feature (1)..(497): tr|A0A1G2WDP2|A0A1G2WDP2_9CAUL Tryptophan halogenase OS =Phenylobacterium sp. RIFCSPHIGHO2_01_FULL_69_31 OX=180 1944 GN=A2790_04190 PE=4 SV=1
MQGQVVKKVVVAGGGSAGWMAAAGLSTQLGALLDITLVESDAIGTVGVGESTIPTARTFVHLLGLDEREFMRETGATFKLGILFENWGQVGDRYIHSFGQVGKSTLMAHFHHLWLHAKAQGFGGDLGDYCLELRASEEGKFYTADDAPVNYAYHIDATRFGRYLRKRCENKGVRRVEGKIQEVQQHPQTGHITALVLESGERVEGDLFIDCTGFRGLLIEQTLKAGFEDWGQWLPNDRAVAVQTRTRDPAMPLTRAIAHTAGWQWGIPLQHREGNGWVYCSDFMSDDEASSSLLGQLKGERLTDPWQLRFRPGRRRKAWDKNCVAIGLAAGFIEPLEATSLHMIMIAVTRLLQLFPFTGVNDALTTRFNFLANQEIERIRDFIILHYNATERTDTPYWNRCRTMEIPASLAERIQLFRETAQVYHVPGELFLVDSWLQVMLGQRIRPASHHLMGALMPPEQLRRALDDLKGNIDRAVARMPSHQDFVDRYAGLELAD

SEQ ID NO: 84953 - protein, 477 aa, Streptomyces violaceusniger
  misc_feature (1)..(477): tr|A0A0X3VRN9|A0A0X3VRN9_STRVO Tryptophan halogenase OS =Streptomyces violaceusniger OX=68280 GN=ADL28_33370 PE =4 SV=1
MNSAVESDYDVVVVGGGPGGSTLSTLVALQGHRVLLLEKEEFPRHQIGESLLPSTVHGICRLLGVTDELANSGFMKKHGGTFRWGLNAEPWTFDFSVSEKFSGPTSYAYQVERMKFDKILLDNARSKGVDVRERSEVVGVLEEEGRIRGVRYDDAEGVRREVRARFVADASGNKSRIHNRIGGARKYSDVFQNIAVFGYFTGGKRTPAPWTGNITCASFDLGWFWYIPLSDELTSVGAVLRREALARLQDGPRDKVLEGLIEECPLIADYLSEAERVTEGPYGEVRVRKDYSYIQEKFWRPGMVLVGDAACFIDPLFSSGVHLSTYSALLAARSINTTLGGVIDEAHCFREYEARYRREYDVFHDFLVAFYDLQKDEHAYFREAKDVIGSSASAAESFAELVGGGASNEEALIGTAPSFSQERRADLLEQSRKIHWQGSRVQVQALFGESVGDAPLYEGGLVESPDGMHWARPERPS

SEQ ID NO: 84954 - protein, 507 aa, Pseudoxanthomonas sp.
  misc_feature (1)..(507): tr|A0A2S6B1G5|A0A2S6B1G5_9GAMM Tryptophan 7-halogenase OS=Pseudoxanthomonas sp. KAs_5_3 OX=2067658 GN=C0063_15 930 PE=4 SV=1
MTATHNRITSVVVVGGGSAGWMAATALATYLGKQASIRLVESEEIGIVGVGEASVPYMKQFNAGLLGINEFDFVARTQGTFKLGIQFNDWDRIGDSYIHGFGKIGQGVGPLPFHQFWLKLFLAGRAPPIGDYSLATVAAPLGKFMSSPANAPMESPLADIAYAYHFDAGLYAAFLRGLAESRGVQRIEGKITGVQQRGEDGFVEAVVLESGERVEGELFIDCSGFRGLLIEQTLGTGYNDWTHWLPCDRAMAVPCATMGPPTPYTRATALSAGWQWRIPLQSRVGNGYVYSSEHISDDEAAATLLANLDGRALADPRPLRFTTGVRKKLWNKNVVALGLASGFMEPLESTSIYLAQSGIQRLLGLFPNRGFDPLLARQFNEESAFEYESTRDFLILHYCATRRNDSTFWDYCRTMSIPDTLRHKIDMFRNGGRYFRSGDEFFALPSWVQVMLGQGIVPASYHPIVDDMPEQALVDHVERVRRSLAMCAAEMPSHQAFIDRHCKALAM

SEQ ID NO: 84955 - protein, 510 aa, Shimia sp.
  misc_feature (1)..(510): tr|A0A0N0DAA2|A0A0N0DAA2_9RHOB Flavin-dependent tryptop han halogenase PrnA OS=Shimia sp. SK013 OX=1389006 GN=p rnA PE=4 SV=1
MPSKKSNSKSQEGPKPLHICIVGGGSSGWMMAAYVTNHFKFDGRKLKMTLIESAEVPPTGVGEATIHTMRGYLEDAGISEEKFLNECQGTFKHGIEFVGWSENTPPFFHPFENPPVVFENHAALNFLKADRSEGAMARYDYWAGIQSRLARRGVSPRQKSDVPYHGIVPYGYHLDANAFAHFLKKIATQRGVNHIISHVDKVESTKGKIDRLHLRNGKQIEADIFVDCTGFAARLIKELGGEFISGAEQLLVDSAVTCQVDAKDIEARPFTTATARNAGWTFDIDLQTRGGRGYVYSSKYLSKDEAFKEFSDAYPGQLDESRARHFQLRIGRMDKAWKGNCCAIGLAAGFLEPMESTGLYFVEYTARLFVEVLKSLTDNNMEVHADWFSNIFSELFDEVSAFIEAHYKLSDRRDTQFWRDATSAPHSPRLAQLLSLWESRAPGQFDFTGRSFFGAESWQAILFGLGWRPQKSHRLATVDQKAALAHFKVLKGHADRIAATNPQQADYLGL

SEQ ID NO: 84956 - protein, 514 aa, Asticcacaulis sp.
  misc_feature (1)..(514): tr|A0A2T5XCU3|A0A2T5XCU3_9CAUL Tryptophan halogenase OS =Asticcacaulis sp. CF398 OX=2135738 GN=C8K45_4016 PE=4 SV=1
MMGKRRILILGGGTAGWLAAAYLARHFDIRRQPRLEIVLVESPEIGSVGVGEGTFPTIRQTLKFIGIDEAPFMRRTTATFKQGIRFADWVKTPVNGRHEHYFHPFEAPYYTEGEGLVPYWLLQDEATRKPFAEAVTFQKRVAEARRAPKRPHEGDFAGPLNYAYHFDARQLAEVLNERAIALGVTHKQAKLDGVVLDHTGQIDHIVADGEVLTADLYIDCSGMRAELIGKALGSPFRSVRGTLFTNKALACKTAYERPDTPIESYTVATGHAAGWTWDIGLDGQRGIGYTYSTDHTTDAEAEATLRRYVGGKAPLSIREIPFEPGYREKQWIGNCVAVGLSGGFMEPLESTGIVMIEVAVAMIAELFPLAGPIDAPAKRFNALMTARYENVVNFLKLHYALSHRSEAFWRDNTDPQTWPDRLRDLLEQWRYRPPSRFDFLIDVETFAFFNYQYILYGMGFRTDLSGARDHFPHVEDANRTFAKIHNFGERATLDLPSHRTLIRQIYAEGFAENA

SEQ ID NO: 84957 - protein, 472 aa, Asticcacaulis sp.
  misc_feature (1)..(472): tr|A0A2T5XQU8|A0A2T5XQU8_9CAUL Tryptophan halogenase OS =Asticcacaulis sp. CF398 OX=2135738 GN=C8K45_0790 PE=4 SV=1
MVRKSVEIVLVESDEIGIVGVGEATIPPLVNLFTFLGIPEAEMLSKVQGTYKLGIEFVNWGQTGERYIHAFGNPGRDLGIVPFYQYWLKAHAEGRGGDLWDYSLNAQAAFAHRYAPLKQIDGGIEGLTHAWHFDAGLLARYLRAGCETQGVIRKEGKVTGVNLRPEDGFIVSLNLESGETVDGDMFIDCSGFRGVLIEEALKAGYDDWSHWLPNDRAIAVPSESNGPLLPYTRATAHTAGWQWRIPLQHRIGNGHVFSSGFMEEDEAARILLDNLDGKPLADPRTLRFTTGRRRQSWVKNCLALGLASGFLEPLESTSIHLVQSGMTRFLKLFPDRGFNPLTIAEYNRQTAHEYELVRDFIILHYHATQRTDSDYWNHCRTMPLPDSLAHKIAYFREHGRLLIEEADLFRESNWAQVLIGQNITPTHASPLTHAVEDAALDDYMANIKRLVGHAAAGLPLHADFIGRHCRAR

SEQ ID NO: 84958 - protein, 521 aa, Methylorubrum extorquens
  misc_feature (1)..(521): tr|H1KVD3|H1KVD3_METEX Tryptophan halogenase (Fragment) OS=Methylorubrum extorquens DSM 13060 OX=882800 GN=Met exDRAFT_6596 PE=4 SV=1
MFRSERSAPARLVVAGGGPAGWMAALYLKRVLRRAGWTVTLVGSAPAAGASAALATRPAFTRFLKGFGIDEAIFMRRCAATYRLASRYDDWFAEGQGHWHPFGACGPRIAGRDLFHYWMKLRGEGAEDEAGSYADYAPQALMAAEGRGPRPLADRSSLTESGDYGYHLDRKALVRFLRELALSEGVRGVTGRVREIERNLYGDVGALILDGGQTIEGDIFLDCTGAAAQLIGTALGEAWVAGSGPGDRVARLSLPRSPEVPPFTAYRGRAEGWTASLPLADRTEHLFVYDSRTTPPDAAAATLRRAFDGQAGIVDAELRHGRRASPWQRNVVAMGAAARAVEPLLGFDLDLVLAGLETFLAYLPRQGEGGDVLRRAYAARLNRFHDDAAEAVAAHYVLGRRSEPFWAAARAVMIPDRLADRLDLYELAGHVALSEEGPFSEGDHYLLFSGADFLPRRPFAPVDVADGREIARLLASIRAQSAQIAGAMAPHVRLMDALHGEAPVAAPAVRIAAASAPAGPA

SEQ ID NO: 84959 - protein, 506 aa, Asticcacaulis sp.
  misc_feature (1)..(506): tr|A0A2T5XNL8|A0A2T5XNL8_9CAUL Tryptophan halogenase OS =Asticcacaulis sp. CF398 OX=2135738 GN=C8K45_1824 PE=4 SV=1
MSPPHPRPIKSICIVGGGSAGWMTAAFLSKMLGQACAITLIESEEIGTIGVGEATIPAIKTFNGLLELDEVEFIRRTQGSFKLGIEFRDWGHTGNSYIHGFGRIGQDWGWLRLHQYWRRALSLGETPGDIGRYSINVQAARANRFMPPRTDSKTSPLADIAYAYHFDAGLYARYLREQAQTRGVSRIEGHITGVDLRAADGFIESVTLRSGQVVGAELFIDCSGMRSLLLGEALKVPFEDWSHWLPCDRALAVPSESVSPLTPYTRSTAHSAGWQWRIPLQHRIGNGHVYASAFIDDEAAADTLLRHLDSPPTAEPRAIRFRTGRRRTLWEKNCVAIGLSGGFLEPLESTSLHLIQSGLIRLLSLFPDSAFRPADIALYNHQSVIEYAHVRDFIIAHYKLNRRDDSDFWRTCREMSIPDSLQRRLDIFASAGRVMPEVADELFSAESWIMVLLGQGLLPAAWDPAAELKTPEETLRFLANVEAVVRKCVAVMPDHAEFIARTCAAQ

SEQ ID NO: 84960 - protein, 497 aa, Massilia sp.
  misc_feature (1)..(497): tr|A0A0Q7FF27|A0A0Q7FF27_9BURK Uncharacterized protein OS=Massilia sp. Root418 OX=1736532 GN=ASC94_13720 PE=4 SV=1
MDAANHSAYKRIVVVGGGAAGWMAATALATAQPASTVELVESEEIGIIGVGEATFPSIRAFHKILGIDEAEFLRATNGTYKLGIEFCNWRTQGERYFHTFGDFGALTGPQALWGQHRRLGDDALGALGEQCLPSVMASQGRFQVPPEREQFFNYAYHFDAVLYAGFLRALALKRGVRRTEGRIVDVARRADGGVNQLRLADGRTVAGDLFIDCSGFASLLLGRTLDEPFVDFSHWLPADRAWACPSGRNGPDLAPYTRATALEAGWAWRIPLSNRTGHGHVFASRYIDEERARTQLLEQMDGPPLAEPRLLRFTTGHRARFWVHNVVALGLSSGFLEPLESTSIFLVQSGLGRMIELLLQGAAPGRQAVADYNAGMVRQFERVRDFIMLHYCLTARRDSKLWRAMMAMELPDTLAFKIHAWRQTGALHQYSDEGFDATSWLAIHAGMGHWPERADPALREMAPEAARQALLQRRASIAAVVAAMPSHDAYLRSVLAR

SEQ ID NO: 84961 - protein, 507 aa, Asticcacaulis sp.
  misc_feature (1)..(507): tr|A0A2T5XHS0|A0A2T5XHS0_9CAUL Tryptophan halogenase OS =Asticcacaulis sp. CF398 OX=2135738 GN=C8K45_3037 PE=4 SV=1
MRENRITSIAIIGGGTAGWMTAAALSKILGRDYADIVLVESDEIGTVGVGEATIPQINVFNRLLGLDEDEFIRRTQGSFKLGIEFVDWGARGERYFHPFGPYGVDMRGVSFHAFWQKLQTLGVADSISDYNLQAIAARENRFMRPVRSAEGSPVSQIAYAFHFDAGLYARYLRQFSEDHGVVRQEGRVVDVAQNAETGFVEAVELADGRRVEAELFIDCTGFRALLIEQTLKAGFVDWSHWLPTDGAWAVPCESAQPFTPYTRSTARDAGWQWRIPLQHRTGNGHVFSSDFVSPDAARETLLQNLDAKPLAEPRLIRFKAGHRRTFWEKNVVAIGLAGGFLEPLESTSIHLIQSGIAKLLQLFPDKGFEAADRRRFNEMTRLEYEYIRDFIILHYNCTRRDDSDFWNHVRTMEIPDRLREKYDVFQSRGRIFREHEELFNDTSWFAVMVGQGMKWRAYDPVADLMSDDEVRARLSNIRDVMRRSADMIPDHADYIARTCAAPSLQTA

SEQ ID NO: 84962 - protein, 314 aa, Streptomyces sp.
  misc_feature (1)..(314): tr|A0A397N7B3|A0A397N7B3_9ACTN Tryptophan halogenase OS =Streptomyces sp. 3212.5 OX=2135785 GN=C8R36_7489 PE=4 SV=1
MPGGWRLSALPREPVARVPETILEGPVPVLVDATGAARAVSRGRLGRSEVDRLRHTVWRLRPRPERHAWSLMEATPDGWWYSAPLPDGERLTVVRVRGTGRPGRTPAAPPPRTAERLTVPLPPLPEPAAERVAVVGRADPPWGAQLVAVGDAALSVDPLSSAGLRHALELAGPAAEAALGLAAGDPSPAAAYGELVEAEFTRHLTQRRAVHTAATVYREEEFWRRPAKRGSRSPSASAETRCTHRDHLTAGSGLRPEVVARDRRRCAASARERVRQCPDSCELPHPAITPRTDELPGRRPSPPVPRSPVGRIRQ

SEQ ID NO: 84963 - protein, 503 aa, Asticcacaulis sp.
  misc_feature (1)..(503): tr|A0A2T5XCI8|A0A2T5XCI8_9CAUL Tryptophan halogenase OS =Asticcacaulis sp. CF398 OX=2135738 GN=C8K45_3944 PE=4 SV=1
MAPIRNITILGGGTSGWMAAAVLARAFKPGTCTVRLIESEEIGIVGVGEATLPQVRDFNTFLGLDEPEFMRATNATFKLGIEFRGWGTSDSYHHPFGVHGQSAGGIPFHQLWLKARSFMDPGPIEDYSFPIRLARENRFDFPIEDPKSIRSTYAYAYHFDAVLYARYLRQWCEARGVQRIEGKVTGVNQNAETGFVESLTLESGETVGGDLFIDCSGFRAVIAGQALNIGWEDWTPWLPCDRALAVPTERTEDLTPYTRATAREAGWTWRIPLQHRTGNGYVFSSRFTSEDRAREVLLGALDAPAQAEPRLLRFQAGRRTASWTRNVIALGLASGFLEPLESTSIYLSQIALTFLMRLMPDTRFDPALSDEFNRLIDIEYERVRDFLILHYHANTGSSGPLWDYVRGMEVPDSLKEKMALFRHRGHVQRYKDGLFSPASWIAVFMGQDVTPQSYDRQADSLSNEALATYLKDLKRKIDANLAVLPSHAEFVAGHCFDPEAANV

SEQ ID NO: 84964 - protein, 498 aa, Alteromonas sp.
  misc_feature (1)..(498): tr|A0A495US61|A0A495US61_9ALTE Tryptophan halogenase OS =Alteromonas sp. TK-46(2) OX=1276890 GN=CLW98_0585 PE=4 SV=1
MNRPMNIVIAGGGTAGWMAANYFAHKWPSDKVKVTLVESPDIGIIGVGEGSTPTLKRFFEELKIKESDWMPKCNATYKVSIQFNGWSPSSGVKHYRHPFISQTDTFTQRAFEVNCRTRRLGLDTHVTPEDFLLNGVLAKQNKAPITPDNFPFRMEYGYHFDSALLGNYLRDVAVEKGVTHISAVISDVVLHLSGDISHLVTEKGNIEGDFFVDCTGFSSHLLQQTLGVKFNSYSDNLFNDSAVVLPTHAYETIPVETQSTALSNGWCWSIPLQNRTGNGYVYSASHLTKDKAEEELRRHLGLENSDVEARHLKMKVGQVAQHWQKNCLALGLSQGFIEPLEATALHLVQICIEYFSDTLEKSGFSSKESAAYNAFAKERFDRVRDYIVAHYKLNTRDDSEYWRANRNNMVLSDSLKSLISTWFQREDLTSEINRQNIGMHWDSVSWHCLFAGYGAFPPLEQNQPGRGDLYSEQKIERFIQGCALNFNHHNNVLQTQQS

SEQ ID NO: 84965 - protein, 490 aa, Asticcacaulis sp.
  misc_feature (1)..(490): tr|A0A2T5XHX8|A0A2T5XHX8_9CAUL Tryptophan halogenase OS =Asticcacaulis sp. CF398 OX=2135738 GN=C8K45_3083 PE=4 SV=1
MSEPAFRRIVIVGGGTAGWMAAAALSKTLGGAYDITLVESAEIGTVGVGEATIPAINQFNDLLGLDEDEFVRETHATFKLGIEFVGWRRADHTYFHPFGGYGQDRDGIPFQHFWHRHRADGGSVPHDDFNLETQAARAGVFTRDGLNYAFQFDAALYAKFLRGYAERRGVTRVEGEIVEVRQAVDGSVEAVTLKSGRTVRGDFFIDCSGFRGLLIEGALKAGYTDWSRWLPVNRAVAVPCVRSGALTPFTRATAREAGWQWRIPLQHRTGNGYVFSADFLSESEATEALMQRLDGEALAEPRVLRFTTGHRNRLWVKNVVALGLASGFLEPLESTSIHLVQVCLIRLIGMFPKDAINPHVVERFNRMAETEYAQIRDFLIAHYHLTQRQDTPFWNHVRTYDIPDSLKARLDIWRDTGQVMVDSAELFRENNWFAVLTGQGLATHGYHPIAGREGDGELRMWLSGLRQALSERRAAMPSHEDFIAAHCRAG

SEQ ID NO: 84966 - protein, 504 aa, Rhodanobacter fulvus
  misc_feature (1)..(504): tr|I4VVX9|I4VVX9_9GAMM Tryptophan halogenase OS=Rhodano bacter fulvus Jip2 OX=1163408 GN=UU9_04377 PE=4 SV=1
MGDNRIRKVVIAGGGTAGWIAASALAYQLQGQIELTLVESSKIATVGVGEATVPPVRNFHRFMNIDEQEFLRAVAGTFKLAISFENFVRPGHRYIHPFGNTGKGTLVAGFQQYWLESLRRGMKSDLGNFSLEAMAALEDKFALTENPEINYAYHMDAALYVEFLRKKFERYGINRIEGMIKEVRQNPDSGYVEALVLDDGQVIEGDLFIDCTGFRGLLIEQTLKTGYEDWNHWLPCDRAIAVQTRSVDPSPVPYTRAIAHEAGWRWHIPVQHRVGCGLVYDSRYMSDDEARAKLLHDVGAEPVRDPWQVKFRTGRRLKAWNKNVVALGLASGFIEPLESTSIHLAMSAVMLLVELFPSEGIPDSLVKRYNDVCRGELEHVRDFITLHYHANQRDEKMWKDCREMTLPDSLQIRIDAWRDRAHVWKDQGELFATTSWMHVLLGQEIMPNQHHPVTREISDADLRRLLDSIRGPIDRTLPLLPLQQEFIDRYCKSPDGIWDMHRLG

SEQ ID NO: 84967 - protein, 497 aa, Alteromonas mediterranea
  misc_feature (1)..(497): tr|S5C2M6|S5C2M6_9ALTE Tryptophan halogenase OS=Alterom onas mediterranea UM7 OX=1300258 GN=I635_10320 PE=4 SV= 1
MMNKAVRNVVIVGGGTAGWISAAVIKRLIGAGVNVTLVESEEIGTVGVGEATIPPIITLNNVMGIDEKEFLRETNATMKLAIKFENWRIEGESYFHTFGAPGKSYAFCQFHHYFKRAQELGLADSIWEYDLNYLACKAGKFAHIKSPDPIIEMPYAYHFDASLYARFLRKKCEAMGVSRKEGIITDVKQDVDSGFISGVTLKSGEYIGGDLFIDCSGFKGLLTQQTLNTGYEDWSHWLPCDRAVAMPSERHEHTHPYTRSIAHSAGWQWRIPLQHRNGNGLVYSSNYYTDDQALDILSRNLDTKPLADPKFIRFKTGRRRKQWNKNVVAVGLSSGFLEPLESTSIHLIQSAVVRLIHLFPHDGFKQHQINEYNKQSQLEYEQVRDFIILHYHVNERTDSHFWKDLREMDVPDSLTHKIELFRESGNLFREQNDLFLESSWLQVLMGQGVFQKDHHPLANALSEQKLQELMQNIKRIKNEPIGKIASHDEFLKQFCGS

SEQ ID NO: 84968 - protein, 501 aa, Alteromonas sp.
  misc_feature (1)..(501): tr|A0A495UMP3|A0A495UMP3_9ALTE Tryptophan halogenase OS =Alteromonas sp. TK-46(2) OX=1276890 GN=CLW98_2652 PE=4 SV=1
MTVSGLDSSKNQTPVKNVVIAGGGTAGWMAATALSRLLGKSINVTLVESKDIGIVGVGEATIPPIRTFHKLLGIDEKAFMRATQATFKLGIEFENWRDQGHSYIHSFGITGRECWAGEFHHFWLRAKEYGFGGEFGDYCPELIAAKQSKFATSEAMPLNFAYHFDAVAYGRFLKSLACDAGVTHKEGDIEKVVVCPQSGNIQSLRLTSDEVINGDFFIDCTGFKGLLIEQALHTGYDDWRHYLFCDSAVAMQTELTAPPAPYTKSVAHKAGWRWQIPLQERMGNGLVFCSRFMSDEDAINTLKSQVTGAPINEPRVIRFTPGKRRRGWNKNCVALGLSSGFIEPLESTSIHLIMTGLIRLMRLFPFDGITQSAIDEYNNKFDSEMSSILDFIVMHYKVTQREDSPFWQQCQRMEIPPSLKHKLALFAESGRVFLDDGDIFRVDSWTQVLMGQGMTPSQYHRVADEMSEQSLKQFMAGLKQQVDNHVAKLPSHEAFLTQYLK

SEQ ID NO: 84969 - protein, 48 aa, Alteromonas mediterranea
  misc_feature (1)..(48): tr|S5C8C7|S5C8C7_9ALTE Tryptophan halogenase OS=Alterom onas mediterranea UM7 OX=1300258 GN=I635_20365 PE=4 SV= 1
MKPQQYHRVADEMSEQSLKQFLAGLKQQVDNHIAKLPAHEVFLTQYLG

SEQ ID NO: 84970 - protein, 502 aa, Asticcacaulis sp.
  misc_feature (1)..(502): tr|A0A2T5XHR9|A0A2T5XHR9_9CAUL Tryptophan halogenase OS =Asticcacaulis sp. CF398 OX=2135738 GN=C8K45_3033 PE=4 SV=1
MDNGNIRRVVIVGGGTAGWMSAAFLSRVLAGTGIELTLVESAEIGTVGVGEATIPPIAFFNRILGIDEAAFLRETHGTMKLGIAFDGWRREGERYLHPFGSFGGSIDGVSLQAFVVRARQQGMDTDLWDYSLNSQAAFRDRFAPPEKDPKSPLSELAYAYHFDAGLYAQFLRRFAEARGVTRIEGRIEQVRLNADDGGVEAVQLSDGREVAGDFFLDCSGFRALLIGEALGVGYHDWSHLLPANRAVAVPDTRVGPPVPYTLSMARRAGWQWRIPLQHRTGNGYVYVSDFISDDEAASTLLSNLQGQPIAEPRFLRFTTGRRHQSRSRNVVAIGLSSGFLEPLESTSIHFIQHGLIKLAATFPQHRRDETAAALYNRIMAEELDQVRDFLIAHYHLNERVGEPLWDYVRHMEIPETLREKIALFRQRGFCAYPNQTIFQEANWLAILWGQTGMPDGYDPLADAVAPDLMNLRLDNLRRAYAEVAGRLPSHDAFLQRFTGQTA

SEQ ID NO: 84971 - protein, 496 aa, Alteromonas sp.
  misc_feature (1)..(496): tr|A0A495US79|A0A495US79_9ALTE Tryptophan halogenase OS =Alteromonas sp. TK-46(2) OX=1276890 GN=CLW98_0586 PE=4 SV=1
MYDKAVKKVVVVGGGTAGWISAAVIKRLIGTDLTVTLVESEDIGTVGVGEATIPPIITLNNVLGIDEKEFLRETNATMKLAIKFENWRVKGEDYFHTFGAPGKSYAFCHFHHYFKRAQKLGLTDSIWEYDLNYLACKAGKFAHIKSPDPIIEMPYAYHFDASLYARFLRKKCEAMGVTRKEGIIHDVTQDSESGFITGVTLKDGEHIEGDLFIDCSGFKGLLTQQTLNTGYEDWSHWLPCDRAVAIPSERLEKTLPYTRSIAHSAGWQWRIPLQHRNGNGLVYSSNYYTDEQALDILSNNLDTKLLADPNFIRFKTGRRRKQWNKNVIAVGLSSGFLEPLESTSIHLIQSAVVRLIHLFPHEGFKQRQIDEYNKQSKTEYEQIRDFIILHYHVNERTDSHFWKDLREMDVPDSLTHKIELFRESGNLFREQNDLFLESSWLQVLMGQGIVQGDYHPLANALSEQKLQELMQNIKRIKNEPIGKIATHDDFLKQFCG

SEQ ID NO: 84972 - protein, 499 aa, Asticcacaulis sp.
  misc_feature (1)..(499): tr|A0A2T5XQJ4|A0A2T5XQJ4_9CAUL Tryptophan halogenase OS =Asticcacaulis sp. CF398 OX=2135738 GN=C8K45_0686 PE=4 SV=1
MEPLRIVIVGGGTAGWMTAAGLSYACRDRIAQVTLVESEEIGTIGVGEASIPSLVTFNQFLKIDEREFMARTKATFKLGIEFRDWGALGDRYMHPFGPFGHSFGMAAFHHYWLKAQQNGDRTPLSDYNLNTALAGRNAFTPPSPDRSSPLSALVYAFHFDAGLYAQYLRSYAENFGVKRIEGKVVTVGQDAESGHITGVTLADGRTVEGDFFVDCSGFRGLLIEETLKAGYEDWTGLLPCDRAVAVPCENQYPLTPFTRATAHGAGWQWRIPLQHRTGNGLVYSSAHMSDDEAAGTLLSHLDGKPLTDPRLIRFRTGRRRTVWEKNCVAIGLSAGFLEPLESTAIHLTQRGVTKLITSLPRKGFDPVLARRFNEETRFEYEDVRDFLVLHYALTRRDDTAFWRESRARGVSDTLKARMDLFATSGRIQVGADELFKDASWLAVMDGQGLKPCDYDPLADMVDESDVRRSLDFIRTTFARIAEQTPPHDAFLTTHVGPLG

SEQ ID NO: 84973 - protein, 463 aa, Algoriphagus sp.
  misc_feature (1)..(463): tr|A0A2D8C7C6|A0A2D8C7C6_9BACT Uncharacterized protein OS=Algoriphagus sp. OX=1872435 GN=CL554_12990 PE=4 SV=1
  misc_feature (121)..(121): Xaa can be any naturally occurring amino acid
  misc_feature (127)..(127): Xaa can be any naturally occurring amino acid
  misc_feature (142)..(142): Xaa can be any naturally occurring amino acid
  misc_feature (332)..(332): Xaa can be any naturally occurring amino acid
  misc_feature (340)..(340): Xaa can be any naturally occurring amino acid
  misc_feature (438)..(438): Xaa can be any naturally occurring amino acid
  misc_feature (455)..(455): Xaa can be any naturally occurring amino acid
MKIGIIGGGTAGLIASLILKRSCKKLNIEIVRSDKLGIIGVGEGSENTWNDFMSFVGIDPQDLIKNTDATFKFGVMFENWTKKPYFHSVDNNLENIENSYGYMIKNKYSFANMTVPFLWKXKVGTKXYPNQYHFNTFKLNTXLSNIAKSRGIKITNDEIKKVNTVKNKIKSLVGEKKKYSFDFYIDCTGFKRLLISSLGAKWISYSKYLCMNSAIAFPTKDTDEYNPYTLARAMSAGWMWRIPTFGRWGNGYIFNDKYITEAQAKKECEQYLGHSITIAKKIKFNPGRLDMSWINNCCALGLSSNFMEPMEASSIGTSIKQSFMLAEDILQXNNATINFXNKRLQTIVENIRDFIVLHYLCNKKDSVFWKDKPFEIPNTLQKYLDIWKVRLPNKNDFQENKLLFYQSNFILVLHGIGLISNKQLKYLFYQPNINEDIXHLLFFYGTTPVVSHKNXLKQIRLKI

SEQ ID NO: 84974 - protein, 482 aa, Alteromonas pelagimontana
  misc_feature (1)..(482): tr|A0A2A6B167|A0A2A6B167_9ALTE Tryptophan 7-halogenase OS=Alteromonas pelagimontana OX=1858656 GN=CA267_04540 PE=4 SV=1
MAAASLARYSESQPLKITLIESADIPTVGVGEATVPNIVEYNRQLGLDEIELIKATKATFKLGIRFIDWSKEGESFFHPFADYGVDFQNVGFHHYIRRLQQEGVDVAINDFCFAEALANKGLFAQPATPPVSPVADYAYAYHFDAALYARFLRDFSVQKGVSHISGHVAKVNLDGRKHIADVQLKSGEIIAGDLFIDCTGFDGLLIEQALQTGYEDWSQWLWCDTAVAVQSASTEPPLPFTRSIAREAGWQWEIPLQHRTGNGYIFSSKYIQADEATEKLLSTLKNEPLTAPRTLQFLPGRRKKIWNKNCFALGLASGFLEPLESTSISLIQTAIAKLLTFFPDMTFNQHDIDEVNRLHNEEVERIRDFLILHYVLNQREQGEFWHDYRHLAMPESLQHKVEVFKSRGHLVQYAHESFNASSWLAMYNGFYIRAARYDHRADVPSQQTLLAHMARIQQFIAQLSDGALSHQNFIKKHCQSGG

SEQ ID NO: 84975 - protein, 526 aa, Halieaceae bacterium
  misc_feature (1)..(526): tr|A0A2D9NM07|A0A2D9NM07_9GAMM Tryptophan halogenase OS =Halieaceae bacterium OX=2026743 GN=CME49_01460 PE=4 SV =1
  misc_feature (472)..(472): Xaa can be any naturally occurring amino acid
  misc_feature (475)..(475): Xaa can be any naturally occurring amino acid
MAAGGQMTRALNQVVILGGGTAGWLTASTLAAEHGASLDITLVESPDIPIIGVGEGTWPSMRTTLQKIGVSERVLLKECDATFKQGTEFIGWRSESEAHAYYHPFSLPAEYASLNLAEHWLASSVTSDFCATVTPQAGVISASRAPKALGVPEFAFQFNYGYHFDAAKLSVLLRDHAVDALGVTHMLANLTEVEFSGSGAITALTLDNGTSLSGDVFVDCSGQRGLLIGEAMGVPTVSMGHVLPNDRAIATQVPYSNPDAQIASVTRSTAQASGWIWDIGLQSRRGVGYVHSAAHISEDEAVSSVLDYVKHSDDDVDLGQLNVRVIPFDASRRRQAWVKNCVAVGLSAGFIEPLEASSIALIEQAAHRLCQVLPLVADDYEAEARAFNEQMNRQWAQVEEFLQLHYVLSQRSDSAYWRDVRSEQRVLPELSEKLKKWRRHPVWHADAPRFDELFPSASYQYVLYGMLGRHIXPQXHRRSFQSVRDRADSVMHEVKERSKAVRSLPGNRELLNALLGKTTQTLESVA

SEQ ID NO: 84976 - protein, 399 aa, Campylobacter virus
  misc_feature (1)..(399): tr|I7JC76|I7JC76_9CAUD Putative tryptophan halogenase O S=Campylobacter virus CP21 OX=1190451 GN=CP21_168 PE=4 SV=1
MKVTVIGKGTAGILTTKSLRFNFPDLEIDWIYPESNKFIGVGEALVPASSKFLKTIGVDNKMILKDFRGSIKAGLKMIGWADKTFNLPFDNSVLLNRYMNKDLFPENFINFENVSHHFNTFSLQNLYVENINNINKTVTSFKDIDSDLIVDCRGFQDSDDFIEPGILKNNIALTTRIPVQNFLNPYSSFFARDFGWCWTIPLQDYISIGYVTNDSFINQASEDLKKHLQENFKTDLKDYNTIKFKTGYKKQQIAKIEGHNVFSVGLNAAFVEPLQSTGLWLASQQIQELINYIKNGDTNWNQRFEDMYNRVYQFILNHFILCKKSNEYWDYYKNFNFKDSLFTGSNGNNVFDGEFENFLYDSFQGKSVKYNIDKNIVGGKAALTKLKKFDELLRDYLSK

SEQ ID NO: 84977 - protein, 174 aa, Unknown
  misc_feature (1)..(174): tr|K7WDM1|K7WDM1_9ZZZZ Tryptophan halogenase (Fragment) OS=uncultured microorganism OX=358574 PE=4 SV=1
GVGEATVPHIRYFNKLLNLNENDFLRKTNATFKIGIEFVNWGEVGDRYFHSFSPYGVNMEGVHFHHFWLRHAMKEGAPPIDEYNLHYLASKANKFAHPKPELQGSPLSAIEYAFQFDASLYAKYMRGVAESRGVQRIEGKIVDVKQRAEDGFVDKVVLESGAEVAGDLFVDCSG

SEQ ID NO: 84978 - protein, 501 aa, Unknown
  misc_feature (1)..(501): tr|A0A160TL61|A0A160TL61_9ZZZZ Tryptophan halogenase OS =hydrothermal vent metagenome OX=652676 GN=MGWOODY_Smn7 08 PE=4 SV=1
MSGNDIPTVAILGGTVAGWMAAATLARRLPRHRYRVMVIETDRDGDGIGDFGTTLAALPSIAPFHESIGIDENLLLRATRGSFALGIAFSGWAANEAAYFLPFGAVGAPLGPVAFHQLLTRLRREGRAVRAADYSIAAIAAQAGRFARPSTDGHSVLSHYAYGLHLDALGYLRAMRATAEAHGARAATALFRRAIMDASGGIAALELDNGDSLPALLFVDATGTDARLCGEALGVGFQSWRQWLPCDRAIAVRISDQSDPPPFGHVEAQATGWQSGTPLVGEASRLLCWSSAFGDASSGAGSNEPVHGIAFENGRRITPWHRNCVAIGAAACVLESLHPVAIHLVQSALARLVALFPDAAEAPVEAAEYNRMTINEMESARDFLVTQYVTNGRIGEPFWDVIRSVAPPDRVAYKLALFASGGRMPMYDDEVFEEADWIALLDAQGVRPRRHDALAGTVPTQRIEQHLARLREAIIAGVKAMPSHGEYLRRAHATSPRGAAA

SEQ ID NO: 84979 - protein, 327 aa, Unknown
  misc_feature (1)..(327): tr|A0A3B0R3U9|A0A3B0R3U9_9ZZZZ Tryptophan halogenase (F ragment) OS=hydrothermal vent metagenome OX=652676 GN=M NBD_ALPHA06-138 PE=4 SV=1
GRTLSGDLFLDCTGFAARLINHDKKNHFFDKTDMLFVDRAVTTRIPHKGVASINGYTTSTAQDSGWIWDINLQSRLGVGYVYSSRYCDDDTALATLANYLDKPVESFEARNLAMRIGYYQQQWRGNCIAVGLASGFLEPLESTGIYLAEMVNWALAEFIPRFMSGNNPQAQYNAAIAHHYENIVDFLKLHYCTTGRKDTPFWVDNTQPETIPDSLQAKLQAWETDCPSIYDFDRRIQCFSAPNYQFVLYGMGWKSHKRSDPSVTAPYTALMEQLKIRRERLKQFVLRDTLSNADIYQALANTTLPEGGITLEQNALPPSGASNFQLR

SEQ ID NO: 84980 - protein, 521 aa, Unknown
  misc_feature (1)..(521): tr|A0A3B0Z0I7|A0A3B0Z0I7_9ZZZZ Tryptophan halogenase OS =hydrothermal vent metagenome OX=652676 GN=MNBD_GAMMA12 -2238 PE=4 SV=1
MQGGSVKNITIIGGGSAGWMTAAYLSKKNPDIHITLIEASDVPVIGVGEATIAHLSRFLFTLGLKDKDWMPHCNGAYKYGIKFDNWHNIGDEYWHPFEALPYYNSKTNLATYWWYDRYKYNRKSSRESLYTDCFFSTEILKQNKIPRVPGAQDYSDNFNVKAGQDHVPVRVAYAYHFDAGLFGEYLKNHLAKPAGVDHIIDNITDIERAEDGNISALNTKNGLTLEADLFIDCSGFRSVLIGAALDEKFISFSDTLFCNKAMAMQIPYENIETELQPYTTASAISHGWVWNTPLTSRRGTGYVYCDNFVDQDTAEQDYRAFLGEKRVEAFDVRHIDIRVGKYKNTWVKNCVAIGLSSGFIEPLESTGLHFIHVAVEKLSVALEGGFYNAGDRLAFNRYMTLSMEEARDMLSIHYSLTNREDTDFWKAVKYDTKMSDSIADLLMLSKHRFPNDKQGYIFGNNSWICVLNGMNYMPSSDPFLNIQPAEVQKQMGLIKAYTALRKKVGHQFPNHYEYLTKQFFK

SEQ ID NO: 84981 - protein, 483 aa, Unknown
  misc_feature (1)..(483): tr|T1WBL0|T1WBL0_9ZZZZ Tryptophan halogenase (Fragment) OS=uncultured organism OX=155900 PE=4 SV=1
MDQAIRDILIVGGGTAGWMTAAALAAKLAGLPIAVRLVESAEIGTVGVGEATVPHIRHFNAALGLDEADFMRRTQATYKLGIEFRGWGKPDDSYIHPFGAYGAAIGGVGFHHHWLRARQGGDPTPLEAYSLPIVAARQGRFAPPSPDLSSVASTYNYAYQFDAGLYAAYLRAYAEGRGVVRTEGKVADVALRGEDGFIEAITMESGERIKADLFIDCSGFRGLLIEQALKAGYEDWTRWLPCDRAAAVPCGTVETSTPYTRCTADDAGWRWRIPLQHRVGNGYVYSSAHISDDNAAAALLAGLEGKAQADPRFLRFVAGHRRKQWSRNCVAVGLASGFLEPLESTSIHLIQVAITTLLELFPDRTCARADQDEYNRVMTLEFERIRDFLVLHYHANQRVGSPFWDDRRNLPIPDSLAYKMDLFRDRGVVVKYKDGFFLEPSWLAVYLGQNIVPDAYDVVSDSVPDAVLPQRLKAIRESVAGAA

SEQ ID NO: 84982 - protein, 177 aa, Unknown
  misc_feature (1)..(177): tr|K7W8W6|K7W8W6_9ZZZZ Tryptophan halogenase (Fragment) OS=uncultured microorganism OX=358574 PE=4 SV=1
GVGEATVPDLKATLRYLNIDEKEFMVRTNAGFKSAIKFVNWRDDPKEVGDHHFYHPFERPPIIRGLSFSDVWLLGRSNYGQADDFAYVAGLAPTLCDYYRSPKAPNNKPFQGECNYAYHLDAVLFGRYLRDIAKSRGVNHVVDMVTDVHLNENGFVRSVQTKENGELEGDLFVDCSG

SEQ ID NO: 84983 - protein, 188 aa, Unknown
  misc_feature (1)..(188): tr|K7WFV3|K7WFV3_9ZZZZ Tryptophan halogenase (Fragment) OS=uncultured microorganism OX=358574 PE=4 SV=1
GVGEATVPTFRTTMDFIGYSEEEWLPHVNGTFKAAIQYVNWVDPPEPGRDSHYWHPFPAYPDPLVQPLGNPWFVSIGEGASLIHYCLRKRLDGEKKSVAELICPATTLSEHMKSPKSFDDPTLTERYAYHMDAGLIGDFLRSRLTERGVKHLVDHVVDVALDERGFIQHVTTTDGRQLSADLFIDCSG

SEQ ID NO: 84984 - protein, 210 aa, Unknown
  misc_feature (1)..(210): tr|T1C7S6|T1C7S6_9ZZZZ Tryptophan halogenase (Fragment) OS=mine drainage metagenome OX=410659 GN=B1A_03167 PE= 4 SV=1
MSSASDAPANSPLADIRYAYHFDASLYARYLRGYAEARGARRTEGKIRHVQLRGEDGYVESVTLENGTVIGGDLFIDCSGFRGLLIEQALHIGYIDYSQWLRCDRAVAVGCEKVGPPTPYTRVTARTAGWQWRIPLQHRTGNGHVYSSALISDDEATATLLANLDGKPLGEPRLLRFTPGMRKKFWSKTWWRWAWPAASWRRVESTSILP

SEQ ID NO: 84985 - protein, 119 aa, Unknown
  misc_feature (1)..(119): tr|T1BA82|T1BA82_9ZZZZ Tryptophan halogenase (Fragment) OS=mine drainage metagenome OX=410659 GN=B1A_13627 PE= 4 SV=1
MYNEAPEPLQVTGRAPSSSTRGRRTVDEFRAEGLQRAHIVAVLDRGGGFSSADHADPECRTDVDHAVVKGRRRGIMSGQSVRRVVIVGGGTAGWMAAAVLIRTMAAHLEVCVVESDAIG

SEQ ID NO: 84986 - protein, 540 aa, Unknown
  misc_feature (1)..(540): tr|T0ZB13|T0ZB13_9ZZZZ Tryptophan halogenase OS=mine dr ainage metagenome OX=410659 GN=B1B_14140 PE=4 SV=1
MACRAWSKGMSAQPIERTVIVGGGTAGWMTAALLAKALGGTARIELVESEEIGTIGVGEATIPQIRHINAFLGLDENEVMRAARATFKLGIQFNDWLRPGHSYIHAFSDIGLPQGGVPFQHYWLRERTQGGTHALWDYSLNAQAAAAGRFARMEHVGSSPLTGVRWAYHFDAGLYAAHLRRVAEHLGVTRREGRIVDVDLRGEDGFIAAVKLADGTRVAGELFIDCSGFRALLIEGALHAGYDDWRQWLPCDRALAVASARVPPMRPYTQASARPAGWQWRIPLQHRTGNGHVYCSAFISDDEAAATLLANLEGEALGAPRPFRFTAGMRKQVWVRNCVALGLAAGFMEPLESTTIHLVQSGVDRLLKLFPDARFEPAVRDEFNRQTRFEYERIRDFLILHYTTSERCDTPFWRHCAAIARPESLQHKIDVFEASGQIFRAADELFTEVGWLQVLTGAGRRAAGLPPPGRRAAAGAVPGIHGQPARADPARGGRHARARRLRRRALQGGGCGLIRRCRVGGAGFGSPLELPCPPRPVPRC

SEQ ID NO: 84987 - protein, 40 aa, Unknown
  misc_feature (1)..(40): tr|A0A1B6NWS4|A0A1B6NWS4_9ZZZZ Tryptophan halogenase OS =marine sediment metagenome OX=412755 GN=MGSAQ_000600 P E=4 SV=1
MHQANSPLRRIVVVGGGAAGWLTASIIAVTHKHDDNIVSP

SEQ ID NO: 84988 - protein, 499 aa, Unknown; identical to SEQ ID NO: 83793
  misc_feature (1)..(499): tr|A0A160TZW3|A0A160TZW3_9ZZZZ Tryptophan halogenase OS =hydrothermal vent metagenome OX=652676 GN=MGWOODY_Hyp2 100 PE=4 SV=1

SEQ ID NO: 84989 - protein, 510 aa, Unknown
  misc_feature (1)..(510): tr|A0A160TPV4|A0A160TPV4_9ZZZZ Tryptophan halogenase OS =hydrothermal vent metagenome OX=652676 GN=MGWOODY_Smn2 049 PE=4 SV=1
MQDDRYHIVIVGGGTAGWMTAAGLVRQLPGADYAITLVESDEIGTVGVGEATLPHIKLFNDMLGLDEAQFMRETGATIKLGIEFCDWDRPGDRYIHPFGAFGEPWGGVEFQNHWLRARANGRPVAPLQAYSYAVAAARANAFELPNEDPKSIRSTYSYAYHFDAGLYAEFLRRWATGHGVTRIEGQVCDIGRDPASGAITEVTLKSGVSIRGDLFVDCTGFRSLLLAGQFDVGWEDWTPWLPCDRALAVPCAHGGELTPYTRATARRAGWQWRIPLQHRIGNGYIFSSAFCSQEEARETLLANLDGVALAEPRLLRFSPGRRACAWRGNCVAIGLASGFLEPLESTSIYLIQAAVIDLINLMPSPHAARDGIDPRLADEFNRLTVMQYERVRDFLVLHYVANRREGQPLWDYLRHMPIPDSLTHKLELFRARAMAPNYQYGLFARDSWLSVLIGQGIVPDGYDRLADTFDLDMLVARLDDFAGRIESSVSAMPSHADFIANYCAAGGVPA

SEQ ID NO: 84990 - protein, 530 aa, Unknown
  misc_feature (1)..(530): tr|A0A3B0SQT8|A0A3B0SQT8_9ZZZZ Tryptophan halogenase OS =hydrothermal vent metagenome OX=652676 GN=MNBD_ALPHA05 -1868 PE=4 SV=1
MAKPIGNITVVGGGTSGWLAASYLARLFEQRVKTGDLSITLIESPDVGIIGVGESTARPMGDLLRLIGINESEFIKRCNATFKLSGWFANWDIDEAGKPVSWVNPFFSQSDIHGLNPASLFASYGMHRGGGPTDEGFTEAMSVCPDIIRAHKGPRLLGGEDYKSEIPYSYHMDAIELAKMLMERGKELGVKQIIDHVNEVHLDDRGFVSELILRKNGAHPIEFVIDATGFASIIIGKTLKEPFEPYDKYLLNDRAAVAQIPYEDPTRIEPTSRATGMNAGWAFRVPLFNRVGSGYIYSSKFISDDEAIAEFKAHIGDGGREVEPRVIRMRIGKVRRAWVKNCLALGLSSGFVEPLEATAIYSVQVQLQWLFGYFPNSDFNPAVIKRYNQLINGFYDEIVDFIALLFCISNREDTPYWRAVRHDMEIPPRLAENLELWRANMPGDLDLRSMTFFSPSSYRSALMGKQFYKGREYAAASLFSEANWRQYLNMRRQKTKDLMAKLPDHYTLLRRIRGEDTSPSASVTPIYINS

SEQ ID NO: 84991 - protein, 467 aa, Unknown
  misc_feature (1)..(467): tr|T1W8W5|T1W8W5_9ZZZZ Tryptophan halogenase OS=uncultu red organism OX=155900 PE=4 SV=1
MTATVAVLGANLCGWIAAAALARRLPRESYRVVVIDDGTSGDGLGDFAPVIAVPPALAGFHADLGLDAATLVRMTGGGHALGVAFGGWRADGAAAFLSYGETGAPLEGIAFHQLAGRLRAAGHPVRLADHALSAVAAQAGRFAPGAPIAHALHLPVVPYEALLRGAALRAGAERASADFVDAEIAANGIVERLTLADGTAVQPWLVLDCSGTDARIASRTSPASEDWSGWLPCDRTHAETVPAQGAPPPYTQVDAQDTGWTATWPLDGADVRLTCSVGGTGKPFRAARRVEAWRGNCVALGAAAGLLEPLHPTGLTLLLRSLAQLIQLWPAGPQAPVEAAAFNRTAAGALEGARDFLIAHYAVAGCAGALWDDRRAVSLPGPLAAKHDLFAARGRLPMYDNEPFEEEDWAVMFDAMGLMPRRYDARADIVPLAAIERHLAVQRARVIAQVRALPPYAQAMAALRARA

SEQ ID NO: 84992 - protein, 508 aa, Unknown
  misc_feature (1)..(508): tr|T1W4A3|T1W4A3_9ZZZZ Tryptophan halogenase OS=uncultu red organism OX=155900 PE=4 SV=1
MTPQSIVIVGGGTAGWMAAVAFGRLLGPAGVRVTLVESDAIATIGVGEATIPPIRTFHAMLGIDEDAFLQATGGSYKLGIRFEGWSRPKDSYIHPFGQIGTDVVGVPFAAQWLRAHQAGMADPLAQYSLEARAAETGRFSRPIANGDSPLSRIGYAYHFDAGRYAAFLRTQAEQQGVVRREGTIERVETGPAGIAAVHLANGSRIEGDLFLDCSGFRALLIGGALGTGWVDWSEWLPCDRAVAVATSADAAPLPMTRAIAGPAGWRWRIPLQHRTGNGHVFSSRHVSEDEATAQLLAGVEGKTLGDPRVIRFATGHRERMWSGNCIALGLAAGFMEPLESTSIHLVQSGLQHLLRLLPTGKISMPAAAIVDRYNRVMTAEFVRIRDFLVAHYHLNARPERFWRERAIAPIPDGLADKLALFRAGGRIFREADELFNESSWLSLLTGQNAPVEGYDPICDAVPLHAAARRLSQIEQVVGASLNHMPPHADALSRITARESRRADHLAPL

SEQ ID NO: 84993 - protein, 539 aa, Unknown
  misc_feature (1)..(539): tr|T1W7K3|T1W7K3_9ZZZZ Tryptophan halogenase OS=uncultu red organism OX=155900 PE=4 SV=1
MNEHSIRRVVIVGGGTAGWMAAAAFARFLNNGYTQVTLVESEEIGTVGVGEATIPPLINFNQMLGLNENAFLAATAGTFKLGIEFVNWGGLGERYFHPFGKFGHDLQGVHFHQLWLREKARRPTEDIAAWSMSAIAAAHGTFGRAADDARSPVRDLFYAFHFDASLYARFLRDYAEKAGIARIEGKIAKVDQRAEDGYVTAVTLEDGQCIEGDLFIDCSGFRGLLIEETLNTGYESYAHWLPCDRAVAVPCALPNPAEPDPFTRSTAHQAGWQWRIPLQHRMGNGLVYCSQYLDDDAAEAQLLANLEAEPLAAPRRIRFAAGRRRHSWNRNVVALGLSSGFIEPLESTSIHLVQAAIQRLLALFPDKRFDPAERDEFNHQMKDLYEDIRDFIILHYKATRRDDSPFWNQVRTMEVPDSLQRKIDLFAGKGRLFREGYDLFTDPSWVAVFLGQGIVPQSWEPAADALDEQKVAIALEQMRRGYLDTAQRLPTHGDFLRRTALSPLAAPVPTPAPAATDDVPFFAFTAESPFDVNGGGSPL

SEQ ID NO: 84994 - protein, 104 aa, Unknown
  misc_feature (1)..(104): tr|T1BAY1|T1BAY1_9ZZZZ Tryptophan halogenase (Fragment) OS=mine drainage metagenome OX=410659 GN=B2A_01541 PE= 4 SV=1
MVLVELSAKLLAEQMPACREVMDIVARRFNEVTAYRWGRIIDFLKLHYVLTRRTDTAFWRDNVDPATVPARLQDMLALWKYQSPWFFDELDRLEEVFPAASYQY

SEQ ID NO: 84995 - protein, 511 aa, Unknown
  misc_feature (1)..(511): tr|A0A160TPK3|A0A160TPK3_9ZZZZ Tryptophan halogenase OS =hydrothermal vent metagenome OX=652676 GN=MGWOODY_Smn7 07 PE=4 SV=1
MSALVPVRSVVIVGGGTAGWMAAAALSRLVRTGVSVTLVESDSIATVGVGEATIPPIRNFNGLLGIDENDFLAKTQGSIKLGIDFVGWTREGHRYTHPFGEFGFDIEGVKFHHFWHKLHAAGQASWIEDYNLCATAQKLGRFTLPVADPASVLSRLTYAYHFDASLYALYLRAYAEARGVVRIEGKVEDVMLRSIDGHVEAIRLEGDRRIDGELFVDCTGFRGLLIEGALQTGFESWKQWLQCDRAVAVPSASPGRAITPFTQSTARRAGWQWRIPLQHRVGNGYVYCSTDISDDEATATVLANLDGEPLRDPMLIRFEAGRRKLAWNRNVVALGLASGFVEPLESTSIHMIQTGVSKLMALFPDRGFSPVERDEYNRQTQLQMEQIRDFVILHYHANERTEGDLWRRVRDMAVPETLARKLDLFRNRGRFFRYDDELFADSSWIAVLLGQNVMPAGWDPLADAVDPALVRQRLDRIREVFRRAAEAMPRHEEWIARNCPAPGTPVARKTA

SEQ ID NO: 84996 - protein, 500 aa, Unknown
  misc_feature (1)..(500): tr|A0A160TP28|A0A160TP28_9ZZZZ Tryptophan halogenase OS =hydrothermal vent metagenome OX=652676 GN=MGWOODY_Smn2 050 PE=4 SV=1
MSSQPNRIVIVGRDAALWLSATIFRHALAPAGISVTAIELPTDLGPAATYASLPPLEALHNKLGLEESALLRATGGSFSLGHNVVGPVPGMPPFLLAHGSYGAPIDGAGFFPYWLKARRFGLQAAFEDFCLTAMAARQGRMLVPDEETELFGRTDYGYHLPALPYVATLKARAAKLGITTHHSSTIGVEHQVETGSISAILLDDGMRVEGDIFVDASGPEGILADQMPDISRDDWRPAFVANRRLTARAARFASVPAYAEIRVGASGWTALHATQAATFVSYAFALEEQDDESALAAAGKLAGLTLSDPVVTSVEQGIRHQAWSANCVAIGGAACSFDPLLDVELHAIQLGIVHLLALFPAGAIFSAERSEYNRITRSAFDRVRDFQSAFYAANRFGPTGFWAAARGATTPATVGHKLAIFRARGDIAPMEDESFAPDLWQALFTGLGEIPESWPPAIDRTPPERMKDDFRRMLGFIRRKVLEQPTHDGYLASLGRSEAA

SEQ ID NO: 84997 - protein, 522 aa, Unknown
  misc_feature (1)..(522): tr|A0A160TM32|A0A160TM32_9ZZZZ Tryptophan halogenase, p utative OS=hydrothermal vent metagenome OX=652676 GN=MG WOODY_Smn1552 PE=4 SV=1
MDKAVSSIVIVGGGTAGWLAACLIAARANPATRAPITVTLIESPDIPTIGVGEGTWPTMRRTLERIGISEAEFLVACDASFKQGSRFVGWRTGGDGDEYLHPFVPPIDGDPRDVMAAWRDQSPDLRFAEMVTPQARPCRLDLAPRQRTMPDYAGALNYAYHLDAAKLAALLTRHATERLGVRHVRDHVVGVERTEDGDIAEVRTRASHDIAGDLFIDCTGHAALLIGEQYGVGFLDRSGELFNDRALAVQVPVAADSAIASQTNATAHAAGWIWDIGLPTRRGVGCVYSSLHASDEAAEATLAAYLRHALPGAETERLSFRRLTFRSGHRERFWERNCVAIGLSAGFLEPLEASAIVLIELSLEALLDNFPATRDVMDIHAGRFNALFRYRWDRIVEFLKLHYVLSERDEPYWRDHRDPASIPPRLADLLRLWRDQPPSRADLPSAEEIFPAASYQYVLYGMGFPAPPIGQIRGAPGDGVTHQLRQVEQRARVLAASLPTNRAYLDALRAHQDMAPSMENTR

SEQ ID NO: 84998 - protein, 455 aa, Unknown
  misc_feature (1)..(455): tr|A0A3B0SB64|A0A3B0SB64_9ZZZZ Tryptophan halogenase (F ragment) OS=hydrothermal vent metagenome OX=652676 GN=M NBD_ALPHA06-248 PE=4 SV=1
MIRSILIVGGGSAGWITANLLQALLHQSAEQDIQITVLESPDIPKIGVGEATVPSIRRTLQTIGLDEKEFMRATDATFKNLIRFEGWNPGTSYDHPFDRRARPDSDSAIAAWLHRADMMDNGFAKQFSLLSHIANAGLAPKAQGWPGYASPFPYAYHLDAIKLAGMLAEHGRQTGIAHMLANVTDVEVDERGHIAAVRTDTDETCTADLYIDCTGFRSILHKQKLGVKQRDFSQYLLCDRAATMRVPYDIHQPASIKPYTTSSARSAGWSWDIALQGRRGLGYVYASAFQSEADAEAELRALEGPHCNDIAVQHIAFASQKSQASWVGNCIAIGLSDGFLEPLESSGLYLIEFAAQALGEMLPYAKADTTVIAKSFNRQMDGIYDEVLEFLNLHYCLSTRTDTDFWREVQKPEHVLDGLAEKLELWKLKPPGDMDFSSPLQLFSLQSHEYILFGM

SEQ ID NO: 84999 - protein, 202 aa, Unknown
  misc_feature (1)..(202): tr|A0A161K5L2|A0A161K5L2_9ZZZZ Tryptophan halogenase, p utative OS=hydrothermal vent metagenome OX=652676 GN=MG WOODY_Smn871 PE=4 SV=1
MGPGMQDITPRRILFEPGYRERQWVKNCVAVGLSGGFLEPLESTGVLVIEAAIGMIAEMFPHNGPVDAPARRFNELIAARYDNIVNFLKLHYCLSQRSEPFWRDNTDPASIPDRLADLLDQWRHRPPGRFDFTLDLESFAFFNYQYILYGMEFRTDLAPSRSDFPNVGAAEKTFARIRNFGERATLDLPSHRALIQQINRAG

SEQ ID NO: 85000 - protein, 516 aa, Unknown
  misc_feature (1)..(516): tr|A0A3B0RTP3|A0A3B0RTP3_9ZZZZ Tryptophan halogenase, p utative OS=hydrothermal vent metagenome OX=652676 GN=MN BD_ALPHA02-1374 PE=4 SV=1
MDKLCRKIVVVGGGSAGWLLASRLAKKLNVNDNAAFSVTVIESPDVSIVGVGEGTWPTMRQTLRKIGVKETDFMRECCAAFKQGTKFVGWRDGGDQDFYYHPFDAPCGSNSYNAGDLWHKYKRPHSPDSFCAAVSPQYHTCEQGLAPKTITHGEYQGFLNYAYHLDAVKLVGFLRRHATKNLGVRLIEGNVLGVKKDENGWVDHLITREHGDLSGDIFFDCTGFNALLMHQNLDVPYSRLDDTLFVDRALVMQVPYDSETAPLASTTISTAHDAGWIWDIGLSDRRGVGFVYSSNHMNDEEALAGLRQYVGHKASSLPDRQIKFQARRLDRFWEKNVIAVGLSAGFVEPLEAAAIMMIETTADWFCERFPSSRHVMTLQSRIYNETFSGYWDRIVQFIKFHYVLSKRRTDFWKDNKCESSIPQDLLEKLKLWQYCAPFSQDFLADSYVFSWQSFQYVYFGMGSSYDSASSNEYPEERVAFMKDFDMTKAMTKKALETLPSNRELLMKIRDFGLQQV

SEQ ID NO: 85001 - protein, 124 aa, Unknown
  misc_feature (1)..(124): tr|T0ZGS7|T0ZGS7_9ZZZZ Tryptophan halogenase (Fragment) OS=mine drainage metagenome OX=410659 GN=B1A_14326 PE= 4 SV=1
DQDFKWVRDFLILHYHATERDDTEFWKHCRSMEIPDSLRETVELFRDSARITPTAEELFKTVSWAQVMIGQRIQPRRYPPVIDRLKDAELKTFINHVEEVIRSCVAVVPPQEAFIARHCKAPPP

SEQ ID NO: 85002 - protein, 201 aa, Unknown
  misc_feature (1)..(201): tr|T1BA74|T1BA74_9ZZZZ Tryptophan halogenase OS=mine dr ainage metagenome OX=410659 GN=B1B_05330 PE=4 SV=1
MSQSVKNIVIVGGGTAGWMAAAACAKVLGPSYAVHLVESEEIGTIAVGEATVPHLKQFNNLLEIDEVEFVKNVKGTFKLGIQFNDWGRLGDSYIHGFGQLGPDVGPLPFHQFWIKARHKGWAAPLGDYSINTAAAPRGKFMPSASDAPANSPLSDIRYAYHFDASLYARYLRGYAEARGVRRTEGKIRHVQLRARTVTSSR

SEQ ID NO: 85003 - protein, 229 aa, Unknown
  misc_feature (1)..(229): tr|T0ZQJ0|T0ZQJ0_9ZZZZ Tryptophan halogenase (Fragment) OS=mine drainage metagenome OX=410659 GN=B2A_07264 PE= 4 SV=1
MSGQSVRRVVIVGGGTAGWMAAAVLIRTMAAHLEVCVVESDAIGPIGVGEATIPQIRNVNTFLGIEEDAMLRASDGTFKLAIEFNDWLRLGHSYLHAFGEVGLPLGALPFQHYWLRSRSDPAAPDLWAYSLNAAAARGHRMARIERVGQTPIGGIKYAFHFDAKLYGQMLRRYAEQRGAARTEGRVVEVKLRAEDGFIEAVVLESGARIEGDLFVDCSGFRALLIEGAL

SEQ ID NO: 85004 - protein, 502 aa, Sphingopyxis sp.
  misc_feature (1)..(502): tr|A0A0W1EIC0|A0A0W1EIC0_9SPHN Tryptophan halogenase OS =Sphingopyxis sp. HIX OX=1759074 GN=ATE62_20640 PE=4 SV =1
MEGEPFNLVIVGGGTAGWMCAAACAAKLDPALYRVRLIESEEIGTVGVGEATLPQMKDFNDFLGLDEVEFMQATQASFKLGIEFVNWGRQGDRYVHPFGTFGRPIGEGDFFSYWVRAHNAGQAAPLFDYCFPIVAALQNRFMLPNGDKNDVRNAFAYAYHLDAFLYARYLRRWAEARGIARVEGRIVDVERDGRSGKVAAVTLASGTKVAGDMFVDCSGFRSLLLGGTLGVELEDWSRWLPCDSAQAVPSVRSPDFTPYTRSTRRPAGWQWRIPLQHRTGNGYVYSSADISDDEAAATLLANLDGEALAEPRVLRFKAGKREQAWAQNVVGMGLAGGFLEPLESTSIYLVQMAIMHMLTLLPPGADIDPALPAEFNRVMDVEYDRIRDFLILHYIANDADAPLWERVTTMDVPDSLAGKIDRFRHRAHVQAYRDGLFGPPSWQAVFVGQGVVPHAADRLADMLPGDQLAERLAGLHATIARGAASAPLHADFVAHYCPAPAP

SEQ ID NO: 85005 - protein, 499 aa, Sphingopyxis sp.
  misc_feature (1)..(499): tr|A0A0W1EYI0|A0A0W1EYI0_9SPHN Tryptophan halogenase OS =Sphingopyxis sp. HIX OX=1759074 GN=ATE62_15270 PE=4 SV =1
MTPMRLIIIGGGTAGWMAAACLRRFLPQGWSVTLVESEAIGTVGVGEATIPQIRLFNEALGIDEDEFLRATQGTIKQGILFDGWARPGHRYMHAFGAIGRGLGLLPFHHYWLRGRSLGIAGSLDAYSLNESAAHAARFRRGAGVSAHAPAMPYAFHFDAALYAAFLRRRAEGWGVTRVEGKVVSVEQNENGDVAAVRLEGGRRVAGDLFVDCSGFRGLLIEGALATGYEDWSHWLPNDRAVAVPCGHGDAAQQPYTSAIARDAGWQWRIPLQHRIGNGYVYCSRFLGDDEAEAALLASLDGPAQAAPNRLRFTSGKRQKMWNRNVVALGLAAGFMEPLESTSIHLVQSGISRLLNLLPAGAPDPAIVAEYNRQSDFEWERIRDFIVLHYKATERSDTPYWRERAAMEIPDTLAAKLDQFRAQGLIVREHEELFTEPGWLQVLVGQGVMPRSWHPLADTLSESDLKGFLDTNRLVIEREVAAMPPYDAFLKSLSPTGVAA

SEQ ID NO: 85006 - protein, 196 aa, Nannocystis exedens
  misc_feature (1)..(196): tr|A0A1I1TY88|A0A1I1TY88_9DELT Tryptophan halogenase (F ragment) OS=Nannocystis exedens OX=54 GN=SAMN02745121_0 0816 PE=4 SV=1
MTVEHADCVVLGGGPAGSTFAAIARKYAPGAKIVLLEKCRFPRWHIGESTIPAANGVLEDLGVYQTMLASDFVKKMGVTFIWGRDRTPWTADYLTLKTISRAGGDASIIEVTGQDFEKLLGPGHTQRTPYSAFNVERSRFDELLLDNARRLGADVREGTKALGAQRVGNSSQHMITWEDDAGNSGSITADFVLDAT

SEQ ID NO: 85007 - protein, 502 aa, Rhodobacteraceae bacterium
  misc_feature (1)..(502): tr|A0A5C5GH25|A0A5C5GH25_9RHOB Tryptophan 7-halogenase OS=Rhodobacteraceae bacterium SM1903 OX=2588711 GN=FHY6 4_12555 PE=4 SV=1
MGPSGAAQVGMSKRVVIVGGGTAGWLAALILSRAPGRRVTVVESSRIPTIGVGEGTTAVFRHMLKHLGLDERKFIAETGATVKYGIRHRDWRRKGHSYDGPIDEIAQVAGQGLDLYAVASGRPVGEAHLFRHLMEKRRAPYAEVKGREVAAGPFHFAYHFDQAKAGAWLKSQASGITLVDDVVEGLERDGETGSVKGLRLESGQVLEGDVFLDCTGFRRALIGPMGAEWQSYSDTLPVNRAMPFWIDLKPGEEIDPLTLAWAQGAGWMWKIPTSDRYGCGYVYSDAHTSPDEARAEIETALGHAIEPRNDIRIDAGRLKDAWIGNVIALGLSSSFLEPLEATSIHGTVVQCMWLDRWLDDPKGRDHYNAAVARQVDDFRDFIRLHYVSERNDTPFWRDVAASHPQTLRDRLAAWQTRMPERRDFTTLPGNFPHVQEQLYIPVLDGLGLLNRAAAKEALSRDPKRRATLRKTHEQLTKDYTRAAGKCLPHRAWLSSLTKEMAA

SEQ ID NO: 85008 - protein, 512 aa, Sphingopyxis sp.
  misc_feature (1)..(512): tr|A0A4P7S1C6|A0A4P7S1C6_9SPHN Tryptophan 7-halogenase OS=Sphingopyxis sp. PAMC25046 OX=2565556 GN=E5675_14165 PE=4 SV=1
MAEPYRIVILGGGTAGWMCASGLAGLLAASDYDITLIESDEIGTVGVGEATLPHLKSFNDMLGIDEAEFMRATRGTIKLGIEFTDWLRQGARYIHPFGTFGDRWGGADFQHHWARARLSGTDSRSLQDYSFAVAAARANGFEHPNTDPKSIRSTYSYAYHFDAGLYAAFLRTWATARGIRRLEGKVVDVVRDAQNGDVERLTLASGAEVAGDLFIDCSGFRSLLLGQTMGVPWLDWSAWLPCDRALAVPCASVEPLTPYTRATAQRGGWTWRIPLQHRIGNGYVFSSAFCGEDEARRTLLGALDGEALDEPRLLRFQAGRRAAGWAGNVIAVGLASGFLEPLESTSIFLIQAATVDLAALMPRRSERVDPRMAREFNRLFEIHYDRTRDFLILHYTANARAGEPLWDHVRTMALPDSLAHKIALFRESAAAPDYKLGLFSRDSWLSVLEGQGVLPSAASPLTHRLPAADLQARLDDLAERIAVNADDMTPHADFIAGYCAAGTAIQPATSAA

SEQ ID NO: 85009 - protein, 521 aa, Sphingopyxis sp.
  misc_feature (1)..(521): tr|A0A4P7RS52|A0A4P7RS52_9SPHN Tryptophan 7-halogenase OS=Sphingopyxis sp. PAMC25046 OX=2565556 GN=E5675_04520 PE=4 SV=1
MRGPGDTSGPLPGGEGRNRVGERRITKVVIVGGGTAGWMAAAALSRTMDHLSIRLVESDEIGTVGVGEATIPAIRLFNALIGIDENEFIRETGGTFKLGIQFHDWGRIGDVYMHAFGQIGRSLGMLPFQQYWLRGRNEGVAGRLGDYSLNETTGRQNRFARLPQIPNTSLDGIAYAFHFDAALYAAYLRKVSEAAGVERTEGKIAGVRRGGESGHVEAVVLENGTEIEGELFIDCSGFRALLIEDALETGFEDWTQWLPCDRAIAVPSENAGPARPYTQAIAHKAGWQWRIPLQHRTGNGHVFCSDFISEDEATAILLANIEGRPLADPRTLRFKTGMRKRAWNANVVALGLASGFLEPLESTSIHLIQNGIAKLLAHFPDRDFDAANIGAYNRRVRFDYERVRDFVILHYHANQRTDAPFWIRCREMGIPDTLAQKIALFKSQGQIVREGDELFIEIGWFQVLTGQNIMPDGYHPMADQLTRDELAGFFADIETIVARAASHLPTHEEFIAQHCAAGVPA

SEQ ID NO: 85010 - protein, 507 aa, Porphyrobacter sp.
  misc_feature (1)..(507): tr|A0A4Y6W0C5|A0A4Y6W0C5_9SPHN Tryptophan 7-halogenase OS=Porphyrobacter sp. YT40 OX=2547601 GN=E2E27_07685 PE =4 SV=1
MTSPTSSPVRVVVLGGGTVGWMTAAGIAKLLPGIANVQLVESEEIGIVGVGEATLPHIRGFVERLGIDEAAFMKATHATYKLGIDFRDFGRIGESYIHPFGSFGEEVQGVGFHHWWLELARHGKARDLGDYSLAVAAAKANRFRPPAGDDSLASTYGYAYQFDATLFGPFMRDFARGIGVERHEGRVVTVERDGASGDVTALILADGRRIEGDLFVDCSGFRSILLGQELGEAWEDWTHWLPCDRAAAMPCTHATEDVRPYTTATAMPAGWRWQIPLQHRMGNGYVFSSAHISEEQACEAIIASAEGTPLADPRILKFRPGRRAQSWSHNVIGIGLASGFLEPLESTSIYLAQMAITYLIELFPTTGTVDPRDRDEFNRLVEMEYDRVRDFLILHYHATTRDDSEFWNHVRTMQVPDSLAGKLELWRRAARIEKYSDGLFYDASWIAVYVGQGMLPEAHDPRAAMIAPDALARATERLRMAVTGEVAAMPGHRDYLMREAARLAEAA

SEQ ID NO: 85011 - protein, 543 aa, Luteimonas marina
  misc_feature (1)..(543): tr|A0A5C5U0W1|A0A5C5U0W1_9GAMM Tryptophan 7-halogenase OS=Luteimonas marina OX=488485 GN=FQY83_12645 PE=4 SV=1
MEKNRIRRVVIAGGGTAGWVAACALTHQFRDLLDITLVESEQVGTVGVGESTIPTIRTFHKLLQIDEREFLSSVAGSFKLAISFENWIRPGSHYFHPFGTTGVNTWSVDFHQFWLESRRRGMQSELGDYCLETAAARKDRFALFNAGQNTQQWSMRWAKAATAMERSDVSYAYHFDAGLYAAFMRIKCEGSGLKRIEGKIAQVHQDPESGHVQSLVLEDGQVIEGDLFIDCTGARAVLSEQALHTGYEDWNHWLPSNRAVALQTEADGPAAPYTRAIAHEAGWHWKIALQHRIGCGIVFSDAHMSDDEATAKLLAENPAKPLRDPWIIPFRTGRRRKAWNKNVIALGLASGFIEPLESTSIHLTLSAVTRLVQFFPFEGISEAAVDRYNQVSRQELEHVRDFIVLHYHLNQRDEPLWKQCREMELPPGLAERIQVFRETGYAWQGEDELFRLDSWTHCMLGQGVVPQNHHPLTRALSDADLKRLLEGVRKPIDGAVAAMPSHQQFLDSYCKAPASAWEQMYARARQHERVTGKVAGVGGDLTR

SEQ ID NO: 85012 - protein, 492 aa, Sphingopyxis sp.
  misc_feature (1)..(492): tr|A0A4P7RWA8|A0A4P7RWA8_9SPHN Tryptophan halogenase OS =Sphingopyxis sp. PAMC25046 OX=2565556 GN=E5675_14160 P E=4 SV=1
MSGARAITLVGRDAPLWIAAAALRRALAPAGVTVRAVELPAEAGVADVYATLPAIEALHVQIGIDEAALLRSARGAFTLGQNFVDASGAGRPSFLHSYGAFGTGINGGDFFPHWVKARHHGLGVGLDDFSLTASAALGGRMFFPDTDSEVYGRSDYGYHLPAAAYAKSLKAIARHLGVELFETATIAVERGDDGIAALRLDDKRRIESALFADLTRERMLHGSRGFEAWDTPGDRLLRALAPRPAALPAYAEIRASAGGWTGLFPSLTHIHVEHVFSHASTTDEAARQTAEAACGLPLDAVTIRPFAAGVAAAPWTDNVIALGDAACVFDPAHGFALHGLQLGIVHLLAAYPANGAGYAARRAEYNRVLRSHFARVAEFQAAHHALQRYSGAFWDSARALPMPDELAHRIDLFSARGELPPLEDESLPPDSWRALLVGHGIMPQSWRPAADRLPPDEVKAHFRKMLGFVREAVLRQPTHDACLALILQPAHG

SEQ ID NO: 85013 - protein, 501 aa, Sphingopyxis sp.
  misc_feature (1)..(501): tr|A0A4P7RV70|A0A4P7RV70_9SPHN Tryptophan 7-halogenase OS=Sphingopyxis sp. PAMC25046 OX=2565556 GN=E5675_06795 PE=4 SV=1
MGDRFELVIVGGGTAGWMCAAACAAKLDLARFRVRLVESEEIGTVGVGEATLPQMKDFNDFLGLDEIEFMQATQATFKLGIEFVDWGAAGDRYVHPFGTFGRPIGEADFFSYWIRAHVAGTAAPLSDYCFPIVAALQNRFMLPSGDANDVRNAFAYAYHLDAFLYARYLRGWAEARGIERVEGRIVEVEQDSESGDIAAVKLASGTRVAGDLFVDCSGFRSLLLGGTLGVDLEDWAHWLPCDSAQAVPSARSDDFAPYTRSTRRKAGWQWRIPLQHRTGNGYVYSSADISDDEAAATLLANLDGEALADPRVLRFKAGKRQKAWAHNCIGMGLAGGFLEPLESTSIYLVQMAIMHMLTLMPAERAIDPALPCEFNRVMDVEYDRIRDFLILHYVANEADAPLWERVTAAQVPDTLADKIDRFRHRGHVQAYRDGLFGPPSWQAVFVGQGIEPRAADRLADVLPAATVDERLANLAATIADAAATLPSHADFIARYCPAPAP

SEQ ID NO: 85014 - protein, 517 aa, Sphingopyxis sp.
  misc_feature (1)..(517): tr|A0A4P7RUB9|A0A4P7RUB9_9SPHN Tryptophan 7-halogenase OS=Sphingopyxis sp. PAMC25046 OX=2565556 GN=E5675_08080 PE=4 SV=1
MNSAIEKVVIVGGGTAGWLTAARLASSPRAMAGRLSVTLIEAPDIPTIGVGEGTWPTMRATLGAIGIGEGEFLAACDGSFKQGSRFDGWVTGAVDDRYLHPFTAPPAAPTAELLAAWRSGAADLSFAAAMTPQTHVCDLNLAPRQRAMPDYQGAANYAYHLDAGKFAALLARRAVQQLGVRHVADHVTGIDADGAGGIASVATSRNGAVEGDLFIDCTGHASLLIGGHLGVDWIDRGDTLFNDRALAAQVPVTPGSPVASQTVSTAHEAGWIWDIGLPGRRGIGCVYASRFMDDDAAEAVLRAYIARVLPEAPEVPARRLSFPTGHRVRFWEGNCIAVGLSAGFIEPLEASAIVMIELSLNALIDNFPANRAALPIHAARFNELFRYRWDRIVEFLKLHYVLSRREEPYWLAQRDAAHIPSRLAEMLALWRDQPPSAWDFPRVDEIFSAESHQYILYGMGFPVPADLPTTGGRAEGLLADTRQRARSLAAALPANRDYLDTLRPGVQAAAARQEGIG

SEQ ID NO: 85015 - protein, 499 aa, Erythrobacter sp.
  misc_feature (1)..(499): tr|A0A2K1E6W1|A0A2K1E6W1_9SPHN Tryptophan halogenase OS =Erythrobacter sp. SAORIC-644 OX=1869314 GN=BA950_09375 PE=4 SV=1
MTESKPPRVVVLGGGSAGWITACLLHHRWHSRGGQVTVVESPEIGIIGVGEGSTPQLKAFFDHLGIDEADWMAACDATYKLGIRFTGWSERPGFESYFHSFPGPVDLHTEPGFVHNCALRRRGFDVPAHPDDWFLAEVLAREHRGPHPRDNFPFMPSYGYHFDAHKLGKFLRDWATERGVLHRLLKATDVEQGAQTEIAALLCEDGTRIEGDIFVDCSGFRSVLAQQTLGAQFIPFGNNLFNDRAVVLPSAHSTRFKPQTDSIAMRAGWRWSIPLTTRVGNGYVYSSKYVSDEDAEAELREAIGMQDEGEARILEMRVGRIAETWTGNCLAAGLSQGFIEPLEATALHIVIATALDFADAYEKGGYGSAHRDMFNQRIAAKYEGIRDYIVAHYRLNQRSDTQYWRDNAANDALSENLKGMITAWFTHKDLREVNLRQHDGNPHYASMSWHALFAGYGTFPPEAKMVPTPTGLVTAEVDHTRRMLSACATNFLRYAPLSD

SEQ ID NO: 85016 - protein, 517 aa, Sphingobium sp.
  misc_feature (1)..(517): tr|J2L9N1|J2L9N1_9SPHN Tryptophan halogenase OS=Sphingo bium sp. AP49 OX=1144307 GN=PMI04_01582 PE=4 SV=1
MTTDSSLPGRVVILGGGTAGWLAAAYLSRTLKVPNVTLVESSEIGIIGVGEGTFPTIRTTLAGLGISEAEFLVQADATFKQGVLFDGWATGSDSYFHPFNLPVGGEDEALLPHWIAAAGPNRPAWADAVTVQERVIRAGRAPKRPEDADFSGPMNYAYHFDAARFAAYLRAISVAAGVSRIEGTVGLVERHADGDIAALLLADGRRVEGDFFLDCSGFRALLIGQTLGSGFKSCADSLFNDRALAMQVPYATPDAPVRPYTLATAHEAGWTWDIGLSGRRGIGYVYSSRHCSDDEAEATLRRYVGSEGDSLTPRQLRFETGYRDTQWIGNCVAVGLSAGFFEPLESTGIMLIEAALKMIGDFLVPGDRAARDAAARSFNALMAARFARIVHFLKLHYCVTRRTDTAYWRDNADPASIPQELQDMLAQWCHRPPSRFDFLVDVETFLPPSYHYILYGMGFETALTAGADRYPGGAEARDIFTRVRGAQAGACAALPDHRTLLNHYHARAATIPAKVSR

SEQ ID NO: 85017 - protein, 533 aa, Rhodanobacter sp.
  misc_feature (1)..(533): tr|A0A154R6E7|A0A154R6E7_9GAMM Tryptophan halogenase OS =Rhodanobacter sp. FW510-R10 OX=1524462 GN=RhoFW510R10_ 07650 PE=4 SV=1
MNDSRIRQVVIVGGGTAGWMAAALLAQALGAGVAMRLVESAEIGTVGVGEATIPQIRHINRFLGIDEDELLRFVHGTYKLGVQLNGFTRLGDSYLHAFGDLGLPLGLTPFHHYWLRAVQGRTSAASAGDGRDAGDRAMPGAIAECAGAAGRADAPDLWAYSLNAAAAAENRFAPLEKIPDSPLGGLRYAYHFDATRYAQYLRERIAPGAVQRIEGKVTEVRLREGDGFIESLRLDSGEIVEGDFFIDCSGFRGLLIEGALNTGYENWQHWLPCDRALAVASAPGGPMRPYTQASARTAGWQWRIPLRHRTGNGHVYCSRFISDDEAAAQLLANLETEPLGDPRPLRFVTGMRRLAWNRNCLALGLAAGFMEPLESTSIHLVQSGISRLLAMFPDRHCDSALVDEYNRQTRFEYEHVRDFLILHYKATERTDTPFWRQCGAMEIPPSLARRIELFRRTGMVFREGEELFAETGWVQVLLGQRIEPEHHHPLADALSDAQLEGFLADIRTLVGRAKNTLPPHHAFVARAAGSLVT

SEQ ID NO: 85018 - protein, 504 aa, Serratia fonticola
  misc_feature (1)..(504): tr|A0A1Q5V3A4|A0A1Q5V3A4_SERFO Tryptophan halogenase OS =Serratia fonticola OX=47917 GN=BSQ40_26295 PE=4 SV=1
MLNFRNAKRFVILGGGTAGWFAAIAMRRVFSPNVEIRVIESSAIGIVGVGEGGLLNLAHALKRYQIPVDRFMAEVDATYKWGFCYEGWRTGKEDDRYFHLFAGGGKAEWAEYGFLPGFSALIGQQLPLPSYIRGFQAVARNVPQQDASQILAEGGADIQTSYHFDSYKTANFLKTIALERGIVHQDAIVDRVELDQSGNATALIIGEESLDVDFVIDASGFARKIVGNTLKAEWVSFKEHLLMDRAIPFYMPHPFENPLLVTRALAMNAGWMWQIPLVNRVGAGYVYSSKHISDEQALAEIEKTLGYEIVPHETLKFDPGCFKEVWQGNIMALGLSSGFVEPLEATSIGQMLEQLRNFERVLSAGQGIVSDKSIKEFNQANLRSWEGIRDFLRMHYDCPRRDNQFWCDVATSAMPDDYRNIKACWQERTPRMLDIENYAINGWGGIFHVTNWMFVAAPLGLISTQAANKEVLFMPQASRERVSQLLQELPSLLGPDWRPRSQQK

SEQ ID NO: 85019 - protein, 538 aa, Burkholderiales bacterium
  misc_feature (1)..(538): tr|A0A257LHD4|A0A257LHD4_9BURK Tryptophan halogenase OS =Burkholderiales bacterium PBB5 OX=2015567 GN=CFE45_148 15 PE=4 SV=1
MQTIQNILIVGGGTAGWLTAAFLARTLGTDAGGPVTITLVESSDIGIIGVGEGTFPSIRGTLAAIGLDEGRFIRECAATFKQGIRFNHWVRPPGAPGADHYLHPFSHPSQRPGGPDLLPYWLLGAAPPGMPLAQAVTLQQRVADAAHGPKRLADADFQGPLNYAYHFDAGRFATLLAEHARALGVGHVLATVERVELDEAGAIGAVHTRERGRLTADLYIDCTGFRATLIGQALGVPLRSVRDVLFVDRAVALQVPYDRPDAPIPSTTVSTAHEAGWTWDIGLQQRRGVGHVYASRYMDDPQAEQVLRRYIGPASDGLDARRLTLEVGYRERQWVKNCVAVGLSSGFLEPLEASGIGLIEIAAYLIGYLFPAHGDTAPAAQQFNAMMSARYERIVDFIKLHYCLSQRRDSAFWRDNADPRSIPATLQDKLAMWRCRPPHRLDFVSDFEMYPTSSWQYVLYGMEYATDLRHARAAHPRWDEARAEFDMIQQVSQRALADLPTHRDLVSHYSRRAPVARPVARPVAQARGGAVEPRSTSA

SEQ ID NO: 85020 - protein, 510 aa, Mitsuaria sp.
  misc_feature (1)..(510): tr|A0A2G9C7N5|A0A2G9C7N5_9BURK Tryptophan halogenase OS =Mitsuaria sp. HWN-4 OX=2049333 GN=CS062_19160 PE=4 SV= 1
MTPTPPAPSVPRQPVRRVVIAGGGTAGWMMAACIAKHLGKQLDIRLVESDEIGTVGVGEATIPTMLTFHQLLGLDEREFMAATQATIKLGIQFEGWRDRDATYIHAFGSTGIDHWTAGFQHFWMKGRERGLASDYGDYCLELRAAQQHRFAHLPGDGINYAFHLDASLYGAFLRRFSEGFGVRRIEGRIAEVLLRPDGDLRALKLQDGSEIEGDLFVDCTGMRSVLLGQTLGVGYQDWSHWLPCDSAIALQTASVRDAVPYTRAIAHPWGWQWQIPLQHRVGNGVVFSSRYTDDDTARAALLGNIEGEVLTPHRVIRFKPGQRDVVWRRNCVAVGLASGFLEPLESTSIHLIQRSAIRLLQMFPKEGIRQSDIDEYNAQMRHELEHIRDFIVLHYHLQQRTDSPMWRDLREMPVPASLRHRLDLFRETGRVFRGPNELFTENSWIQVMLGQGLMPEQHHPTADLMSDRELAGFLGGIKTRIDQTVQQMPGHQQYIARYAPGTQWRVPVPA

SEQ ID NO: 85021 - protein, 512 aa, Porphyrobacter sp.
  misc_feature (1)..(512): tr|A0A4Y6VYL5|A0A4Y6VYL5_9SPHN Tryptophan 7-halogenase OS=Porphyrobacter sp. YT40 OX=2547601 GN=E2E27_07700 PE =4 SV=1
MSVPPPVTRIVIVGGGTAGWMTAAALVRVLGQLPGLSVTLIESEAIGTVGVGEATIPQIIGFNRLLGLDEMTFMRETRATYKLGIEFVDWLRPGHAYVHPFGSFGIDMLGIEFQHFWLRGQAVGDSSRIDDYSIAAVAGKAGRFAWPRPDQPKSPLSKLSYAFQFDAGRYARFLRGFAESAGAMRVEGRIVSAQQDGESGFVTGVTLEDGREVTGELFIDCSGFRSLLLGQTLGVPFTDWSKWLPCDSAVAIPCELGGENVPLTRSTARSAGWQWRIPLQHRIGNGHVFSSAHIDRQAATDLLLANLDGAPLADPNHLAFKAGHRARAWEKNVVALGLAAGFLEPLESTSIHLVQSGIARLLALFPDTGFGAVERDRFNAETEREYINIRDFLVLHYRASERDDSEFWRYCRNLEAPDGLAEKLAMFRSSGRIIRENNELFTEDSWLSVMLSQGVTPRAYHPAAWMLDEAETRERLAHIRGVIAQTAGQLPTQAEFLRQNGGAIAAAEHLTA

SEQ ID NO: 85022 - protein, 538 aa, Burkholderia sp.
  misc_feature (1)..(538): tr|A0A1I0K1H0|A0A1I0K1H0_9BURK Tryptophan halogenase OS =Burkholderia sp. NFACC38-1 OX=1566268 GN=SAMN03159335_ 03586 PE=4 SV=1
MSNPIKNIVIVGGGTAGWMAASYLVRALQQHTSITLVESAAIPRIGVGEATIPSLQKVFFDFLGIPEREWMPQVNGAFKAAIKFVNWRKSPERSRDDHFYHLFGTVPNCDGVPLTHYWMRKREQGFQQPMEYACYPQPGALDAKLAPCLSDGTRQMSHAWHFDAHLVADFLKRWAIERGVKQVIDEVEQVHLNERGYIASLSTKEGRTLEADLFIDCSGMRGLLINQALKEPFIDMSDYLLCDSAVASAVPNADARVGVEPYTSAIAMNAGWTWKIPMLGRFGSGYVFSSKFTSRDQATADFLNLWGLSDKQPLNQIKFRVGRNGRAWVNNCVAIGLSSCFLEPLESTGIYFIYAALYQLVKHFPDTSFDPRLADAFNAEIVHMFDDCRDFVQAHYFTSSRDDTPFWLANRHDLRLSDAIKEKVQRYKAGLPLTTTSFDDSTYYETFDYEFRNFWLNGNYYCIFAGLGLLPDRSLPLLQHRPESIDKAEAMFARIRREAERLRTSLPTNYDYLRSLRDGGAGLSRSQPGSTLTAPETL

SEQ ID NO: 85023 - protein, 509 aa, Porphyrobacter sp.
  misc_feature (1)..(509): tr|A0A4Y6W1D0|A0A4Y6W1D0_9SPHN Tryptophan 7-halogenase OS=Porphyrobacter sp. YT40 OX=2547601 GN=E2E27_09180 PE =4 SV=1
MGIDENVAIERIIIVGGGTAGWMAAAALSRIKRGRPVEIALIESESIGTVGVGEATIPPFVGFNELIGVNEAEMLAAVGGTFKLGIQFENWGKLGDSYIHPFGAYGYTMGGISFHHVWHRMVGAGDKRPIQVFNLETMAAYFGKFARSEDFKRDDLPPVNYAYHLDAGRYATFLRQLAESRGVVRHEGRIADVQLDGESGFVTGVTLEDGRAFQGDLFIDCSGFRGLLIEQALKTGYDDWSHYLPCDRAVALPCKRDDGGPPPPFTRATAHSAGWQWQVPLQHRNGNGHVYCAAYMDDQEALDILLGNIAGKPQAEPNWLRFVTGRRKKFWNKNVVALGLAAGFMEPLESTSIHLINTGIDKLISLLSLDGITQVQEDTFNRLTGREYARIRDFLILHYNATSRDDSDFWNYVRTMPVPDSLTEKVELFRANGQIFREEDELFTETSWAAVMMGQGIRMGGHNAMADALDPEETAREITEIEQSIRYLVQHMPGHGDYLARYCPAPMAA

SEQ ID NO: 85024 - protein, 415 aa, Pseudomonas synxantha
  misc_feature (1)..(415): tr|I4KWC5|I4KWC5_9PSED Putative tryptophan halogenase O S=Pseudomonas synxantha BG33R OX=96901 GN=PseBG33_0447 PE=4 SV=1
MPTVEMERRQVVVIGAGPSGAIAAALLKRKGHDVLIIEREHFPRFSIGESLLSHCIDFIEEAGMLDAVQAAGFQVKTGAAFAWGERYSAFDFGDTFSNGKPTTFQVQRGEFDKLLADQAALQGVEIRYGQSIVGVDFSGECRYLHVRRQNGSEYHIKAKFVLDASGYGRVLPRLLDLEAPSNFPLRQAVFTHIEDRIEHPGFDRSKILVTTHPTQRDIWFWTIPFSNGRCSVGVVAAKEHFDGRDSDLDACLRSFVDETPSLAAVLQNAAWDTPARSIGGYSANVKSLHGPGFALLGNAAEFLDPVFSSGVTIAMRSASMAAAVLHRQLNGETVDWQSEFAEPLKRGVDTFRCYVEGWYAGTFQDVIFHPGSSPEIRRMISSILAGYAWDERNPFVSEPKRRLRMLSDICASEAV

SEQ ID NO: 85025 - protein, 501 aa, Caulobacter radicis
  misc_feature (1)..(501): tr|A0A2T9J5V5|A0A2T9J5V5_9CAUL Tryptophan halogenase OS =Caulobacter radicis OX=2172650 GN=DDF65_17665 PE=4 SV= 1
MADNRIGRIVIVGGGTAGWMSAAMLARALGPAAQISLVESEAIGTVGVGEASIPQLRNFNAFLGLDEDAFLRATEGTIKLGIEFVDWLAPGHRYMHAFGPVGRPLGTTPFHHYWLDARRRGTAGDDFWAWSANALAARAGRFGRTPGEAGAEPLTWAFHFDAALYARHLRTYAEARGVQRIEGRIVGVDQDGESGFLRAVALEGDRRVEGDLFIDCSGFRGLLIEETLKSGYEDWRKWLPMDSAWAVPSRDDAPPVPYTRAWARDAGWQWRIPLQHRTGNGHVFSSAWTDKDAAARTLMANLEGQALAEPRLLTFVTGRRRKSWNRNVVALGLASGFMEPLESTSIHLVQSGLARLLALFPDRGFAPLLADEFNRQTEQEYACIRDFLVLHYKATQREDTPFWASRKAMEIPETLAARIALFAGSGRVFSRDEDLFKESSWVQVLLGQGVTPAAAHPMTAVVADAQVDGWLDDLARIAGRTAASLPTHAAFLGRAETRLAG

SEQ ID NO: 85026 - protein, 513 aa, Sphingomonas sp.
  misc_feature (1)..(513): tr|A0A2K8MIM2|A0A2K8MIM2_9SPHN Tryptophan halogenase OS =Sphingomonas sp. Cra20 OX=1327635 GN=CVN68_02720 PE=4 SV=1
MSGASGSQPLRRLVIVGGGSAGWMTAAAVSRMVATGLSVTLIESDEIGTVGVGEATIPPLLDFNAALGIDENEFVAATQGTFKLGIEFVDWGKLGERYIHPFGKYGRPMMGINFHQIWLRQHLLQRAVSDPGPISDYAIAIAAATRGRFARPATNPEAVLSGLSYAYHFDAGLYARFLRDYAGRAGVVRIEGKIATAEQSEPDGFLTAVVLADGRRIEGDFFVDCSGFRGLLIQGTLGVSYRSWQHWLPCDSAVAVPSSTAGPPVPFTRSTADRAGWRWRIPLQHRVGNGHVYSSGHIDDDAAREALLAGLEEPPIAEPRVLRFTPGRREKLWEKNCVAIGLSAGFIEPLESTSIHLIQSGIFRLMALFPDRGFSQVEIDEYNRALVAEYEHVRDFIVLHYHATERSDSDLWNYCRTMEIPDSLAQRIALWRGKGRIFRGSGELFTEESWIAVLLGQNIVPESADPLAAMLAVDETSRYLAHLRDIVKRTAEAMPTHAHYIAQHCAAARPVAM

SEQ ID NO: 85027 - protein, 511 aa, Xanthomonas campestris
  misc_feature (1)..(511): tr|Q3BQT8|Q3BQT8_XANC5 Tryptophan halogenase OS=Xanthom onas campestris pv. vesicatoria (strain 85-10) OX=31627 3 GN=XCV3144 PE=4 SV=1
MPQECAVTQAQIRKVVIAGGGTAGWIAACALSHQFRNLLDITLVESEQIGTVGVGESTVPPIRTFHRFLQIDEQEFLRAVAGTFKLSISFEHWRRQGERYIHPFGITGQSTLVCAFHHLWLESQRRGMAGSFGDYCLETVASRVDRFALHGEPAVNYAYHLDAALYAKFLRARSEACGVKRVEGRIQQVTVQPHSGDVASLVLEDGHVIEGDLFIDCSGFRGLLIEQTLHTGYEDWSHWLPCDRAVAVQTEALGPPVPYTRAIAHEAGWRWHIPLQHRVGNGLVFSSKHLSDDEAHAKLLRDVAAPAVKEPWMVPFRTGRRLKAWNKNVVSLGLASGFIEPLESTSIHLTISAVVRLLALFPAEGIAPSQVQLFNDVSRAEMEHVRDFVTLHYHATQRDEPLWQQCRQMELPESLALRLRAWRERAHAWQGADELFRVDSWTHVLMGQGIAPEQHHPLTRAFSDHDLRRLLDGIAQPIQHAVQQMPSQQDFIERYCKAGEQVWGMRSPVPA

SEQ ID NO: 85028 - protein, 446 aa, Burkholderiales bacterium
  misc_feature (1)..(446): tr|A0A257J025|A0A257J025_9BURK Tryptophan halogenase (F ragment) OS=Burkholderiales bacterium PBB5 OX=2015567 G N=CFE45_42895 PE=4 SV=1
FRQIGVAEADWMAACHATYKLNIRFEGWSPESGVPAYSHPFFSKIDSLNEQAFYVNCRTRRLGLDVTTLPDRFLLNGVLAAQGKGPSRPAHFPFDIEYGYHFDSALLGQYLARLAVSRGVNRVLANVRSAELNGQGDIAAVLGDDGLRIAGDLFVDCTGFNALLLQRLLGVAFKSFSSNLFNDCAVVIPTPAPPRASLPVQTVSRALSSGWAWHIPLTSRVGNGYVYSSAFLSADAAEAELRVTLGLADGQGEARHLKMKVGQVERHWHRNCLALGLSQGFIEPLEATALHLVQTCIESFMARYEEGQFTALHQPRFNDEVVERFERVRDYIVAHYKLNTRTDSAYWQANRDNDQLSDALGAVLQAWFDRSDIAEAIHRTQGRSHFGALSWHCLLAGYGAFPPIAPRQPGTGDLYAEEGIENFLDGCAMNFGSHEACLTGAWPLTS

SEQ ID NO: 85029 - protein, 480 aa, Sphingopyxis sp.
  misc_feature (1)..(480): tr|A0A0W1EYE2|A0A0W1EYE2_9SPHN Tryptophan halogenase OS =Sphingopyxis sp. HIX OX=1759074 GN=ATE62_15290 PE=4 SV =1
MTACLFAKQWAGRASVTVIESPEIGIIGVGEGSTPQLKAFFDTLGIAESDWMPACDATYKIGIGFEGWGGAGAPGYFHPFPAPLDVHSQPAFVHNAALRRGGVDVPAHPDAFYLAPRLAAAGQGPHPAENFPFELSYGYHFDAYKVGAYLRDHAAGLGVAHRPRKVEHVRVGNEGLVEALLLDDGEAVEGDFFVDCSGFRALIAEQALGAKFLPFADNLFNDRAVVMPTPHRENTPLPVATGSSAMAAGWCWTIPLTTRVGNGYVFSSRYLDADAAEAELRTALGVGDEVVARHLPMKVGRLAESWTGNCLAMGLAQGFVEPLEATALHIVIATAQEFIAAFESGGFTPQHRVVFNQRIAARYEGIRDYIVAHYRMNRRADAGDYWRDAAAMEALSDDLKAMITAWFTRGDIDAVIAERGIGTYYGSISWHCLFAGYGVFPDAARMRAAAAGDGAADMAMIGDFLRRAALNFGEHRPPAR

SEQ ID NO: 85030 - protein, 500 aa, Erythrobacter sp.
  misc_feature (1)..(500): tr|A0A2K1E651|A0A2K1E651_9SPHN Tryptophan halogenase OS =Erythrobacter sp. SAORIC-644 OX=1869314 GN=BA950_10820 PE=4 SV=1
MSSDYKPRRIVVAGGGTAGWMTAAALAKTMGDAIDLTLVESDAIGTVGVGEATIPPLINFNRLLGINEAEFMRETQATFKLGIEFENWKRDGEKYFHSFGSTGRDHWSAGFQHFWGEGLLRGHEYSYDDYCLELCAAYAGKFAHLPDNRLNYAYHLNATAYAAFLRRIAEGAGASRVEGKIAHVELDGESGNIAAIGLENGQRLEGDIFVDCTGFRSLLIEGALHVGFDDWSHHLPCDSAIAVQTELSASPVPYTRAIAHDAGWQWRIPLQHRGGNGIVYCSRYLSKDAAHDRLMSTLEGKAISEPRAIPFTTGARRKQWHRNCIAIGLSSGFLEPLESTSIHLIQRAVIRLLRMMPAGEVSERDIAEFNDQQLTDMIQVRDFLILHYKATDRRDSAFWRQCATMDIPDSLTQKMELFRETGRVFRKNDELFVENSWVQVMLGQGILPQAFHPVAKKMSDEELSKFLEMLRTNVARTVQGLPAHHAYVAQFCGAKGVAAG

SEQ ID NO: 85031 - protein, 512 aa, Caulobacter radicis
  misc_feature (1)..(512): tr|A0A2T9IY07|A0A2T9IY07_9CAUL Tryptophan halogenase OS =Caulobacter radicis OX=2172650 GN=DDF65_23105 PE=4 SV= 1
MSEDVRNGRIRSIVIVGGGTAGWMAAASLRRHFGKAPIDITLVESSEIGTIGVGEATIPTIRNFYQSLGLDDLEVLRATQGTCKLGIRFKDWMAPGSAFIHPFSLYGQDLNGVPFQHYWLKARGVADVGEMGEYSLGASLAAAGKFTVPAANPPSSLSVFDWALHFDAALFAQLMRRVAEANGVRRIDAKVVKVNLRPEDGFVASLDLHTGTSIEGDLFIDCSGFRGLLIEEALQTGYEDWSRWLFCDRALAVQSQPPEGAEPPPYTDVTAHSAGWRWRIPLQHRYGNGYVYSSRHIDDEAARAELVAAVPDRLLHEPRLIRFTPGRRKQVWNRNVVALGLASGFLEPLESTSIALIETGIEKLKALFPDRGFDPAVVDEFNDWSRREMERVRDFVVLHYKAAQRGDTPFWRATRDADIPDTLARKVELFRSRGHIARYRWEMFQPPSWLAIFAGFDILPGGWDPALDGIDGAALAASLNQMRAGVARAVAQAPTHGDFLRRYVGQAPAAAE

SEQ ID NO: 85032 - protein, 509 aa, Caulobacter radicis
  misc_feature (1)..(509): tr|A0A2T9K8T5|A0A2T9K8T5_9CAUL Tryptophan halogenase OS =Caulobacter radicis OX=2172650 GN=DDF62_03785 PE=4 SV= 1
MANNLRKIVIVGGGSAGWITAAMISHYLKDSPCEIELIESEQIGIIGVGESTIPPFLQLIRSLGIDEKEFMQETQAAFKLAIRFENWRQKGEVYYHPFGLIGGLVDVHEFYQVWLRGKAEGHPSSLQDFAPASVMADRWKFMSPAMAPRTMLANANYAVHIDAALLAKFLRKFAEARGVKRTEGIVKDVATRPDGFIEKVILQDGREASGDLFIDCSGFRSLLSGKTLGTEFLDWSDVLLNDRAIAVQTANIQDPHPYTLAQAQDAGWRWRIPLQHRAGNGYVYCSQYCSDDEALATLMSQVEGEAVRDPWLVPFKTGMRKQLFNKNCVAIGLAGGFIEPLESTALHLIYRGVDYLLRFFPDRDCDPLLAAEYNRRMQVDYEEIRDFIVLHYFTTKRDDTPFWRAYQQVTPPESLRERIELFKASGVLRDGVDDMFRAPSWQSVMEGMGIRPKRYQQLVDTLPAGVVKGLLDKSAPMLSELVDTLPSHGDFLRQHCPAPVPEALLKKAG

SEQ ID NO: 85033 - protein, 506 aa, Xanthomonas campestris
  misc_feature (1)..(506): tr|A0A3E1KLB1|A0A3E1KLB1_XANCE Tryptophan 7-halogenase OS=Xanthomonas campestris pv. campestris OX=340 GN=D0A4 2_19945 PE=4 SV=1
MIPAPLRNIVIVGGGTAGWMAAAAFARVLGPSFNVQLIESEQLGTIGVGEATVPHIKAFNNLLGIDEAEFVRQTQGSFKLGIEFVDWQRPGTSYIHGFGTQIGHPLGLLPFHQYWIKQQRRGKAQPLGAYTLNTVAATRGKFMTSAGDVPANSPLANIAYAYHFDASQYARFLRGYAEQRGVTRLEGLIEQVQLDAHTGHVQSVQLASGQVVSGDLFIDCSGFRGLLIEEALHTGYHDFTHWLPCDRALAVPCEKVGPPTPYTRSTARAAGWQWRIPLQHRTGNGYVYSSAHISDDEAAATLLANLDGTPLADPRPLRFTTGRRKQFWNRNVVALGLASGFLEPLESTSIHLIQSGISKLLELFPREGISPVLVQRYNDRLAFEFDRIRDFLVLHYHATERDDSAFWRHCRTQPITPELQATLDLFRDSGRFYRNAEEMFAEISWVQVMVGQGILPQGYHPLVDQVPDTDAEGFLASVAQTISHCVDVMPTHQQFIDRYCRADPVR

SEQ ID NO: 85034 - protein, 500 aa, Brevundimonas subvibrioides
  misc_feature (1)..(500): tr|A0A258HM41|A0A258HM41_9CAUL Tryptophan halogenase OS =Brevundimonas subvibrioides OX=74313 GN=B7Y86_05100 PE =4 SV=1
MRQLSRILIVGGGSAGWMTAALLSRLFKGLYEITVVESREIGTVGVGEATIPAIKKFNELLGLDENEFLQRTQGSFKLGIQFNDWLRPGSSYIHGFGVIGRDLEWLRCHQYWLKANSQGRAADFANYSINTAAALGNKFMRADPRMAESPIAHLAHAFHFDAGLYAKYLSGYAQDRGVRRREGKVADVTLRSNDGFIQSVTMDDGEVIPADFFVDCSGFRGLLIEQAMKTGYEDWTHWLPCDRAIAVPCERSGDFTPYTRSTARPAGWQWRIPLQHRTGNGHVYSSQYMDDDEAERILCDNLDGAQRAEPLRLCFVTGKRKKIWNRNCVAIGLSSGFLEPLESTSLHLIQSAIIRMVRLLPDASFDQAGIDEFNRQTDFEYERIRDFIILHYKATERADTPFWRYCRDMEVPATLQRKIDLFRANGRIFREDEELFAEESWIQVFLGQGISPRGYDPLVDIKSDAQTVEFLDNIESVISKCVEVMPTHADYVARTCPAPE

SEQ ID NO: 85035 - protein, 518 aa, Porphyrobacter sp.
  misc_feature (1)..(518): tr|A0A4Y6W5W4|A0A4Y6W5W4_9SPHN Tryptophan 7-halogenase OS=Porphyrobacter sp. YT40 OX=2547601 GN=E2E27_07705 PE =4 SV=1
MRGNGIGNVSRLARVVIVGGGTAGWMAAAALSRFFNDGRRTVTLIESDAIGTVGVGEATIPPIRSFNAMLDIPEAEFLRETRGTCKLGIEFVGWGQQGDRYFHPFGTYGQDLHGIAFHQLWLREHARSGAAGAGAIGAYSMSTAAAAAGRFARPAAGAQSVVREIAYAYHFDAGLYAAYLRRLAERQGAVRIEGTITNVTRDGETGDVASVTLENGSTVAGDLFIDCSGFRGLLIEEALETGYEDWSQWLPMDRALAVPSRSPGPPDPFTRATAHSAGWQWRIPLQHRTGNGHVYSSGFMDEDEARRILLANLETEPLAEPRGLSFLTGLRRKAWNHNVVALGLSSGFIEPLESTSIHLIQNGIQRLFALFPDLPISPLERDEYNRGMHELYQDVRDFVILHYKATQREDSEFWRYVKHMAVPDSLARKIALWQHRGRVFRENAELFSLPSWVAVMLGQNIWPEAHDPIADTLDPDKVAAAMAQMRAAYADVAARLPAHGDFLRQSGSWHIAPEAAVA

SEQ ID NO: 85036 - protein, 466 aa, Sphingomonas sp.
  misc_feature (1)..(466): tr|A0A2K8MHC5|A0A2K8MHC5_9SPHN Tryptophan halogenase OS =Sphingomonas sp. Cra20 OX=1327635 GN=CVN68_10685 PE=4 SV=1
MSDRAIRSIAILGGGITGLSAAAAFARALPQLAITVIETPPDPAALADRLPGSTSAIHRFHASIGLDERDLLRAGAAVPRLGLRFENWSTGAATWYHVHGEHGAPTGAVAFHQLWARARREGRAEAWHRYAAAGVLAEASKFVHPQPGTPLATFDYALRLDPERYRPMLTALVDRLRVARFAGAFGTIERRADGGVAALMSADGRRVEADLYVDASGPAAPLADAVAQDFEDWGSVLPYDRVEIGEAPTSAADPNDTIIGGAGGWQFAASLPGKTLLGRVHADRGEGTSIAIRPGRRAAPWVQNILAIGDAAVALDPLHWPNLHLAQSSIARAIELLPGRDCHPVETAEYNRRARAEAERMRDFQALHYLRAGAKIEVPDSLARVVQQFEQRGRFVHQDEDGLLEEIWISALLGLGVVPGATDPLALAVSADAAASRMAEMRAGLATLPARLPGYADYLARCGMPT

SEQ ID NO: 85037 - protein, 501 aa, Sphingomonas sp.
  misc_feature (1)..(501): tr|A0A2A2SEH4|A0A2A2SEH4_9SPHN Tryptophan halogenase OS =Sphingomonas sp. 1PNM-20 OX=1141887 GN=CKY28_08610 PE= 4 SV=1
MTNRPAPLRSICIVGGGTAGWIAAAMIAHLHPEIAVELVESDDIGTIGVGESTIPPFLQLIAKLGVSESEFVRECQASFKLGIEFRDWLRLGHSYFHPFGAIGMPIEGDFYQLWLRAAHGGYRRQLQDFAPASVMAREGRFVLPHAARRTPVGGAAYALHVDAKRVARFLRRFAEARGVRRTEGIVTDVATRPDGAVDRLILKDGRTVSAEFFIDCSGFRALLIGKTLGVGYTDWSHWLLCDRAIAVQTENVGPPPPYTLAHAQAAGWRWRIPLQHRTGNGHVFSSRHMSDDEATARLLDQVEGELVTDPMPVPFRTGVRDRIWNGNVLSIGLSSGFIEPLESTAIHLIYRGMEFFFRFMPDLAFAPELQAEYNRRMTADYEEIRDFIILHYCTTERDDTPFWRECAAMELPPTLAAKLALFRVNGTLADGVDELFRAVSWQSVMDGMGVRPRTHHPTLDRLPAPDLPGELDRAADSLARAVGQLPPHGRFIAENCAAPIP

SEQ ID NO: 85038 - protein, 495 aa, Sphingomonas sp.
  misc_feature (1)..(495): tr|A0A2A2SBR5|A0A2A2SBR5_9SPHN Tryptophan halogenase OS =Sphingomonas sp. 1PNM-20 OX=1141887 GN=CKY28_16615 PE= 4 SV=1
MSALGEPIRDVVVAGGGIVGWSAAAALKRRLPWLGVTVFALPPPPDALADRIGPTLPSIHGFHGDLGLRDADAVVRSGSAFRLGTRFENWVADSPDYVHAYGEHGRPFGTASFHQHWVRAAKLGAAAPFDRHSPAAMLARAGRFARAADEPDAPLSGFEYGLHLDPPAYLAMIRAFALHCGVREHDGVLRSIRLRPDGFVEALELDGGEPLRADLFVDCTGPAARVRSALDDAWEDWRRWLPCDRILIADGPPAPEPAPLDRAVAVEAGWRWSADGLRRTSTGLVYGSAHWSDEQAARALGVREAAPVAIAAGTRPQPWLRNCVAVGDAATAIEPLEWTNLHLAHSAIDRLVAMLPDRDCAPVELAEYNRQCAAEAARVRDFAVLYYAASGRSEPFWRDAAAAEPPPTLLHTLTQFRERGRLPFHEEETFGRDSWLAVLLGQGVIPRRADPLIEVVPPAQSDAAMAGWRDALAQAVARAPTHAAFLQMLHRQVTR

SEQ ID NO: 85039 - protein, 500 aa, Sphingomonas sp.
  misc_feature (1)..(500): tr|A0A0A6D3W3|A0A0A6D3W3_9SPHN Tryptophan halogenase OS =Sphingomonas sp. Ant20 OX=104605 GN=NI18_04330 PE=4 SV =1
MDTPPKTRVIIAGGGTAGWLAAALLTRQLGALVDVTLIESDEIGTVGVGEATIPTVQAFHALLGLDERAFMAATGATFKLGIAFEGWARPDDRYVHSFGDVGRSTWMGDFQHFWLEARANGLAGDFGDYCLELQAAEARRFTIGQQGPQLNYAYHFDAGRYARFLRERCETAGLTRIEGRIAGIDRSAETGHIDAVILADGSRVAGDLFLDCSGFRGLLIGDALGVGYEDWSHWLPANRALAVQTTSVEPARPYTRAIAHDAGWQWRIPLQHRVGNGIVYSSEYLSDDAARDRLLASVQGQPLTDPRLLRFTTGRRLRAWEGNCIALSLAGGFVEPLESTSIHLVMTALTRLLRAFPFDGISPAVVAQFNAQTRREIEGVRDFVILHYHLNQRSEPFWKACAAMPIPDTLAERIALFTDAAQAYQSPDDLFRVSSWTQVMLGQRLEPRDWHRLARMMPPERLGSSLAELKAGIAQQVDRLPAHQAFVDRYCAQAATEVAA

SEQ ID NO: 85040 - protein, 225 aa, Actinoplanes sp.
  misc_feature (1)..(225): tr|A0A428WMJ1|A0A428WMJ1_9ACTN Tryptophan halogenase (F ragment) OS=Actinoplanes sp. ATCC 53533 OX=1288362 GN=D MB66_52510 PE=4 SV=1
MPVEEFDVVVAGGGPAGSTVASLVAMQGHRVLLLEKEVFPRYQIGESLLPSTVHGVCRMLGVTEELAEAGFPTKRGGTFRWGARPEPWTFSFAVSSRMTGPTSFAYQVERARFDEILLRNAQRKGVEVREGCSVAGVIEGDERVAGLRYTDSDGGEHEVRARFVVDASGNKSRLYSSVGGTRNYSEFFRSLALFGYFENGKRLPAPNSGNILSVAFDSGWFWYIP

SEQ ID NO: 85041 - protein, 483 aa, Actinoplanes sp.
  misc_feature (1)..(483): tr|A0A428YMY8|A0A428YMY8_9ACTN Tryptophan halogenase OS =Actinoplanes sp. ATCC 53533 OX=1288362 GN=DMB66_11555 PE=4 SV=1
MTQPYDVVVVGGGPAGSTAATVVAMRGHRVLLLEKETFPRYQIGESLLPSTVHGLCRILGVADEVARAGFTLKRGGTFRWGRNPEPWQFAFAMSPRLPEPTSTAFQVERAKFDEILLRNAARVGVEVREGCQVRGILEADGRINGVEYEAADGSRHTARARYVVDASGSTSRIHGRVGGSRVYSDFFRNLAVFGYFAGGARLPEPNAGNIFCAAFDAGWLWYIPLRDNLTSVGAVIAPEHRAAVRGDPRAVWRSMIEACPEVASKLVGVPAATEAPYDQVRVRKDYSYWKQSFHVPGMLLVGDAACFVDPVLSSGVHLATYGALLAARSINACLAGAVPEERSLAEFEARYRREYGVFYEFLISFYDMQRDARSYFWQAKQVTAVDATETAAFAELVGGLLPGEEGVGVRFADAAADLDRAVGLLATADDRRNPLYTSRTVDETFRQGRNLQEEALYGAPLDDTDPPVPGGLPLAKDGLGWRS

SEQ ID NO: 85042 - protein, 495 aa, Aliikangiella marina
  misc_feature (1)..(495): tr|A0A545TCY0|A0A545TCY0_9GAMM Tryptophan 7-halogenase OS=Aliikangiella marina OX=1712262 GN=FLL45_08835 PE=4 SV=1
MSQKHILILGGGTAGWMAANLFAKKWPTEKAKITLVESPDVDIIGVGEGSTPSLKHFFESIDVQEKDWMPKCNATYKVNIRFDDWSPKSGVTSYRHPFTSQVDVFTARAFMVNTRTRRLGLDTHVNPESFLLNGQLAKTGKGPLTPANFPFITEYGYHFDSHLLGKYLSDLAVSRGVNYQQAHIEEVVLNEHGDIECLRTRENSAINADFFIDCTGFVSLLMQKTLKVPFKAFKENLFNDSAVVMPTKIDAEIPVETVSTALSAGWCWKIPLTNRYGNGYVYSADFISRDEAENEFRQHLGMLNSDEDVRHLKMRVGQLEKHWSKNCMAIGLSQGFIEPLEATALHLVQIAIDTFANYYEKGQFSNQYQSNFNHEISNRFEKVRDYIVAHYKMNTRDDSDYWIANRENKHLSDSLMRILNVWFKGEDLHAEIERQQLDSHFDAVSWHCLLAGYGAFPKLVAQQPGQGDLYQEQNIEKFIEGCSLNYKSHAECLYQ

SEQ ID NO: 85043 - protein, 513 aa, Pelagibacterium sp.
  misc_feature (1)..(513): tr|A0A1E4GH12|A0A1E4GH12_9RHIZ Uncharacterized protein OS=Pelagibacterium sp. SCN 64-44 OX=1660125 GN=ABS76_08 320 PE=4 SV=1
MDKPAHFAIVGGGTAGWIAAFIIQDEARRRGLNIRLSVVESSRIPTVGVGEATTAAFRVLLKHFGIDEFEFFRKTDASFKLGIRHEDWRRKGFTYYGPIDDPHQVVAPPPGAPSDYLNVYAVAAGRPVQDMHLFQPLLEQKKAPYALKPDGSLIALGPFHHAFHFDQALVGKFFASKSQGVEKVDAMVAGIERDGETGDIGALVLDDNSRLEGDFFIDATGFRKQIIVKALEAPWVSYAHELPVNRALPFWVDVKPGEELANYTRAWAQSAGWMWQIPTRTRYGCGYVYSDKFSTPEQAKEEVERVLGHEIEVRGDIRFQIGRLEKAWIGNCVAVGLSSSFLEPLESTSIHGTIVQMMLFAQRYMDAPGKMNQDKRDDYNARVGRQVDDFRTFVNTHYVTERDDTPFWREVRANRIHPETRARLARWQQEMPRHEHFPSYLGGLPHIETQLHYPVLSGLGLLDRELARREMERDPKLRRFAQETFEGLVREYRAAANQALGHAEFLRIVQEMA

SEQ ID NO: 85044 - protein, 501 aa, Sphingomonas sp.
  misc_feature (1)..(501): tr|A0A4Q6XZV8|A0A4Q6XZV8_9SPHN Tryptophan 7-halogenase OS=Sphingomonas sp. 3-7 OX=2484750 GN=EWE75_16085 PE=4 SV=1
MSDIPHNHRVKRVVVAGGGTAGWVTATALVRHLGALIDVTLVESDEISTVGVGESTVPTFRSFHEFMGINEPRFMAATQATFKLGIEFKNWARIGDRYIHPFGTVGKTVSWMADFHHFWLHARANGYGGELGEYCLEWVAGEANRMSHKVAPGIGYAYHVDATRYARFLRGLAEPAGVKRIEGKIRNVEIDPSTGDIAALVLESEERIEGDLFIDCTGFRSLLLGQALGVEFEDWSQWVTTNSAVAVQSVSAPTSQPYTSAIAHEAGWRWKIPLQHRDGNGLVFCSEFMSDDEARAKLLAEIEGEPTVEPWLLRFKTGMRVKTWHRNCVGLGLANGFIEPLESTSIHLMMAGVTRLIQDFPFMGCHDGLTNHFNEKSRREFECIRDFIILHYHVTERDDSPFWRRCRDMDIPDSLAERLRLWREDARAYQLPYDLFRVDSWTTVLTGQRLWPAGYHAIAESMAPGELRKALDRMRSEVAAKALTMPTHPEFLRSYCPADLL

SEQ ID NO: 85045 - protein, 484 aa, Brevundimonas sp.
  misc_feature (1)..(484): tr|B4W8W7|B4W8W7_9CAUL Tryptophan halogenase superfamil y OS=Brevundimonas sp. BAL3 OX=391600 GN=BBAL3_2793 PE= 4 SV=1
MTAAALARLVAPSGVQITLVESEAIGTVGVGESTLPHIRAFNERLGIDEAAFMKATRATFKLGIQFENWGQIGGSYIHPFGDYGAPGGEAPFHHYWLRGRELGDVGPIDDYSLPVVAAREGRFAPPSDDPRSLLSTYRYAYQFDATLYARFLRGMAETEGVRRIEGRIQNVAQDGESGAITKVTLDDGRQIEGDLFVDCSGFRALLIEQTLKAGFTDWSHWLPCDRAVALPCESDQPTVPYTRATALEAGWQFRIPLQHRVGNGYVYSSAFIDDAAALDRLVGRLEGKPLKAPNVLKFTAGQRTRNWAANCVSVGLSSGFIEPLESTSIYLIQIAITKLIELWPTAVIDPATEAEFNRQMDLEYIRIRDFIILHYCATARNDTPFWDYVRTMPLPDTLSEKIELFRARGVVQDYREGLFLHPSWVAVYLGQDILPRRHHPLVDAVSATQLMSSLERLRRMVREASYKLPSQDDYIARYCAHLPL

SEQ ID NO: 85046 - protein, 238 aa, Xanthomonas oryzae
  misc_feature (1)..(238): tr|G7TJG8|G7TJG8_XANOB Tryptophan halogenase OS=Xanthom onas oryzae pv. oryzicola (strain BLS256) OX=383407 GN= XOC_4110 PE=4 SV=1
MTMPDTLPSDPQQRAVRRVVIAGGGTAGWMAAAAISKLLGRHLQITLVESDEIGTVGVGKATIPSLVTFHRLLEIDEAVFMATTQATIKLGIAFEHWRDVDRHYIHSFGHAGTDHGSAGFQHFWLKGQQRGVARDFGDYCLELRAAQEGRFAHLPNGGMNDAYHLDAGLYARFLRRFSEGFGVTRIEGRIGQVETDAESGFFTALTLQDGTRVAGDLFLRLHRLGRPADRQDAGRGQR

SEQ ID NO: 85047 - protein, 514 aa, Brevundimonas sp.; identical to SEQ ID NO: 83757
  misc_feature (1)..(514): tr|B4WBL9|B4WBL9_9CAUL Tryptophan halogenase superfamil y OS=Brevundimonas sp. BAL3 OX=391600 GN=BBAL3_3331 PE= 4 SV=1

SEQ ID NO: 85048 - protein, 506 aa, Pseudoxanthomonas indica
  misc_feature (1)..(506): tr|A0A1T5IJU3|A0A1T5IJU3_9GAMM Tryptophan halogenase OS =Pseudoxanthomonas indica OX=428993 GN=SAMN06296058_002 2 PE=4 SV=1
MDTHDRIKQIVVVGGGSAGWMAAAALATYLGTQAKVRLVESEEIGIVGVGESTVPYMKTFNTQVLGIREADFVAKTQGTFKLGIQFNDWGRIGDSYVHGFGKIGHSMGPLPFHQYWLKQFLAGRAPDIGAFSLPTAAAPLNKFMVSPADAPAGSPLADIAYGYQFDAGLYARYLRELAESRGAQRIEGKIVEVLRRGNDGFIEAVVLENGQRIEGELFIDCSGFRGLLIEETLKTGYEDWSEWLPCDRAMAVPSESAGPLTPYTRVTAQSAGWQWRIPLQHRVGNGYVYSSRHISDDEAAATLLAGLNGKPLADPRPLRFIPGRRRKFWNGNVVAVGLAGGFMEPLESTSIYLAQSGIQRLLSLFPDRGFDPALAERFNRESAFEQERVRDFLVLHYNATERDDSAFWNHCRTMAIPEELRETIELFRRDGRYFRNGEDFFALPSWVQVMLGQRIIPQGYHPIVDELPEDKLVQLVDRVRHVVANCVESMPAHQQFLDTYCRAPTP

SEQ ID NO: 85049 - protein, 572 aa, Streptomyces peucetius
  misc_feature (1)..(572): tr|A0A2D3UF37|A0A2D3UF37_STRC0 Tryptophan halogenase OS =Streptomyces peucetius subsp. caesius ATCC 27952 OX=31 6280 GN=CGZ69_27150 PE=4 SV=1
MSPGPVQVPHQQVRPPRHMNCPAHVYTRIQAGTAPVQMPYKECGQADSMDSHIMRIVVVGGTAAGWTAAARLASAFRETVSVTVLETPSGADHQETGQVTALGPQIQRDLFDRLGVLEDEWMRACCASFNAAVRYVNWRTGGAAEIAARTTVSGGVDHFYNPCAGIPECEGSLLSEHWQYRRMNGETVEPFDYACFREPPLMDARKSPRWLDGRAAVPYGWHVDIHMFTQYLRNVATGRFGVRAVRGELLHAERDADGMITLLHTAEGRAVPGEFFLDCTGAEGLLIAGMLQEPFVEAQDRLLCDSAVTVTVPHDHTTHGIDPFTTATALPAGWAWKMPLPGRFGAGHVYARDWTEPDEAVGTLCALWGLRPGRTAVRHIALRTGRSRRAWVKNCVAVGPSACSLEPLAGDTLGGVLGALDRLVRDFPSRDDPEGPAARFNRAAETAHARARDFAQLLYRTAPRADTPFWRAQRELPLSAELAECLAAHRAGLAPDAHELAYAGVLAALAPGRSAPRAALAHRQDARDVADAHFLRIKRQQQILLETLPTAQHYLQRLHTRPMPQPAGAGPL

SEQ ID NO: 85050 - protein, 500 aa, Streptomyces hygroscopicus
  misc_feature (1)..(500): tr|H2JL05|H2JL05_STRHJ Tryptophan 5-halogenase OS=Strep tomyces hygroscopicus subsp. jinggangensis (strain 5008 ) OX=1133850 GN=SHJG_8627 PE=4 SV=1
MTASYLRAAFADRVDITVVESRRIGTIGVGEATFSTVRHFFDYLGLSEADWMPECNGTYKLAVRLENWRAPGTYFYHPFERMRVVDGVPLTDWWQKVGGTGSFDRDCFLIPWLCDAKASPRYLDHRLFEQDFDEDPDRPLYRTTLAEQNTQFPYAYHFDASLLADFLCRYAVGRGVHRIIDDVVDVRLDERGWIDRLVTREHADLTADLYVDCSGFRSRLLGDALGEPFVSFQDSLPNDRAVALRVPVDTAVRGIRPCTTATAQDAGWIWTIPLYDRIGTGYVYAADYCEPEEAERVLRDFVGPAAADLEANHIRMRIGRSHRAWVNNCVGIGLSAGFVEPLQSTGIFLIQHAIEQLVRYFPGTDRDPVLRDTYNLSTARAIEGVREFLILHYRGAARADNDYWRDAKKRPVPEDMAVRMEQWQSKLPDNDTTYPYYHAFEPYSYVCMALGLGGIPLRHPPALDLFDTRAARAELTRVREQARKLVDTLPSQVEYLSGLR

SEQ ID NO: 85051 - protein, 492 aa, Streptomyces sp.
  misc_feature (1)..(492): tr|A0A429FDX4|A0A429FDX4_9ACTN Tryptophan halogenase OS =Streptomyces sp. WAC 04229 OX=2203206 GN=DMH12_09985 P E=4 SV=1
MSVEEFDVVVAGGGPGGSTVATLVAMQGHRVLLLEKENFPRYQIGESLLPATVHGVCRMLGVSDELAAAGFPVKRGGTFRWGARPEPWTFHFGLSARMAGSTSYAYQVERARFDEILLNNAKRRSVVVREGCAVTDVVEDGDRVTGLRYTGPDGSERQVTARFVVDASGNKSRLYANVGGARNYSEFFRSLALFGYFEGGKRLPEPVSGNILSVAFDSGWFWYIPLSPTLTSVGAVVRREDADKVQGDREKAFNSLIAECPMISEYLSDATRVTTGTYGELRIRKDYSYQQTHFWRPGMILVGDAACFVDPVFSSGVHLATYSGLLAARSINSVLAGELDEKTVLTEFEARYRREYQVFYEFLMSFYQMNVNEDSYFWQAKKVTNSQTTTDIESFVELIGGVSSGETALTTADRIAERSAEFAAAVDQMAGGDQENMVPMFKSQVVRQAMQEAGQVQMKALLGADAEPELPLFPGGLVTSPDGMTWQPHRPA

SEQ ID NO: 85052 - protein, 506 aa, Xanthomonas arboricola
  misc_feature (1)..(506): tr|A0A2S6ZNR1|A0A2S6ZNR1_9XANT Tryptophan halogenase OS =Xanthomonas arboricola pv. arracaciae OX=487851 GN=Xar aCFBP7407_16470 PE=4 SV=1
MIPAPLRNIVIVGGGTAGWMAAAAFARVLGPGFKVQLIESEQLGTVGVGEATVPHIKAFNNLLGIDEAEFVRQTQGSFKLGIEFVDWQRPGTSYIHGFGTQIGHPLGLLPFHQYWIKQHARGKAQPLGAYTLNTVAAVRGKFMTSAGDVPANSPLANIAYAYHFDATQYARFLRTYAEQRGVTRIEGLVEQVQLHADSGHVQSLQLASGQVVSGDLFIDCSGFRGLLIEEALHTGYHDFTHWLPCDRALAVPSENVGPPTPYTRSTARAAGWQWRIPLQHRTGNGYVYSSAHISDDEAAATLLANLEGKPLADPRPLRFTTGRRKQFWNRNVVALGLASGFLEPLESTSIHLIQAGISRLLELFPREGISPVLVQRYNDRLAFEFDRIRDFLVLHYHATERDDSAFWRHCRTMPITPELQTTLDLFRDSGRFYRNAEEMFAEISWVQVMVGQGILPRGYHPLVDQVPDHDAERFLASVAQTIGHCVDVMPTHQQFIDRYCKAAAPR

SEQ ID NO: 85053 - protein, 501 aa, Sphingomonas sp.
  misc_feature (1)..(501): tr|A0A1G5TFZ8|A0A1G5TFZ8_9SPHN Tryptophan halogenase OS =Sphingomonas sp. NFR15 OX=1566282 GN=SAMN03159340_0118 6 PE=4 SV=1
MTDPIRIVVAGGGTAGWMAAATFARFLEVGFEIDLVESEEIGAVGVGEATIPQIRLFNDALGLDEDAFLRATQGTYKLGIEFVDWLRPGHRYMHAFGAVGRDVGLLPFHQYWLRARGLGAAGELTAYSLNNQAALAERMQRGPARTARLLPDMPSAFHFDAALYARHLRRYSEARGVNRVEGKIVRVEQDTTGDVSRLVLEDGTALGADLYIDCTGFHGLLIEQTLKTGYDDWSHWLPCDRAIAVPSARGGALTPYTRATAKAAGWQWRIPLQHRTGNGIVYSSAHLSEDEATATLLAGLDEEAIAEPRPIPFRTGKRRKMWNRNVVAIGLAAGFMEPLESTSIHLIQSAISRLMKLLPARSIAEADRAEFNRQSDFEYERVRDLIILHYHANDRSEPFWRACREMELPETLAAKIALWRGNGHITREHEELFTEVGWLQVLVGQGVMPAGHHPLADAVPAADLAEFMDTIDKLNAREVAQMPSHADFIAGHCAAPLPVAA

SEQ ID NO: 85054 - protein, 509 aa, Sphingomonas sp.
  misc_feature (1)..(509): tr|A0A2A2SEC6|A0A2A2SEC6_9SPHN Tryptophan halogenase OS =Sphingomonas sp. 1PNM-20 OX=1141887 GN=CKY28_08165 PE= 4 SV=1
MTDRIERVVILGGGTAGWMTTTALAKSFGRRLRVTLLESDEIGTVGVGEATIPTIHWFNELIGLDEAEFFRATKASFKLGIEFVDWARPGHRYFHPFGHYGVQLPGVSFHHRWLKARADGLDLPLSAFSLATRLADENRFAKPQGDARSILSTLGYAYHFDAGLYARHLRTLAEADGVRRVEGKLRDVERHPETGHIAALTTERGERLEGDLFIDCSGFRALLIEGVMSAGYDEWSHWLPCDRAVAMPCARVAETTPYTRSTARAAGWQWRIPLQHRTGNGYVYASPFISDDEAAAALLAELDGEALAEPRFLRFTAGRRKRGWIGNVVAIGLSSGFLEPLESTSIHLIQSGIAKLLTLFPDRDMDPGLARRFDRVFGADMDDIKDFLILHYHATSGKSDALWTHCRHMAIPDTLAEKMAQYRRSGRLMIGTDDLFRDASWLAVLNGQGVEAEDYNPLADTLDPATNRAQLEQIAAVVARAAPTLPKHDEVVAQIIGGGAGTPARATAR

SEQ ID NO: 85055 - protein, 498 aa, Alteromonas sp.
  misc_feature (1)..(498): tr|A0A1J0RT14|A0A1J0RT14_9ALTE Tryptophan halogenase OS =Alteromonas sp. Mex14 OX=1917157 GN=BM527_09305 PE=4 S V=1
MNRPMNIVIAGGGTAGWMAANYFAHKWPSDKVKVTLVESPDIGIIGVGEGSTPTLKRFFEELKIKESDWMPKCNATYKVSIQFNDWSPSSGVKQYRHPFISQTDTFTQRAFEVNCRTRRLGLDTHVKPEDFLINGVLAKQNKAPLTPENFPFRMEYGYHFDSALLGNYLRNVAVGKGVNHVSGIISDVALHPSGDISHLVTDKGNIEGDFFVDCTGFSSNLLQQALGVTFHSYSENLFNDSAVVLPTQAQENIQVETQSTALSSGWCWTIPLQNRTGNGYVYSAAHLSKDKAEEELRRHLGLENSDVEARHLKMKVGQVEQHWQKNCLALGLSQGFIEPLEATALHLVQICIEYFSDMFEKGGFSNSEKTAYNAFAKERFDRVRDYIVAHYKLNTRDDSDYWRANRNNMVLSDSLKSIINTWFQREDLANEIKRQNIGIHWDSVSWHCLFAGYGAFPTLAQNQPGRGDLYKEQDIERFVQGCALNFKQHDVVLKTHQS

SEQ ID NO: 85056 - protein, 503 aa, Brevundimonas sp.
  misc_feature (1)..(503): tr|B4WB60|B4WB60_9CAUL Tryptophan halogenase superfamil y OS=Brevundimonas sp. BAL3 OX=391600 GN=BBAL3_3001 PE= 4 SV=1
MGADVRQLKTILIVGGGSAGWMAAALFSKLFKGLYDITLIESEAIGTIGVGEATIPAIKTFNELIGLDENDFMRRTQASFKLGIQFVDWDRVGSSYIHGFGVIGRDLKWLRCHQYWLKMRAEGKVSDLAAYSINTAAALQNRFMRADPKRPGSPLGHIAHAFHFDAGLYAKYLRGMSEAAGVRRREGKVVSVQLRPEDGFVDSVTLEDGAVVSADLFIDCSGFRGLIIEQAMKTGYEDWSHWLPCDRAMAVPCARTEPFTPYTRSTARPAGWQWRIPLQHRTGNGHVYSSRHMDDGEAEQILLSNLDGAQMAEPNRIRFVAGKRRQIWNRNCVAAGLASGFLEPLESTSLHLIQSVLIRLVRLMPDAGFDPATIAEFNRQTDFEYERIRDFIILHYKATERDDTPFWRYCRDMDVPVTLERKIDLFRANGRIFREDDELFAEESWIQVLLGQGIIPVGYDPLVDVTPEPDIERYLADVETVIGKCVALMPSHADYVAKACPAA

SEQ ID NO: 85057 - protein, 496 aa, Aliikangiella marina
  misc_feature (1)..(496): tr|A0A545T186|A0A545T186_9GAMM Tryptophan 7-halogenase OS=Aliikangiella marina OX=1712262 GN=FLL45_21875 PE=4 SV=1
MSNNRIQKVVIVGGGSAGWMAGAALAKLLGKNLDISLIESEEIGRIGVGEATIPPLRVFNQLLGINEQDFMRSCQATFKLGIEFQNWGERGDSYIHSFGATGKVCWAGEFQHFWLGGLERNIQNEFGDYCLELKAAKAGKFGFNKDIQLNYAYHIDAGLYAAYLKRFAMTNGLKWIEGRITQVHQNTENGYIESVELSNGQKIAGDFFIDCSGFAAKLIEETLEAGFESYQSYLPCDSAVPVQTVKHGDPKPYTQAIAHDFGWQWRIPLQHRVGNGLVYCSEFASDETAQETIMSNLESEAITDPVVLKYKTGTRKKGWVKNCVAIGLSSGFLEPVESTAIHLIMSAVLRLMRLFPHNEISQSNVDEYNRQYIEEMERIRDFIILHYKATEREDSSFWQYCKHMTVPETLAHRMRLFKDTGRVCITDTELFKIDSWTQVMLGQRVRPDNYHQIVDMMPDGELDRFLMILRNQVDSQLTNMPTHQQFIDHYCKANPI

SEQ ID NO: 85058 - protein, 504 aa, Sphingomonas sp.
  misc_feature (1)..(504): tr|A0A2A2SC23|A0A2A2SC23_9SPHN Tryptophan halogenase OS =Sphingomonas sp. 1PNM-20 OX=1141887 GN=CKY28_16620 PE= 4 SV=1
MTDTGAQRVVIVGGGTSGWMAAAALAKLLPRRCSVHLIESEAIGIVGVGEATLPHIRAFNDRLGIAESDFMSWTRATFKLGIEFRNWGRIGDSYVHPFGTFGRGQGEVDFHHYWTRLRLQGLNPPPLERFSMACTMAREGRFTRPTTEPGRITTTFGYAYQFDAVLFAPYLRQLAESLGATRTEGKVVDVELNGETGHIRAIKLESGERIEGDLFVDCSGFRSLLLGEALGEPFQDWSRWLPADRAAAMPCRTETAVTPYTSAIAMPAGWRWRIPLQHRTGNGYVYSSAFVSDDEAASALAGAVEGDAIAQPRTLRFRAGRRERSWVGNCVAIGLASGFLEPLESTSIYLVQQAITALLELFPERGIAPSDRDEFNRIIDLEYDRIRDFLILHYHATERDDSEFWNYVRTMPVPDSLAEKMELFRRRGRIVKYREGVFLDASWVAVYLGQRVRPLGYDPRADLPPADALLRGMGELEAEVAAAAEAMPNHLDFIRGYCPMAAAA

SEQ ID NO: 85059 - protein, 510 aa, Sphingomonas sp.
  misc_feature (1)..(510): tr|A0A2A2SC41|A0A2A2SC41_9SPHN Tryptophan halogenase OS =Sphingomonas sp. 1PNM-20 OX=1141887 GN=CKY28_16605 PE= 4 SV=1
MRADAIRRVVIVGGGTAGWMAAAGIARVAGELPGLEIELVESDEIGTVGVGEATIPQIALFNAMLGIDEADFVRATNATYKLGIEFRDWTRLGHSYVHPFGFYGLDMKGVQFHHHWLKGRTLGDPTPLDAYSLAVVAGLRERFAHPRPDQPNSPLSKIGYAFQFDAGLYARYLRRLAEGWGVRRTEGRVVDVTRDGETGHVSAIVLQSGARVAGDLFVDCSGFRGLLIEGVMGAGFEDWSAWLPCDRALAVPCESGGDRRPLTRSTARPAGWQWRIPLQHRIGNGYVYSSAHVSDDEAAATLLANLDGAPLAEPKPLRFKAGHRRRAWIGNVVALGLAGGFLEPLESTSIHLVQSGIARLMTLFPARGFDQLEIDRFNAETVEEYVDIRDFLVLHYKATERDDSDFWNYCRTLAPPEGLAYKLAMFRRNGRIFREHDELFTETSWLSVMVGQGVEATGYHPVADLLSDEETLRRLHHIRDVVGQTADAMPTQDEYLRRIGCDLTPLRRAS

SEQ ID NO: 85060 - protein, 509 aa, Sphingomonas sp.
  misc_feature (1)..(509): tr|A0A0A6D375|A0A0A6D375_9SPHN Tryptophan halogenase OS =Sphingomonas sp. Ant20 OX=104605 GN=NI18_01520 PE=4 SV =1
MAEQSDISSICIVGGGTAGWMAAAALAAKLAGLPIAITLVESDEIGTVGVGEATLPHIRAFNLALGIDEAEMMRATEATYKLGIEFCDWGRRGDRYIHPFGDFGPTTNDVPFYQYWLKLRQSGDRSRIDEYSYPVIAAEQGRFRRPSGDLDAVESTFGYAYQFDAGLYARFLRGFAEKRGVSRTEGRVVRVVQDGETGFVRDVVLTNGTTLSADLFIDCSGFRGLLIETALQSGYDDWSAWLPCNRAIAVPTQSNGALRPFTRATARTAGWQWRIPLQHRVGNGHVYCSSFISDDEAHDQLVAGLDAPMQAEPRRLSFTTGRRREFWKKNVVAIGLAGGFLEPLESTSINLIQDGITELLAVFPDKGFAARDIAEYNRRIGLHYERIRDFLLLHYVATQRDDSEMWRHFRNLRLPDSLSERIDAWRTRGHLIQYEFGLFLSPSWVAVFLGQNLVPDRHDPRVESMSVDALTARAMDVRARVDAAVRRTPEHTAFIRESGGAARLAVAGA

SEQ ID NO: 85061 - protein, 509 aa, Brevundimonas sp.
  misc_feature (1)..(509): tr|B4WBL8|B4WBL8_9CAUL Tryptophan halogenase superfamil y OS=Brevundimonas sp. BAL3 OX=391600 GN=BBAL3_2452 PE= 1 SV=1
MDEIDDPRIRSVVIVGGGTAGWMTAAALVQHFRTAPLKITVVESSDIGTIGVGEATIPTIRRFYGQLGLRDDDVMRATQATCKLGIRFLDWSGPGSDFIHPFGLYGQDVKGIGFHHYWLKQRRAGDAAPLAAYSLGAALAAGGKFTLPSPHPPSQLSVFDWALHLDAGLFAQHLRAYAEAGGCARIDARIRSVELRPEDGFVRALTLDDGREVEGDLFVDCSGFKGLVIGEALGVGFEDWGRWLPCDAAYAVQSENRPGDAPAPFTRVTARSAGWQWGIPLRHRAGNGLVFSSAHLSDDQALAELMPHLLGDPLTEPRRIPFRPGRRSQAWAKNCVAIGLSSGFLEPLESTSIALIETGIERLKALFPDRRFAQPILDEFNDQTAREMERVRDFIILHYKLNRRTDTDFWRDCREMPVPETLERKIALWTARGQFVRYRWEMFHPASWLAIYDGFGLYPDHHDPAVDAMDPAYLARSLAEMRANIADLVARTPEHAQFLAGLDPAASAA

SEQ ID NO: 85062 - protein, 500 aa, Devosia geojensis
  misc_feature (1)..(500): tr|A0A0F5FU18|A0A0F5FU18_9RHIZ Uncharacterized protein (Fragment) OS=Devosia geojensis OX=443610 GN=VE25_08005 PE=4 SV=1
TAGWIAAFILQDSARAKKLDAKFTVIESSKVPTVGVGEATTAAFRVLLKYFGIDEFEFFRKTEASFKLGIRHQDWRRKGYTYYGPIDDPHQVVARPPGAPSDYLNVYSVAAGRPVQEMHLFQPLLEQHKAPYARKADGSLIPLGPFHHAFHFDQALVGRFFASKSKDVEIVDALVSGIERDPVTGDISALVLDTGEKLKADFFVDATGFRKQIIVKELNAPWISYAHELPVNRALPFWLPIEEGEEIANYTRAWAQEAGWMWMIPTQTRYGCGYVYSDEFRTPEEAKREIEGVLGREIEVRSDIRFSIGRLETPWMHNCLAVGLSSSFLEPLESTSIHGTIVQMMLFARLFLKAPGEMTDGDRADYNRRVGRQVDDFRTFVNTHYMTERDDTPFWREVRANRIHPETKERLARWRKEMPRREHFPDYLEGLPHIETQLYYPVLNGLGLLDREVARREMERDPKLRRFAQETVDSLVREYRAAANQALGHAEFLKIVREMG

SEQ ID NO: 85063 - protein, 496 aa, Sphingomonas sp.
  misc_feature (1)..(496): tr|A0A0A6D3C4|A0A0A6D3C4_9SPHN Tryptophan halogenase OS =Sphingomonas sp. Ant20 OX=104605 GN=NI18_00770 PE=4 SV =1
MVIVGGGTAGWMAAAALARLIPTGASITLIESDAIGTVGVGEATIPPIRGFNAMLGIDEPEFLAATAGSFKLGIEFVDWGALGERYLHPFGGFGFDIEGVRFHQYWRRRRAAGVVEDIEAYSLCAVAARAGRFVPPSPDPASVLSQMAHAYHFDAGLYARFLRGRAERDGVVRVEGDVVNVALDGETGHVRHVTLAGDRVIEGDLFLDCSGFRGLLIEQTLGAGYEDWTHWLPCDRAVAMPTANAGAAITPYTRSTARAAGWQWRIPLQHRTGNGYVYSSAHCSDDEAAATLHAGVDGTPLAEPRLLRFTAGRRRKQWIGNVVALGLASGFTEPLESTSIHMVQTGISKLLALFPDQGFSPVEIDTYNRLAATQFDQVRDFLILHYHATRRDDSPFWRETRARAIPDSLSEKLALWRRRGRLFRWEDDLFAEASWVAVLLGQGIVPDGWDRLADAVDAREVDARFDRLRAMFADAASRMPRHEDYLARTCPARVRA

SEQ ID NO: 85064 - protein, 497 aa, Frankia sp.
  misc_feature (1)..(497): tr|A0A1X1MHB6|A0A1X1MHB6_9ACTN Tryptophan halogenase OS =Frankia sp. KB5 OX=683318 GN=KBI5_23180 PE=4 SV=1
  misc_feature (472)..(472): Xaa can be any naturally occurring amino acid
MAVTDSAEFDVVVVGGGPAGSTLAALVAMQGHRVLVLEKEHFPRYQIGESLLPSTIHGVCRLTGAADELAKAGFPLKRGGTFRWGATPEPWTFAFSVSSRMAGPTSFAYQVERSKFDEILLRNARRVGAEVHEGCSATDVIEDGDRVVGIRYTDDGGNRREARASFVVDATGNKSRIYHRVGGTRQYSEFFRSLALFGYFEGGRRMPEPNRNNILCVAFDSGWFWYIPLSDTLTSVGAVVRSEMAEKVQGDSEQAMKALIEECPMISDYLAPARRVTTGQYGQLRVRKDYSYHQTTFWRPGMVLVGDAACFVDPVFSSGVHLATYSALLAARSINSVLAEIVDEKTAMQEFEARYRREYGVFYEFLVSFYEMHHSEDSYFWQAKKVTGNSQPELEAFVELIGGVSSGESALTDADALALRLQANTADFTTAVDALVANNSESMVPFMKSQVIRGVMHEGSQMQMRALLGEDXEPETPLFPGGLVSSADGMFWLPTDA

SEQ ID NO: 85065 - protein, 258 aa, Actinoplanes sp.
  misc_feature (1)..(258): tr|A0A428VXK0|A0A428VXK0_9ACTN Tryptophan halogenase (F ragment) OS=Actinoplanes sp. ATCC 53533 OX=1288362 GN=D MB66_60470 PE=4 SV=1
HGVCRMLGVTEELAEAGFPTKRGGTFRWGARPEPWTFSFAVSSRMTGPTSFAYQVERARFDEILLRNAQRKGVEVREGCSVAGVIEGDERVAGLRYTDSDGGEHEVRARFVVDASGNKSRLYSSVGGTRNYSEFFRSLALFGYFENGKRLPAPNSGNILSVAFDSGWFWYIPLSDTMTSVGAVVRREMAEKIQGDREKALQALIAECPLISEYLQDARRITTGRYGELRVRKDYSYLQTSFWRPGMILVGDAACFVDP

SEQ ID NO: 85066 - protein, 520 aa, Gammaproteobacteria bacterium
  misc_feature (1)..(520): tr|A0A1Z9AS02|A0A1Z9AS02_9GAMM Tryptophan halogenase OS =Gammaproteobacteria bacterium TMED95 OX=1986771 GN=CBC 55_01630 PE=4 SV=1
MTRPIKRIVIVGGGSAGWLTAGVIAATYTSGESEEGLRVTLIESPDISTIGVGEGTWPSMRKTLARIGISETDFLTRCDASFKQGTEFFDWQPGDGTAYTHPFSPPQGFDQFNPASTFLALPEQPRFDQTVCAQTTLFEQQQAPKQLTAPEYVGASNYGYHLDAGKFAELLQEHCVTHLQVEHVTANVCAITSASNGDIAALETDRTEPIEGDLFIDCSGTRGLLINEHYQIDFKPLDHFLFNNRAVATQVPYLDEQDPIASCTLATAQDAGWIWDIGLTSRRGVGYVFSSQHQSNDQAIDKLYQYIEKSLPTEAARRLTTRVIDFAPGHRRTFWHQNCVALGMAAGFIEPLEASALVLVELGAAMIADELPPDRLAMDRVSRRYNDRFSYRWARIIDFLKLHYILSKRPEPYWRDHSCEGSIPQTLVEQLDTWNYRSPWHNDQFHADEMFPSASYQYVLYGMGFRPNQTERPTRERDQQDKLGVQFFYKAAQEGKRLRQAMPSNRDLLTKIKAHGLKRI

SEQ ID NO: 85067 - protein, 415 aa, Burkholderia multivorans
  misc_feature (1)..(415): tr|B9BF47|B9BF47_9BURK Tryptophan halogenase OS=Burkhol deria multivorans CGD1 OX=513051 GN=BURMUCGD1_4592 PE=4 SV=1
MNEKKSNSVDVAIIGAGPSGAVAAALLRKCGRSVLVLERQHFPRFSIGESLLPQSMCYLEEAGMLQAVVEAGFQFKNGAYFVHRDRTSSFDFREKFSDGWGTAYQVERATFDDLLIRCAASQGADVRFGHTVRAFQAGDMPRLDVVDEAGSEYAVEASFVLDASGFGRVLPRLLGLEAPTGLPTRAAVFSHVQDSLPAGSTDRDKICIAVHPERRDVWFWMIPLTNGRSSVGCVADAAFLDVPEAQQESLLRELLQSEPTLARLVGSKPFVMPVRRIAGYASNVASLHGHGYALLGNAGEFLDPIFSSGVTIAMRSAHLAVAALERQLRGETVDWARDYDLALRKGIDTFRAFVERWYSGVLQDIVFHEDKASDVKRMVCSILAGYAWDEANPFVREPARGLDLLAEICRSNAAR

SEQ ID NO: 85068 - protein, 494 aa, Sphingomonas sp.
  misc_feature (1)..(494): tr|A0A1G5TJT0|A0A1G5TJT0_9SPHN Tryptophan halogenase OS =Sphingomonas sp. NFR15 OX=1566282 GN=SAMN03159340_0137 1 PE=4 SV=1
MNHAQTIRRVVIAGGGTAGWVAAAALSKHLGALLDIVLVESDEIGTVGVGEATIPTIRTFHRFLELDERDFMRATQATFKLGIAFENWARRGDRYVHGFGRVGQSIWMGDFQHMWLRGREAGIADDLGAYCLELAAAEAGKFATSDTGRINYAYHFDASLYAGFLRRFSEARGVTRLEGRIGGVRRNADTGDIEALYLADGREVAGDLFVDCTGFRGMLIEQTLKAGYEDWSHWLPTNRALAVQTTSVAPAVPYTRAIAHDAGWQWQIPLQHRVGNGLVYCSEYLSDDAAETTLRAQIQGEPITEPRLIRFVTGRRKRVWDHNCVALGLASGFVEPLESTSIHLIMIGVTRLIQSFPFGGIKPSLVKHYNDLAQAELERVRDFIILHYHLNQRGDDPFWERCRTMAIPDTLAQRIALFRESAMTPQTADDLFQADSWLQVMLGQRLEPTGYHRMGHMLSVEHLRRAFADVRDGIAGTVARMPTHHEFLEQYCAA

SEQ ID NO: 85069 - protein, 501 aa, Alteromonas sp.
  misc_feature (1)..(501): tr|A0A1J0RYQ5|A0A1J0RYQ5_9ALTE Tryptophan halogenase OS =Alteromonas sp. Mex14 OX=1917157 GN=BM527_18870 PE=4 S V=1
MTVSGLDSSKNQTPVKNVVIAGGGTAGWMAATALSRLLGKSINVTLVESKDIGIVGVGEATIPPIRTFHKLLGIEEKAFMRATQATFKLGIEFENWREQGHSYIHSFGITGRECWAGEFHHFWLRAKEYGFGGEFGDYCPELIAAKQSKFATSEAMPLNFAYHFDAVAYGRFLKFLACDAGVTHKEGDIEEVVVCPQSGNIQFLRLASDEVIDGDFFIDCTGFKGLLIEKALHTGYDDWRHYLFCDSAVAMQTELTAPPVPYTKSVAHKAGWRWQIPLQERMGNGLVFCSRFMSDEDAINTLKSQVTGAPINEPRVIRFTPGKRRRGWNKNCVALGLSSGFIEPLESTSIHLIMTGLIRLMRLFPFDGITQSAIDEYNNKFDSEMSAILDFIVMHYKVTQREDSPFWQQCQRMDIPFSLKHKLDLFAESGRVFLDDGDIFRVDSWTQVLMGQGMTPSQYHRVADEMSEQSLKQFMAGLKQQVDNHVAKLPSHAAFLTKYLG

SEQ ID NO: 85070 - protein, 483 aa, Aliikangiella marina
  misc_feature (1)..(483): tr|A0A545TAA1|A0A545TAA1_9GAMM Tryptophan 7-halogenase OS=Aliikangiella marina OX=1712262 GN=FLL45_13980 PE=4 SV=1
MTALYLNHRWKNKNIKVSLIESADIGIIGVGEGSTPSLKNFFDDIEIKESEWMPQCQATYKVGIRFDNWSTQPGFESYRHPFPSQVDKFSSDLFAKQLHIRRHGIDVEVHPDKFFIQSQLAMEKKGPIAPYHFPLENAYGYHFDSGLLGQYLAEIARLRGIGHIQAKVTDALLNNNGMISTLVTEENTQINADFFIDCTGFVGFLIQKKLQIPFISFSDNLFNDSAVVIPTPANKTINSETVSTALQHGWAWDIPLQHRTGNGYVYSSAYCDQTSAETELRKKLNLLDSDIGARHLKMKVGRVSQHWSKNCLAIGLSQGFIEPLEATALHLVQATILEFIIQFEKGNFTNQFQSQFNDTINNRFEGVRDYIVAHYRLNTRTDTQYWLDNANNPKISESLTRILQSWTGALGHDIEPEIIQQNIAGYFPVDSWRILLAGYGFFPALDHNHPQQGNIDHTEIENHQAFLKRCGVNFKTQNALLIN

SEQ ID NO: 85071 - protein, 196 aa, Xanthomonas oryzae
  misc_feature (1)..(196): tr|G7TJG6|G7TJG6_XANOB Tryptophan halogenase OS=Xanthom onas oryzae pv. oryzicola (strain BLS256) OX=383407 GN= XOC_4108 PE=4 SV=1
MWEKNCVALGLASGFLEQLESTNIHLIQRGIIGLLQTFPQVINAVDIAEYNRQAAQEITHIRDFVILHYHATDRRDTPFWRDCAAMDIPDSLRHRVERFRQSGRVFHQANGPFAENAWVQVMLGQGIVPQQHHPVADLMGDAELSRFLDTIRARVEAALVRLPAHADFLQRYCPAPPPPEPAARLPAPPVMATPAR

SEQ ID NO: 85072 - protein, 505 aa, Xanthomonas oryzae
  misc_feature (1)..(505): tr|G7TI74|G7TI74_XANOB Tryptophan halogenase OS=Xanthom onas oryzae pv. oryzicola (strain BLS256) OX=383407 GN= XOC_1412 PE=4 SV=1
MIQAQIRKVVIAGGGTAGWIAACALSHQFRGLLDITLVESEQIVTVGVGESTVPPIRTFHRFLQIDEQEFLRAVAGTFKLSISFEHWRAQGERYIHPFGITGQSTLVCAFHHLWLESQRRGMPGSFGDYCLETVASRVDRFALHGEPAVNYAYHLDAALYATFLRARSEACGVKRIEGKIQQVTVQPHSGDVASVVLEDGHVIEGDLFIDCSGFRGLLIEQTLHTGYEDWSHWLPCDRAVAVQTEAVGPPVPYTRAIAHEAGWRWHIPLQHRVGNGLVFSSKHLSDDQAHAKLLHDVAAPAVKDPWMVPFRTGRRRKAWNKNVVSLGLASGFIEPLESTSIHLTISAVVRLLALFPGEGIAPSQVQLFNDVSRAEMEHVRDFVILHYHATQRNEPLWQQCRAMELPESLALRLRAWRERAHAWQGADELFRVDSWTHVLMGQGIEPEQHHPLTRAFSDHDLRRLLDGIAQPIQHAVQQMPSQHAFIERYCKAGAQVCGMRSPVPA

SEQ ID NO: 85073 - protein, 528 aa, Shewanella sp.
  misc_feature (1)..(528): tr|A0A4Y5YGZ9|A0A4Y5YGZ9_9GAMM Tryptophan 7-halogenase OS=Shewanella sp. SM1901 OX=2588449 GN=FH971_13105 PE=4 SV=1
MQKPITQIVIVGGGTAGWITAGLLAAEHNVDKGVLAHDPKLTITLIESPDVATIGVGEGTWPSMRSTLSKIGIDENEFIRRCDASFKQGSRFIHWRHDSVNNNAQTQSDSYLHPFSLPHGHQELDLCPFWLSHADQVSFAEAVSSQEVLTQMGLAPKAISSPQYHFQNNYGYHLNAGKFSQLLSEHCTQKLGVKHIRDHVCQIVNNDQGDIDKLMTKEHGEISGQLFIDCTGAKSLLLGEHLEVPFLCQKSVLFNDNALAVQVPYEQADSPIASCTHSTAQRNGWIWDIGLPTRKGVGYVYSSSHTNDGDAEQTLLNYLGVNGVAADKLQPRKLSFNPGYRAKCWQNNCIAIGMAAGFIEPLEASALALIEWTASTLAQQLPPNRQVMDTISARVNQRYQLHWQQIIDFLKLHYVISQREVDGYWRDHRDNQSIPDSLQAQLELWRYQVPSQQDISYKEALFPAASFQYVLYGMGFNTQLPTHVKPSMQQLAQRLFNDNQQRTKALSNNLLSNRALLEKVAQYGFSKL

SEQ ID NO: 85074 - protein, 516 aa, Sphingopyxis sp.
  misc_feature (1)..(516): tr|A0A1L3JEQ1|A0A1L3JEQ1_9SPHN Tryptophan halogenase OS =Sphingopyxis sp. LPB0140 OX=1913578 GN=LPB140_05345 PE =4 SV=1
MIKNDSSFIGSAIKDIVIVGGGTAGWMAAAAFSRFLDNGNRNITLVESEEIGTVGVGEATIPAIINFNKMLEISENDFLRATQGTFKLGIEFVNWGQVGDSYFHPFGNYGQDLHGINFHQLYLREHALGDKRSISQYCMSAMAAQNGRFGRASANARSPVSEIFYAYHFDASLYAKMLREYAENNKVNRQEGRVVDVVRHAENGFVESVILDDGRKISGDLFIDCSGFRALLIGDALGEEYEDWSKWLPVDRAFAVPTTNIMSPVPFTRSTAHEAGWQWRIPLQHRTGNGHVYSSKFIPDDVAQQILMSNLEGEPLAAPKQLRFTTGRRKNSWSHNVVALGLSGGFLEPLESTSIHLIQNGIARLFALFPDKGFNPIEREEYNKGMSELYEDIRDFIILHYHATQREDSEFWRYVKNMSIPTSLERKMDLFKSRGRVFRENAELFGLPSWVAVMLGQNIWPYGWDTLADALDEGRVRDAMRQMRDVYAATAQALPTHEEFIKMSGAWAADDERMLK

SEQ ID NO: 85075 - protein, 504 aa, Sphingomonas sp.
  misc_feature (1)..(504): tr|A0A4Q6Y9L3|A0A4Q6Y9L3_9SPHN Tryptophan 7-halogenase OS=Sphingomonas sp. 3-7 OX=2484750 GN=EWE75_00090 PE=4 SV=1
MTAPAGPITSILIVGGGTAGWMTAAALARALPRHCAITLVESEEIGTVGVGEATIPPIRLFNQTLGIDEAEFLRETGGTFKLGIELVDWGRVGHRYFHPFGTHGKPFDLVAVHQHWLAARADGCGIAFDDLAMAWGAAQRGRFAMPMTDPRHVGSTFDYAYHFDAGRYAAFLRRYAEQRGVTRVEGKAVDVARDGETGLLSTVTLADGRTLAADLFVDCSGFRGLLIEGALAAGYETWTQWLPCDRAVAVPCASVGPPAPYTRSTADAAGWRWRIPLQHRTGNGYVYRSSDVSDDEAAATLLAKLDGEPLAEPRFLRFTTGRRRSFWTGNVVAIGLSSGFMEPLESTSIHLIQTGIAKLIALFPDRGFDPALIAEYNRIATTEFERIRDFLILHYKLTERRDTPLWRECAAMAVPETLQFKIDHFRRSGRHVPRELDLFGEASWTAVHLGQSNLPEGRDPLLGYAQDAAASRVFVERLAGAIQTAAESMPAHDQYIAHVLSRQH

SEQ ID NO: 85076 - protein, 527 aa, Shewanella sp.
  misc_feature (1)..(527): tr|A0A4Y5YE55|A0A4Y5YE55_9GAMM Tryptophan 7-halogenase OS=Shewanella sp. SM1901 OX=2588449 GN=FH971_08810 PE=4 SV=1
MNQNNIKNIVIVGGGTSGWMTAAMLIKLFKSQLNITLIESDAIGTIGVGEATIPPLQIFNSVLGISESDFIKATQATYKLGIEFENWYQQGDAYMHAFGNIGRDLGFTAFHHYWLSSRANNVKTNGSETNSPHAKYPEINRSQVEGSQYNPNDFWQYSLNYQAAKHNKFQPIQTISQAQMSGITHAYHFDANLYANLLHQYSDQRGVTRVEGTIASTELTIDGNIETVTLQNGQSIRGDLFIDCSGFSAILIGQALGVDYENWQHWLPCDSAYAVPCESVSPIIPYTKAIAHDTGWQWRIPLQHRTGNGIVYSSQFMTDEQAKQLLLTNLDGKSLAEPRKINFQTGRRTKQWHKNCVAIGLSSGFLEPLESTSLHLVQSAIIRLTKLFPQNGITLQHIDEFNRQSQTEFEQIRDFIILHYHLNAKQSADGEHGLWQQCRDMDIPESLQRRIDLFKSTATVFRHQDELFTEAAWVQVMLGQGITPTDFHPLTQAVRQIDLNDYLANIRKVIASTVDQMSSHEDYIAAL

SEQ ID NO: 85077 - protein, 509 aa, Xanthomonas oryzae
  misc_feature (1)..(509): tr|G7TC86|G7TC86_XANOB Tryptophan halogenase OS=Xanthom onas oryzae pv. oryzicola (strain BLS256) OX=383407 GN= XOC_4642 PE=4 SV=1
MIPAPLRNIVIVGGGTAGWMAAAAFARVLGPTFTVQLIESEQLGTVGVGEATVPHIKAFNNLLGIDEAEFVRQTQGSFKLGIEFVDWQRPGTAYMHGFGTQIGHPLGLLPFHQYWIKQHARGKAQPLGAYTLNTVAAARGKFMTSAGDVPANSPLANIAYAYHFDATQYAHFLRRYSQQRGVTRIEGLVEQVQLHPESGHVQSLQLASGQTVHGDVFIDCSGFRGLLIEEALHTGYHDFTHWLPCDRALAVPCEKVGPPTPYTRSTARAAGWQWRIPLQHRTGNGYVYCSAHISDDEAAATLLANLDGKPLADPRPLRFITGRRKQFWNRNVVALGLASGFLEPLESTSIHLIQSGISKLLELFPREGISPVLVQRYNDRSAFEFDRIRDFLLLHYHATEREDSAFWRHCRSMPITPELQTTLDLFRDSGRFYRNAEEMFAEISWVQVMVGQGILPQGYHPLVDQVPDRDAEGFLASVAQTIAHCVDVMPPHQQFIDRYCKAAALPCGG

SEQ ID NO: 85078 - protein, 513 aa, Streptomyces antibioticus
  misc_feature (1)..(513): tr|A0A0L8NA31|A0A0L8NA31_STRAT Tryptophan halogenase OS =Streptomyces antibioticus OX=1890 GN=ADK77_39775 PE=4 SV=1
MIKSVVIVGGGTAGWMSATYLKAAFGDRIDVTLVESDRVSSIGVGEATFSTVRHFFDYLGLDEREWMPHCAASYKLAIRFENWREVGDHFYHPFERLRMSDGFTLADWWLHEGDRSLRFDQACFVTPALCEAQRSPRMLDGSLFAQGLDESLGRSTLDEQRAQFPYAYHFDAGLLARFLAKYGTDRGVRHVVDDVVEVRTDERGWLTEVMTKQNGALAGDLFIDCTGFRGLLINQTLEEKFVSFQDVLPNNRAVALRVPQPDQAERGMRPYTTATAMEAGWIWTIPLYGRNGNGYVYSDEFCTPEEAERTLRAFAAPGQDDLEANHIRMRIGRNERSWVKNCVAIGLSSAFVEPLESTGIFFIQHGIEQLVKHFPDERWDPSLADDYNRRVARVLDGVKEFLVLHYVAAGRDDTPYWKEAKLRGLPDGLAEKLDMARSHLLDERAIYPYYHGFEQYSWITMLLGLGHEPRAARPALAHVDPTAARAELARLRSDADRLVRTLPSCHEYLTSIH

SEQ ID NO: 85079 - protein, 513 aa, Sphingomonas sp.
  misc_feature (1)..(513): tr|A0A4Q6XSC3|A0A4Q6XSC3_9SPHN Tryptophan 7-halogenase OS=Sphingomonas sp. 3-7 OX=2484750 GN=EWE75_16295 PE=4 SV=1
MQPIRNIVIVGGGTAGWLAAGVIAAKHQGRMPADFTVTLVESPNTPIIGVGEGTWPTLRTTLSKMGVSETDFFRECNASFKQGARFARWTTGEVDEGYYHPLMLPQGFQRVNMAAHWLADGHDQSFCDAVTPQGMLCDDGLAPKTIATPEFDAVANYAYHLDAGKFAGFLQRHCTAKLGVRHVLADVTHVNQAENGDITSVVTEQAGEIAGDLFVDCTGFAALLIGKTLGVPFKSCADVLFCDTALAIQVPYDSEDSPIASHTISTAQSAGWIWDIGLPSRRGTGHVYSSSHISDDDAERELRAYLGPVGATADVRKIKIRSGHRETFWKNNVVAVGLAAGFLEPLEASAIVLIEMSTKLIAEQMPVCREVMDIIAARFNATTHYRWGRIIDFLKLHYVLTKRTDSDFWRDNVRADTIPDRLRDLLTLWKYQPPWFHDEFDRVDEVFPAASYQYVLYGMQFGTEVSREALSAETRIAEQTRREAAVQTQRLRAGLPRHRDLIRKIIDHGLPAI

SEQ ID NO: 85080 - protein, 495 aa, Gammaproteobacteria bacterium
  misc_feature (1)..(495): tr|A0A1Z9ARX2|A0A1Z9ARX2_9GAMM Tryptophan halogenase OS =Gammaproteobacteria bacterium TMED95 OX=1986771 GN=CBC 55_01615 PE=4 SV=1
MNHQNPVSRVVIVGGGTAGWMTAAALSKLIGQTLAITLVESEEIGTVGVGEATIPTLLTLHKLLKIDEREFLKSVKGTIKLGIQFENWLRADHRYIHSFGYTGESCWAAGFQHFWLKSRSLGHDVLGYGEYAPELAAAKANKFGFLKPEPLNYAYHLEASGYAKFLRGIAEQHGVTRKEGKIVSVDQSDSGDIASVMLQDGQSVTGDLFIDCSGFAGLLIDKTLKVGFDDYSHHLPCDSAVAVQTQSVSDPVPYTRAMTHSAGWQWRIPLQHRVGNGLVYSSAFYSDDEAIARLTRNTEGEILTDPRVIRFKTGQRQHHWYKNCVAIGLSAGFIEPMESTSIHLIMRAIIRLMQMFPHHGSRDADIREFNRQMREEITFIRDFIVLHYHANEHQEAPFWTAMAHLDIPDTLAHRLELFRETGRVFQAQGDVFGENSWTQVMLGQGIMPQRYHHIVDMMSEPELRDFMSRQHNRVNQILDVLPNHQAFLDAYVGTQ

SEQ ID NO: 85081 - protein, 512 aa, Sphingomonas sp.
  misc_feature (1)..(512): tr|A0A0A6CZG7|A0A0A6CZG7_9SPHN Tryptophan halogenase OS =Sphingomonas sp. Ant20 OX=104605 GN=NI18_14690 PE=4 SV =1
MTQLRRILIAGGGSAGWMTAAMFSRLFKGLYEIVLVESDAIGTVGVGEATIPAIKKFNELLGIDEDDFLRRTQGNFKLGIQFQDWLRPGSSYVHGFGVIGQDLEWLRCHHYWLKMHGEGRAREFDRYSINTWAALQNRFMRPRADMPDSPIGQIAYAFHFDAGLYAAYLADYARDRGVTRREGRIADVTLDPGSGFIRSVTMDDGEVIEAELFIDCSGFRGLLIEQALGSGYEDWSHWLPCDRAVAVPSERSANFTPYTRSTARPAGWQWRIPLQHRTGNGHVYASRWMDDDAAQAMLLDNLDMPAVGEPRRLRFVPGKRRSGWIKNCVAIGLAGGFLEPLESTGLHLIQSAILRLVRLLPDTGFDPANIAEYNRQTDFEYERIRDFIILHYKATERGDTPFWRHVRDMDVPETLARKIALFRANGRIFREDDELFAEESWIQVLIGQGIIPTAPDPLVDVTPADEIERFLSNIEGVIAKCTALMPSHADFIARTCQAPPLIVPRSRVAASR

SEQ ID NO: 85082 - protein, 553 aa, Minicystis rosea
  misc_feature (1)..(553): tr|A0A1L6LJW1|A0A1L6LJW1_9DELT Tryptophan halogenase, p utative OS=Minicystis rosea OX=888845 GN=A7982_07450 PE =4 SV=1
MASSSDRPFTTPVMRELFTNHELLLREVSRPKGDAEGVRRVGILGGGTAGWFTALALRAQLPWLDVSVIESPSIPIIGVGEASVPSLVAFLHHYLKLDVLEFTREVQPTWKQGIRFEWGLPGDYVFQAPFDWEVNGIGMLGSMAETGNINRFTVEAILMARNVTPIVRTNGQLQSFLPLFPFAYHLDNQRLVRYLTRTALSRGVRHIDAKIAEAKLAEGSGGDGDPEIASLVTDDGRTLEFDLYIDCSGFRSFLLEKQLGTKFHSYASSLYTDSALAFNAPHGGKLKPYTTARTMENGWCWNIPMVEDDHLGYVYSSAYCSDDEALAEARRAFPDLHGERVVRFRSGRHERSWVGNVYAIGNAYAFVEPLESTGLLMIMRAITSLVRAFPIGRDHAVMKRFINATAARDWDRLRWFLAAHYKFNRKLDSRFWQEVRADADVSGIEAALSMFQACGPLSLLPRAIRTSLTEATEIFFYGLAGLDCILLGQKVPYPDLEREPPETWRARLQIAQELARRALTHAEALRAVKERPDLLLELVNHPQSWVTKAVPLL

SEQ ID NO: 85083 - protein, 515 aa, Sphingopyxis sp.
  misc_feature (1)..(515): tr|A0A1L3JB11|A0A1L3JB11_9SPHN Tryptophan halogenase OS =Sphingopyxis sp. LPB0140 OX=1913578 GN=LPB140_05350 PE =4 SV=1
MTQDDMIQRIVIVGGGTAGWMAAAAFSRVLGAMPGLLITLIESDAIGTVGVGEATIPDICLFNNLLGINENLFMRETGATYKLGIEFVDWYKKGHSYVHPFGNYGIDMLGIEFHHMWLRGLSIGDNSNIDEYSIATMAGKMERFMRPDVNQPNSPLSKFSYAFQFDAGRYAQFLRRRSQAQGVERIEGKIVDTLLDSQNGHVRHVQLEDGSKIEGDLFIDCSGFRALLIGGAMGVGFEDWTKWLPCDRAVAMPCAYPNGQSGADSEPLTRSIAQPAGWQWRIPLQHRIGNGHVYSSAHMNAQEAEKILRDNLDGEVLGEANHIRFTAGHRKKAWVKNVISLGLSGGFLEPLESTAIHLVQTGISRILTLFPTRKCNVKEIERFNQQSIEDYVTIRDFLILHYKATSRDDSEFWDYCRNLEPPSGLADKLAMFESSGRVFRENNELFTETSWLSVMVGQGVKAGGYHPAAHLISEVETKERLRHIRGVIKQTANAMPAQADFLRQQGAIMPQEEMK

SEQ ID NO: 85084 - protein, 497 aa, Hyphomonas chukchiensis
  misc_feature (1)..(497): tr|A0A062UA12|A0A062UA12_9RHOB Uncharacterized protein OS=Hyphomonas chukchiensis OX=1280947 GN=HY30_09815 PE= 4 SV=1
MDGQTVKKVVIAGGGTAGWIVAAALSRQLGPLIDITLVESDEIGTVGVGEATIPTHRIFHHLLGVDERAFMRATKATFKLGIAFENWGQIGDRYIHSFGVVGKSTWMADFHHIWMQAREMGLASELGDYCFELKAAEANKFATSDTSQINYAYHLDASLYAGFLRQFAESFGARRVEGLIEAVEQNPETGFITVLVLKSGERIEGDLFIDCTGFRALLIDKTLNTGFTDWSHWLPTDRAIAVQTKATGPALPYTRAIAHDAGWRWKIPLQHRVGNGLVYSSAHLSDDEARSRLLAEIDGEPLTDPRIIRYRTGRREKVWVKNCISIGLSSGFVEPLESTSIHLIQIYASRLVQMFPFNGFSDALATRFNDMARVELERIRDFIVLHYKLTERTDSDFWKMMGAMNIPDTLRNRIDLFRDTGLAYQEKAELFQVDSWLQVMMGQRLHPQGRHHLGRLMSEDQIKMALNGLRTNIANAVARLPVHQDFLDQYMREPELS

SEQ ID NO: 85085 - protein, 501 aa, Sphingomonas sp.
  misc_feature (1)..(501): tr|A0A2A2SER3|A0A2A2SER3_9SPHN Tryptophan halogenase OS =Sphingomonas sp. 1PNM-20 OX=1141887 GN=CKY28_08615 PE= 4 SV=1
MIERSPDRVRELVIVGGGTAGWMAAAAFARHFVGTGLKITLVESSGIGTIGVGEATIPTIRRFYAKLGMTDQSVMQATGATAKLGILFQDWHRVGEGFIHPFGLYGQDYGDVAFHHLWLRRRMEGDPRPITEYSLGASLAEHGRMALPQPNPPTPLAVYDWAIHLDASLFAKHLRSYAEASGVERIDAVVAEVEPGPAGVAALRLADGRRVEGDLFIDCTGFRSMLLGEAMGVGFEDWREWLPCDAAIAVQTGNAAADPPPYTRAHAKSAGWQWRIPLRHRAGNGLVYSSALMSEDEATATLMADLPGEPLIEPRRIPFRSGRRTQAWRGNVVALGLASGFLEPLESTSIALIETGIERLKELFPDRDMAPALADEFNDATAREMERVRDFIILHYKLTRRDDTPFWRHCQAMPVPETLRRKMALWDARGEFVRYRWEMFHPASWLAMYTGFDRLPASINPAVAGADMGRVSGALDRMRASVADAVRRTPTHAQFLQTLDR

SEQ ID NO: 85086 - protein, 533 aa, Labedaea rhizosphaerae
  misc_feature (1)..(533): tr|A0A4R6SGL3|A0A4R6SGL3_9PSEU Tryptophan halogenase OS =Labedaea rhizosphaerae OX=598644 GN=EV186_102357 PE=4 SV=1
MKAHRAPTYKLENVCDQGVCIVIRSVTIVGGGTAGWMTASYLKAAFGDRIDVTLIESAQVKRIGVGEATFSTVRHFFNYLGLDEAEWLPKCAGSYKLGIRFENWRKPGEHFYHPFERLRSVSGFSLAEWWLELGDRSEPFDRSCYITTALCEAARAPRMMDGSLFVSGLDGDLGRSTLDDQRDQFPYAYHFDADAVAGFLGEYGRGRGVRHIIDNVTEVQQDSRGWISGVRTAEHGVVTGDLYVDCTGFRGVLINKTLGEKFQSFEDDLPNNRAVALRVPREDATDMDPFTTATTMSAGWAWTIPLFRRNGNGYVYSDKFITPEEAETELREKVAPGRDDLEANHIRMRIGRNENSWVGNCVAIGLSSAFVEPLESTGIFFIQHGIEQLVKHFPDNGFDELRTAAYNRRINNAIDGVKEFLILHYRSADREDTPYWKETKSRPLPDALRERLALAETQLLDDETIYPYYHGFESYSWNTMNLGLGRVPAKARPALRHLDPAPAHAEFARLKAEADEMIATLPSCYEYLASIND

SEQ ID NO: 85087 - protein, 538 aa, Pseudomonas sp.; identical to SEQ ID NO: 82946
  misc_feature (1)..(538): tr|A0A2V3Z755|A0A2V3Z755_9PSED Tryptophan halogenase OS =Pseudomonas sp. LAMO17WK12:I9 OX=1286370 GN=H160_01307 PE=4 SV=1

SEQ ID NO: 85088 - protein, 485 aa, Streptomyces antibioticus
  misc_feature (1)..(485): tr|A0A124HKN4|A0A124HKN4_STRAT Tryptophan halogenase OS =Streptomyces antibioticus OX=1890 GN=AQJ23_35020 PE=4 SV=1
MTQEYDLIVVGGGPAGSTAATAVALRGHRVLLLERETFPRYQIGESLLPATVHGLCRILGVADEVQQAGFTLKRGGTLRWGRDPEPWQFSFAMTPRVPEPTATAFQVERSRFDEILLRGARRAGAEVREGSTVRRVVADEKRVRGVEFTDADGNARTAYARYVIDASGNTSRIHTGVGGGRVYSDFFRNLAVFGYFAGGARLPEPNSGNIFCAAFDAGWLWYIPLRDDLTSVGAVISPEHTQAVQRDARGAWRDMIEACPEVSRLVAGVPEATEAPYDQVRVRRDWSYWKQSFWKPGMALVGDAACFVDPVLSSGVHLATYGALLAARSVNAALDGSVPEEQGFAEFEARYRREYRVFYEFLIAFYDMERNEDSYFWSAKKITHVDLDEAAAFAELAGGLVSRDSAVVRTDWHTAAAQLDGAVSELAVADGRVNPLLSAPVVGETFRTGNDLQEQALYGGPLDDPGPAAPGGLAVTPDGLSWVKE

SEQ ID NO: 85089 - protein, 503 aa, Sphingomonas sp.
  misc_feature (1)..(503): tr|A0A2A2SJ51|A0A2A2SJ51_9SPHN Tryptophan halogenase OS =Sphingomonas sp. 1PNM-20 OX=1141887 GN=CKY28_00430 PE= 4 SV=1
MVDTTGRTIVIVGGGTAGWMAAAALRRFSPPTTRIRLLESDRIGAVGVGEATIPQIRLFNAGLGIDEDEFVRETQGSFKLGIEFIDWSGRGSRYIHAFGTIGRGLGLVPFHHYWLRHAQAGGASRYWDYSPTALAASRNAFARDLGRPELPSGVAWAFHFDAGLYAAYLRRYAEARGVERTEGEVAHVSLHGETGHIEAVTLQGGERLAGDFFVDCTGFRGLLIEDALQAGYDDWRRLLPCDRALAVPSAAAGPLTPYTRATAREAGWQWRIPLQHRTGNGLVYSSAHLSDDRAAEILLANLDGAPLAEPKPLRFVTGRRRRAWVGNCVALGLAAGFLEPLESTSIHLIQSGIARLLELFPTDPVSPADVDEYNAQTEREWTAIRDFLVLHYHANARPEPFWAERRALAIPDTLRHRMELFRQTGRVTAREHDLFKEPAWIQVLLGQGVVPQGHHPLADALPADQLDQLLSLARAHAAQVAARMPAHQAFIAAHCAAPRKAAA

SEQ ID NO: 85090 - protein, 507 aa, Sphingopyxis sp.
  misc_feature (1)..(507): tr|A0A1L3JB80|A0A1L3JB80_9SPHN Tryptophan halogenase OS =Sphingopyxis sp. LPB0140 OX=1913578 GN=LPB140_05365 PE =4 SV=1
MNIQNPTKIVILGGGTSGWMSATALAVMLGAQVDVTLVESEDIGIIGVGEATLPHLRHFVETLGIDEADFMRATHATYKLGIDFRDFGKIGDSYIHPFGSFGDALAGVPFHHYWLAAQKNIGDVGSIGDYSMGVAAALANKFAPPASDNSLASTYGYAYQFDATLFGPFMRDFATAKGVKRVEGRVNNVQTNPENGNVETLILESGNQISGDIFIDCSGFRSMLLGQTLGAEWEDWSHWLPCDRAVAVPCTAENENEIEPYTRAIAMPAGWRWRIPLQHRIGNGYVYASQYLSDDEAKNALINAIEGKPLAEPKLLKFKAGRRKKSFIKNVIGVGLSSGFLEPLESTSIYLAQMAITNFIELFPKNGVIQQFDRDAFNQLVDMEYDRIRDFLILHYHATTRDDTPFWDHVRTMEIPHSLSEKMELWRQSGHVSKYSQGLFYEPSWVAVYLGQNIYPTGFDPRTEIGNQDGLFRALHSLKNAISKQVNNMPSHRAYLHNHAKRLADIE

SEQ ID NO: 85091 - protein, 439 aa, Salipiger bermudensis
  misc_feature (1)..(439): tr|Q0FWS6|Q0FWS6_SALBH Tryptophan halogenase, putative OS=Salipiger bermudensis (strain DSM 26914 / JCM 13377 / KCTC 12554 / HTCC2601) OX=314265 GN=R2601_02848 PE=4 SV=1
MRDMLRRFGLSERGVLAACDASFKHGIRFDDWSGPGSRCLHPFHRHALPRDIAARWLASSGEPPFAAIASAQAALIAHERAPRPAGAPEFTGPVPYAYHLDAEKFAEYLAGELTSRGVTRQSAHVTGVLREGETVTALRTEDGAPLSADLWVDCTGFAGLLLPEEGRDWVSYADRLLCDRAVTMRVPEDDPAYTPAPFTRARALEAGWCWDIGLRHRRGRGYVYSSAHLSDDEAEAALRAEEGQHSAELPARVIHFTPGRRAAPWQGNVVALGLAAGFLEPLESTGLFLADFAARALVEMFPAAPGLPMQPLARRYNALLAEMHDDLADFLALHYAVAQRRDTTFWRDAAKAALRSERLRELLELWQLRPPSFADFSYRYSPFSHTAWEFILLGMGWRPATAPAGTTPCAAPAEALTRQMLDALPDHGTLLRHLAQACR

SEQ ID NO: 85092 - protein, 532 aa, Sphingomonas sp.
  misc_feature (1)..(532): tr|A0A2A2SBZ3|A0A2A2SBZ3_9SPHN Tryptophan halogenase OS =Sphingomonas sp. 1PNM-20 OX=1141887 GN=CKY28_16610 PE= 4 SV=1
MNEQTIRDVVIVGGGTAGWMTAAALSRFLDNGVTRVTLVESEEIGTVGVGEATIPPIITFNQMLGLNENEFLRETGGTFKLGIEFVDWGDLGERYFHPFGFHGRDLQGVHFHQLYLRERRRRPLPDISAWSMSAVAASMGKFGRPGANAQSAVKDLLYAFHFDAGLYARYLRRYAERGGVTRVEGKIVDVDTRGEDGHVEAVTLADGRRIAGDLFIDCSGFRGLLIDGALKTGYEDWTHWLPCDRAVAVPSAYEGEPDPFTRATARSAGWQWRIPLQHRMGNGLVYSSTYMDDAEAERLLMANLEGEPLAEPRRLSFTTGRRKQCWNKNVVALGLSSGFIEPLESTSIHFIQSGIAKLIALFPDRRFDPVERDEYNRQMRDLYEDVRDFIVLHYKATRRSDSPFWDRCRTMEIPDSLARKIDLFRAKGRVFRDGLELFATTSWVAVCFGQHVVPDEHEPAVDALDEDKVAQALEQMRRGYQEVAEQLPTHGEFIRRCGPSPFARPQPTQPESPVPTFSFESESPFAGQGFTL

SEQ ID NO: 85093 - protein, 343 aa, Actinoplanes sp.
  misc_feature (1)..(343): tr|A0A428XWB0|A0A428XWB0_9ACTN Tryptophan halogenase (F ragment) OS=Actinoplanes sp. ATCC 53533 OX=1288362 GN=D MB66_27130 PE=4 SV=1
YTDSDGGEHEVRARFVVDASGNKSRLYSSVGGTRNYSEFFRSLALFGYFENGKRLPAPNSGNILSVAFDSGWFWYIPLSDTMTSVGAVVRREMAEKIQGDREKALQALIAECPLISEYLQDARRITTGRYGELRVRKDYSYLQTSFWRPGMILVGDAACFVDPVFSSGVHLATYSALLAARSINSVLADDLDEKTALTEFEARYRREYGVFYEFLVSFYEMNVNEESYFWQAKKVTKNKRTELESFVELIGGVSSGEAALTTSGRITERSAEFAAAVDQMASSDDGNMVPMFKSQVVKQVMQEGGQVQMKAVLGEDAEPELPLFPGGLVASPDGMKWLPYHPA

SEQ ID NO: 85094 - protein, 500 aa, Sphingomonas sp.
  misc_feature (1)..(500): tr|A0A0A6D504|A0A0A6D504_9SPHN Tryptophan halogenase OS =Sphingomonas sp. Ant20 OX=104605 GN=NI18_00765 PE=4 SV =1
MTGTLGSVVIVGGGTAGWMAAVAFGRLLGPAGTRVTLVESDDIATIGVGEATIPPIRTFHAMLGIDEDAFLRATGGSYKLGIRFEGWTRPGESYVHPFGQIGTDIAGVPFAAQWLRARQAGAAEALGAYSLEARASEAGRFSRPIANGDSPLSRISYAYHFDAGRYAVFLRAQAEAHGVIRREGRVDRVERGPAGIAAVHLADGSRVEGDLFLDCTGFRALLIEGALQAGWTDWSQWLPCDRAVAVPSAADAAPLALTRAIAEPAGWRWRIPLQHRTGNGHVFSSRHCSEDEATATLLAGLGGETLADPRVIRFATGHRTRFWSGNCIALGLAAGFMEPLESTSIHLVQSGLQHLLRMLPAGGPPAPAIVDRYNRTMTGEFVRIRDFLVAHYRLNARTEPFWRERAAAPIPDGLAEKLALFRAGGRIFREADELFNEVSWLALLTGQDAPVTGHDPICDALPIAIAAKRLAQIERVVATSLTHMPPHADALARLGQDRTI

SEQ ID NO: 85095 - protein, 512 aa, Glaciecola pallidula
  misc_feature (1)..(512): tr|K7A5S3|K7A5S3_9ALTE Tryptophan halogenase OS=Glaciec ola pallidula DSM 14239 = ACAM 615 OX=1121922 GN=GPAL_3 950 PE=4 SV=1
MSDAIKTIAIVGGGTAGWLSAAIIAAHHKSKSGDRNASGIEIKLIESSDIPTVGVGEGTWPTMKNTLRDIGIKEADLFANCHAVFKQGGKFVDWVHGNGDFYYHPFTVPLGYGRIDLAPYVSDIEKYAVEANFQHHVCEAGLAPRTISESEYSGQCNYAYHIDAGEFAELLKHHCKSKLNVTHIVDTVNQVTLASDGSISSISLNKHADVEADLYVDCTGFAALLLGGKLNVPFIKMDDVLFNDSALAMHVPYDSKDSPIASHTIATAQNAGWIWDIGLTHRRGVGHVYSSKYLSDEEAEANLRKYIGEASKGLTARKISFESGHRERFWEKNCVAVGMAAGFVEPLEATAIMLVEISARYIAENLPPTKAIMPTVAKRFNQQMRYRWSRIIDFLKLHYMLTKRPEPYWQAHTNPKDIPESLKEDLSIWGYRGPTSGDFKSAIELFPAASYQYVIYGMGFKPDFSQQAHLYQEQQQADMIIQRNQKITEQMLQTLPLHREYIEKWLANTQMK

SEQ ID NO: 85096 - protein, 528 aa, Massilia flava
  misc_feature (1)..(528): tr|A0A562PK67|A0A562PK67_9BURK Tryptophan halogenase OS =Massilia flava OX=871742 GN=IP92_04039 PE=4 SV=1
MHGAPALLPFHSQADMNQQIKHIVIVGGGAAGWITAGRIAARHARAESGITVTLVESPTIGPIGVGEGTWPTMRSTLMKMGISETDFMRECDATFKQGAKFARWVDGTADDFYYHPLMLPQGFGQMDLVPYWQTACAGRSFSDTVCLQEQVCEHGLAPKMITTPEYASVANYAYHLDAGKFVGFLTRHCVDKLGVKHVLGDVTEVKSAPNGDITAIVTAQQGEIAGDLFVDCTGFSSLLLGKHLEVPFVDKGDVLFIDKAIAAQVPYEHPDAPIATHTISTGQAAGWIWDIGLVNRRGIGYVYSTRYTSDDEAEAALRAYIGPAGKTVNTRRIPIRSGHRQLFWKNNCVAVGLAAGFLEPLEASALVLVELSADMLAEQLPASRDIVDIVARRFNDTFLYRWDRIIDFLKLHYILSKRTDNAFWTDNRAAETIPDSLQDLMRLWRYRPPGNCDFTSNNEVFPAASYQYVLYGMGFKTDPEFLRPSASEQRAAQEHLAQNSAAIKKALRMLPAHRELIAKIHAYGLPAV

SEQ ID NO: 85097 - protein, 533 aa, Streptomyces sp.
  misc_feature (1)..(533): tr|A0A4R9F2K6|A0A4R9F2K6_9ACTN Tryptophan 7-halogenase OS=Streptomyces sp. MZ04 OX=2559236 GN=E2651_09965 PE=4 SV=1
MEDHRIKRVVILGGGTAGWMSASYLGKALGSEVSITVLEAPQVPRIGVGEATVPNLHKTFFDYLGFTEEEWMRECNASFKMGIKFTNWRTPGAGEATPRTMSDGTGDHFYHLFGLLANSDNLPISHHWTHKKLAGQTDEPFDYACYREPPIMDQNLSPRFMDGTKWTNYAWHFDANLVADFLCRFAVQKQGAVHIKEKMTSAEVDERGYITCVKTETGRVVEGDLFIDCSGFRALLINGVMREPFLDMSDHLLNDSAVATAVQHDDEAEGVEPYTGAIAMSSGWAWKIPMLGRFGTGYVFSSRFQSRDDATLEFCKMWGLDPEKQPLNQIKFRVGRNRRAWVRNCVSIGLASCFLEPLESTGIYFTYAALYQLAKHFPDKRFDPILQNRFNAEIETMFDDTRDFLQAHFSYAPRNDTAFWRACKDLELADDIKEKVAMYQAGLPVNMPITDEATYYGNFDAEFRNFWNNSNYYCIFAGLNKLPDHTLPILAARPDMLDRAEPVFEGIKAKQKELAASLPSTYDYLRQLHGKTS

SEQ ID NO: 85098 - protein, 509 aa, Caulobacter radicis
  misc_feature (1)..(509): tr|A0A2T9JPE7|A0A2T9JPE7_9CAUL Tryptophan halogenase OS =Caulobacter radicis OX=2172650 GN=DDF62_19935 PE=4 SV= 1
METSAPLDIVIVGGGTAGWMVGTALVSGLRPHQARVRLVESDEIATVGVGEATIPAMRDYNRFVGIDEVEMMRETNGTFKLGIEFLDWGFKGSSYHHPFGVHGAAIGGAGFHHHWNRARLAGHDFDIEQFSYAIAAARDDRFEFPNPDPDKIDSTYSYAYHFDASLYAKYLRKVAEGRGLKRTEGKVVDVTRDPLSGDVASITLASGEVIRGDFFVDCTGFRGLLIGQTLNSPFEEWTDWLPCDRAWAVPCARADRFTPFTRSTAREAGWQWRIPLQHRTGNGYVYSSRYISDDEAAATLMANLDGEALAEPRQIRFKAGRRTASWTRNVMAAGLASGFLEPLESTSIYLVQIAVMNLLKLFPGKRVEPALVEEFNRRVDMEYDRVRDFLILHYHANTRTDGALWKHCREMEIPESLKHKLELFRHRGVAPNYHDGLFALPSWISVLLGQGVLPGGYDRMVDNVPLSQALAEMERQRSAITRRVPSMPTHADFVASHCAIPRPIAEAVA

SEQ ID NO: 85099 - protein, 516 aa, Sphingomonas sp.
  misc_feature (1)..(516): tr|A0A2K8MAX6|A0A2K8MAX6_9SPHN Tryptophan halogenase OS =Sphingomonas sp. Cra20 OX=1327635 GN=CVN68_02715 PE=4 SV=1
MAKRILIVGGGTAGWLTAGYLAKRLGADLPGGVSIQLVESRDIGILGVGEGTFPTIRRTLSTIGISETELVRRCGASFKQGTKFVHWRHAPGGAGPDHYAHPFQNAEARGGLELLPYWLLGVGGDVNWDEVANPQKKAADAHRAPKLPTHPDYVSPLNYAFHFDAVALAALLREHAVANGVRHLIDQVSEVRLDEDGAIAGVVTASGLLEADLYVDCTGFRAELIGKALGVPYRSCRDVLFCDSAVAIQIPYRDGSAPIASFTISTAQEAGWVWDIGLDRRRGIGHVYSSAHTDDARAEELVRAYVGADAEGIETRKFRFDAGYREVNWHKNCVAIGLSSGFFEPLEATGIVMSEVAAGLVASLFPWGGDFETSARQFNANMLQRYERARDFIKLHYCLSQRRDSAFWRDNVAENSIPHSLRERLERWRFRPPTELDVDPNVDIFTEASWQYVLYGMGWKTDVSARAGAYRYHDDARAAFEEVRRQAAFAVANLPSNRELIDYAINNRFGPVGAAA

SEQ ID NO: 85100 - protein, 511 aa, Nonomuraea sp.
  misc_feature (1)..(511): tr|A0A5C8JQV3|A0A5C8JQV3_9ACTN Tryptophan 7-halogenase OS=Nonomuraea sp. C10 OX=2600577 GN=FR742_08125 PE=4 SV =1
MINDVVIVGGGTAGWMTATYLKRAFGDRVSVTLVESPRIPTIGVGEATFSTVRHFFDYLGLDEREWMPQCSASYKLAIRFQNWRGDGTHFYHPFERLRVSNGFTLADWHLQLNGAAEPFDRHCYLTPWLCEARRSPRLLDGSLFASGLDGSLGRSTLDEQRAQFPYAYHFDAAQLAAYLTGIGVRGGVRHVLDDVTAVGRDERGWISHVSTKEHGDVTGQLFVDCTGFRGLLINQTLGERFRSFTDVLPNNRAVALRVPREEQELINPYTTATAMDAGWIWTIPLYGRNGTGYVYSDEYCSPEEAERTLRAFAAPGRDDLEANHIRMRIGRNERSWVGNCVAVGLSSGFVEPLESTGIFFIQHAIEQLVKHFPDERWEPRLIDGYNDRVARVIDGVREFLVLHYRAAARADTPFWKETKVRPIPEWLAGFLPVAATRLPDESTIYPYYHGFELYSWITMLLGLGHYKPGPRPALAHLDPAGARAEFADLRAGAQRMAAALPAAHEYLTSLR

SEQ ID NO: 85101 - protein, 518 aa, Rhodanobacter sp.
  misc_feature (1)..(518): tr|A0A4R8L6Y2|A0A4R8L6Y2_9GAMM Tryptophan halogenase OS =Rhodanobacter sp. TND4FH1 OX=1907401 GN=BJV57_2623 PE= 4 SV=1
MNQTAIRDIVIVGGGTAGWMAAALLAKALGSQVKIRLIESDEIGIIGVGEATIPQIRHINTFLGIDENDMLRATQGTFKLGVQLNDFGRLGDSYLHAFSDIGLPLGLIGFHQYWLRAVQGRTSAAGAGCAGEAERPRHPDSDLWSYSLNTQAARAHRFAPMDRVGSSSLGGIKYAYHFDAGLYGQYLRRHCDPDVVRRTEGKVVDVQLRAHDGFIESVRLESGETINGDLFIDCSGFRGLLIEGTLKTGYESWQHWLPCDRAVAVASARTEPLWPYTRATARTAGWQWRVPLQHRTGNGHVYSSQFISDDEASAMLLANLDGEALATPRPLRFTTGMRRKAWQRNCVALGLAAGFMEPLESTSIHLIQSGISRLLAMFPDRHCEPVLMDEYNRQIRFEYESIRDFLILHYKATERDDTAFWRQCAAMDIPPGLARKIALFRGNGHLYREADELFTEMAWLQVLIGQHIEPAAHHPLADSISDAQLDGFLGDMRTLIGRATASMPDHARFVADHCHAPG

SEQ ID NO: 85102 - protein, 499 aa, Mycobacterium riyadhense
  misc_feature (1)..(499): tr|A0A1X2BMZ1|A0A1X2BMZ1_9MYCO Tryptophan halogenase OS =Mycobacterium riyadhense OX=486698 GN=AWC22_00155 PE=4 SV=1
MALTNPEEFDVIVVGGGPAGSTLAALTAMQSHRVLVLEKEFFPRYQIGESLLPSTIHGVCRLTGVADELAKANFPRKQGGTFKWGASPEPWAFSFSASPRMAGPTSFAYQVERSKFDEILLNNARRVGAEVREGCVVTDVITADGRVLGVRYTNGDGSPREARARFVIDASGNKSRLYQRVGGTRRYSEFFRNLALFGYFEGGKRMPEPNNNNILCVAFDSGWFWYIPLNETLTSVGAVVQREMAEKVQGDPETALKSLIEECPMISDFLCSAERVTSGQYGKIRVRKDYSYHQTTFWCPGMLLVGDAACFVDPVFSSGVHLATYGALLAARSINSALAGLVDEQTAMNEFEARYRREYSVFYEFLLSFYEMHHSETSYFWQAKKITKNDRPELEAFIELVGGISSGECALTNADALAERFQSQSAEFAGAVDKAGPNGSMVPMLKSSLVRRLMQALFEGSAQEQIQGLLGKDAPRDRPLFPGGLVASRDGMFWLPANQ

SEQ ID NO: 85103 - protein, 523 aa, Maricaulis sp.
  misc_feature (1)..(523): tr|A0A2D8BTE6|A0A2D8BTE6_9RHOB Uncharacterized protein OS=Maricaulis sp. OX=1486257 GN=CMF74_06850 PE=4 SV=1
  misc_feature (350)..(350): Xaa can be any naturally occurring amino acid
MIKTNKIVIVGGGSAGWMTAATLIKVFPNKDITLIESANTPTVGVGESTLGQINSWMGLIGIKDEEFMAATDATYKLSIRFDEFYKKGGGHFHYPFGNPPIEDRRAGINDWWFKKELYPETQYHDFAEKYFPAMALVNNNKITDKLNQLKNWNFQTDTAYHFDATKFGLFLKSHHCLNKGVKYIVGDVTDVNVDDNGVKELLLDGSVPIKADLFIDCTGFKSLLLAGALKEPFESYADFLPNNSAWATKIKYKNAKKEIVPYTNCHAIENGWCWEIPLWHRWGTGYVFSDKYVSDEDALVEFKNHIKWRFPYADPEELEYKKIKMRVGLHERTWVKNVCAIGLSAGFIEXLESNGLYTTHEFLFKLIKTLDRDHVNKFDIDSYNMQNKWIFRNFAEFVGLHYALTGRDDTPYWRACQSRSYASKVMDNLEPTRIVGFSEAGYNKFYRNEFELGGFPLIAAGMRWAPVCKTDAIYNRVWLTEEDHKIMWKKMTENLDKRVEEWESMIKDCPNYYDYIKEKFHND

SEQ ID NO: 85104 - protein, 509 aa, Caulobacter radicis
  misc_feature (1)..(509): tr|A0A2T9JPF3|A0A2T9JPF3_9CAUL Tryptophan halogenase OS =Caulobacter radicis OX=2172650 GN=DDF62_19925 PE=4 SV= 1
MSEAIRDIVVVGGGTAGWMTAAALAQTVGTRRYSITLVESEQIGTVGVGEATIPMILLFNKVLGLDEDVFIRETNATFKLGIEFVDWRRLGHSYFHPFGLYGADMDGVGFQHFWLRWARESGDRNHDGFNAETLAAATGRFMRTPPAPNLPKINYAFQFDAALYAAFLRRYAEARGVVRVEGKIAGVERDGESGQVSRLVLDDGRTIGGDFFVDCSGFRGLLIEETMGAGYDDWSRWLPCNRAAAVPCERAGELTPYTRATAREAGWQWRIPLQHRSGNGYVFCDAFIGEDEAVRLLGERLDGAALADAKILKFTAGRRRKSWIGNVLAIGLSSGFLEPLESTSIHLIQAAIAKLLTLFPKTGFDPFVVDKFNREMALEYEQVRDFIIAHYKVGERDDTPFWRWCRDMVPPDSLAQRLEVFRARGEVLIDQKELFKETNWFAILVGQGLVPDGHHAVADAISSEELRSRMGRIRAAINERVAGMPPHDLYLEKAGLLGAAARAGRRVPA

SEQ ID NO: 85105 - protein, 499 aa, Sphingopyxis sp.
  misc_feature (1)..(499): tr|A0A1H6GAY4|A0A1H6GAY4_9SPHN Tryptophan halogenase OS =Sphingopyxis sp. YR583 OX=1881047 GN=SAMN05428974_3947 PE=4 SV=1
MSDKKPVQRIVIAGGGTAGWMMASAIARTMGKTVDLTLVESEQIGTIGVGESTIPPLVNFNRILGIPEPEFMRATQATFKLGILFDNWKHDGDSYFHSFGLSGKDHWSAGFQHFWLNARERGHQQPYSDYCLELVAGMQGKFAHLPEERMNYAYHVDATLYGRYLRKLAEADGCKRVEGKIARVELDGETGDIAALHLDGDRRIEGDMFVDCTGFRGLLIDGALHAGFEDWSHWLPNDSAIAVQSKHLGPPQPYTQAIAHDAGWQWRIPLQHRMGAGIVYSSGYLSRDAAYDRLMGSVGEPLIEPFDIKFKGGVRRKQWFRNCVAVGLAGGFVEPLEATTVHLIQRAVLRFIRLMPNGRVSERDAQEFNDQQRTDIEQIRDFVVLHYKVTNRRDSPFWRHVANMPVPDSLQQKIELFRETGRVFRKYEELFAENSWVQVMMGQGIEPQSYHPIADKLRDDEVERLFQSIRDNIAQTVATLPEHHAYVARYCGAEEPKAA

SEQ ID NO: 85106 - protein, 504 aa, Caulobacter radicis
  misc_feature (1)..(504): tr|A0A2T9JTI0|A0A2T9JTI0_9CAUL Tryptophan halogenase OS =Caulobacter radicis OX=2172650 GN=DDF65_04920 PE=4 SV= 1
MVDQRIRKVVVVGGGTAGWMAAAAFSRLLVGDAVSVEVVESEAIGTVGVGEATIPTIRNFNQTLGLDEVEFIRATQASFKLGIDFRDWGRVGHRYFHGFGDFGADHEAVQAHQLWRRLKALGDPSGLEDWSLPTAAAALNRFIPPSPDPRSPLHDYAYAYHFDAGLYAAFLRRYAEARGVTRTEGRIVDVALRGEDGFVEAVVLEDGRRVEGDLFVDCSGFRALLIEGALKAGFEDWSRWLPCDRALAVPCRLGGDGLTPYTRSTAREAGWQWRIPLQHRIGNGYVYSSAFVDDERAARTLMENLDGEALDDPRPLRFLAGRRRKFWDRNVVTVGLSGGFLEPLESTSISLIQNGVARLLEFFPDRRCDPLLADEFNRVSAQEYERIRDFIILHYCINQRDEPMWRQVREVELPDSLQAKIALYKARGHVAIHEGDGFGRPSWIAIYNGLGVVPEAYDPLADRIPEAELRKLMEHRRALIRHTAQSMPTQEAFIARHCAAPPLS

SEQ ID NO: 85107 - protein, 505 aa, Caulobacter radicis
  misc_feature (1)..(505): tr|A0A2T9JWW7|A0A2T9JWW7_9CAUL Tryptophan halogenase OS =Caulobacter radicis OX=2172650 GN=DDF62_15520 PE=4 SV= 1
MDRAIGSIAILGGGTAGWMAAAVLSQVLRGTKTTITLVESAEIPTVGVGEATIPPIIDFLRLLEIDQGQFMAATEGSFKLGIRFDDWRVVGERYWHPFGTFGPSVDRRPFHHMWHRLRAAGDDPRVEAYSLATALGDAGRMAFADGQGEGRGQGPLGGMRHALHFDAGLVARFLRTYSEQRGVRRLERRVEGATLKDDGFVEALVLDGGDRLAADLFIDCSGFRGVLIEGALKTGYEDWSAFLPCDRAVAGLTARDANPPPFTQAAARPAGWRWRIPLRHRTGNGYVYSSAHVSDDEALADLEREAGKLLTEPRVLRFTGGRRKAFWNRNVVALGLASGFIEPLESTSIHFVTSGLMKLLDHFPDKDFDGANIADYNKALIAEYEAARDFIVLHYQPTRRDEPFWRERAAAALPPDLAERLALYRGTGRIPHRPTELFTEPSWFYVLEGMGVRPDAYDPLVDLSNLSQVREGLAGWRRRVAEIVQASPLHDAALDVVAGRRRPAA

SEQ ID NO: 85108 - protein, 498 aa, Sphingomonas sp.
  misc_feature (1)..(498): tr|A0A2K8MJK8|A0A2K8MJK8_9SPHN Tryptophan halogenase OS =Sphingomonas sp. Cra20 OX=1327635 GN=CVN68_20490 PE=4 SV=1
MEQIRQILIVGGGSAGWMTAALLARLFQGLYQITLIESEEIGTIGVGEATIPAIKKYNELLGLDENDFLRRTQGTFKLGIQFVDWLRCGSSYIHGFGVIGQDLGWLRCHQYWLKMHGLGRASDFANYSINTAAALADKFRRADPKMAESPIGHIANAFHFDASLYAKFLRGFAEERGVVRREGKVTDVALDPENGFVRSVTMADGAVIEADLFIDCSGFRGLIIEQAMQTGYEEWTQWLPCDRAIAVPCARSDAFTPYTRATARSAGWQWRIPLQHRTGNGHVYSSRYVDDAEAEAMLLANLDGAQLAEPNRIRFVTGKRRKTWNRNCVAIGLAAGFLEPLESTSLHLIQSAVIRMVRLLPDARFDPATIAEFNRQTDFEYERVRDFIILHYKATERDDTPFWRYCRDMEVPDTLRHKIDLFAANGRIFREDEELFAEESWIQVLLGQGVIPRGYDPLVDIKSEPQIEQYLGNVERVIRKCVEVMPTHDDYVANTCPA

SEQ ID NO: 85109 - protein, 526 aa, Rhodanobacter sp.
  misc_feature (1)..(526): tr|A0A4R8L721|A0A4R8L721_9GAMM Tryptophan halogenase OS =Rhodanobacter sp. TND4FH1 OX=1907401 GN=BJV57_2627 PE= 4 SV=1
MSRIQKILVVGGGTAGWLTACYLAKTLNSAASASIQVELVESPNIALLGVGEATFPSIRGTLAAIGLDERRFLAGANATFKQGIQYVNWLRPPGTAGADRFFHPFSQPSQRPGSPELLPYWLLGGAPEGTSFADAVTMQQRLIDHGRAPKRATDPDYQGPMNHAYHFDAACFAKVLAEHGQQLGITRHLATVERAELDDSGAIARIVTREIGDLKADLYVDCTGLRGALIGGAMQSPFHSRRDVLFVDRAVALQVPYQQPDAPILPFTRATAQEAGWIWDISLQTRRGIGYVYSSRHADATRAEDIIRRYVGEQAAGLEALHLKFETGYRPEHWRRNCVAVGLAGGFVEPLESTGIALVELGAYLITHLLPGDLDDMERSARHYNQMMVARYERIIDFIKMHYCLSQRRDHAFWIDNADAASIPQTLQDRLALWRHRPPHRLDFVTDLEMFMPASWQYVLYGMEFKTDLEPMRSAYTQMDAAQREFAMIQQMAGHALNDLPDHRALVEQLCREHAQHMERRVAVDA

SEQ ID NO: 85110 - protein, 493 aa, Maricaulis sp.
  misc_feature (1)..(493): tr|A0A2D8BYA6|A0A2D8BYA6_9RHOB Uncharacterized protein (Fragment) OS=Maricaulis sp. OX=1486257 GN=CMF74_15940 PE=4 SV=1
SILIYKLNPKIKISLIESKEIPIVGVGESTTGTISQLIDDHTHLGGIRNFLKETGATYKYGIRHVDWLRKNHSFVSPIGSSFERWKKYPTEDYDHIRIYHVAEKLNYVIPLQNQLMLQDKLYYVKHGDKYQMMHDLDDGLHIDAFKTSDYFRKKCLSTGRITRIEDTIQSFIKNDLGGVKTLKLKSGKELDADLFIDCSGWHKTLIKDMGVNFVSYENNLLTNRAILFPKKNKENDILKNHLTATARKYGWTFEIPLQERTGRGYIINRHMVSDEDAVKEMNECFNEEIEVKKTINFEVGRLNNFWIKNVLAVGLCSNFIEPLEATGLHTTIEQVEHFCDYYLNDTLDLYDYYLQKNYNDHITSFIDDIRDFILLHYQTKRTDTDFWIESSSKKRWTEEFKRKMYTWKKRMPRKHDYHHKGRLHGLSNALWLQVGHGYEIFDSEIAKKELEYYGLYDIAKQQLNEIGVFSKYCVDNAMTTNDFYKLLNNGKIN

SEQ ID NO: 85111 - protein, 534 aa, Dehalococcoidales bacterium
  misc_feature (1)..(534): tr|A0A2E9M8J4|A0A2E9M8J4_9CHLR Tryptophan halogenase OS =Dehalococcoidales bacterium OX=2026733 GN=CL877_08920 PE=4 SV=1
MQTNRVLIVGGGSAGWTAAAYLNATLNVGDQKVADISLVESPNVPRIGVGEATIPNINHTLAAIGIDELDFMKAVDGTFKQSIRYVNWLDNKGEFYHHPFSRFGTGAHDDAGRRWLMSDRSVPFMNTISAQPILCEMGLAPKVFERVDLGIPVGYAFHMDALKFADYLHAFATARGVTDYEDHVISVDMHENGNIAAVNTESGKRLEADLFVDCTGFAAQLIEKKLGVGFTDCSRWLLCDRAVTMNVPHDHYYPGYVRPYTTASALSAGWVWEIPLQTRRSLGYVHSSTHISDDEAERELRAFEGNHSDSLPTRIVDFVVGRREQPWTANCVSIGLSGGFIEPLESTGLYLAQAASALLAEHFPHTDDMAPLAFRFNRIMQDRFYEILDFINMHYCLTRRTDTEFWREVRRPEMINDRLQAKFDYWKIKPPSVSDFIDQFFTGQAGIFPTPGESVGDGRCPIDTGGLWNHHSYEAILYGMDFLRDECNERYGENRPRPFIHKKVIDAVDSARDKLPPHDVWLRRMVGMPDYTKG

SEQ ID NO: 85112 - protein, 507 aa, Brevundimonas subvibrioides
  misc_feature (1)..(507): tr|A0A258FFW9|A0A258FFW9_9CAUL Tryptophan halogenase OS =Brevundimonas subvibrioides OX=74313 GN=B7Z01_12735 PE =4 SV=1
MPEPIKSILIVGGGTAGWMAAAAIKRSVGPHAEVRLVESADIGIVGVGEATVPTIKDFNALIDLDEAEFMRETKATIKLGIEFNGWGKADSAYFHPFGTYGVGPTLGDFPGSYFALKERGKAGSLEAYSICAHAARRGRMGQRSPDPRSALSGFHTAYHFDANLYGQYLRKVCAGRGVERIEGEIVEVVQRPEDGFVDHVVLKDGRTLKADLFIDCTGFRGLLIEGALKAGYEDWSHWLPMNRALAVPCAKVRAVDPYTSSTAREAGWQWRIALQHRTGNGYVYCSDYIDDDAARETLLSNLDGEALADPRPLRFVTGRRKKLWDKNVVSLGLSSGFIEPLESTSIHLVQVGIIRLLQHWPDTGFSQTNTDGYNRRLGREIELIRDFVILHYHATDRDDTPFWRHVRDMPIPDSLIERVEMFRDRGLLFQVGADEYFSQGSWMAVMVGQEILPKTYNPLYAYQNLDQVAAGFEQIRKAWTATVDNLPTHEAFLKQQGMWAGETPAAA

SEQ ID NO: 85113 - protein, 505 aa, Caulobacter radicis
  misc_feature (1)..(505): tr|A0A2T9JQR0|A0A2T9JQR0_9CAUL Tryptophan halogenase OS =Caulobacter radicis OX=2172650 GN=DDF62_17860 PE=4 SV= 1
MSDQRVRSVVVVGGGTAGWMTAAALAKTLSAQGLKITLVESEAIGTVGVGEATIPPILTFNAMLGVDEREFMRATKASFKLGIEFVDWGAIGEMYHHPFGTFGLDLEGIKFHQVWRKFAGLAGPIGDYNLTEAAARRWRFSLPDPDPSKVMSSLRYAYHFDAGLYARFLRGFSEQRGVVRIEGRIGKVDQNGETGFVEAVVLEDGRRVEGDFFVDCTGFRGLVIGQALKVPYQDWGRWLPNNRAVAIGCELGGDGLTPFTRATAREGGWQWRIPLQHRIGNGYVYSSHHVDDQRALDTLLANLDGAPTDEPNFLRFTPGRRERAWEKNVCSIGLSAGFIEPLESTSIHMIQAGITKLLALFPGNGVDPLEIDEYNRLTAEQVDRIRDFVILHFHATRRDDTDYWRYLSSMTVPDSLARRMELFAHRGRWFPSEYDLFHEPNWLAVLLGQGIVPEEWDPLVDSLPDDQVRQRLSHLSALIARTAEAMPDHAQFVARYCGAAQGVAA

SEQ ID NO: 85114 - protein, 506 aa, Xanthomonas cannabis
  misc_feature (1)..(506): tr|A0A0B2C609|A0A0B2C609_9XANT Tryptophan halogenase OS =Xanthomonas cannabis pv. cannabis OX=1885894 GN=OZ10_1 9210 PE=4 SV=1
MLPAPLRNIVIVGGGTAGWMAAAAFARVLGPTFNVQLIESDQLGTVGVGEATVPHIKAFNNLLGIDEAEFVRQTQGSFKLGIEFVDWQRPGTSYIHGFGSQIGHPLGLLPFHQYWIKQRARGKAQPLGAYTLNTVAAVRGKFMTSAGDVPANSPLANIAYAYHFDAALYARFLRGFAEARGVTRIEGMVEQVQLHPESGNVVALHLAAGQVIAGDLFIDCSGFRGVLIEDALHTGYHDFTHWLPCDRALAVPCEKVGPPTPYTRCTARAAGWQWRIPLQHRTGNGYVYCSAHISDDEAAATLLANLDGKPLADPRPLRFTTGRRKQCWNRNVVALGLASGFLEPLESTSIHLIQSGISKLLELFPREGISPVLVQRYNDRLAFEFDRIRDFLLLHYHATERDDSTFWRHCRQMPITPELHATLDLFRDSGRFYRNAEEMFAEISWVQVMVGQGIVPTGYHPLVDQVPDRDAEGFLASVAQTIAHCVDVMPTHQQFIDRFCKAPATR

SEQ ID NO: 85115 - protein, 520 aa, Xanthomonas campestris
  misc_feature (1)..(520): tr|A0A3E1KUM2|A0A3E1KUM2_XANCE Tryptophan 7-halogenase OS=Xanthomonas campestris pv. campestris OX=340 GN=D0A4 2_12785 PE=4 SV=1
MHAPAPSESQRLVRRVVIAGGGTAGWMAAAALSKLLGRQLQITLVESDEIGTVGVGEATIPSLVTFHRLLEIDEAQFMAATQATFKVGIAFEHWRDVDRHYIHSFGHTGTDHWSAGFQHFWLKARARGVARDFGDYCLELRAAQEGRFAHLPNGGMNYAYHLDAGLYARFLRRFSEGFGVQRIEGRIGSVQTDAHSGDIAALVLDDGTRIEGDLFLDCTGFRALLIGQTLGVGSEDWSRWLFADSALAVQTESVGAPVTFTRARADRAGWMWRIPLQHRVGNGIVYSSRYTDQDSAAQVLEHNLQGRALTTPRALRFTPNQRHRVWEKNCVALGLASGFLEPIESTNIHLIQRGIVRLLQTFPQVIDPVDIAEYNRQAAEEIAHIRDFVILHYHATDRRDTAFWRDCASMEIPDSLRHRMELFRQSGRVFHQGNELFAENSWIQVMLGQGIVPRHHHPVADLMGDAELSQFLEGIRQRVEATLARLPPHAEFLRRYCPAPAPPAPMPQPAPGTPLAAPAA

SEQ ID NO: 85116 - protein, 506 aa, Sphingomonas sp.
  misc_feature (1)..(506): tr|A0A2K8ME08|A0A2K8ME08_9SPHN Tryptophan halogenase OS =Sphingomonas sp. Cra20 OX=1327635 GN=CVN68_09185 PE=4 SV=1
MRASDALRKVCIVGGGTAGWIAAALMAHHFKGKLFEIELVESDDIGTIGVGESTIPPFMELIARLEINEQEFVRATQASFKLGIEFEDWRRKGESYFHPFGSIGQPVELSEFYQCWLKARQAGQPFELMDFAPAAAMARNGRFMLPFKAQKTPIGGAAYALHVDAKRVAQFLRAHAEERGVTRTEGMVADVRLDDRGFVDTLVLKDGREVTADFFIDCSGFRALLIEKTLGVGYEDWSQWLFCDRAIAAQTRNVGPPRPYTLAQAQDYGWRWRIPLQHRTGNGHVFCSEFLSDDEATRILLDQVEGEVVAGPMVVPFKTGVRDKIWHRNVLSLGLASGFIEPLESTAIHLVYRGMDFFFRYLPDRNCDPRLAGEYNRRMTADYTEIRDFIVLHYCATQRNDTPFWRKCHDMELPDSLRERIELFRVNGVLREGHDELFRAVSWHSVLEGMGIHPASYHPLVDRIEEGWLFEGMSQVRAQLAQVAGTLPTHQEFIDAHCRAEAVDLR

SEQ ID NO: 85117 - protein, 510 aa, Sphingomonas sp.
  misc_feature (1)..(510): tr|A0A2K8MC18|A0A2K8MC18_9SPHN Tryptophan halogenase OS =Sphingomonas sp. Cra20 OX=1327635 GN=CVN68_05135 PE=4 SV=1
MAEKREVLVVGGGTAGWITAAYLARFFEGRVGVTLLESPEIGIIGVGEGAFPTIRNTLKFLGIDESHFIRAASATFKQGIRFDDWLHAPASDGTRHHYLHPFEAPFQAEASGLVPYWLLQDEATRAPFAEAVTIQNRVAEAQRAPKRSGEGDYAGPLNYAYHFDAARLAEVIAARAVELGVRHLAGRLTHVELAEDGSVAGVVTDAHGALAADLYIDCSGFRAELIGNALGVPLKSVKHLLFTDRALACKIPYDRPDAPIASFTIATAHAAGWTWDIGLQGARGIGCVWSSAHMSDEDAAAVLRDYVGHDAFAARMIPFEPGYREAQWVKNCVAVGLSGGFLEPLESTGVVLIEAAVAMIAELFPLGGPADAPAARFNQLIAARYESIINFLKLHYCLSRRSEPFWRDNADPASIPPALQALLGEWRRRPPSRFDFLLDLESFAFFNYQYILYGMEFRTDLSGSRGDFPAMAAAEKLFARIRGFGERATADLPSHRTLIRQINEGLSLAG

SEQ ID NO: 85118 - protein, 490 aa, Sphingomonas sp.
  misc_feature (1)..(490): tr|A0A2K8ML05|A0A2K8ML05_9SPHN Tryptophan halogenase OS =Sphingomonas sp. Cra20 OX=1327635 GN=CVN68_10690 PE=4 SV=1
MIVVGGGTAGWMAASAIARMLPHAASVELIESAEIGIVGVGEATLPHLRAYLQTLGLDEAEFMAATHATYKLGIEFRDFGKPGDAYLHPFGDFGRPLNDVPFLHWWLRMHALGQGGEIADYCVANVMAAQKRFSPPAADPDALLSAYSYAYQFDATRFGPFLRGFAEARGVKRTEGKIVSVERDGGTGDVVALVLESGTRIEGDLFVDCSGFRSLLLGDALGEAWEDWSHWLPCDRAMALPCASPSGEIEPLTRATAMPAGWRWRIPLQHRVGNGYVYSSAHLSDDAASAAILGAIEGEPLADPRVLRFKAGRRKRSWSHNVIAVGLASGFLEPLESTSIYLVQIAIQQLVDLFPIGGIQAADRDEFNAQVDYEYDRIRDFLILHYHASTRDDSDFWRDVRHMPIPDSLADKIELFRRAGRIQRYSRGLFFAPSWIAVLIGQGVMPQGWDQRVDTANPHELGQALGRLRVQIASDVATLPGHRVALGLQA

SEQ ID NO: 85119 - protein, 500 aa, Caulobacter radicis
  misc_feature (1)..(500): tr|A0A2T9K5Z8|A0A2T9K5Z8_9CAUL Tryptophan halogenase OS =Caulobacter radicis OX=2172650 GN=DDF62_07125 PE=4 SV= 1
MADNRIGRIVIVGGGTAGWMSAAMLARALGPAAKISLVESEAIGTVGVGEASIPQLRNFNAFLGLDEDAFLRATEGTIKLGIEFVDWLRPGHRYMHAFGPVGRPLGTTPFHHYWLDARRRGTAGDDFWAWSANALAARAGRFGRVTPGGAEPLTWAFHFDAALYARHLRTYAEARGVVRVEGRIVGVDQDGDSGFLRAVALEDDRRIEGDLFIDCSGFRGLLIEEALKTGYEDWRRWLPMDSAWAVPSRDDAPPVPYTRAWARDAGWQWRIPLQHRTGNGHVFSSAWTDKDAAARVLMDNLEGEALADPRLLTFVTGRRRKSWNRNVVALGLASGFMEPLESTSIHLVQSGLARLLALFPDQGFDPLLADEFNRQTEQEYACIRDFLVLHYKATQREDTPFWASRKAMEIPETLAARMALFASSGRVFSRDEDLFKESSWVQVLLGQGVTPAAAHPMTAVVADAQVDGWLDDLARIAGRAASSLPSHAAFLARAETRLAG

SEQ ID NO: 85120 - protein, 506 aa, Maricaulis sp.
  misc_feature (1)..(506): tr|A0A2D8BQY6|A0A2D8BQY6_9RHOB Uncharacterized protein OS=Maricaulis sp. OX=1486257 GN=CMF74_02885 PE=4 SV=1
  misc_feature (67)..(67): Xaa can be any naturally occurring amino acid
  misc_feature (71)..(71): Xaa can be any naturally occurring amino acid
  misc_feature (74)..(74): Xaa can be any naturally occurring amino acid
  misc_feature (80)..(80): Xaa can be any naturally occurring amino acid
  misc_feature (209)..(209): Xaa can be any naturally occurring amino acid
  misc_feature (298)..(298): Xaa can be any naturally occurring amino acid
  misc_feature (329)..(329): Xaa can be any naturally occurring amino acid
  misc_feature (333)..(333): Xaa can be any naturally occurring amino acid
  misc_feature (337)..(337): Xaa can be any naturally occurring amino acid
  misc_feature (341)..(342): Xaa can be any naturally occurring amino acid
MLKKDIIIVGGGSAGFMVAATLLKQLPESSITLIESPNTPTVGVGESTITGVKLWTKLLGINDKQFXKATXGIXKLSIKXTDFYKKGQSFHYPFGAPVLENNKAMLNDWWFKKILYPETPTSDYAETFYPVMSMIKNHTLDKNSGLPFNFDFDTAYHFDATKFAHWLKEEYCIPRGLKYIQEDIVSHEVDDNGIKSLNGKYSADLFIDXTGFKALLLGDIMKVPFESYNDLLPNDSAIATKIDYTDKERQMVPYTNCTAIENGWVWNIPLWSRIGTGYVYSSKFVDDNTALQQFEKHXNRKVESYKKINIKTGIHEKLWVKNVCAIGLXAGFXEPLXSNGXXTVIKFTLNFLRNVQRGEVSQWDKDNYTYQCKHEFKGFAEFVAMHYAFTHRQDTDYWKHQFNKTWTKSAEDLTPTGYEGLYRLMERRHNNFHFAHEGGTHCVAAGMNFSPTDYPALSFYNQETIMDMKSKWDPLITRLNKRKEYWDETAKKLKSYYQFMKDEIYV

SEQ ID NO: 85121 - protein, 501 aa, Sphingomonadaceae bacterium
  misc_feature (1)..(501): tr|A0A257DNB2|A0A257DNB2_9SPHN Tryptophan halogenase OS =Sphingomonadaceae bacterium PASS1 OX=2015579 GN=CFE36_ 01750 PE=4 SV=1
MAIEHIIIVGGGTAGWMAAAALSRIRAGRPVAITLIESEEIGTVGVGEATIPPFLDFNRLLEIDERDMLSMVQGSFKLGIQFVNWGKIGDSYIHPFGNYGYQVDGISFHHVWHKYQQAGDKRPIQVFNVETMAAHFGRFARTEDYQRDDLPPVNYAYHIDAGRYARYLRNYAETRGVVRREGKISDVTLDNESGFVSSVTMEHGDVLKGDLFIDCSGFRGLLIEQALKTGYDDWSNYLPCNRAVALPCMREDGSGPLPYTRATAHSAGWQWQVPLQHRNGNGHVYCNEYMSDDEAHSILVNNIAGKPGAEPNFLRFVTGRRKKFWNKNVVALGLASGFMEPLESTSLHLVNTGINKLIALLSLDGVTQAQEDAFNRLTGKEYARIRDFLILHYNSTTRDDSPFWNYCRNMPVPDSLTEKVELFRQNGQIFREDDELFTETSWAAVMMGQGIKMGGHNAMADAVREPNTRREIDEMEKSIQFVVQHMPSHGEYLNRYCPAPA

SEQ ID NO: 85122 - protein, 512 aa, Sphingomonadaceae bacterium
  misc_feature (1)..(512): tr|A0A257DPI8|A0A257DPI8_9SPHN Tryptophan halogenase OS =Sphingomonadaceae bacterium PASS1 OX=2015579 GN=CFE36_ 01640 PE=4 SV=1
MNQSDTAISDIVIVGGGTAGWMAAAAFGRFLNDGHRKITVVESDEIGSVGVGEATIPAILNFNRMLDIAENDFLRETQGTFKLGIEFVNWGKLGDAYFHPFGHYGQDLHGINFHQLYLREYARGDHRSISEYCMSAMAAKSGKFGRASANARSPVSELSYAFHFDASLYAKFLRRHAEANRVVRKEGKIVRVHRRDGDGFVESVELADGTKVAGELFIDCSGFRGLLIGDTLGVGYEDWSHWLPMDRAIAVPTANIGPPVPFTRSTARTAGWQWRIPLQHRTGNGHVYSSQYLDDESAEEMLMANLEGDALAAPRRLSFTTGRRDLSWSHNVVALGLSGGFLEPLESTSIHLIQNGIARLFALFPDKNFNPLERDEYNRGMRDLYLDIRDFIILHYKATQRDDTPFWRYVRDMDIPEQLVRKMELFKTRGRVFRENAELFSMPSWVAVMLGQNVWPEHWDTLADALDEKRVSEAMAQMRRGYAATADALPTHEEFLRKAGAWAAPDSRNAQP

SEQ ID NO: 85123 - protein, 482 aa, Erythrobacter sp.
  misc_feature (1)..(482): tr|A0A2K1E7I3|A0A2K1E7I3_9SPHN Tryptophan halogenase OS =Erythrobacter sp. SAORIC-644 OX=1869314 GN=BA950_09355 PE=4 SV=1
MAAALLARFLPPDYRVELVESEAIGTVGVGEATIPQIRHFNQALGIDEAEFLRETKGSFKLGIAFDGWRGEGHSYMHAFGPVGQSSGLIAFRHYWLRAKALGHAKDLAHYSPNEVAARNLRMPGPGGADLPYAYHFDASLYATFLRHYAETRGAVRTEGTIERVERDGETGDIAALVLDGDRRMEADFFIDCTGFRALLIEGAMEAGFDDWSNLLPCDRALAVPCASGGDFTPYTRAVARKAGWQWRIPLQHRIGNGYVFSSQFCSEADAADTLLANLDGSPDGTPRLLSFTTGKRRRQWIGNCLALGLAAGFMEPLESTSIHLVQSALARFLQLLPAGRSTPSTIDHFNAQADFEWSRVRDFLVLHYWANGREGDPFWDAMRALDLPATLQAKIDQWRDTGHIHREHEELFTEVAWFQVFAGQGVSANHYNPLADAMAEQDLLDFLASQEHALEQAAAAMPHHADTLGRLMARPAKRNTAA

SEQ ID NO: 85124 - protein, 522 aa, Xanthomonas cannabis
  misc_feature (1)..(522): tr|A0A0B2CE48|A0A0B2CE48_9XANT Tryptophan halogenase OS =Xanthomonas cannabis pv. cannabis OX=1885894 GN=OZ10_1 2390 PE=4 SV=1
MAHTTSPDPTQRPVRRVVIAGGGTAGWMAAAALSKLLGRQLQITLVESDEIGTVGVGEATIPSLVTFHRLLEIDEATFMAATQATFKLGIAFEHWRDVDRHYIHSFGHTGTDHWSAGFHHFWLKGRQRGVARDFGDYCLELRATQEGRFAHLPNGGMNYAYHLDAGLYARFLRRFSEGFGVQRIEGRIGQVETDPHSGFLTALTLDNGSRVEGDLFIDCTGFAALLIGKTLGVGSDDWSRWLFADSALAVQTESVGPPVTYTRARADQAGWMWRIPLQHRVGNGIVYSSRYTDQDSARAVLERHLQGRALTEPRALRFTPNQRQRVWEKNCVALGLASGFLEPIESTNIHLIQRGIVRLLQTFPQVINAVDIAEYNRQAADEIAHIRDFVILHYHATERRDTPFWRDCAAMDIPDSLRHRMELFRQSGRVFHQGNELFAENSWVQVMLGQGIVPQQHHPVADLMGDAELSHFLESIRQRVDATVAGLPPHAQFLRHHCPAVPLPDPAARTPADVAAMAAPAG

SEQ ID NO: 85125 - protein, 501 aa, Sphingorhabdus sp.
  misc_feature (1)..(501): tr|A0A2D5DGM7|A0A2D5DGM7_9SPHN Tryptophan halogenase OS =Sphingorhabdus sp. OX=1902408 GN=CMN74_02485 PE=4 SV=1
  misc_feature (41)..(41): Xaa can be any naturally occurring amino acid
MSVQTIVIVGGGTAGWMTAAALSKLVKPRGLSVTLVESEQXGTVGVGEATIPPFVDFNQLIGVDEAEMLAAAKGSFKLGIQFVNWGKIGDSYLHPFGNYGYEVDGVSFHNVWMRMRAAGDQRPLAYFSPETMAAQFGRFAKTDGDERGDLPPINYAYHLDAGLYARFLRQLAESRGVIRREGKVADVQLNGENGHVRSVTLEDGSVLEGDLFVDCSGFRGLLIEQVLETGYEDWTHWLPCDRAVAIPSSGGGKLPPYTKATAWKAGWQWQVPLQHRNGNGHVYCSAHMSDDEALSILTDNIEGEALAEPNFLRFTTGRRKKFWNRNVVALGLSAGFMEPLESTSIHLINTGISKLIALLSLDDISPMQEQAFNRLTAKEYARIRDFLILHYYATSRDDSDFWNYCRTMSVPDSLTEKIELFRLNGQIFREEDELFAQTSWIAVMMGQGIMPMGYSPMADALDDPGLPAEIDGIDQSIRYRVGQMPEHRAYVDAFCKNARAA

SEQ ID NO: 85126 - protein, 472 aa, Planctomycetes bacterium
  misc_feature (1)..(472): tr|A0A5C6EIS1|A0A5C6EIS1_9BACT Tryptophan halogenase OS =Planctomycetes bacterium Poly59 OX=2528013 GN=Poly59_4 2650 PE=4 SV=1
MNEIDVAVIGSGFSGSILARVLASKGMTVAMIDPQMHPRFAIGESSTPIADAILRRLGTRYGLKDLISLSTWGSWQWDHADLDCGRKRGFSYFAHPKGQPFSESHIGERSLLAAASPEDDVADTHWFRADVDHYLCQQATTEGVALAAGFSVASIESSGDQWVLQLSGPDDSPKQLTMRARWVIDASGQSAALARLLGARDMADRLQTQTHSTFTHFHGVPSWQETLQASGIDGSEPFNCDDAAQHHLLGNGWMWMLRFVSGITSVGYTTTVGRPLEWSGYPSIEAMMKPAWLVRPGVGWQQTDRLQRWFDPICAERAIMLPTAALTMDPLHSTGIAHALAGVERVAGIILDDHSANDYATSFHRETMLLDRLVSTAYDVMDDFPRFTAACMLYFAGAIACEERLQKGETPTALWNADDPLFVAATDNACAMIADRSNDKYETQVRETIAPWNTAGLMDPAVNNRYAYTATK

SEQ ID NO: 85127 - protein, 423 aa, Niabella soli
  misc_feature (1)..(423): tr|W0F275|W0F275_9BACT Tryptophan halogenase OS=Niabell a soli DSM 19437 OX=929713 GN=NIASO_13510 PE=4 SV=1
MQTEKTDVLVIGAGPAGTVAGAIVNKAGYKVRVVEKMKFPRFVIGESLLPRCMEALEEAELLDSVLEQSFQRKTGAKFVRDGVICDYSFSDQFTDGWDHAYQVTRADFDKALADGLEAKGVPIDYETTVTAIKFNDDGSSVTTITDAQGDEKQIEAKFIIDGSGYGRVIPRLFGLDKPSNLPPRKAVFVHTKDVNRQMDDEPDRITIVVHKPDIWVWIIPFATGITSVGFVGDPAFFEKYSGSPEEIMRSLIADEPYIAERMKGIEYLWEPRVLQSWSATTEKFFGNGFVLTGNVTEFLDPVFSSGVTLATVSSQIAGKLVVRQLQGEKVDWEKEYTEVMMQGVNTFRSYVMGWYDTTLHTIFFAKDQNPDIKKMICSVLAGYVWDTDNTYVREHDTALKKLAKTIKLRDSIEYINNGFKEKG

SEQ ID NO: 85128 - protein, 376 aa, Corallococcus sp.
  misc_feature (1)..(376): tr|A0A554GMQ9|A0A554GMQ9_9DELT Tryptophan halogenase OS =Corallococcus sp. Z5C101001 OX=2596829 GN=FOF48_07755 PE=4 SV=1
MSGAHCDVAVLGGGPAGAGLALALCARTPLSVTLVERAAHDTARVGETLPPHARRPLVKLGAWESFVRDGHLPSRGTASCWGSATVGYHDTLMSPLGPAWHLDRARFDAGLRAQVAERGGGVRTGTSLSGCEALGAWGYRLHLSHPVEGPSTLEARFVVDATGWKAAFATAQGARRRVVDRCFALYGDFHLRAGAAFSTQALVEACPEGWWYSALLPGGHVVVALVGDGESLRGVRPRDPAPWLSLLARTTATRERLEACEFTGEPPRAVPAPVGVLTPVHAAHWLAVGDAACTYDPLSSQGITKALDAALPATEALDQHLRGRPNALAAYEAQVRRGFVEHLRTRDHYYREERRWPDAPFWRNRRESLASAALAA

SEQ ID NO: 85129 - protein, 509 aa, Caulobacter radicis
  misc_feature (1)..(509): tr|A0A2T9IY10|A0A2T9IY10_9CAUL Tryptophan halogenase OS =Caulobacter radicis OX=2172650 GN=DDF65_23110 PE=4 SV= 1
MANNLRKIVIVGGGSAGWITAAMLSHYLKDSPCEIELIESEQIGIIGVGESTIPPFLQLIRSLGIDEKEFMQETQAAFKLAIRFENWRQKDEVYYHPFGLIGGLVDVHEFYQVWLRGKAEGHPSSLQDFAPASVMADRWKFMSPAMAPRTMLANANYAVHIDAALLAKFLRKFAEARGVKRTEGIVKDVATRPDGFIEKVILQDGREASGDLFIDCSGFRSLLNGKTLGTEFLDWSDVLLNDRAIAVQTANIQDPHPYTLAQAQDAGWRWRIPLQHRAGNGYVYCSQYCSDDEALATLMSQVEGEAVRDPWLVPFKTGMRKQLFNKNCVAIGLAGGFIEPLESTALHLIYRGVDYLLRFFPDRDCDPVLAAEYNRRMQVDYEEIRDFIVLHYFTTKRDDTPFWRAYQQVTPPESLRERIELFKASGVLRDGVDDMFRAPSWQSVMEGMGIRPKRYQQLVDTLPAGVVRGLLDKSAPMLSELVDTLPSHGDFLRQHCPAPMPEALLKRAG

SEQ ID NO: 85130 - protein, 505 aa, Caulobacter radicis
  misc_feature (1)..(505): tr|A0A2T9JB79|A0A2T9JB79_9CAUL Tryptophan halogenase OS =Caulobacter radicis OX=2172650 GN=DDF65_14705 PE=4 SV= 1
MDRAIGSIAILGGGTAGWMAAAVLAQVLRGTKTTITLVESAEIPTVGVGEATIPPIIDFLRLLEIDQGQFMAATEGSFKLGIRFDDWRVLGERYWHPFGTFGPSVDRRPFHHMWHRLRAAGDDPRVEAYSLAAALGDAGRMAFADGQGEGRGAGPLGGMRHALHFDAGLVARFLRTYSEQRGVRRLERRVEGATLKDDGFVEALVLDGGERLAADFFIDCSGFRGVLIEGALKTGYEDWSAFLPCDRAVAGLTVRDANPPPFTQAAARPAGWRWRIPLRHRTGNGYVYSSAHVSDEEALADLEREAGKLLTEPRVLKFTGGRRRAFWNRNVVALGLASGFIEPLESTSIHFVTSGLMKLLDHFPDKDFDAANIADYNKALIAEYEAARDFIVLHYQPTRRDEPFWRERAAAALPPDLAERLALYRGTGRIPHRPTELFTEPSWFYVLEGMGVRPDAYDPLVDLSNLSQVREGLAGWRRRVAEIVQASPLHDAALDVVAGRRRPAA

SEQ ID NO: 85131 - protein, 502 aa, Caulobacter radicis
  misc_feature (1)..(502): tr|A0A2T9JPH0|A0A2T9JPH0_9CAUL Tryptophan halogenase OS =Caulobacter radicis OX=2172650 GN=DDF62_19930 PE=4 SV= 1
MSRPVRTVVVVGAGAPLWLTALALRKAFGAGGLVVRAVETAPPTPGLSHAGLPAVGNLHQLLGLSDVELARRCGAVPSLGQRFAGFAGDGSAFLHPYDTHGHAVDYVDFVHHWVLARRRGLKTGLEDFSLGAAAAKQGRIVEGDDPGRLSSPGVGLHVDAMAYAALLRQRALTDGVSVEQGAVTEVEREGERIEALRLEGGAVVAGDLFVDVGDGALIGQMPGAGFEAWSAWLPFDRVLPMAGQRLNTLPAYAHIEAVDGGWVGLYPLQDHTAGLAVYDSQVADAQGMVRRAEGVSPLGWRQGEAMVLKPGMQTRPWIGNCVALGAAAIALDPSDAAPMHALQAGLSHLVTLFPADIDSGPEARAYGAAMAAHGRSLRDFQAMHYHLNRRSGLPWEAARRVEPPADLAYKLRLFGARGVVPTREDEAFQPANWAACLIGHGVIPQAHDPLAEGVSEAEQIQIFQKILGRIAADVGRMRPLEARLAAMAQRPAAQAPAPLRFT

SEQ ID NO: 85132 - protein, 505 aa, Pelomonas sp.
  misc_feature (1)..(505): tr|A0A5C7UZL5|A0A5C7UZL5_9BURK Tryptophan 7-halogenase OS=Pelomonas sp. OX=1909303 GN=E6Q67_11790 PE=4 SV=1
MQDTQALVREVVIVGGGTAGWMAAAALSKLLKQQVQITVVESDEIGTVGVGEATIPMIQRFNQVLEIDENEFMRETQATFKLAIEFVNWGRVGDRYMHGFGRIGQTLNTVAFEHYWRKLHLQGRAGDLADYSITRAAALKNRFMRPVADAGNSPLGEIAYAFHFDAGLYARYLRRYAEARGVTRLEGRIVDARLSGLSGRVESLKLADGREVGGQLFIDCSGFRGLLIEQVLRTGFEDWSHWLPCDRAWAVPCESAGPLLPYTRSTAHSAGWQWRIPLQHRTGNGHVFSSSFMAEDEAQRVLMSQLDGRPTAEPRLLKFQTGMRRQAWTRNVVSVGLASGFMEPLESTSIHLVQTAIARLIEFFPTTHWDEADIAEYNRLSRFEYERIRDFLILHYHVNQREDAEFWRHCRHMSIPDTLAAKLALYQSRGRIVREGAELFAEVGWLQVMHGQGLQAQGYHPLADLIAERETEAYLQGVREVIANCVDVMPTHEQFIAQHCAAPRP

SEQ ID NO: 85133 - protein, 517 aa, Cellvibrio sp.
  misc_feature (1)..(517): tr|A0A1U9NAE2|A0A1U9NAE2_9GAMM Tryptophan halogenase OS =Cellvibrio sp. PSBB023 OX=1945512 GN=B0D95_11360 PE=4 SV=1
MSKSVLIVGGGTAGWICAAYMARMLAADTPGGVTITLVESDEIGILGVGEGTFPIIRKTMSRIGLDESELIREADATFKQGIRFNNWKKNPADDPHDTYFHPFQVASQHTDMDLLPYWLLGVAGDVPWAEACTVQERVVDAKLAPKLITHPNYNAPLNYAYHFDAGKLAQVVCRQAMAMGVKRLIDTIDDVKVDENGIASVQGRNHGELKADLYIDCTGFRARLIGEALGSEFTSYKDQLFCNRAVAMQVPYDRPDAPIPSCTYTSAQDAGWIWDIGLHNRRGVGYVYASDYCSDDEALATLKRYIGPAADNLQHRKLAFEAGFRKTQWHKNCIGVGLSVGFIEPLEATGISFAEVAALMLCNLFPWSGDYERSAQQFNQAMTKRFEHVIDFIKLHYYLSERTDTAFWRDNRAPASASDYLKGKLEQWRHRPPSFLDIDASHDIFDENSWQYILYGMGFKTDISARAGALRFYDDAKREFDSIRQQSNKAMAAVPSHRDLINEVVARGFRNASGGQR

SEQ ID NO: 85134 - protein, 498 aa, Xanthomonas campestris; identical to SEQ ID NO: 83595
  misc_feature (1)..(498): tr|A0A3E1LBZ3|A0A3E1LBZ3_XANCE Tryptophan 7-halogenase OS=Xanthomonas campestris pv. campestris OX=340 GN=D0A4 2_03840 PE=4 SV=1

SEQ ID NO: 85135 - protein, 512 aa, Saccharopolyspora sp.
  misc_feature (1)..(512): tr|A0A4R4Y863|A0A4R4Y863_9PSEU Tryptophan 7-halogenase OS=Saccharopolyspora sp. 7K502 OX=2530387 GN=E1288_3618 5 PE=4 SV=1
MLRNVVIVGGGTAGWMTATYLKEALGDQISVTLVESARVPTIGVGEATFSTVRHFFDYLGLAERDWMPACHASYKLAIRFENWREPGHVFYHPFERMAKVQGFTMADWWLKLGGERFDKDCMVIPELVDAKRAPKYSDGELFERSLHDGGDRKRQSTMSDQDTQFPYAYHFDASLLAEFLADFGTRRGIRRVRDDVLEVRQDERGWISHLVTREHGEITGDLFIDCTGFRGLLINQVLEEPFESYQEYLPNNRAVALRVPADVEQTGMRPCTTATAQDSGWIWTIPLSNRIGTGYVYADEFCSPEEAEKTLREFVGPEAADAEANHIRMRIGRNRNSWVRNCVAIGLSSGFVEPLESTGIFFIQHGVEQLVKHFPDANWEPELIASYNRAVARCLDGVRDFLVVHYRCAARADTPYWKATKERPLPPGLDERLEAWSVRLPDHTSVYPYYHGFEPYSYNVMLLGLGGHLPKRSLPALDFLDDTAARAEMARVREESARLVSSLPSQYEYLTS

SEQ ID NO: 85136 - protein, 486 aa, Maricaulis sp.
  misc_feature (1)..(486): tr|A0A2D8BZV0|A0A2D8BZV0_9RHOB Uncharacterized protein OS=Maricaulis sp. OX=1486257 GN=CMF74_18905 PE=4 SV=1
MIEDRNIAILGGGNAGWLTALFCKQIFPKSNILVIENENIGPIGVGEATTPHFVDFLRDLNINLRELIKETSATIKNGISFENWNGDQKKYFHGFRETGVLDNFNVEPYFGNNCIDFYYKSLILKKLDLNEFTYPAKLSYNKKVNLNNLNFALHFDAGKMTNYLKRVGVRRGITYVNDNFKKVTCDSDQYINSIVCEKNKYFVDFVFDASGLNRLLIKNHFNVKWNSFRESLPMKKAIPFHLKSKEQINPYTSAIALPHGWMWNVPLQSRIGAGYVFDSNYIDENQAQKEVEEFLNEKVEVRKVIDFESGCFEKFWVNNCMAVGLASSFVEPLESTSLYLTVTQLKLIPFYVNHMFTKNNFGYDQFNSIMLNSMKDIVNFIYLHYCTQREDSLFWKEFKDKTKPPEKFSTLFNRIKNMDMNWMDFPIHEKAMAYFELYNFLQISNGLNHFENFNLKGYEEINPDIEKYKKLIDFTIDDSPFHKEVL

SEQ ID NO: 85137 - protein, 508 aa, Sphingomonadaceae bacterium
  misc_feature (1)..(508): tr|A0A257DPE1|A0A257DPE1_9SPHN Tryptophan halogenase OS =Sphingomonadaceae bacterium PASS1 OX=2015579 GN=CFE36_ 01635 PE=4 SV=1
MNDNAIRKMVIVGGGTAGWMTAAAFSRVFGALPGLQIELVESDVIGTVGVGEATIPDICLFNSLLGIDENEFVRQTGATYKLGIEFVDWKRLGHRYIHPFGHYGIDMMGIEFHHFWLKGKGLGDNSLLDAYSMAAVAGKAGRFIRPQANQPNSPLSKFSYAFQFDAGRYAKYLRARAEAQGVKRTEGKITKVEQDNESGFVTAVVLENGTQVTGDLFIDCSGFRSLLIGDTLGVGFEDWTPWLPCDRAVAIPCTHREGGSSEPLTRSTARPAGWQWRIPLQHRIGNGHVYSSMHMSSDEATSLLLANLDGEPLADPNYIRFTAGYRHRAWEKNVVAFGLAGGFLEPLESTSIHLVQAGIARLMTLFPTREFRREGIDRFNRESIEGYSEIRDFLVLHYKATERNDSAFWDYCRTLEPPPGLADKLAMFRSSGRVFRENNELFTETSWLSVMVGQGIEASGYHPAADLLADDETMNRLAHIRSVIQGTADTMPTQSEFLIQQGSAMVKA

SEQ ID NO: 85138 - protein, 507 aa, Porphyrobacter sp.
  misc_feature (1)..(507): tr|A0A4Y6VZV9|A0A4Y6VZV9_9SPHN Tryptophan 7-halogenase OS=Porphyrobacter sp. YT40 OX=2547601 GN=E2E27_07150 PE =4 SV=1
MDRPEVRKLVIVGGGTAGWITAAAFARLLGERLTIELVESEAIGTVGVGEATIPQIIRLNTILGIDEHEFLRATSGTFKLGIEFVDWGSKGSRYLHTFGETGMVVGNVAFHHHWRRSAGAAGDPKGLWNWSLHQMAADQARFGKLDRVGNTPMAGLAYAYHFDASRYAQFLRAYAEARGVTRTEGIVQSVQRDGESGNICAITLQNGTVVAGDFFIDCTGFRSLLLGEELGVGYQDWSRWLPCDRALAVPSERLPTLVPYTRATAKDAGWQWRIPLQHRTGNGHVYSSGFTSDDAAADTLLTGLDTNALGDPRPIRFTTGRREAFWAHNCAAIGLSSGFLEPLESTSIHLIQSHVSRLIQLFPRAGDPSAMRDEYNRRCAAEFAQIRDFLILHYHRTDREDTEFWRYCKHMAVPDSLTHKLALFAASGRVGRDVDDLFREASWVQVMLGQGIMPADYDPMADRMSEGQLAEFLANLRTLMARAVAGLPTHEQYLARHCPVDAALLAA

SEQ ID NO: 85139 - protein, 441 aa, Actinosynnema mirum
  misc_feature (1)..(441): tr|C6W874|C6W874_ACTMD Tryptophan halogenase OS=Actinos ynnema mirum (strain ATCC 29888 / DSM 43827 / NBRC 1406 4 / IMRU 3971) OX=446462 GN=Amir_3184 PE=4 SV=1
MLDAIVMGGGPAGAVCASVLARQGRSVLVLERQEFPRFHIGESMLPYMVGLLERHGLLDAVREQGYVVKRGGEFIDPTGTKFFRAGVFRADFAKTGDGRHHETFQVERSHFDRVNLDQARAAGATVREGAQVVGLLEEGGRVVGVRYREGGVEREERARYVVDATGRAGVVANRFGLRRMIEDLRMVAVFHHRDGLDEAHNPGHEGDIQVGSHADGWIWAIPLSADRISVGTVMHRDRLRGRTPAEAFAEHVERVPRINQRLTGTTATSDFWVETDYSYHSDQVTGPGWVMVGDAGCFGDPMFSGGVLVGMATGAEAAEALGRALDSPADEEQALTGYSNFFKTGYDTYVRLIFSFYEGELLPALAEAHSEAGDLSEADMEMYVVRLLGGDFWSARNPVANALRANPAWSTFSPFEPVHRCPVYPELDVAELGGLAGAVGR

SEQ ID NO: 85140 - protein, 491 aa, Porphyrobacter sp.
  misc_feature (1)..(491): tr|A0A4Y6W129|A0A4Y6W129_9SPHN Tryptophan 7-halogenase OS=Porphyrobacter sp. YT40 OX=2547601 GN=E2E27_07690 PE =4 SV=1
MSDPREPLRRVVVVGGGQVGVLAAIAMRRALPGCEVLVIGTPPSPAAFADIASTAMPFTNKLHDRLGLDEADIVTRAGGSYRLITRYAGWGGAGQAGALAYGETLAPALKTAFARDWGAVRLPGAGAPPVGSLAQVLAEAGRFAPPPPGEPTPLSAVDYALRWNPAAYRALLIDTAEALGVGYIEGAIDRIEPGEGDTIAAVGLAGGGMIPADLFLDCSGPEASLIAAHPAFAFTDWSASLPTRRVYCSQPGAPMAALEDRITLTGLGWISEIAGRDGVQVMLGTPAHVPREDALALLRLPARAVIALTPGRAERPWIGNIVALGDAAARFEPLGPLHLDLAHRQLALLLEMLPGRAISPFEREEYNRRSGLMMEGVREVLALHFAGIEAQRVFGAVPLPGRVGAVIDQFLRRGRIPFREESPLLGQEQFALLVALGWVPGLPPAAQAADAAGESTARAAFEAEARAALDFAPPYDQWLARALGASRAPAG

SEQ ID NO: 85141 - protein, 502 aa, Rhodanobacter sp.
  misc_feature (1)..(502): tr|A0A0Q8M9S9|A0A0Q8M9S9_9GAMM Tryptophan halogenase OS =Rhodanobacter sp. Root179 OX=1736482 GN=ASD82_08200 PE =4 SV=1
MNDPRIRQVVIVGGGTAGWMTAALLAQALGPQLDIRLVESSEIGIVGVGEATIPQIRHVSQFLGIDEDELLKASRGTIKLAVQFNDWRRIGDSYLHAFSDIGLPLGLAAFQHYWLRGRELDPEAPDLWAYSINAQAANANRFARMDKVGDSPLTGIRYAYHFDAARFGQLLRRHAEQRGVKRTDGKVVDVALRGSDGFIESIRLDSGETIAGDLFIDCSGFRGLLTEGALKTGYDSWQHWLPCDRAVVVASEHGDTLRPYTQASAQQAGWQWRIPLQHLDSNGHVYSSSHLSDDEACATLLSHLEGPMIGEPRQLRFHTGIRKQVWNRNCIAMGLASGFIEPLESTSIHLMQSAVGRLLTMFPDKHFDPALIAEYNRQTRFEYERTRDFIALHYNATERDDTAFWRQCATMALPEGLAHRIELFRQSGHIFRDGEELFTPTGWLQVMIGQGIVPQRHSPLADGLPQAQLGEFLGNIRTLVDRAVASMPGHADFIARHFKAAD

SEQ ID NO: 85142 - protein, 521 aa, Sphingopyxis sp.
  misc_feature (1)..(521): tr|A0A1H6GDM3|A0A1H6GDM3_9SPHN Tryptophan halogenase OS =Sphingopyxis sp. YR583 OX=1881047 GN=SAMN05428974_3950 PE=4 SV=1
MTNKVERVVIVGGGTAGWLAASLIASSRRAKAAPLSITLVEAPDVPIVGVGEGTWPTMRTTLATIGLDEADFLAACDGAFKQASRFDGWVDGSAGDSYLHPFTTPPAVPTGELLAAWQASAPDQPFAAAMSAQAAVCNLHLAPRQRTMPGYQGAANYAYHFAAEKFAALLSAHATKNLGITHILDHVTGARRADNGDIAALTTGSGREVEGDLFIDCTGFKGLLIDGELGVEWIDRSAHAFNDRAIASQVPVPPGSPIASQTIATAHEAGWIWDIGLPSRRGIGCVYSSRFMDAERAEAILRNYIARELPGAVPEEGAFGAPFKHISFRTGHRARFWEKNCISIGLAAGFVEPLEASAIVLIELSLRALTDNFPADRAAMDIHSGRFNKLFRYRWDRIIEFLKLHYVLSRREEPYWRAHRDPGHIPPHLADLLTLWRDQPPSLSDFPYVDEIFSAQSHQYILYGMGFPAPAGWPASERAQAALAEMRQRARTLAAGLPTNRLYLDALAADLAAARQVEGTR

SEQ ID NO: 85143 - protein, 505 aa, Xanthomonas cannabis
  misc_feature (1)..(505): tr|A0A0B2CD12|A0A0B2CD12_9XANT Tryptophan halogenase OS =Xanthomonas cannabis pv. cannabis OX=1885894 GN=OZ10_1 4730 PE=4 SV=1
MTQAQIRKVVIAGGGTAGWIAACALSHQFRNLLDITLIESEQIGTVGVGESTVPPIRTFHRFLQIDEQEFLREVAGTFKLSISFEHWLRQGERYIHPFGITGQSTLVCAFHHLWLESQRRGMRSSFGDYCLETVASREDRFALPREPAVNYAYHLDAALYARFLRTRSEACGVQRIEGRIQQVTQHPDSGDVASLVLEDGQAIAGDLFIDCSGFRGLLIEQTLHTGYEDWSHWLPCDRAVAVQTEALGPPVPYTRAIAHEAGWRWHIPLQHRVGNGLVFSSRHLSDDEAHAKLLRDVAAPAVKDPWMVPFRTGRRLKAWNKNVVSLGLASGFIEPLESTSIHLTISAVVRLLTLFPAEGIAPSQVQLFNDVSRAEMEHVRDFVTLHYHATRRAEPLWQQCREMELPESLALRLRAWRERAHAWQAADELFRVDSWTHVLMGQGLMPEQHHPLTRAFSDQDLQGLLNDIAQPIRHAVDQFPSQQAFIERYCQARPEVWGARKPAIA

SEQ ID NO: 85144 - protein, 516 aa, Nostoc sp.
  misc_feature (1)..(516): tr|A0A318BH26|A0A318BH26_9NOSO Tryptophan halogenase OS =Nostoc sp. 3335mG OX=2204170 GN=DMC47_11325 PE=4 SV=1
MTRPISSIVIVGGGTAGWLAACLIAARSASGDTPPLSVTLIESPDIPTIGVGEGTWPTMRATLDRIGIAESDFLLACDASFKQGSRFDGWLTGAPGEHYYHPFVAPIDGDPRDVVAAWQSSQADRPFAEAVSAQPLACERDLAPRQRAMPDYAGALNYAYHLDAGKLAALLMRHATSKLGVRHLRDHVTGVDRADNGDISAVRTRSSGSIAGDLFIDCSGHAALLIAGEYGVSFVDRRGELFNDRALALQVPVPADSAVASQTTATAHSAGWIWDIGLPTRRGIGCVYASDFLSDDAAVDTLRDYVARTAPWAAAATLEPRRLSFRSGHRERFWEGNCLAIGLSAGFLEPLEASAIVLIELSLGALIDNFPVTREMMDIHAGRFNTLFRYRWDRIVEFLKLHYVLSHRDEPYWRAHRDPASIPDRLTELLQVWRHQPPSHHDLSMIDEIFPAASYQYVLYGMAFPPPVAGTRTPRSGNADAALRQVEHRARALASSLPDNRAYLSALRAAALQETI

SEQ ID NO: 85145 - protein, 518 aa, Roseateles sp.
  misc_feature (1)..(518): tr|A0A1H7T508|A0A1H7T508_9BURK Tryptophan halogenase OS =Roseateles sp. YR242 OX=1855305 GN=SAMN05216359_11739 PE=4 SV=1
MKAIDDILIVGGGTAGWLTAAFLAQQLGTAHGGVRITLVESSDIGIIGVGEGTFPSIRGTLSAIGIPEARFLQACSATFKQGVRFNHWVRPPGAEGSDHYFHPFSLPSQRPGAPELLPYWLMGEAGPERAFAEAVTLQKAVVEARHGPKRVTDGDYLGPLNYAYHFDAGRFAGLLAEQAQVLGVQRLIATVDRVDLDEQGAIAAVHTREAGVLRAGLYVDCSGFHARLIGEALGSPFTSLNDVLFVDRALAMQVPYDRPDAPIASCTLSTAQENGWIWDIGLQERRGIGHVYSSRHTDDDAAERELRRYIGSAAEALSPRKLTLNVGYRETQWVKNCVAVGLSGGFLEPLESSGIGLIETAAYLIAQLFPFDGDTAPVARHFNRFMADRYARIVDFIKMHYGLTQRRDTAFWRDNADPASFPDSLRDKLAMWRHRPPQRLDFITDVEMYLPASWQYVLYGMEYDTLLQGARHAWRRADEARREFSTIAQLGAHAVRDMPRHRDLIDQMLNRAGLKMAA

SEQ ID NO: 85146 - protein, 493 aa, Cellvibrio sp.
  misc_feature (1)..(493): tr|A0A1U9N8R1|A0A1U9N8R1_9GAMM Tryptophan halogenase OS =Cellvibrio sp. PSBB023 OX=1945512 GN=B0D95_07915 PE=4 SV=1
MQPIKKLVIIGGGTAGWLAAAAVGKIYQGQVSVTLIESDAIGVVGVGEATIPTMLAFHKLIGIPEVEMMRATHATFKLGINFKDWGEIGEDYIHSFGQVGRIFWAGEFQHFWARAKKNGLNIPFGAYCLEHEAARAEKFSISENPALNYAFHFDAGLYAKFLRKFSEGLGVVRHEGKIERVEQDVESGFVQRLHLDSGLTIDADFFIDCSGFRGLLIEETLKTGYENWQHWLPCDSALAVQTAKVKPATPYTTSTAREFGWQWRIPLQNRTGNGLVYSSQYADRIWAEKTLTENLEGEMLTAPRLIQFTTGRRKLGWHKNCVALGLASGFLEPLESTSIHMVTSGLIRFLRLFPLRGVQRVLVDEYNRQSKEEAESIRDFIILHYHATRRNDTEFWRHVRTMPVPDSLRHRIDMFTQSGMVFLGGDELFRTNGWTQVLIGQGFTPENYQPIVDNMSDMEFRAYMTGFRDHVANNISRLPGHEEFIAQYCAMEK

SEQ ID NO: 85147 - protein, 514 aa, Deltaproteobacteria bacterium
  misc_feature (1)..(514): tr|A0A355Q2P4|A0A355Q2P4_9DELT Uncharacterized protein OS=Deltaproteobacteria bacterium OX=2026735 GN=DDZ97_01 525 PE=4 SV=1
MTDNSSIFEKKIVVLGGGTAGWLSAFLLQDFCRQHELSAKVTVIESSKIPVIGVGEGTTAIFKTFLDSFGLEEAEFLSETRGTIKYGIRHKDWRKLGHHYDGPIDDPHFLIPPAGEDGFEYLNSYCVAAGRSVSEAHLFQILLSKGLAPVKTQKDQLVPNHPFLHAYHIDNALVGQYLRKKSKGIRIVDGVVEEALRNSETGHITSLKMDDGDLIEGDFFIDCSGFRRILIEKTLGNEWVDYSAELPVNRAMPFFLDLDTSKEIPAYTLAWAQKSGWMWQIPTQDRLGCGYVYCDKYCSPEEAQEEIESVLGHPIEPRQDLRFQVGRLQDSWQSNCVAVGLSAGFLEPLEATSIHSTLVQLILFAKEYLSAALNGDYSGRKDFNQRIAHQFDDFRTFLNIHYRSERRDTPFWEFVHQECLGEESIGRLERWQKSLPKREHFEGFLSGLPHVETQLYFPVLDGLGLLSQGAARQEMSNRNLKRQAQEELKQLHSKYLEMIQGSLGHREYLSKVSA

SEQ ID NO: 85148 - protein, 489 aa, Nostoc sp.
  misc_feature (1)..(489): tr|A0A318B5M7|A0A318B5M7_9NOSO Tryptophan halogenase OS =Nostoc sp. 3335mG OX=2204170 GN=DMC47_21590 PE=4 SV=1
MAAAALTKLIPTGVSVTLIESDAIGTVGVGEATIPPIRSFNALLGIDEADFLSKTQGSIKLGIEFVDWTREGHRYAHPFGEFGFDIEGVKFHHYWRKLVERGEASGIEDYNLCAAAMRAGRFIPPVTDPHDARSRLTYAYHFDAGLYARYLRSYAEARGVERVEGRIVDVALNGHSGVIESVALEGDRRITGELWIDCSGFRGLLIADALKTGWVSWRHWLQCDRAVAVPCAAAGAEITPYTRSTAREAGWQWRIPLQHRTGNGYVYCSDDIGDDAARQTLLATLDGAPLRDPQLIRFEAGRREAMWAKNCVALGLASGFIEPLESTSIHLIQSGISKLLALFPDRGFSPVERDEYNRLSILQLEQVRDFVILHYHANRRRTGDLWRRMREMAVPETLARKIDLFRGRGRFFRYEDELFAESSWVAVLLGQGIMPAGWDPLVDAIDSAAVRDRLERIRAAFARATDAMPPHHLWLARTAAARPDLKVPA

SEQ ID NO: 85149 - protein, 501 aa, Nostoc sp.
  misc_feature (1)..(501): tr|A0A318ALB4|A0A318ALB4_9NOSO Tryptophan halogenase OS =Nostoc sp. 3335mG OX=2204170 GN=DMC47_43400 PE=4 SV=1
MSDTRIRRIVILGGGTAGWMTAAALSRALTGQQIAITLIESDAIGTIGVGEATIPTIHWFNQIVGLDETQFMAETKATVKLGIEFVGWNGPGSNYLHPFGTYGPPGDGVMFLHRLIRGRLDGDTTPSEAYSLTAQIARAARFTRPVSDPRSLLSTLGYAYHFDAGLYARYLRGIAEKAGVTRIEGKVSRIDRAPDTGFVTALATDTGAEVAGDLFIDCSGLRGLLIEETMGSGFDDWTHWLPCDRAWAAPSAVESQVTAFTRATAAEAGWRWRIPLQHRVGNGYVFSSRFQSEDEARASLIAGMDGPPSAEPRLIRFTPGARKRPWMGNVVAIGLSGGFLEPLESTSIHLIQSGIAKLLALFPARDCSPLLADQYNRVFGQEMQDVRDFLILHYHRTAGRTEPMWRERQAMDIPETLARKIAHFEQSGRIVLSTDELFRDASWFAVLDGQGVIPRGYNPMIDGAGGADNLRHLEAVRNAIRDSTGKIPTIPPRPGQDARAV

SEQ ID NO: 85150 - protein, 502 aa, Cellvibrio sp.
  misc_feature (1)..(502): tr|A0A1U9NB76|A0A1U9NB76_9GAMM Tryptophan halogenase OS =Cellvibrio sp. PSBB023 OX=1945512 GN=B0D95_12915 PE=4 SV=1
MKANAIHKVVIVGGGTAGWMTAAALSKILGKTLDISLVESDEISTVGVGEATVPPLINFHGLLGIKEQEFMSACQGTIKLGISFEHWKEQDDKYIHAFGKTGKDHWAAGFWHCWLKGLRNGIGDGYGDYCVEHLAARAGKFAILPRSRDGHNYQVNYAYHFDAALYAKFLRKIAENSGVKRAEGKITHVTTNADTGFIESVSLASGQLIEGDLFIDCSGFAALLIEQTLHTGYEDWSHWLPCDRAVAVQTTLVGPPVPYTRAIARDFGWQWRIPLQHREGSGLVYCSRYLSDDDAKKTLLQNVDGDPFFEPRVIKFRSGQRLKHWNKNCVALGLASGFIEPLESTSIHLVQQGILRLVSLFPSGGIQQFDIDEFNAQTKIETNNVRDFIILHYNTTQRTDTPFWRYCRNMTVPDSLKHKLELFRESGKIFKVPGELFGENNWVQVLLGQGIMPKQYHQIVDMMSDEELAAFLYGIKMSAQNLVKQLPSHSDFLESYCKASNM

SEQ ID NO: 85151 - protein, 504 aa, Metallibacterium scheffleri
  misc_feature (1)..(504): tr|A0A4S3KRY7|A0A4S3KRY7_9GAMM Tryptophan halogenase OS =Metallibacterium scheffleri OX=993689 GN=B1806_02040 P E=4 SV=1
MPTLQPVKNIVIVGGGTAGWMAAAACAKVLGAGYAVQLIESEEIGTIGVGEATVPHLKLFNNLLEIDEVEFVKTVKGTFKLGIQFNDWGRLGDSYIHGFGKLGTDISLLPFHQFWIKARQRGWAGPLGDYSINTAAAPRGKFMPSASDVPASSPLADIRYAYHFDASLYARYLRGYAEARGVRRTEGKIKHVQLRGEDGYVESVTLENGSVIGGDLFIDCSGFRGLLIEQALHTGYTDYSQWLRCDRAVAVGCEKVGPPTPYTRVTARTAGWQWRIPLQHRTGNGHVYSSALISDDEAAATLLANLDGKPMGEPRFLRFTPGMRKKFWNKNVVALGLASGFLEPLESTSIFLIQSGIARLLSLLPWNDFSEVVIDEYNAQLGFELERIRDFLILHYHATQRDDAPLWRECARMSIPDGLAHKMRLFADSGRFFRECEEMFGDLSWVQVLIGQNILPRTYHPLVEQMPDDQLRQFVQGVAQVIESCTGMMPPHQTFIDRRCAAPA

SEQ ID NO: 85152 - protein, 514 aa, Deltaproteobacteria bacterium
  misc_feature (1)..(514): tr|A0A3D5JA77|A0A3D5JA77_9DELT Uncharacterized protein OS=Deltaproteobacteria bacterium OX=2026735 GN=DGB85_04 250 PE=4 SV=1
MSDNSSSSEKKIIVLGGGTAGWLSAFLLQDFCRQHQLSAEVTVIESSKIPVIGVGEGTTAIFKTFLDSFGLEEAEFLRETRGTIKYGIRHKDWRKLGHYYDGPIDDPHFLIPPAGEDGFEYLNSYCVAAGRSVTEAHLFQILLSNGLAPIKAKKNQLVPNHPFLHAYHIDNALVGQYLLKKSKGIRIVDGVVEDALRDSETGHVLSLKMDDGDIIEGDFFIDCSGFRRILIDKTLGNEWVDYSAELPVNRAMPFFLAHDRSKEIPSYTLAWAQKSGWMWQIPTQDRLGCGYVYSDEYCNPEEAQEEIESVLGHSIEPRQDLRFQVGRLKDSWRSNCVAVGLSAGFLEPLEATSIHSTLVQLILFAKEYLSAALNGDYSGREDFNQRIAHQFDDFKTFLNIHYRSERRDTPFWEFVGEECLGNDSKELLEKWRKSLPTRQDFNQFLSGLPHVETQLYFPVLDGLGLLSQGVARQEMSNRNLKRQAQEELKQLHNKYLEMTQGSLGHREYLSRVIA

SEQ ID NO: 85153 - protein, 531 aa, Rhodanobacter sp.
  misc_feature (1)..(531): tr|A0A1V3Q688|A0A1V3Q688_9GAMM Tryptophan halogenase OS =Rhodanobacter sp. C03 OX=1945858 GN=B0E48_03650 PE=4 S V=1
MPRLKKVLVVGGGTAGWLAACYLAKAMNAVHPDSVQVHLVESDHIGLLGVGEATFPSIRGTLAAIGLDERRFLVEATATYKQGIHYRHWVRSPGTPGSDHFFHPFSQPSQRPGGPELLPYWLLGAAPAGVSFADAVTMQSTLVDHGRGPRRPTDPDYQGPMNHAFHFDAACFAKVLAEHGQETLGVKRHVATVERAVLDEQGAIACVVTKELGELTADLYVDCTGLRSALIGGIMQSPFHSRRDVLFADRAVAMQVLYAKPDAPIPPYTISTAQEAGWIWDIGLQKRRGVGYVYSSRHTDAERAEEVFRRYLGAAGEGLTAMHIKFETGYRPEHWRKNCVAVGLAGGFVEPLESTGIALIELATYLLTHLLPGDTDNMESAARHFNEMMVARYDRIIDFIKMHYCLSQRRDSPFWIDNCDAASIPQTLQEKLAKWKLRPPHRLDFVGDLEMFMTASWQYVLYGMEFQTDLESMRSAYPHMEAARREFAMIRQAAARALDDLPDHRALVEQLCREHMQRIRPDADMAASASG

SEQ ID NO: 85154 - protein, 502 aa, Sphingorhabdus sp.
  misc_feature (1)..(502): tr|A0A2D5DLG3|A0A2D5DLG3_9SPHN Tryptophan halogenase OS =Sphingorhabdus sp. OX=1902408 GN=CMN74_11395 PE=4 SV=1
MRERLEKLVIAGGGTAGWMAAAALARFAPPGSRIELVESEAIGTVGVGEATIPQIHLFNGALGMDEAEFLRETKGSFKLGIEFDGWLREGESYMHAFGNIGRGVGLLPFQHYWLRAKKLGIAKPLQRYSLNELAARTMRMQRGRPAPNLPEMPYAYHFDAGLYAAFLRRYAEARGVVRHEGRIASVERDGESGAVTALALDDDRRIEGDFFLDCTGFRALLIGEALGSPFEDWKHHLPCDRAVAVPCANGGEFTPYTRSIARKAGWQWRIPLQHRIGNGMVYSSDHLSDDEAAETLLANLDGAPQGDPRPIRFRTGMRREQWSHNCLAIGLAAGFMEPLESTSIHLIQSAISRFLSVMPNDAPDPAIVDWFNAQASFEWTRIRDFLVLHYVANERRGEPFWDAVRAQELPETLAAKIDQWKATGFIHREHEELFTEVGWFQVFAGQGVEARSYNPVADALPEKDLRALLGETEAALVEQVRPMDHHIDFLARMIRAGQGTPS

SEQ ID NO: 85155 - protein, 501 aa, Nostoc sp.
  misc_feature (1)..(501): tr|A0A318BKY3|A0A318BKY3_9NOSO Tryptophan halogenase OS =Nostoc sp. 3335mG OX=2204170 GN=DMC47_12050 PE=4 SV=1
MNDARIRRIVIVGGGTAGWMAAATFARLLGPEYCEIALVESDAIGTVGVGEATIPQMATFNRMLGIDEAEFLRETRGSFKLGIEFVDWARIGHRYFHPFGSYGINMNGISFHAYWLRLHAMGEAPAIEPWSLQAMASAQGKFMRSIDAGNSPLSDIAYAYHFDAALYAGYLRRYAEARGVVRHEGRIDRVDLDGENGFVEAVVLEDGRRIEGDLFIDCSGFRGLLIERTLGAKFIDWSHWLPCDRAVAVPCAGSEAMAPFTRATARRAGWQWRIPLQHRIGNGHVFSSTHMSDDEATAILLDNLDGEPLGDPRFVPFRAGHRDRMWIGNCVAIGLSSGFLEPLESTSIWLIQSGLSRLMAMFPDRQFRSAEIERYNRILSTEYAEIRDFIILHYHATERDDSPFWRHCRTMEVPERLSEKMRVFRSHGRTFRENEELFNDTSWFAVMNGQGMRPAGYDPIAETLSLDETRARLAHIRDAIQASADYMPTHRAFLNEYCGVR

SEQ ID NO: 85156 - protein, 513 aa, Sphingomonas sp.
  misc_feature (1)..(513): tr|A0A4R1U8U4|A0A4R1U8U4_9SPHN Tryptophan halogenase OS =Sphingomonas sp. PP-CC-3G-468 OX=2135656 GN=C8J41_1017 84 PE=4 SV=1
MHEIQNIVIVGGGTAGWLTAGVIAAKHQARRQHGFTVTLVESPNVPTIGVGEGTWPTLRSTLKKMGVSETELFRQCDASFKQGARFNRWTTGAPDDGYYHPLMLPQHFGQVNLAPHWLADEGSATFCDTVTPQGRICDEGLGPKTIATPEYDGHANYAYHLDAGKFSHFLQRNCCDTLGVRHVKADVTEVHLDDSGDIATLDTEQGVSIAGDLFIDCTGFAALLIGGAMKVPFRSCTDVLFCDTALAMQVPYDQPDAPIASHTISTAQSAGWIWDIGLPTRRGVGHVFSSSHISADAAEQELRDYIGPAARDLTARRLAIRAGHREQFWVRNCVAVGLAAGFLEPLEASAIVLIELSAKMIAEQMPACREVMDVVAHRFNDTAHYRWGRIIDFLKLHYALTKRTDTAFWRDNVRPESIPDRLAGLMELWRFQSPWVHDEFDRAEEVFPSASYQYVLYGMGARTAVMPGSIDDDVALARRARHDNQVQTQRLVSSLPGHRELIDRIKRHGLQPI

SEQ ID NO: 85157 - protein, 495 aa, Cellvibrio sp.
  misc_feature (1)..(495): tr|A0A1U9NAK8|A0A1U9NAK8_9GAMM Tryptophan halogenase OS =Cellvibrio sp. PSBB023 OX=1945512 GN=B0D95_10445 PE=4 SV=1
MSSKPVSHIVIAGGGTAGWMTAAYLANWLGNTNIRVTLVESELIGTVGVGEATVPGIHQFIKDLNIRESEFIKATNATFKLGIEFENWVAPNQSFFHPFAGYGVPIEDRPFHKTWWAAKQQGYSAALAEFCLCTQLAKAGRFAQPSFDPDSRLAWYNYAYHFDATLFAKYLRGYAEARRVKRIEGKINQVQLDPDSGFIHSLHLESGEQISGDLFVDCSGISALLIGKTLGVGYEDWSQWLLSDSALAVQTQSVAEPDPFTRSTARTAGWQWHIPLQHRVGNGYVFSSQFITEDQARAELRANLRGERVTEPRLIRFTTGMRQDFWHKNCVAIGLSSGFLEPLESTSISLIQTGINKLVAFLVDYEIQEKQVAEANRLNRLEYERIRDFIILHYKLNGRTEPLWQHVRDMEIPATLEEKIATFKAFGDIQLLEIESFTEHSWISMFAGFAVNPTGLTPSPEPGKMQAVMDKMRAAVGKGRDYAPSHAEFLQTLES

SEQ ID NO: 85158 - protein, 493 aa, Verrucomicrobia bacterium
  misc_feature (1)..(493): tr|A0A1Z8TLN5|A0A1Z8TLN5_9BACT Uncharacterized protein OS=Verrucomicrobia bacterium TMED56 OX=1986792 GN=CBC16 _10720 PE=4 SV=1
MSSKNKKLIVLGGGTAGWLTALFLNKIFPKYETTLIESKQVGIIGVGEATTPNIIYMLDYLNINLSELISETKGSIKNGINFENWNGDGKKYFHGFYERLADFSVPPIFKGDCWNHYLNNLISKKLDFNTHTYITKLSYENKVDVHKTSYALHFDTNLLSEYLHKTGVDRGIKYVNGKLKKVHSSNLNDNINKITLTNNKSYSCDFIFDCSGFSRLLIGKHFGVKWKSYKQHLPMKKAIPFWLKQTGNIQPYTTALAMKYGWIWKIPLQHRIGSGYIFDSNYINDDQALKEAEKTLNTKLEVNKIIDFEAGRYESFWHENCIALGLASSFIEPLESTSIFLTIQQLFNLNHFLGDMFKENKNSKALYNEMSNKNMDETLNFVYLHYLTKRNDSPFWKNFRKDYPPPTNFRHVLSLIRSGNLRFLDIEEVKKTAAFPISSYLMVAYGLGLFNKKPNMIYYKNIVPTISQYLDAIKQATDQATPLNIFLDHVNYK

SEQ ID NO: 85159 - protein, 532 aa, Aquimonas voraii
  misc_feature (1)..(532): tr|A0A1G6VKQ9|A0A1G6VKQ9_9GAMM Tryptophan halogenase OS =Aquimonas voraii OX=265719 GN=SAMN04488509_103142 PE=4 SV=1
MADEARRIRRVVIAGGGTAGWVAACALSHQFRDLLDITLVESEQIGTIGVGESTIPTVRTFHRLLQIDEREFMRATAACFKLSIKFSDWGREGETYIHPFGRTGLGTWACEFHHFWLESLRRGQRSDLADYCLEAAASRADRFALTGAAQGSAASWSTRWELAQSGPGQGELSYAYHLDAAQYAAFLRRRAEQQGLVRVEGKIREARQHPVSGDVAALVLDSGQVIEGDLFIDCTGFRGLLIEQTLKTGYEDWTHWLPCDRAVAMQTESVGPAAPYTQASAHSAGWRWQIPLQHRVGNGWVFCSRYMSDDEASARLRAATQGAALRPPMVLPFVTGRRRQVWNRNVVALGLSSGFIEPLESTSIHLALSGVARLIHMFPFAGIDDSLVRRYNEASRAEAEHVRDFIILHYHANQRDEPMWRECRAMGLPDSLAQRIALFRDRAHAWQGEDELFRVDSWTHVMLGQGITPRAHHPLSRALPDADLAQLLAAIRQPIQRRVDSMPSHQAFLERYCPAERPPEMRTRPSAVLKNA

SEQ ID NO: 85160 - protein, 495 aa, Pseudoalteromonas sp.
  misc_feature (1)..(495): tr|G7G5P8|G7G5P8_9GAMM FADH2 O2-dependent halogenase I OS=Pseudoalteromonas sp. BSi20495 OX=386429 GN=prnA PE= 4 SV=1
MTKTNAVKNVVIAGGGTAGWMAAAALAKLVGNNINITLVESDDIGTVGVGEATIPPIRTFHKLLGINEQAFMKATQASFKLGISFENWGDENTHYIHSFGATGKECWAGEFHHFWLQGKALGINNPFGDYCYELQAAKAGKFAFNQQNPINYAYHMDATRYAQFLREFSEPLGVTRIEGKIQKVVKNTKTGHIESLILNNGEHINGDFFIDCTGFRGLLIEQALHTGYEDWSHLLPCNSAIAVQTKSTSETVLPLTRSIAHKSGWQWRIPLQNRIGNGLVYCSQYMDDEQAKALLLNNIEGEPLTEPRIIKFKTGRRLKGWNKNCLALGLASGFVEPLESTSIHLIMSGIIRFMRLFPFNGITNHAIDEYNKQLKSEIENIRDFIVLHYKVTNRDDSEFWQHCSAMEVPKTLQHKTDLFKQTGRVFLDDGDIFRVDSWVQVMLGQGIEPNQHHLIASMMSDEELARFLHGIKQQIEQRVSQLPPHHEFLKQYCPA

SEQ ID NO: 85161 - protein, 510 aa, Sphingomonas sp.
  misc_feature (1)..(510): tr|A0A430EFJ3|A0A430EFJ3_9SPHN Tryptophan 7-halogenase OS=Sphingomonas sp. ABOLE OX=1985878 GN=CA234_17250 PE= 4 SV=1
MRDDHLRRIVIVGGGTAGWMAAAALGKLVGTLPGLQIALVESDAIGTVGVGEATIPHINLFNRMLGIDEAAFVRETRATYKLGIEFVDWLRLGTRYVHPFGVYGLDMLGVEFHHFWLKARTLGDTTPLDAYSIGIAAARRGRFAHPRPDQPHSPLARLGYAFQFDAGLYAGFLRRLAEGLGVHRTEGRIVEVRRDGESGHVAAVRLESGAEVAGDLFVDCSGFRGLLIEQTMGASFCDWTHWLPCDRAVAVPCAPGGERLPLTRATARAAGWQWRIPLQHRTGNGYVYAGEHLSDDEATATLLANLDGPALAEPRALRFRAGHRDRAWIGNVVALGLAGGFLEPLESTSIHLIQSGIGRLMALFPSRGFDAPEIDRFNRETAQEYADIRDFLILHYKATERDDTAFWRRCRDLAPPESLAERIALFRRNGRILHEQRELFQAPSWLAVMTGQGIAPAGYHPVADLLSDAETRERLNHIAQVIEETANTMPLHDDYLRQIGCALPQLRRAS

SEQ ID NO: 85162 - protein, 497 aa, Frankia casuarinae
  misc_feature (1)..(497): tr|A0A1X1PSN6|A0A1X1PSN6_FRACC Tryptophan halogenase OS =Frankia casuarinae (strain DSM 45818 / CECT 9043 / CcI 3) OX=106370 GN=UK99_18975 PE=4 SV=1
  misc_feature (344)..(344): Xaa can be any naturally occurring amino acid
  misc_feature (373)..(373): Xaa can be any naturally occurring amino acid
MAVTDSAEFDVVVVGGGPAGSTLAALVAMQGHRVLVLEKEHFPRYQIGESLLPSTIHGVCRLTGAADELAKAGFPLKRGGTFRWGATPEPWTFAFSVSSRMAGPTSFAYQVERSKFDEILLRNARRVGAEVHEGCSATDVIEDGDRVVGIRYTDDGGNRREARASFVVDATGNKSRIYHRVGGTRQYSEFFRSLALFGYFEGGRRMPEPNRNNILCVAFDSGWFWYIPLSDTLTSVGAVVRSEMAEKVQGDSEQAMKALIEECPMISDYLAPARRVTTGQYGQLRVRKDYSYHQTTFWRPGMVLVGDAACFVDPVFSSGVHLATYSALLAARSINSVLAEIVDXKTAMQEFEARYRREYGVFYEFLVSFYEMXHSEDSYFWQAKKVTGNSQPELEAFVELIGGVSSGESALTDADALALRLQANTADFTTAVDALVANNSESMVPFMKSQVIRGVMHEGSQMQMRALLGEDAEPETPLFPGGLVSSADGMFWLPTDA

SEQ ID NO: 85163 - protein, 516 aa, Caulobacterales bacterium
  misc_feature (1)..(516): tr|A0A1F8IMT8|A0A1F8IMT8_9PROT Tryptophan halogenase OS =Caulobacterales bacterium RIFOXYB1_FULL_67_16 OX=17975 88 GN=A2352_07610 PE=4 SV=1
MDQPRRPLKKICIVGGGTAGWIAAALMAEHFKGRMAEVELVESDDIGTIGVGESTVPPFLEMLKKLGINEQDFIQQTQASFKLGIQFDDWTEKGESYFHPFGAIGVPVDVSDFYPVWLKARMNGYQRPLMDFASAARMAAHERFMLPFKAQRSPIGGASYAVHVDAKRVARYLRDFAEARAVKRTEGIVEEVMTRPDGFVSGLKLKSGQTVEADFFIDCTGFRALLIGKTLGVGYTDWSEWLMCDRAIAVQTENVGAPKPYTLAQAQDCGWRWRIPLQHRTGNGHVFCSRYMSDDEATARLLAQVEGRPVVNPMVVPFKTGVREKIWDRNVLSLGLASGFIEPLESTAIHLIYRGMDFFFRLMPDLDCDPKLATEYNRRMTVDYEEIRDFIILHYALTRRDDTPFWRACRDMALPEGLQHKLDVFRANGSLVEALDPLFRNVSWYAVMDGMGVTPRSYPPLVDRIDFAGLTAEMDRAADILNAFVKDLPSHQQFLQDNCPAPPVDLAPVALAAVPA

SEQ ID NO: 85164 - protein, 506 aa, Brevundimonas sp.; identical to SEQ ID NO: 84084
  misc_feature (1)..(506): tr|A0A069ITM8|A0A069ITM8_9CAUL Tryptophan halogenase OS =Brevundimonas sp. EAKA OX=1495854 GN=ER13_11120 PE=4 S V=1

SEQ ID NO: 85165 - protein, 500 aa, Cellvibrio sp.
  misc_feature (1)..(500): tr|A0A3D4PYB4|A0A3D4PYB4_9GAMM Tryptophan halogenase OS =Cellvibrio sp. OX=1965322 GN=DIW64_04045 PE=4 SV=1
MTEHTAVNSIRKIVIAGGGTSGWLAAAAISKVLGKNLDITLIESPEIGRIGVGEATIPTLRVFHKLLGINERELMAHVQGTFKLGIEFSNWANKGDKYFHSFGLTGKDCWACQFQHFWLAGKKYGIDVPFGDYCPESKAARLEKCSGENDEINYAYHLDATLYADFLKIFSMKHGAKHVEGLIEKVIVSPENGFIKSLLLKDGREIEGDLFLDCTGFRALLIDGALNTPWVPYGHYLPCDSAIALQTELVRAPRPYTQSIAHDFGWQWRIPLQHRAGNGMVYSSRHVSDDEAMATLMKNLEGRPVTEPRVIKYKTGRRMKVWNKNCIAVGLTASFIEPLESTSIHLAMSAIYRLMRYFPQNEIVMSNVDEFNKQSAEETDRARNFVILHYHATQRDDTEFWRYCKNMEIPEALGHRVQLFKDTAAIALEEKELFLNDSWVQVMMGQGIMPTAYHPIADVMDEMELKKFLGYLSGSVGEKVSAMPSHQELINQYCKAIAPV

SEQ ID NO: 85166 - protein, 594 aa, Enhygromyxa salina
  misc_feature (1)..(594): tr|A0A2S9YSJ3|A0A2S9YSJ3_9DELT Tryptophan halogenase OS =Enhygromyxa salina OX=215803 GN=ENSA7_22250 PE=4 SV=1
MADSFEVAILGGGLAAQCLARHLRRAGVTGPIVVIDRGALPIPATTLKLGESTVEAGAWYLGQRLGLHDRLLAEHEMKFGLRFFFSAGNNDDVGDRLELGPQHAARFRRGLRPPAYQLHRGRLEHMLTRLNEAAGVTMWPGTLVGEITLATTNERHRVELRDQASGRARTIHARWLIDASGRAGLLTRPQQLRRPLAHRVRVAHGWVAGRIDPERWTARPEFGDRIEPDLRWRSTVHLIGPGYSIWMIPVDPQITSIGVVARAGGGVLDPISDAATLNRWLAEREPQLAATIARSAWIDGPHFGDVEAHVSRVVVSPRRFAVCGEAAAHLDPLYSSGFDLLAIANELIVATVLDDAQARPLAPICEQRNVVFAQVARQLLSVYADAYRLLDAPRIATHKITWDIATYLGYLAPLIMSGTFAQAQPLADHIQIAARVVRLNRRMQQLFSSWRARAGRAGHEVPSVNLAHLPPVASCFARLGDMDPSDPPARWHQLLRDNLRLLEDQAIATFLDAAADLGLTLPDGRIDAHAISLEPRAWAADGLILREPTPHDTETAEQRVSATRRGMSGQGSLSSPLVLEPDTRSPSPADRSPA

SEQ ID NO: 85167 - protein, 538 aa, Burkholderia cenocepacia
  misc_feature (1)..(538): tr|A2W5K4|A2W5K4_9BURK Uncharacterized protein OS=Burkh olderia cenocepacia PC184 OX=350702 GN=BCPG_05662 PE=4 SV=1
MTHPIKNIVIVGGGTAGWMSASYLVRALQHHANITLVESAAIPRIGVGEATIPSLQKVFFDFLGIPEREWMPKVNGAFKSAIRFVSWRKSADGSRGDHFYHLFGNVPNCDGVPLTHYWLRKREQGFQQPMEYACYPQTEALDGKLAPCLADGARQMSHAWHFDAHLVADFLKRWATERGVKRVVDEVEQVHLNDRGYIASLSTKEGRTLEADLFIDCSGMRGLLINQALKEPFIDMSDYLLCDSAVASAVPADDARDGIEPYTSAIAMNAGWTWKIPMLGRFGSGYVFSSKFTSRDQATADFLDLWGLSDKQPLNQIKFRVGRNRRAWVNNCVAIGLSSCFLEPLESTGIYFIYAALYQLVKHFPDTSFDPRLADAFNAEIVYMFDDCRDFVQAHYFTTSRDDTAFWRANRHDLRLSDAIKEKVERYKAGLPLTTTSFDDSTYYDTFDYEFKNFWLNGNYYCIFAGLGLLPDQSLPLLRHRPESIDKAEAMFARIRREAERLRASLPTNYDYLRSLREGDAGLSRSQPGPTLATPEIL

SEQ ID NO: 85168 - protein, 517 aa, Thalassotalea euphylliae
  misc_feature (1)..(517): tr|A0A3E0TU31|A0A3E0TU31_9GAMM Tryptophan 7-halogenase OS=Thalassotalea euphylliae OX=1655234 GN=DXX93_16365 P E=4 SV=1
MTNNTNSHQVPVSHETNVADNQQIRKVVILGGGTAGWISAALLKKLLGEAVAIELVESQEIGTVGVGEATIPPIQVLNTVLGINEAEFLRETKATIKLAIRFENWKQQGHQYYHSFGAIGKSMAFCHFHHLLKRAGGLEDESQLWQYDLNYLCAEAGKFAKIKTKDPIIDMPYAYHFDAGLYAKYLRKFSEKLGVVRTEGLVERVNQCADSGNIKELILKSGQVVAGDLFIDCSGFKGLLIQQTLRTGYEDWSQWLQCDSALAVPSERHEKTAPYTRSIAHSAGWQWRIPLQHRNGNGLVYSSRHYSEQEASDILLSHLDTKPLADPKPIRFQTGRRYQQWHKNVIAVGLSSGFLEPLESTSIHLIQSAVVRLVHLFPHCGITADVVDEYNKQSKVEFEQIRDFLILHYHVTERTDSQFWRDMRAMDIPDSLRHKIALFKENGRLFRDQNDLFLENSWLQVMVGQGILPKDYHPMANSMSLDYIEETLKKIKAIKADPVSKLPSHDEFLAHYCQLKK

SEQ ID NO: 85169 - protein, 499 aa, Brevundimonas sp.
  misc_feature (1)..(499): tr|A0A069IV68|A0A069IV68_9CAUL Tryptophan halogenase OS =Brevundimonas sp. EAKA OX=1495854 GN=ER13_06290 PE=4 S V=1
MRQLKTILIVGGGSAGWMAAALFSKLFKGLYDITLIESEAIGTIGVGEATIPAIKTFNELIGLDENDFMRRTQASFKLGIQFVDWDRVGSSYIHGFGVIGRDLKWLRCHQYWLKMRAEGKVSDLAAYSINTAAALQNRFMRADPKRPGSPLGHIAHAFHFDAGLYAKYLRGMSEAAGVRRREGKVVSVQLRPEDGFVDSVTLEDGAVVSADLFIDCSGFRGLIIEQAMKTGYEDWSHWLPCDRAMAVPCARTEPFTPYTRSTARPAGWQWRIPLQHRTGNGHVYSSRHMDDGEAEQILLSNLDGAQMAEPNRIRFVAGKRRQIWNRNCVAAGLASGFLEPLESTSLHLIQSVLIRLVRLMPDAGFDPATIAEFNRQTDFEYERIRDFIILHYKATERDDTPFWRYCRDMDVPVTLERKIDLFRANGRIFREDDELFAEESWIQVLLGQGIIPVGYDPLVDVTPEPDIERYLADVETVIGKCVALMPSHADYVAKACPAA

SEQ ID NO: 85170 - protein, 510 aa, Cellvibrio sp.
  misc_feature (1)..(510): tr|A0A3D4PW81|A0A3D4PW81_9GAMM Tryptophan halogenase OS =Cellvibrio sp. OX=1965322 GN=DIW64_01140 PE=4 SV=1
MSESNALDNIKKIVIVGGGTAGWMAAAAFSKFFKNQFCEVVLVESDDIGTIGVGEATIPQIQVFNQSLNIDENDFIRKTQGSFKLGIEFVNWGAIGESYIHAFGGVGNDMDSIPFYHYWLKLNKQGGSADIGEYCFNSLASRKNKFMRSIDAGNSPLSNIAYAYHFDAGLYAKYLRGFSEKLGVQRTEGRISNVNLDEDSGYIKSVSLENGQEINGDFFVDCSGLHALLIGKALNVEYEDWSHWLPCDTAWAVPSQKLDPLPSYTRATAHAAGWQWRIPLQHRTGNGHVFSRRFTDVDTAKDLLLNNIQGEILAEPRLIKFVTGRRKQFWHKNCVAIGLSSGFMEPLESTSIHLVQSAIARIMSVFPRKTISQVEIDLYNEQVGFEYERIRDFLILHYKVTSRNDSEFWNYCRQMSVPDSLQQKIEVFKENAHVHRFNSELFNEISWVEVMLGQGLYPRGYHPLVDVVPAAELTRRMAHIKRVLDTAVDYLPAHAQYIAEHCAAQEVKNQ

SEQ ID NO: 85171 - protein, 503 aa, Alphaproteobacteria bacterium
  misc_feature (1)..(503): tr|A0A257JPG1|A0A257JPG1_9PROT Tryptophan halogenase OS =Alphaproteobacteria bacterium PA3 OX=2015571 GN=CFE32_ 11055 PE=4 SV=1
MQGQSQKLERLVIVGGGSAGWMAAAAIANAAGRGCKITLIESDEIGTVGVGEATIPPIKVFNRSLGLDEKDFVVRTQGTFKLGIEFVNWGRQGHRYFHPFGTYGADFDMVPLHQYYLRARQTGRDPGSLDEFTMAWQVAKRGRFAPPTQDPRLIQSTFDYAYHFDAGLYAQFLRSYSEARGVVRMEGKIADVGLDGEDGRITHVKLEDGRKVEGDFFVDCSGFRGLLIEGALKAGYEDWSHWLPCNRAMAVPCEHGGEFTPYTRSTAREAGWQWRIPLQHRIGNGYVYSSGFISDEEVERTLLANLDGKALADPRPLRFTTGKRKKIWHKNCVAIGLAAGFMEPLESTSLHLIQTGITRFLALFPEKTVDPVLETEFNRLSTYEWERIRDFLILHYCATERDDTELWRYCASMSLPDTLTYKMAHFRKYGRMVSDGPELFLNPSWLAVYLGQFVEPEGYDPLVDTRTHVEADRHLASLKTLMAQTAETFPTHRDFINQTCRAG

SEQ ID NO: 85172 - protein, 496 aa, Cellvibrio sp.
  misc_feature (1)..(496): tr|A0A3D4PY42|A0A3D4PY42_9GAMM Tryptophan halogenase OS =Cellvibrio sp. OX=1965322 GN=DIW64_04320 PE=4 SV=1
MSAKPVKKILIVGGGTAGWMTAAYLARWLEKVDIQVTLIESELIGTIGVGEATVPGIHQFIKDLGIKESEFIRATNATFKLGIEFENWAGIDKTFFHPFAGYGVPIEDRPFYKTWWAANKQGYTEGLDKFCLCTQLAHAGKFALPSFDEKSRLAWYNYAYHFDASLFAKFLRGYAEQRNVKRIEGKINHVQLDADTGFIQSVAMDSGQVVESDLFVDCTGMPALLIGKALGVGYEDWSHWLPCDSALAVQTTSVADPDSYTRSSARTAGWQWHIPLQHRVGNGYVYSSQFISHDHARDELLNNLTGERVTDPKLIRFTTGMRNNFWTKNCVAIGLSSGFLEPLESTSISLIQTGIAKMTGFLVNFEIDEKHVAEANRLNRLEYERIRDFIILHYKLNGRSNPFWQHVRAMTIPATLEEKMAVFRDSGDIKILEQESFQADSWVSMFYGFGQAPSVLAASTDTEKIHTIMQKMKSAIGKGAQLAPSHAEFIQTVGTT

SEQ ID NO: 85173 - protein, 506 aa, Cellvibrio sp.
  misc_feature (1)..(506): tr|A0A3D4PZM6|A0A3D4PZM6_9GAMM Tryptophan halogenase OS =Cellvibrio sp. OX=1965322 GN=DIW64_07435 PE=4 SV=1
MNGKRVLILGGGTAGWITANLMATHWQDKGFDITLVESPDIGIIGVGEGSTPPLKHFMDVIGVDEHEWMAECKATYKTGITFKDWSIKPGFTEYFHPFLSQPDQFSAPAFFHNSHLRRNGVDLEGHPNHFFLATELARQKLAPIAPENFPFEINYGYHFDSALLGKFLSRVAARKGVKYIQATLQEVALAADGSISALNMRDGQQLSADIYVDCSGFNSELLQKALKVPFISCADTLFNDSAVVFPTPQQAQIEVQTLATAMKYGWAWKIPLTHRNGNGYVYSSRFCDKDKAETEFRAHLNLLDADVEARHLKFKVGRVAEQWHKNCLAVGLAQGFIEPLEATALDMVQETVARFIEAYNNGNYSDQYRQEFNDRINLRFDAVRDYIVCHYRISSRVDTDYWVENGRNEKISNSLRSILTSWMQGKNITDELERQKLDAYFPNVSWSCLLAGKGIYPTQAQLKPGNELAHQYDLNNIHRYIQGCALNFKPHMEQLAMLEKAAVQAA

SEQ ID NO: 85174 - protein, 512 aa, Herbaspirillum sp.
  misc_feature (1)..(512): tr|A0A542M1R6|A0A542M1R6_9BURK Tryptophan halogenase OS =Herbaspirillum sp. SJZ107 OX=2572881 GN=FBX97_2588 PE= 4 SV=1
MYSVQMSIPTPIKRIVIVGGGTAGWMAAAALSRLLKNKYAICLVESDAISSVGVGESTIPMMRLFNNVLGINEDEFMRETKATFKLGIEFTDWGKIGERYMHGFGRFGQDLETVDFFQYWLKAHRAGQAPDLERYSINRMAAHANKFIRPSPEMANSPLADIVYAFHLDAGLYARYLRSYAEKHGVVRTEGKIVQVRQRLNGGPRDGFIESLALEDGSVVEGDLFLDCSGFRGLLIEQALNTGFEDWSHWLPCDRAWAVPCESGGELLPYTRASARPAGWQWRIGLQHRTGNGHVFSSRFMSDDEAAAILMKNLDGKPLAEPKLLRFTAGKRKKAWHKNVVAVGLSSGFLEPLESTSIFLIQSAISRLVSFFPDAGFHQADIDEFNRQCDFEVERIRDFIILHYHATERSDTPFWDHVRTMAIPDTLRRKLDLYGAHGRVVRENNELFTEIGWQQVLHGQGVQAAGYNPLVDLLSDKELADFLGNIERVVGKCVDVMPSHKEFIRAIATANR

SEQ ID NO: 85175 - protein, 522 aa, Cellvibrio sp.
  misc_feature (1)..(522): tr|A0A3D4Q058|A0A3D4Q058_9GAMM Tryptophan halogenase OS =Cellvibrio sp. OX=1965322 GN=DIW64_09865 PE=4 SV=1
MADHITRVVIVGGGSAGWLAAGIIAATSPSHVQVTLIESPDVAAIGVGEGTWPTMRATLQSMGISETDFFRECDVSFKQGSKFSRWTSLAKDDDYYHPFTAPAKYHEINLAPFWLPFKNKIPFAHVVCPQAAICDSGFSPKQITTAEFGAVLNYGYHLDAGKFAPFLHKHCVEKLGVTYISANVTAINSHENGDIRSVDTDTQGEVAGDLFVDCTGLSSMLLGKHYSIPFVSQKNILFNDSALAVQIPYAGGADAIASHTLSTAQTNGWIWDIGLQSRRGIGHVFSSHYTTDELAERELRNYIAPTVGEKMAEELSVRKISFNPGHRKIFWHKNCVAIGLSAGFIEPLEATALVLIELSAKMIAEQFPANRNAMDIVAKRFNNTLSHHWEKIIIFLKLHYVLTRRVDTEYWRDNCLASTIPDSLHELLALWKVQSPWLYDEMLREEMFPSASYQYIYYGMKGKTEVMGVDSAGSNKHLYDKKLRKAEALFMENAQHIQQLKKVLQPNRELIEKIKQHGLQAI

SEQ ID NO: 85176 - protein, 503 aa, Unknown
  misc_feature (1)..(503): tr|A0A0N0K877|A0A0N0K877_9PROT Tryptophan halogenase OS =alpha proteobacterium AAP38 OX=1523418 GN=IP70_18635 P E=4 SV=1
MPSDNRIRELVIVGGGTAGWMTAASLANHFQGSGLKITLIESSAIGTIGVGEATIPTIRRFYQSLGLRDLDVLKATHGTVKLGIRFDGWLNKDSSFIHPFGVYGQDLRDIPFHQYWLRLRAAGEKVDLGDYSLAVALARGGRFTTPSPNPPSTLSVFDWALHFDAGLFAQLMRQTAEKLGVQRIDAKIEKVELNPANGHISGLLLDSGATVTGDLFVDCSGFQGLLIEGAMSAGYEDWGQWLLCDRALAAQGYAITPPPPFTRVTAHNAGWRWTIPLQHRTGHGYVYSSRHISDSDAEAELLAAVGGDLKMAPRRITFTPGRRKQAWKGNCVAIGLSSGFLEPLESTSIALIETGIDKLKQLFPGRDIDPLLVDEYNDWSRREMERVRDFIILHYWLNRREDTEFWRDCRAIDLPDTLTRKVEMWKRRGHMVRYRWEMFQPASWLAIYAGFDFLPDGYDPALDGFDVPSLSRGLAGMRKAIADTVADCPTHQEFIDRYAKVAP

SEQ ID NO: 85177 - protein, 589 aa, Microcystis aeruginosa
  misc_feature (1)..(589): tr|L8P3M2|L8P3M2_MICAE Tryptophan halogenase family pro tein OS=Microcystis aeruginosa DIANCHI905 OX=1235808 GN =C789_306 PE=4 SV=1
MQMTQDKEYDVIIMGAGFAGLCQARHLMLKIPNIKVALVDPRPEQRTDKDLKIGESTIEIAALFLAKELGLHDYLIENHAPKQGLNFHWPKNPAKTETIDDYYHAGSNRQVPIPSFQINRSKFEQDLLKMDKAMGINFYNGQVVDVDLTPGDAIKTVKIKVGDERMELQAKHVIDAAGRKFIIGRKTDNLLFSPENLMGLNTGSAWVRVKNVDRTIFHSGYDPLNASTSHYYSTNHYFGEGHWLWMIPIDTQTMELSIGVIHHHDVINSTQVNSREKFHDFLRNNHQILANIIDSGEAVDFHYWPRISHTSKTLFSPDNWYVLGDAAYIFDAFYSYGTTTIALAIEGITEIVRAKLAGEADAEQKRAAYNEFNLAYSRSVNCLYRGHAKQLGQASVMSWRIYFEYMWWFGVQVPMYVGKWHLDLTYIPIFLKTLNSNIDGLFADLNEQFTELADKDVNIGLMDCYRGDQLFKGYHTLKHFDDFLENTKFEPRRCNVFAGLKATCFYAALWYALFQWKGFGIQGCLNPRHIYHFLRLLGLSGQATIGELIYKFKTKGLPANSEIEAMRQEFKTYQYQPKLQPWLAEATNS

SEQ ID NO: 85178 - protein, 506 aa, Xanthomonas axonopodis
  misc_feature (1)..(506): tr|A0A0P6VF71|A0A0P6VF71_9XANT Tryptophan halogenase OS =Xanthomonas axonopodis OX=53413 GN=XAXN_06620 PE=4 SV= 1
MIPAPPRNIVIVGGSTAGWMAAAAFARVLGPTFKVQLIESEQLGTVGVGEATVPHIKAFNNLLGIDEAEFVRQTQGSFKLGIEFVDWQRPGRKYMHGFGTQIGHPLGLLPFHQYWIKQHARGKAQPLGAYTLNTVAATRGKFMTSAGDVPANSPLANIAYAYHFDATQYAHFLRLYSEQRGVTRIEGLVEQVQLHPESGHVQSLQLASGQVIKGDLFIDCSSFRGLLIEDALHTGYHDFTHWLPCDRALAVPCEKVGPPTPYTRSTARAAGWQWRIPLQHRTGNGYVYCSAHISDDEAAATLLANLDGKPLADPRPLRFTTGRRKQCWNRNVVALGLASGFLEPLESTSIHLIQSGISKLLELFPREGISPVLVQRYNDRLAFEFDRIRDFLLLHYHATGRDDSAFWRHCRHMPITSELQSTLDLFRDSGRFYRNAEEMFAEISWVQVMVGQGILPQGYHPLVDQVPDRDAEGFLTSVAQTISHCVDVMPSHQQFIDRYCKAAALP

SEQ ID NO: 85179 - protein, 509 aa, Pseudoxanthomonas sp.
  misc_feature (1)..(509): tr|A0A0Q8ENX4|A0A0Q8ENX4_9GAMM Tryptophan halogenase OS =Pseudoxanthomonas sp. Root630 OX=1736574 GN=ASD72_2025 5 PE=4 SV=1
MDSPDAPEGHIRKVVIAGGGTAGWLAACALSHQFRDRLQITLVESEQIGTVGVGESTVPPIRTFHRFLQIDEQEFLRAVAGTFKLSISFENWRRPGDRYIHPFGITGQGTWAAAFHHFWLDSLRRGMPSELGDFCLETVASRGDQFSLQTQPQVNYAYHFDAGLYARFLRRIAEGYGLLRVEGKIREVRQHAHDGSVQSLVLEDGQIIEGDLFIDCTGFRGLLIEQTLQTGYEDWNAWLPSDRAVAVQTESIGPPVPYTRAIAHEAGWRWHIPLQHRVGCGLVFSSRHMSDDEARAKLLHDVGAPAIRDPWLVPFRTGRRLKAWNKNVVALGLASGFIEPLESTSIHLAISAVVRLVQLFPFAGIAPSLVELYNEVSRAEMEHVRDFIILHYHATQRDEPMWKSCREMPLPESLEIRLRAWRERAHAWQDPDELFRVDSWTHVLLGQGIRPGPPHPLARALADDDLRRLLDSIRQPIARAVATMPSQQAFIDRYCKAGAEVWGGRRAPN

SEQ ID NO: 85180 - protein, 415 aa, Pseudomonas wadenswilerensis
  misc_feature (1)..(415): tr|A0A380T898|A0A380T898_9PSED Tryptophan 2-halogenase OS=Pseudomonas wadenswilerensis OX=1785161 GN=cmdE PE=4 SV=1
MPNTELQQRQVLIIGAGPSGAIAGALLKRNGHDVLIIERQRFPRFSIGESLLSHCIDFVEEAGMLPALEAAGFQRKNGAAFAWGDEYSAFDFGDTFSNGKPSTFQVQRAQFDQLLADQAAAQGVEIRYEEEIIAADFERPRPQVRVRRLDGSEYRVEAEFVLDASGYGRVLPRLLDLEAPSNFPVRQAVFTHIEDRIDHPAFDREKILITTHPQHRDIWFWTIPFSNGRCSLGVVAAAEHFAAAPADLDACLKDFVAQTPSLAKVLANAAWDTPARTIGGYSANVKTLHGPGFALLGNAAEFLDPVFSSGVTIAMRSASMAAGVLHRQLQGESVDWQSEFAEPLKRGVDTFRAYVEGWYNGSFQDVIYHPASSPEIRAMISSILAGYAWDQRNPFVSEPKRRLRMLAEVCARTVA

SEQ ID NO: 85181 - protein, 521 aa, Xanthomonas axonopodis
  misc_feature (1)..(521): tr|A0A0P6VVV6|A0A0P6VVV6_9XANT Tryptophan halogenase OS =Xanthomonas axonopodis OX=53413 GN=XAXN_04135 PE=4 SV= 1
MSDTTPLDPQPRPVRRVVIAGGGTAGWMAAAALSKLLGRHLQITLVESDEIGTVGVGEATIPSLVTFHRLLEIDEAAFMAATQATIKLGIAFEHWREVDQHYIHSFGHAGTDHWSAGFQHFWLKGRQRGVARDFGDYCLELRAAQEGRFAHLPNGGMNYAYHLDAGLYARFLRRFSEGFGVTRVEGRIGQVETDAQSGFLTALTLQDGTRVEGDLFLDCTGFAGLLIGKTLGVGSDDWSRWLFTDSALAVQTESVGPPVTYTRSRADQAGWMWRIPLQHRVGNGIVYSSRYMDQDGARAVLERNLTGRALTEPRPLRFTPNQRHRVWEKNCVALGLASGFLEPLESTNIHLIQRGIIRLLQTFPQVINAVDIAEYNRQAAQEINHIRDFVILHYHATDRRDTPFWRDCAAMDIPDSLRHRMELFRQSGRVFHQANELFAENSWVQVMLGQGIVPQQHHPVADLMGDAELSRFLETIRTRVEAALVRLPAHADFLQRYCPAPPLPEPAARVPAPPVMATPAG

SEQ ID NO: 85182 - protein, 498 aa, Pseudoxanthomonas sp.
  misc_feature (1)..(498): tr|A0A0Q8EPK2|A0A0Q8EPK2_9GAMM Tryptophan halogenase OS =Pseudoxanthomonas sp. Root630 OX=1736574 GN=ASD72_0381 5 PE=4 SV=1
MNETSSRDVKRVVIAGGGTAGWMAAAAISRVLGKTLDITLVESEEIGTVGVGEATIPTLLSFHRMIDIDEREYMAATQGTIKLGISFENWLDTDHRYIHSFGFSGKDRGASGFQHFWLRGRKEGLASGYEDYCLELKAALADRFAHLPHGGINYAYHMDASLYAKFLRQFSERHGAKRIEGKIADVVTDAASGFITALTMENGDSIEGDFFIDCTGFRALLIGKALGVGFTDWSHWLFNDSALATQTTAVRDAVPYTRAIAGKSGWQWRIPLQHRVGNGIVYSSRHISDDEARAEFLGGLEGDVIKQPWPIRFQPGQRQQCWEKNCVALGLAGSFIEPLESTTIHLIQRGIVHLLQNFPQVVTRPAIDEYNARLDEELQHVRDFVVMHYHLSNRRDSPYWREIAEMGIPSTLRHRIELFRETGTVFHVPGELFGENSWIQVMMGQGIVPKRYHPTADVISPAELQRFLDDIRASVQGNAQRMPAHMDYLRSYCPAPKP

SEQ ID NO: 85183 - protein, 528 aa, Sphingobium francense
  misc_feature (1)..(528): tr|A0A4Q4IXW5|A0A4Q4IXW5_9SPHN Tryptophan 7-halogenase OS=Sphingobium francense OX=332057 GN=EWH08_16720 PE=4 SV=1
MSVDIPSLFMGNFDMIHPVRNIVIVGGGTAGWLTAGVIAARHRSRIGNGFTVTLVESPNTPIIGVGEGTWPTLRTTLSRMGISETDLFRECDAAFKQGARFARWTTGTPDDGYYHPLMLPQNFGQVNLAPHWLAGEGDESFCDSVCSQGRICDDGLAPKTIATAEYDALANYAYHLDAGKFAPFLQRHCCEKLGVRHVLADVEQVLMKEDGDIRAIRTTQAGEIEGDLFVDCTGFKALLIEGAMKVPFRDCNDVLFCDTALAMQVPYDRPDSPMASHTISTAQSAGWIWDIGLPTRRGIGHVYSSNHISDEEAERELRAYIGPPAEGLSARKIAIRSGHRETFWKGNCVAVGLAAGFLEPLEASAIVLIELSAKIIAEQMPACREVMDIVASRFNATTYYRWGRIIDFLKLHYVLTKRTDSDFWRDNVREETIPDRLQELMLLWRYQSPWFLDEFDRVEEVFPAASYQYVLYGMGFRTEIDRPALARDAHLADRARRENAAMTAKLRAGLPRHRDLIDKIVTHGLQPV

SEQ ID NO: 85184 - protein, 519 aa, Cellvibrio sp.
  misc_feature (1)..(519): tr|A0A3D4PXX8|A0A3D4PXX8_9GAMM Tryptophan halogenase OS =Cellvibrio sp. OX=1965322 GN=DIW64_04055 PE=4 SV=1
MNSLVKKIVIVGGGTAGWLTAGILAAEYKNKSALDIQITLVESPDINPIGVGEGTWPSMRATLRKIGISEADLVTQCAASFKQGSKFVGWKTGLEGDVYHHPFTIPNGYLECNLVAAWQTQFSDLPFADVVSVQNYVSESGCSPKQFTTPEYAGAVNYGYHLDAGKFGELLQKHCTAQLGVKHILDHVTHVISAPNGDIAAINTKEVGAIEGDLFIDCTGFACLLLGQHFGISFVDKKNFSLNDSALAAQVPYPEEISPIASSTIATAQSAGWTWDIGLSSRRGVGYVYSSTHISDDHAERELRAHIAKSVGVDAAEKVSTRKLAIRAGHREQFWYKNCVAIGMAAGFIEPLEASALALVELSANMIRDEFPLTSATMPLVAKRFNSVFQYRWERIVEFLKLHYVLTERRDTEYWRDMSSPDAIPEQLQQQLLLWAQRPPYINDLIQVEETFPSASYQYVLYGMGFKSNVNGVIRASDNVNLGLEKIKDNFERSRKYANLLPSNRELIVHIFKYGMQKI

SEQ ID NO: 85185 - protein, 528 aa, Sphingomonas sp.
  misc_feature (1)..(528): tr|A0A430EFI4|A0A430EFI4_9SPHN Tryptophan 7-halogenase OS=Sphingomonas sp. ABOLE OX=1985878 GN=CA234_17255 PE= 4 SV=1
MNEHNIRDVVIVGGGTAGWMAAAAFSRFLNNGYTRITLIESDEIGTVGVGEATIPPILRFNQMIGLDENEFLAATGGTFKLGIEFVDWGGLGERYFHPFGNYAQDLQGVHFHQLYLRERARRAMPDIAEWSMSAMAASMGKFGRPSATAQTPVRELFYAFHFDAGRYAQLLRRVSEARGITRIEGKISDVTLRPEDGFVQSVTLADGRTVAGDLFIDCSGFRGLLIEEALQTGYEDWRHWLPCDRAVAVPCANVRDPDPFTRSTAREAGWQWRIPLQHRMGNGHVYCSEFLDDDTAEQQLMASLEGPALADPRRLRFTTGRRRESWSRNVVALGLSSGFLEPLESTSIHLIQSGIARLIALFPDKRFDPIERQEYNRQMRDLYEDIRDFIILHYKATTRTDTPFWNRVRTMDIPESLANRIALFQGKGRLFREGNELFTNTSWVAVCLGQHIVPREHEPAADALDENLVAQALEQMRQGYRETAQKMPTHAAFLARIAPQQAPPPPAEPLPVFSFAQDAPFAAPGSPV

SEQ ID NO: 85186 - protein, 514 aa, Brevundimonas sp.; identical to SEQ ID NO: 83757
  misc_feature (1)..(514): tr|A0A069J1Y0|A0A069J1Y0_9CAUL Tryptophan halogenase OS =Brevundimonas sp. EAKA OX=1495854 GN=ER13_11125 PE=4 S V=1

SEQ ID NO: 85187 - protein, 506 aa, Pseudoxanthomonas sp.
  misc_feature (1)..(506): tr|A0A0Q8EBI2|A0A0Q8EBI2_9GAMM Tryptophan halogenase OS =Pseudoxanthomonas sp. Root630 OX=1736574 GN=ASD72_1311 0 PE=4 SV=1
MDGNSIREVVVVGGGSAGWMAASALVRHLDRNCKVRLVESDEIGIIGVGEATVPHIRTFNAQALGLDEAEFVRATQGTFKLGIEFRDWARIGDRYMHGFGTVGHDPGPAAFHHYWLRLLLAGKNVGDIGSYQLQTAASREDRFLPGANDVPPTSPLASVAYAYHFDATLYARYLRGFAEGQGVERIEGKVVDVELRPEDGFVSAVVMADGRRVEGDLFIDCSGFRGLLIEQALKTGYEDWSHWLPCDRAVAVPCARVGDPTPYTRSTARTAGWQWRIPLQHRTGNGLVYCSRFLSDDEAANTLLSNLDGEAQAEPRPLRFVTGKRKQFWNRNVVAVGLASGFMEPLESTSLLLIQTAILRLLDMFPRQGIDPGLVARYNERTHFEYDHIRDFLILHYKAVERDEPFWRECREMPIPDTLQANIDLFRNSGRFYRDGEEFFALQSWIQVMLGQRIVPSAYSPLVDRLSEAEVEAFVANVRQTIDRCVQAMPKHQAFIERHCRAPAVG

SEQ ID NO: 85188 - protein, 504 aa, Unknown
  misc_feature (1)..(504): tr|A0A0N1BW50|A0A0N1BW50_9PROT Uncharacterized protein OS=alpha proteobacterium AAP38 OX=1523418 GN=IP70_04340 PE=4 SV=1
MTNLRRILIVGGGTAGWMAACALNQAVKRLGTVVELVESEEIGTVGVGEATVPTIRDFNRSIGLDEVAFMKATQGSFKLGIAFQDWRAKGTSFFHGFGDYIVNAGPYSTLNHWLVARHLAGQDAVGPFDDYHMAAVMAAAGRFAAPESDPRSPYAYFSYAFHFDASLYARMLRAKAEAEGVVRHEGRITRVDRHPETGFITQVHLADGRILAADLFIDCSGFVSLLVDKTLAEPWVDYSHWLPVDRAWAVPCAGNGTPAPFTRATALEAGWQWRIPLQHRTGNGYVFSSAHVTEDAARERLLAGLDGTVLAEPRLLRFRTGRRQRFWIGNCVAIGLSSGFVEPLESTSISLIQGGITRLVNLLPDLDFNPGLAAEYNRIQALEFDRIRDFIILHYALNGREDSEFWRERRRIPLPDTLAEKIETFRATGQVVLLNEETFVTPSWQALFIGLGLIPQRLDPLMAAQDRGEVLEALRLRRQSLAQAAARLPSHGDFINRFCKADPA

SEQ ID NO: 85189 - protein, 486 aa, Streptomyces sp.
  misc_feature (1)..(486): tr|A0A1S2Q4A1|A0A1S2Q4A1_9ACTN Tryptophan halogenase OS =Streptomyces sp. MUSC 14 OX=1354889 GN=BIV25_06380 PE= 4 SV=1
MTSEYDLVVVGGGPAGATAATAVALRGHRVLLLERDTFPRYQIGESLLPATVHGVCRLLGVADEVARAGFTPKRGGTMRWGRDPKPWRFSFSMTPRLPEPTATAFQVERSRFDEILLRNAERVGVEVREGSPVRRVLSVGGRVRGVEYTDRDGTAHTAQARYVVDASGNTSRIHSRVGGARVYSDFFRNLAVFGYYAGGRRLPEPDSGNIFCAAFDAGWLWYIPLRDDLTSVGAVIAPEHLAAVQRDPRGAWQDMIKACPEVGRLLTDVPLATEPPYDRIRVRKDYSYWKTSLWVPGMALAGDSACFVDPVLSSGVHLATYGALLAARAVNSALDGSVPEERGFAEFEARYRREYGVFYEFLIAFYDMERGEDSYFWSAKKVTRVDLDEAAAFAELAGGLVSGDASVLAAERGAAVAELGEAVARLAVGPERVNPLLSTRIVADTFRTGNDLQEQALYGGPLDAPAAAGSLTVATDGLSWLGPAAY

SEQ ID NO: 85190 - protein, 533 aa, Myxococcus stipitatus
  misc_feature (1)..(533): tr|L7UDS2|L7UDS2_MYXSD Tryptophan halogenase OS=Myxococ cus stipitatus (strain DSM 14675 / JCM 12634 / Mx s8) O X=1278073 GN=MYSTI_03287 PE=4 SV=1
MDTAIREVVILGGGTAGWMTAAYLQKVFEGTVQVTLLEAATIPRIGVGEATVPNLQRVFFDRLGIPEDEWMRECNAAFKTAVKFVNWRKKEPGAPDNHFYHAFGLIPNVDNIPLSHYWVLRNEGGERVDEGVDYACYREPPMMDAKLAPRFRDGRPAVNYAWHFDAQLVADYLRRLSTGWGVKHVVDELSSVEKTPDGHIKALHTRGGRVLEGDLFVDCSGFRGLLINQAMEEPFLDMSDHLLCNSAVATAINHDDARFGIEPYTSAIASNHGWMWKIPMLGRFGTGYVYSSEFCSQDEAIREFSAKWGLDPEKTAFNRIRFRVGRNRRAWVKNCVSIGLASCFVEPLESTGIYFITASIYQLAKHFPDKGFNPVLMDRFNREVEMMFDDTRDFLQAHFLTSSRDDTAFWLANKNDLKLSDALKDKLETWKTGLTVNMPVSGEEAYYGNFETEFRNFWTNSSYYCVLSGMGWMPEQPLTTLKYRPSSVAHAEEAFQRVKLQQQALLQGLPTNHEFLQRLHRQNGMDLARTGTR

SEQ ID NO: 85191 - protein, 532 aa, Serratia sp.
  misc_feature (1)..(532): tr|L0MG20|L0MG20_9GAMM Tryptophan halogenase OS=Serrati a sp. FGI94 OX=671990 GN=D781_2597 PE=4 SV=1
MSKPIKNIVIVGGGTAGWMSASYLVRALQQQANITLIESEAIPRIGVGEATIPSLQKVFFDFLGIPEREWMPQVNGAFKAGIKFVNWRKPPSPSHNDYFYHLFGNVPNCDGVPLTHYWLRKREQGFQQSMAYACYPQPGALDGNLAPCLHDGSRQMSHAWHFDAHLVADFLKRWAVDRGVNRVVDEVVEVKLNEHGFISSLLTKEGRQLEADLFIDCSGMQGLLINQALKEPFIDMSDYLLCDSAVASAVPNDDTQEGVEPYTSSIAMNAGWTWKIPMLGRFGSGYVFSSKFTSRDQATSDFLNLWGLSDNQPLNQIKFRVGRNKRAWVNNCVSIGLASCFLEPLESTGIYFIYAALYQLVKHFPDTAFDPRLADAFNAEIVYMFDDCRDFVQAHYFTSSREDTAFWLANRHELRLSDAIQEKIERYKAGLPLTTTSFDDATYYDTFDFEFKNFWLNGNYYCIFAGLDMLPDRSLPLLQLRPESIDKAEAMFASIQHEAERLRTSLPTNYDYLRSLQKGYAEQSRPASPEIL

SEQ ID NO: 85192 - protein, 517 aa, Unknown
  misc_feature (1)..(517): tr|A0A0N1LJ64|A0A0N1LJ64_9PROT Tryptophan halogenase OS =alpha proteobacterium AAP38 OX=1523418 GN=IP70_24195 P E=4 SV=1
MRVQAAKRLRVVIVGGGTAGWMVASGLSKLLPADAYDLTLIESDEIGTVGVGEATLPHIKLFNDRLGIDEAEFMRATGATIKLGIEFVGWNQPTDRYIHPFGVFGEPWAGVDFQHHWARARLSGIEAGSLQDYSFAVALCRAGMFDHPAAVDTKSIRSTFSYAYHFDAGLYAEFLRHWATARGVTRVEGRIINVARDGESGHVTRLTLASGGGIEGDFFVDCSGFRSLLVGGAMQVPWCDWSHWLPCDRALAVPSGSVQPLTPYTRATARKAGWTWRIPLQHRIGNGYVFSSRWCGEDEARETLLSALDGPALAEPRLLRFAAGRRVRAWAGNCVAAGLSSGFLEPLESTSIFLIQAAMFDLVGLMPRPGGGIDPRLAAEFNRLFEIHYDRVRDFLVLHYVANSRHGEPLWDHVRSMEMPDSLLHKLDLFREGAAAPDYKLGLFSRDSWLSVFEGQGVMPGAYARLADHLPLPELERRLSDLRGRIRDGLSGMPAHADFIARHCAAPDHSGSRGNAA

SEQ ID NO: 85193 - protein, 513 aa, Streptomyces sp.
  misc_feature (1)..(513): tr|A0A1W7D4T7|A0A1W7D4T7_9ACTN Tryptophan halogenase OS =Streptomyces sp. SCSIO 03032 OX=1109743 GN=CAG99_27180 PE=4 SV=1
MIRKVAIVGGGTAGWMTASYLKAAFADRLDVTLVESEAVGRIGVGEATFSTVRHFFDYLGLDEADWLPKCEGGYKLAIRFENWAKQGHHFYHPFERLRKADGFSLAEWWLALGDHSQPFDRQCFVTSALCEAKRSPRMLDGSLFATGLDGSLGRSSLAEQRAQFPYAYHFDADKVAAFLAAYSKERGVRHIVDDVVHSALDDRGWISHVQTRGGLRLDADLFIDCTGFRGALINKLMGEPFESFQDVLPNNRAVATRVSRPEITDMNPYTTATAMDAGWMWRIPLFHRDGVGYVYSDEFASPEEAERTLRTQVGDLRGELDVNHIAMRVGRCRDSWVKNCVAIGLSSAFVEPLESTGIFFIQHGIEQLVKHFPDERWDPELTRNYNTRIAQAVDGVKEFLVLHYRGAARSDNDYWRAAKTRKAPDGLVERMEQALPHLIDEEATYPYYHGFEPYSWNTMLLGLGNQPARARPALAHMDPARARAEFDLLRAEANAVIEKLPSCYEYLERIHTP

SEQ ID NO: 85194 - protein, 507 aa, Frateuria terrea
  misc_feature (1)..(507): tr|A0A1H6T2B4|A0A1H6T2B4_9GAMM Tryptophan halogenase OS =Frateuria terrea OX=529704 GN=SAMN04487997_1522 PE=4 S V=1
MTDSSIKNIVIVGGGTAGWMAAAAFAKVLGGRYAIQLIESDEIGIVGVGEATVPHLKLFNNLLGIDEAEFVRRTQGSFKLGIQFDDWGRIGSRYFHSFGAIGHDLGLLPFHQYWLKARRQGKAAADIGAYSLNAVAAAQGKFMVSASDVAPTSPLANIAYAYHFDAGLYARFLREYAERLGVRRLEGRIVDVALHPDSGFVEAVTLASGVRVAGDLFVDCSGFRGLLIEQALRTGYDDFSRWLPCDRAVAVACEKVGPPTPYTHSIARGAGWQWRIPLQHRTGNGYVYSSAHISDDEAAATLLSNLDGRPLGEPRLLRFTAGMRRKFWNRNVVALGLASGFMEPLESTSIYLVQSGIAKFLNLFPWGDFDPVLTERYNEQSIFEYERIRDFLILHYHATERSDTPFWDACRRMSIPPQLAQTIRLFRDSGRFFRQGEEMFALVSWVQVMLGQGIVPESYHPLVDQVAQSDMEGYLASVGKVIANCVQAMPSHAAFIERCCAAVPVPA

SEQ ID NO: 85195 - protein, 532 aa, Colwellia sp.
  misc_feature (1)..(532): tr|A0A2N1C6W5|A0A2N1C6W5_9GAMM Tryptophan halogenase OS =Colwellia sp. 75C3 OX=888425 GN=CXF85_05440 PE=4 SV=1
MYIMNKLTKKVVIVGGGIAGWLTAGRLAAKHKGNTKQGLNVVLIESANIPAVGVGEGTWPTMRSTLRALGISETDFIRECEASFKQGAKFAKWFDGTEDDFYYHPLVLPQGFGKTDLAAHWLAKQAQTKQKNSHVNSFSNDVCFQEAICEQGLAPKTIRHAEFADVANYAYHLDSAKFAVFLQKHCQEKLGVTHIVDDVIGVNSIDTEADNPTEKGDIISVSTEHNGDIGGELFVDCTGFSSLLLGKHYQVPFKKCDDILFIDTALAVQVPYESVDSPIASHTISTGQEAGWIWDIGLQHRRGVGYVYSSKHSTEAEARAKLAEYVGDKFSSLKVRKIPIVSGHRETFWQNNCVAVGLSAGFLEPLEASALVMVELAAQMISEQLPASREVMDVVAKRFNETALYRWDRIIDFLKLHYILSERTEPFWSDNRDPTTIPQSLQDLMTEWQYRAPADHDFTSNNEVFPAASYQYVLYGMGFKSDYCHTPYAIDDRDFADGQFKKNKVLIDKALSSLPSNRELLDKIKSYGLSRI

SEQ ID NO: 85196 - protein, 503 aa, Caulobacter vibrioides
  misc_feature (1)..(503): tr|A0A0V2FFW3|A0A0V2FFW3_CAUVI Tryptophan halogenase OS =Caulobacter vibrioides OX=155892 GN=AS593_10970 PE=4 S V=1
MDQRIRKVVVVGGGTAGWMAAAAFGRLLASDAVAVEVVESEVIGTVGVGEATIPTIRNFNEKLGLDEVEFIRATQASFKLGIDFRDWGRVGHRYFHGFGDFGADHAAVQAHQLWRRLRALGETGGLEDWSLPTAAGLLNRFIPPSPDPRSPLHDYAYAYHFDAGLYAAFLRRYAEARGVTRTEGRIVDVAVRGQDGFVEAVVLDDGRRVEGDLFVDCSGFRALLIEGTLKAGFEDWSRWLPCDRALAVPCRTGGDGLTPYTRSTAREAGWQWRIPLQHRTGNGYVYSSAFVDDERAARTLMENLDGEALDDPRPLRFLAGRRKKFWDRNVVAVGLSGGFLEPLESTSIALIQNGVARLLEFFPDRRCDPLLAAEFNRVSAQEYERIRDFIILHYCINQRDEPMWRQVREVELPDSLQAKIALYKARGHVAILEGDGFARPSWISIYNGLGVVPEAYDPLADRIPEAELRRLMDQRRALIRHTAQSMPTQAAFIARHCAAPPLG

SEQ ID NO: 85197 - protein, 512 aa, Streptomyces albus
  misc_feature (1)..(512): tr|A0A109B7V7|A0A109B7V7_9ACTN Tryptophan halogenase OS =Streptomyces albus subsp. albus OX=67257 GN=ADL21_0019 5 PE=4 SV=1
MIRSVVIVGGGTAGWMTASYLKAAFADRLDVTLVESPGVSRIGVGEATFSTVRHFFDYLGLDEAEWLPKCAGGYKLGIRFENWAGDGGHFYHPFERLRVVDGFSLADWWLELGDHSQPMDRQVFLTSALSEAKRSPRMLDGSLFVSGLDNHLGKSTLDEQRDQFPYAYHFDADQVAKFLASYAIRRGVRHVVDTVEQVVQDERGWISHVQTAERGILTGQLFIDCTGFRSLLMSKTLGTAFESFEDVLPNNRAVALRVPRETETDMAPYTTATTMNAGWRWTIPLFRRNGNGYVYSDKFISPEEAERELRAAVAPGRDDLEANHIRMRIGRHKDSWVKNCVAVGLSSAFVEPLESTGIFFIQHAIEQLVKHFPDESFDEQQIAAYNTRIGNAIDGVKEFLALHYKAARRNDTPYWKEAQVRVAPDGLAARMELAESRLLDDETVYPYYHGFESYSWNAMTVGLGHRPRRPHPALKHLDPSAALAEFERVRAEAREMVAALPSCHEYLASIND

SEQ ID NO: 85198 - protein, 504 aa, Herbaspirillum sp.
  misc_feature (1)..(504): tr|A0A542MEM0|A0A542MEM0_9BURK Tryptophan halogenase OS =Herbaspirillum sp. SJZ107 OX=2572881 GN=FBX97_1729 PE= 4 SV=1
MEDNTIRRIVILGGGTAGWMAAAPLAQRLGNHASVTVVESPDIGTIGVGEATLPTIRFYNALLGIDQADFIARTRATFKLGIEFCDWGHLGNRFFHGFGDFGPPLAGRTAHMHWLRLARAFDRMPPLEDWSMPAVMAREFKFVLPNKSQPGVTDSFSYGFHFDAGLYANYLRDYAVARGARRVEGTVTAVEQHPETGFITALTLRDGRRIEGDLFIDCSGFRGLLIEDTLHAGYDDWSDQLPCNSALAVPCASAPRLTPYTRSTAKDAGWIWRIPLQHRTGNGHVYSNAFTSDERARDTLLQGLDGAALDEPRQLRFVTGRRRKSWIKNCVAIGLSAGFVEPLESTSINLIETAVGKLVELFPDRDFRPELADEFNRVMSVRYESVRDFIMLHYKLTARDDSEFWRYCAAMPIPDSLRHQIELFRETGRVTILDRDGFAEPSFVAMMTGLGVVPKRYDPMADGDDLRQVHGHFAALRDMIAAAVAKMPDHDTFVRTQSVSAKVA

SEQ ID NO: 85199 - protein, 511 aa, Cellvibrio sp.
  misc_feature (1)..(511): tr|A0A3D4PWV2|A0A3D4PWV2_9GAMM Tryptophan halogenase OS =Cellvibrio sp. OX=1965322 GN=DIW64_01130 PE=4 SV=1
MGSHAMIKKYVILGGGTAGWMTAAAFARFLHAESVQIVLIESDAIGTVGVGEATIPHIRAFNDMLGIEESDFMQAVNATYKLGIRFSGWGSSDSDYYHPFGDHGFPIKGVGFHHYWLGAKNAGADIAPFDSYSMANVLAREKKFTYPSSDPDDVLSTFSYAYHIDATAYAKFLRSYSEGRVTRIEGEVVSVAKNTETGFIESLTLVSGECIEGDLFIDCSGFRSRLLGQELDVKFQSWKKWLPCDSALAVPTEGNLLKQPYTHSSAKKAGWCWKIPLQHRIGNGHVFSSDFTSRADALDELKNNLSGEMKKDPISIRFEAGVREKTWEKNCIAVGLACGFLEPLESTSIYLIEVAILKILELLPTDTKDCLLEEKEFNRQMENEYLKVRDFIILHYALNQRPEDFWKYCANMPLPDTLQEKIDVFKATAQIVEYDAGLFMPPSWLAVYLGQGLFPVNIDSRLTPKSIQEAMALLKEMPAHLNHIVSQIETQKQKIDSRPPVSRMSLYGVRR

SEQ ID NO: 85200 - protein, 497 aa, Cellvibrio sp.
  misc_feature (1)..(497): tr|A0A3D4PY83|A0A3D4PY83_9GAMM Tryptophan halogenase OS =Cellvibrio sp. OX=1965322 GN=DIW64_05110 PE=4 SV=1
MQKPKRILIVGGGTAGWMAANLLASRWKDIEVCLLESTEIGIIGVGEGSTPHLKLFFDEVGIAESEWMPRCNATYKNGISFFDWSFLPGFKSYFHPFPAQTDDIFTVPAFFSNISARMQGYSANVHPDHYFLETYITQQNLGPIPTENFPFGVAYGYHFDSGLLGQYLAEKAVSSGVKRVFGTVTEVLMNQNGELASVRLDDDSLLPADFFIDCSGFKSLLLQGALKATYTSFKENLFNNAAVVMPTPMSAIIPPETKATALSNGWAWKIPLTNRYGNGYVYSADYITPEQAEMELRQHLGMLDSDVTARHLQMTVGRVEKHWEKNCVAVGLSQGFIEPLEATALALSFNTISGFIKAYEKGAYTNQFEDAFNKEINARFDGVRDYIVCHYKVNQRKDTDYWKDNAANPHVSETLNQILHFWQRGGDFAKNMYMNNLVGSYQPKSWACLLAGYGVFPPIESTAINTQYKSPHDMNQLADFIRRCGLNFKSHNELLAQ

SEQ ID NO: 85201 - protein, 467 aa, Cellvibrio sp.
  misc_feature (1)..(467): tr|A0A3D4Q103|A0A3D4Q103_9GAMM Tryptophan halogenase OS =Cellvibrio sp. OX=1965322 GN=DIW64_09850 PE=4 SV=1
  misc_feature (190)..(190): Xaa can be any naturally occurring amino acid
MIGDQAVKNLVIVGGGTAGWMAAASFSKLLGKSISVTLIESDEISTVGVGEATVPPLILLNRYLEINEQEFLAFVKGSIKLGISFENWKNVNENYFHMFGTPGKDTWAASFQHFWLRGKELGVNYPLGDYSLEQKAAENNKFAHMPNASLNYAYHLDAGFYAKFLRNIAEKAGATRIEGKIVNVALDEDXQALHTGYEDWSHWLPCDSAVAVQTESVRDPVPYTRSIAHPAGWQWQIPLQHRVGNGLVYCSRYISDDEAKKVLLDNIQGRLITEPKIIKYRTGQRLKHWNKNCIALGLASGFIEPLESTSIHLIQRGITRLIQMFPHAGIRACDVDEYNEQMKVEILNVRDFIILHYHLTDRNDSSFWEYCKNMEIPESLEQRMRMFRETGKVFVKSYELFSESSWLQVMIGQGLIPENYHPVANEIPAEGLIKFLAGIRAQINQNLQKMPTHKDYLNFYCKASDWN

SEQ ID NO: 85202 - protein, 509 aa, Herbaspirillum sp.
  misc_feature (1)..(509): tr|A0A542MEQ2|A0A542MEQ2_9BURK Tryptophan halogenase OS =Herbaspirillum sp. SJZ107 OX=2572881 GN=FBX97_1638 PE= 4 SV=1
MSNTIEHIVVVGGGSAGWLAAAVIAAEHRHLRVTLVESPGVPPIGVGEGTWPSMRDTLHRIGVSESAFFRECDAAFKQGSRFDRWVDGSAGDYYFHPFVLPQGYGDANLAAAWQAQRRHVPFADLASFQPHLCVGGRAPKQARTPEFAAVANYGYHLDAGKFGLFLRAHCVEKLGVRHVLDHVDAVVPHDNGDIAGLRLRDGGVLAGDLFVDCTGMQSLLLGGHYGVPLLHQRHVLFNDRALAVQVPYATPDAPIASQTTSTAQSCGWIWDIGLPTRRGIGHVYSSAHIGDDEAEDQLRAYVAASGGPSDIAPRKLRFEPGYRERFWQRNCVAIGLSAGFIEPLEASALALVEMSAAWLADDMPATRAQVDVVADRFNEAFAYRWERVIEFLKLHYVLSKRSDAPYWIDHRRPETIPARLQELLGLWRTRPPSRRDFPRIEEVFPSASYQYILYGMQTPFEGAPRASDLPQEADRHFREAARLTAQMLPALPSNRALLEHIRLHGLPRI

SEQ ID NO: 85203 - protein, 505 aa, Xanthomonas axonopodis
  misc_feature (1)..(505): tr|A0A0P6VQ44|A0A0P6VQ44_9XANT Tryptophan halogenase OS =Xanthomonas axonopodis OX=53413 GN=XAXN_14840 PE=4 SV= 1
MTQAQIRKVVIAGGGTAGWIAACALSHQFRNLLDIILVESEQIGTVGVGESTVPPIRTFHRFLQIDEQEFLRAVAGTFKLSISFEHWRRQGERYIHPFGITGQSTLVCAFHHLWLESQRRGMPGSFGDYCLETVASRVDRFALQGEPAVNYAYHLDAALYARFLRARSEACGVTRVEGRIQQVTVQPHSGDVASLVLEGGQVIEGDLFIDCSGFRGLLIEQTLHTGYEDWSHWLPCDRAVAVQTEALGPPVPYTRAIAHEAGWRWHIPLQHRVGNGLVFSSEHLSDDEAHAKLLRDVAALAVKDPWMVPFRTGRRLKAWNKNVVSLGLASGFIEPLESTSIHLTISAVVRLLALFPAEGIAPSQVQLFNDVSRAEMEHVRDFVTLHYHATQREEPLWQQCRQMELPESLALRLRAWRERAHAWQGADELFRVDSWTHVLMGQGIAPEQHHPLTCAFSDHDLRRLLEGIAQPIQHAVQQMPSQQTFIERYCKAGEQVWGMRSPVPA

SEQ ID NO: 85204 - protein, 538 aa, Pseudomonas sp.
  misc_feature (1)..(538): tr|A0A1X7NWL4|A0A1X7NWL4_9PSED Tryptophan halogenase OS =Pseudomonas sp. NFIX51 OX=1566187 GN=SAMN03159362_1876 PE=4 SV=1
MNKPIKNIVIVGGGTAGWMAASYLVRALQQQANITLIESEAIPRIGVGEATIPSLQKVFFDFLGIPEREWMPQVNGAFKAAIKFVNWRKSPGSSRDDHFYHLFGNVPNCDGVPLTHYWLRKREQGFQQPMEYACYPQAGALDGKLAPCLPDGTRQMSHAWHFDAHLVADFLKRWAVERGVKRVVDEVVDVHLNERGYISSLFTKEGRTLEADLFIDCSGMRGLLINQALKEPFIDMSDYLLCDSAVASAVPNDDAREGVEPYTSAIAMNSGWTWKIPMLGRFGSGYVFSSKFTSRDQATADFLNLWGLSDNQPLNQIKFRVGRNKRAWVNNCVSIGLSSCFLEPLESTGIYFIYAALYQLVKHFPDTSFDPRLSDAFNAEIVYMFDDCRDFVQAHYFTASREDTPFWLANRHDLRLSDAIKEKVQRYKAGLPLTTTSFDDSTYYETFDYEFKNFWLNGNYYCIFAGLGMLPDRSLPLLQHRPESIEKAEAMFASIRRETERLRTSLPTNYDYLRSLRDGDAGLSHSQRGPTLATQETL

SEQ ID NO: 85205 - protein, 409 aa, Myxococcus stipitatus
  misc_feature (1)..(409): tr|L7UDT8|L7UDT8_MYXSD Tryptophan halogenase OS=Myxococ cus stipitatus (strain DSM 14675 / JCM 12634 / Mx s8) O X=1278073 GN=MYSTI_03302 PE=4 SV=1
MKVEKTEVVIIGAGPSGSVAAGLLRKQGRQVLILEREQFPRFSIGESLLPQSMEYIEEAGMLQDVVEAGFQYKNGASFVRGTKYTEFDFREKFTQGWGTTYQVQRAHFDHVLALAAERKGATLRFRHTVESVDVSGATPELTVRSPEGEQYRVQARFLLDASGFGRVLPRLLSLETPSNFPVRGALFTHVEDRVAPGTFDRNKIRITTHPKHVHVWYWTIPFSNGRCSLGVVAKREYLEQFQGTETERLKAIVAEDPELTKLLKDAVWDTPARAITGYAANVKSLWGNGFALLGNAGEFLDPVFSSGVTIAVKSASLAARCIARSFAGETVDWERDYAVPLKSGVDTFRTFVESWYEGGFQDVIFHPNSSPEIRKMISSILAGYAWDKENPFVADSKRRLGVLEKLCAP

SEQ ID NO: 85206 - protein, 439 aa, Frankia casuarinae
  misc_feature (1)..(439): tr|Q2JBA4|Q2JBA4_FRACC Tryptophan halogenase OS=Frankia casuarinae (strain DSM 45818 / CECT 9043 / CcI3) OX=10 6370 GN=Francci3_2065 PE=4 SV=1
MAENTEVVDVVVIGAGPAGAAAAATLAKAGRSVIVLERRTFPRFHIGESMVPFVNAAFEKLGILDRLKQQGYVAKHGAEFCQGEEDENVRVSFTTQGPGRHHVTFQVERAHLDNMLIQFAGECGARVIHEATVHDLITEGDRVVGVRYEHDGTAREVRAQYVLDAGGRASKIAKAFRLRKPVDRLKMVAVFRHLKGIDEARNPGFEGDIQVGAHEDGWLWAIPIWPDTMSVGAVMPQQVLRSGDPAALFDEHVSRVRRVRERVAGAHPVSDVQIETDYCYYSDQVAGPGWFLAGDAGCFFDPIFSGGVYLATSTGIRAGESIDAALREPLRAEELQNEYQRFYKTGYDMYARLIYMYYEEPDPDAYLASVGLDDCGDAFASNKWVVRFLCGDFFNARNKLAQEVVKERRWDTFAPFERVSECPYYAELNEAEDREPVEA

SEQ ID NO: 85207 - protein, 484 aa, Brevundimonas sp.
  misc_feature (1)..(484): tr|A0A069ITI8|A0A069ITI8_9CAUL Tryptophan halogenase OS =Brevundimonas sp. EAKA OX=1495854 GN=ER13_04535 PE=4 S V=1
MTAAALARLVAPSGVQITLVESEAIGTVGVGESTLPHIRAFNERLGIDEAAFMKATRATFKLGIQFENWGQIGGSYIHPFGDYGAPGGEAPFHHYWLRGRELGDVGPIDDYSLPVVAAREGRFAPPSDDPRSLLSTYRYAYQFDATLYARFLRGMAETEGVRRIEGRIQNVAQDGESGAITKVTLDDGRQIEGDLFVDCSGFRALLIEQTLKAGFTDWSHWLPCDRAAALPCESDQPTVPYTRATALEAGWQFRIPLQHRVGNGYVYSSAFIDEAAALDRLVGRLEGKPLKAPNVLKFTAGQRTRNWAANCVSVGLSSGFIEPLESTSIYLIQIAITKLIELWPTAVIDPATEAEFNRQMDLEYIRIRDFIILHYCATARNDTPFWDYVRTMPLPDTLSEKIELFRARGVVQDYREGLFLHPSWVAVYLGQDILPRRHHPLVDAVSATQLMSSLERLRRMVREASSRLPSQDDYIARYCAHLPL

SEQ ID NO: 85208 - protein, 492 aa, Frankia casuarinae
  misc_feature (1)..(492): tr|A0A1X1PVV1|A0A1X1PVV1_FRACC Tryptophan halogenase OS =Frankia casuarinae (strain DSM 45818 / CECT 9043 / CcI 3) OX=106370 GN=UK99_14060 PE=4 SV=1
  misc_feature (24)..(24): Xaa can be any naturally occurring amino acid
MSAPTAELFDVVVIGGGPGGSTVXTLTAKSGHRVLLLERERFPRYQIGESLLPSTVHGVARLLGVDQKLREAGFTRKQGGTFRWGSNPEPWTFSFAVSPRLAGPTSFAYQVERMKFDQILLDNARENGVEVRESCAVVDVTEDGERVTGVRYADPSGHERTVAARCVVDASGNKGRTYRHVGGERHYSEFFQNLALFGYFEGGKRLPPPSSGNILSAAFDDGWFWYIPLTPDLTSVGAVVHRDSAEKVQGDPEQALQSLIDSCPLIKEYLADAKRVTSGPYGELRVRKDYSYCNTRFWRPGMVLVGDAACFVDPVFSSGVHLATYSGMLAARSINSLFAGTVGEQEAFDEFERRYRREYGVFYEFLVSFYGMQANEQSYFWEAKKITNCPLSEFEAFVELVGGVASGEEKLAPGAVARHLATTSRSLADAAEELTEQRGTLHAAGVVANAMAEGVRVQAQAWLGAEAGDETPLFPDGLVSSLDGLRWVRPRS

SEQ ID NO: 85209 - protein, 177 aa, Rhizobium fredii
  misc_feature (1)..(177): tr|A0A0B7MTI5|A0A0B7MTI5_RHIFH Partial tryptophan halog enase OS=Rhizobium fredii (strain HH103) OX=1117943 GN= SFHH103_psfHH103d_311 PE=4 SV=1
MLDLTNAKRIGIIGGGIVGWLAAIALRRVFDVDVDVTVIEAPTVFPLGPGEGGSLNLIDTLCRNELDLDVFIGEAGATHKLGVLYENWRGGGIPDRYYRMFGGSGIPEIECRVGGFFPLLSARIAAGENLHTCIPGFELIIKKASQVEIDELLATGESGLYPSFHFNHAGFERYLRA

SEQ ID NO: 85210 - protein, 509 aa, Catenovulum agarivorans
  misc_feature (1)..(509): tr|W7Q833|W7Q833_9ALTE Tryptophan halogenase OS=Catenov ulum agarivorans DS-2 OX=1328313 GN=DS2_14834 PE=4 SV=1
MANFTRPQHITIVGGGTAGWITASVLAKGLIEKGFKISVIESPDIPTVGVGEATIPPIIMLARFLQIDQLDLLKNIAGTFKFGIHFQHWSDIGDSYMHAFGKMQPNFHDNSFTQTWMAYQQELNLAPIHSFLPTAHAAYTGKFAYASKRPDNAPDNYFFPLTELFHAYHFDASLLAKYLKVYATKMGVNFIPATVTDVVCGTNGDIEKLHLNTGDTVPADFFVDCSGEQGLLIKKQLKAEFLHWRDYLPCDRAVVVQTENNQAPHPYTKSIAMSAGWRWQIPLTTRSGNGYVHASQFIEPQQAQDEFAQALSSDSKITDFRTLKFTTGCLKTPWVNNVAAIGLSSGFLEPLESTSIHMTHKFSLELMNAFRYGKNRQQEADTFNNNFYQDALATRDFLIAHYCTTNRTDSEFWCYVKNMPLPDSLTDKLNQFKQTGFIDLPEGSLFAFESWLQVLTGQKMQFNAPTLSQNYSDADVAFFFNNVKNAVSSEVQKLPSHIEFLAQIHQSKS

SEQ ID NO: 85211 - protein, 520 aa, Colwellia sp.
  misc_feature (1)..(520): tr|A0A2N1CAB7|A0A2N1CAB7_9GAMM Tryptophan 7-halogenase OS=Colwellia sp. 75C3 OX=888425 GN=CXF85_00755 PE=4 SV= 1
MSQTNVIQKIVIVGGGTAGWLAANHLAKNLITNSVNSIEITLVESANIPTIGVGEGTVPMMRQSLQHLGISETEFILECDATFKQGIKFVDWTTNPVAGKPAYYHHIFDYPKTSELDLTAYWLKNMKGSGISYVDALSIQGKICDAGLAPKMITTPEFQGATSYGYHLDANKFSALLAKNAVKKLGVTHIQADVVSVLQHENGEISSLVIANGENIQGDFFVDCTGFKSLLLGEKLKVPFKDKSGTLFVDHAVAIQVPYEQADAPIASHTISTALTSGWVWDIGLKERRGIGHVYSSSHTSHEQAEQDLRAYIGPISDGVDSRLIPMKIGYREKFWHKNCVALGLSQGFVEPLEATGLLVFDATAKMLAEQFPSSKLDMPLIAKQFNERVALSWDNVIDFVKAHYCLSKRDDSQFWLDNRANDSIPDSLQERLERWKYQPPSPYDFSNKFGVFNLENYQYILYGMDFDTNLTHFQHRLSQDELASKVFADISNHSDLALNKLPKHRELIDKIYQYGLQKI

SEQ ID NO: 85212 - protein, 502 aa, Caulobacter vibrioides
  misc_feature (1)..(502): tr|A0A290MV12|A0A290MV12_CAUVI Tryptophan 7-halogenase OS=Caulobacter vibrioides OX=155892 GN=CA606_01220 PE=4 SV=1
MDPIRKIVIVGGGTAGWISASGLAAVLKGLPIAIELVESAEIGTVGVGEATVPHIRYFNARLGLDEADFMRKTQATIKLGIQFCDWGRKGEAYIHPFGAYGHAIDGLPFHQHWLAARARGEAGPIESYSLPIMASHARKFAPPSADPRSLGSTFNYAYQFDAGLYAQYLRAYSEARGVTRTEGKITSVQQRAEDGFVTGVTLENGRVIEGDLFIDCSGFRGLLIEGALQAGYEDWSRWLPCDRAVAAPCEAVESPTPYTRATADRFGWRWRIPLQHRVGNGHVYCSSYVSDDEATRALVENLDGKLQQDPRFLRFVTGRRKKQWFKNVVAVGLSSGFLEPLESTSIHLIQVAITTLVEMFPHRGFQQADQDEYNRVMDLEFERIRDFLVLHYHANQRDDSPFWIERREGPIPDSLAYKMALFRERGAVVGYKDGFFLEPSWLAVYFGQNILPHGHDPLVAASDPARTAKIMADLSTAVTRTVEAMPTHEAFLRAMAQTRSPA

SEQ ID NO: 85213 - protein, 504 aa, Pseudoalteromonas piscicida
  misc_feature (1)..(504): tr|A0A290TSP8|A0A290TSP8_PSEO7 Uncharacterized protein OS=Pseudoalteromonas piscicida OX=43662 GN=PPIS_a0855 P E=4 SV=1
MKNQKIVILGGGTAGWMAANMMAKSWADKAIEITVVESSSIGTIGVGEGSTPQFKGFMDYLGISEAEWMPACNATYKNGIRFIDWSTKPGFSSYFHPFPAQPDDYSAPAFFHNSFVRRKAIDVEGHPDHFFLATHLADLNKSPIAAESFPFEINYGYHFDSALLGQLLARKAAEFNVKHIDATITDVRKHLDGDIAALITSDGTEISGDIFIDCSGFKSLLLQHTLGVGFESFESNLFNDAAVVIPTKQLDTIRSETQSVARQFGWSWHIPLTNRIGNGYVYSQHYCDADQAETELRAALGLLDSEVEARHIKMKVGQVKAHWSKNCIAIGLSQGFIEPLEATALHIVQETVQSFIECYQDAGFTDGNRDKHNRALSERYQAIRDYIVAHYRVNSRTDTNYWLDNANNNHLSRSLYQILQTWVSGNNLSDELVRQNVEQYYPSVSWHCLLAGYGIYPEQAQLKSGNALANQHNIEKVNDFIRRCGLNFKDHRMELESFVANVHK

SEQ ID NO: 85214 - protein, 516 aa, Streptomyces sp.
  misc_feature (1)..(516): tr|A0A4U0NVN3|A0A4U0NVN3_9ACTN Tryptophan 7-halogenase OS=Streptomyces sp. jys28 OX=2571125 GN=FCH28_14170 PE= 4 SV=1
MLNKVVIVGGGTAGWMTASYLKAAFGERIQITLVESGNVGTVGVGEATFSDIRHFFEFLGLKEKDWMPACNATYKLAVRFENWREKDHYFYHPFEQMRSVNGFPLTDWWLHQSPTERFDKDCFVMASVIDAGRSPRMLDGTLIDQPFDEGADEMQGLTMSEHQGKTQFPYAYHFEAALLAKYLTKYAVDRGVKHIVDDVKQVNLDDRGWISGVTTAEHGDLTGDVFIDCTGFRGLLLNKALEEPFISYADTLPNDSAVALQVPMDMEKRGIRPCTTATAQDAGWIWTIPLMGRVGTGYVYAKDYLSPEDAERTLREFVGPAAADVEANHIKMRIGRSRNSWVKNCVAIGLSSGFVEPLESTGIFFIHHAIEQLAKNFPGEDWNPTHRDLYNKAIGNVMDGVREFLVLHYVAAKRTDNQYWRDTKTRAIPDALAERIETWKTQLPDSETVFPYYHGLPPYSYMCILLGMGGIDLKPSRALALCDGSAAEREFSEIREKTRRLTEVLPPAYEYFAQHH

SEQ ID NO: 85215 - protein, 503 aa, Sphingomonas sp.
  misc_feature (1)..(503): tr|A0A196MQR0|A0A196MQR0_9SPHN Tryptophan halogenase OS =Sphingomonas sp. TDK1 OX=453247 GN=A7X12_06900 PE=4 SV =1
MATAAPYRIVVAGGGTAGWMAAAALARFLGAGFTVTLVESDAIGTVGVGEATIPQIRMFNASLGIDEDAFVAATQASYKLAIEFVGWTKGGRYMHAFGDVGRDNGLLAFRHTWLRGLAEGVAEPLAAYALNNVAARANRMQRGPARTARVLPEMPYAFHFDAGLYARFLRDHAEAAGVVRHEGRIEAVSRNGEDGNVAALHLDGDRRIEGDLFLDCTGFHARLIGEAMGVGYQDWSHWLPCDRALAVPSARARDFTPYTRATAHDAGWQWRIPLQHRTGNGIVYSSRHLSDDEAAARLLSGLDEPALADPRPIRFHTGRRELAWAGNVIALGLASGFLEPLESTSIHMIQSAVERVLKLLPGGRAVTPLRDSYNRQAAHESERIRDFLILHYWANDRDERFWRERRETPLPDGLADKIALWREAGEIVREDSDLFSDVAWLQVLVGQGIIARRYHPLADQPPVAQIAEYLDLLAKLNAREVAQMLPHSDFVRAHGAAGAEIAA

SEQ ID NO: 85216 - protein, 499 aa, Hyphomonas sp.
  misc_feature (1)..(499): tr|A0A2D7B0U2|A0A2D7B0U2_9RHOB Tryptophan halogenase OS =Hyphomonas sp. OX=87 GN=CME99_10465 PE=4 SV=1
  misc_feature (61)..(61): Xaa can be any naturally occurring amino acid
  misc_feature (324)..(324): Xaa can be any naturally occurring amino acid
  misc_feature (366)..(366): Xaa can be any naturally occurring amino acid
  misc_feature (470)..(470): Xaa can be any naturally occurring amino acid
  misc_feature (480)..(480): Xaa can be any naturally occurring amino acid
MSTQQVKRVVIAGGGTAGWIAAAALSRMLGPLLDITLVESDAIGTVGVGEATIPTHRTFHXLLGIDEREFMRATKATFKLGIAFENWGGVGDRYIHSFGQVGKPSWMGEFYNIWMYAQERGIGDALDAYCFELQAAEEDRFYTSEKANINFAYHLDASLYAKFLRTFSEAKGVKRVEGLIDTVEQDGESGFITALKLQSGERIEGDLFIDCTGFRGLLIEQTLKTGYEDWTHWLPTDSALAVQTRSVGPAIPYTRAIAHHAGWQWRIPLQHRVGNGLVFCSENMQPDEAQEFLLNNVDGEPLTEPRLIRYKTGRRRKVWNKNCXALGLSSGFVEPLESTSIHLIQIGATRLVQQFPFSGISEAIAXHYNEQAERELEKIRDFIVLHYKLTERDDSDFWRARRDMPVPDTLSQRIALFRENGLVYQASDDLFRVDSWLQVMMGQRLKPKGYHHMGHMMTDDQLTRALGGLXASIAQAVSKXPKHQDFIDTYCAAPETETA

SEQ ID NO: 85217 - protein, 545 aa, Chloroflexi bacterium
  misc_feature (1)..(545): tr|A0A2E7PC18|A0A2E7PC18_9CHLR Tryptophan halogenase OS =Chloroflexi bacterium OX=2026724 GN=CL732_01780 PE=4 S V=1
MNVTDLSADVVVIGGGPAGSAAATMLARKGWQVTVLERENFPRDHVGESLLPASIPILEELGALPAVEEAGFLPKPGATMVWGSGSSPWSWYFKETSQRYPHSYQVWRPQFDQILLDNARAAGVTVVEGAHVSEVIFDDGEAVGVEFTNADGVEGEAECRFIVDASGQSTLLARHLEYKQWDPFFQNLAVYAYFTGGDPLPEPDQNNIFIESYQHGWLWSIPLHTGRTSVGAVVDSKIGQEGIQKEGAKAFLESQLSQSTHTKNMLAKAAMDSEPTVLLDWSYTSEKLFGPGFILAGDAACFVDPLFSSGVHLALMSGVLAAAYVTTALNDPSLAEDAGQVYQELYLKEYNQFREMARLFYSSNLSAESYFWEARRITNASHYSPRESFIQAVAGQPPRGYERVVLERGHAPEEFTESIRAVETERRARTEWLAALAGDPQRNQLLNAIPLIAEGVKVEEKPVLAEGEFVRGHVLNTISQPEGTPCSPIVAAVITAVDGQKSVADIVDSLGQHLDQSAHAQLEEAVSRTIEILFVDGAITGLTTE

SEQ ID NO: 85218 - protein, 509 aa, Caulobacter vibrioides
  misc_feature (1)..(509): tr|A0A0V2FD61|A0A0V2FD61_CAUVI Tryptophan halogenase OS =Caulobacter vibrioides OX=155892 GN=AS593_22400 PE=4 S V=1
MANNLRKIVIVGGGSAGWITAAMISHYLKDSPCEIELIESEQIGIIGVGESTIPPFLQLIRSLGIDEKEFMQETQAAFKLAIRFENWRQKGEVYYHPFGLIGGPVDVHEFYQVWLRGKAEGHPSNLQDFATASVMADRWKFMSPAMAPRTMIANANYAVHIDAALLAKFLRKFAEARGVKRTEGIVKDVATRPDGFIEKVILQDGREASGDLFIDCSGFRSLINGQTLKTEFLDWSDVLLCDRAIAVQTANVRDPHPYTLAQAQDFGWRWRIPLQHRAGNGYVFCSQYCSDDEAMATLMSQVEGEAVRDPWIVPFKTGMRKQLFNKNCVAIGLAGGFIEPLESTALHLIYRGVDYLLRFFPDRDCDATVAAEYNRRMRADYEEIRDFIVLHYFTTKRDDTPFWRAYQQVTPPESLRERIELFKAGGVLRDGVDDMFRAPSWQSVMEGMGIRPKRYQQLVDTLPAGVVKGLLDKSAPMLSELVDTLPSHGDFLRQHCPAPVPEALLKKVG

SEQ ID NO: 85219 - protein, 505 aa, Rhodanobacter sp.
  misc_feature (1)..(505): tr|A0A1G3F6C1|A0A1G3F6C1_9GAMM Tryptophan halogenase OS =Rhodanobacter sp. RIFOXYA1_FULL_67_6 OX=1802011 GN=A22 11_01505 PE=4 SV=1
MTNQRIKNIVIVGGGTAGWMSAAALAKVLGPGHSIRLIESEEIGTIGVGEATVPHLSLFNKLLGIDEAEFVRETMGTFKLGVQFVDWLKPGKTYVHGFGTSIGLDIGMLPFHQYWLRAFKSGNASEIGNYSLNTLAAARGKFMVSAADAPPNTPLANIAYAYHFDAGLYARYLRRYAEARGVQRTEGKIRETLLRPSDGFVDAVVLESGEKISGELFIDCSGFRGLLIEQALHTGYEDWNHWLPTNRAVTVACERTAPPTPYTRATAQTAGWQWRIALQHRVGNGHVYASPYISDDEAAATLLRNLDGAPLGEPRLLRFVAGTRKKVWNRNVVAIGLASGFLEPLESTGIFLIQSAITRLLTLFPDRNFSEAVIDRYNALSRFELERIRDFLILHFHATQRDDTPFWNYCRTMEIPETLRSVMALFRESGQFIRNAEELFGLVSWVEVMLGQGIMPTAWHTGADQMSEKDLNEFVAHVQQVIATCVDAMPPHQAFIDRYCKAAGV

SEQ ID NO: 85220 - protein, 479 aa, Rhodanobacter sp.
  misc_feature (1)..(479): tr|A0A1G3FAF8|A0A1G3FAF8_9GAMM Tryptophan halogenase (F ragment) OS=Rhodanobacter sp. RIFOXYA1_FULL_67_6 OX=180 2011 GN=A2211_11400 PE=4 SV=1
MARIQRILVVGGGTAGWLTACYLAKVLNTAAPESVRVELVESPNIGLLGVGEATFPSIRGTLAAIGLDERRFLVGASATYKQGIQYVNWVRPRGEPGPDRFFHPFSLPSQRSGSPELLPYWLLGGAPDGMAFAEAVTMQQRLIEHGRAPKRATDPDYQGPMNHAYHFDAACFAAVLAEHGQSLGIRRHLATVERAELDESGAIARIVTREIGELSADLYVDCTGLRGALIGGAMQSPFHSRRDVLFADRAVALQVPYPRQDAPILPFTRATAQEAGWIWDIGLQKRRGIGYVYSSRHSGATRAEEVIRGYVGAAADGLDALHIKFETGYRPEHWRRNCVAVGLAGGFVEPLESTGIALVELAAYLITHLLPGDVDDMERTARRFNEMMVARYERIIDFIKMHYCLSQRRDSAFWIDNTAPASIPQTLQDRLALWRHRPPHRLDFVTDLEMFMPASWQYVLYGMEFGTDLEPMRSAYPQM

SEQ ID NO: 85221 - protein, 95 aa, Caulobacter vibrioides
  misc_feature (1)..(95): tr|A0A258D816|A0A258D816_CAUVI Tryptophan halogenase (F ragment) OS=Caulobacter vibrioides OX=155892 GN=B7Z12_0 9215 PE=4 SV=1
MTTTHPNALRKIVIVGGGSAGWISAAMLSHYFQNGGCAVELIESEEIGTIGVGESTIPPFLQLLASLGVDEREFIQATQASFKLGIRFEDWKQKG

SEQ ID NO: 85222 - protein, 498 aa, Planctomycetes bacterium
  misc_feature (1)..(498): tr|A0A517VW22|A0A517VW22_9BACT Tryptophan halogenase OS =Planctomycetes bacterium V144 OX=2527964 GN=V144x_2670 0 PE=4 SV=1
MQQFDVVILGAGFGGSLTALLLNQIGRNVALIDRGTHPRFSIGESSTPIADYLLESLSENYDLPQFQPFCKYGTWQERYPQLACGIKRGFSYFAHEPEQFFRQKSNHSSELLVTANLDEASADTHWFRADVDHFFAEEVQKSSVVYLDQTEVVLAQSDDWTIQAERRGERFDFRAQFLIDATGAMGVVPDFLGVERQTVFESCSTAVYGHFENVTPWSEILDQYEFDRSEYPFDCDQAALHHVLSEGWMWQLRFNNDITSAGFVLDSAKNALSAIELWQNLLSRYPSILSQFEGASIVSPEFGLCSTGRLQRGWKECAGPNWALLPHTAGFVDPLHSTGIAHTLCGIERLVMTLEQCWRNSDELSVALSHYSESIQAELKLIDALVACCYRSLKQFDLFTTSALFYFAAATSFEHQRCNEQKRPLFLCADDVDLSNIIGGWLNEVSQIQEKNVSNPDEIKQAILNAETKLKPWNRVGLFHPDVPNMYYYTAAPKPEPQ

SEQ ID NO: 85223 - protein, 495 aa, Alteromonas sp.
  misc_feature (1)..(495): tr|A0A4U0ZCI2|A0A4U0ZCI2_9ALTE Tryptophan 7-halogenase OS=Alteromonas sp. HB161718 OX=2565549 GN=E5672_06665 P E=4 SV=1
MNQTVKNVVIVGGGTAGWISAAVIKRLIGAGVDVTLVESEEIGTVGVGEATIPPIITLNNVLGIDEKEFLRETNATMKLAIKFENWRVQGESYFHTFGAPGKSYAFCHFHHYFKRAQTLGLTDSIWEYDLNYLACKNGKFAHIKSPDPIIEMPYAYHFDASLYARFLRKKCEAMGVTRKEGIISDVTQDADNGFVTGVTLKSGEHVEGDLFIDCSGFKGLLTQQTLNTGYEDWSHWLPCDRAVAMPSERLEKTLPYTRSIAHSAGWQWRIPLQHRNGNGLVYSSNYYSDDQALDILSSNLDTKPLADPNFIRFRTGRRRKQWNKNVVAVGLSSGFLEPLESTSIHLIQSAVVRLIHLFPHDGFKQRQIDEYNKQSQLEFEQIRDFIILHYHVNERKDSHFWKDLREMDVPDSLTHKIELFRASGNLFREQNDLFLESSWLQVLMGQGVVQKDYHPLANALSEQKLQELMQNIKRIKNEPIGKIATHDDFLKQFCG

SEQ ID NO: 85224 - protein, 534 aa, Chloroflexi bacterium
  misc_feature (1)..(534): tr|A0A2E2AN27|A0A2E2AN27_9CHLR Tryptophan halogenase OS =Chloroflexi bacterium OX=2026724 GN=CL709_11620 PE=4 S V=1
  misc_feature (440)..(440): Xaa can be any naturally occurring amino acid
  misc_feature (458)..(458): Xaa can be any naturally occurring amino acid
  misc_feature (484)..(485): Xaa can be any naturally occurring amino acid
  misc_feature (489)..(489): Xaa can be any naturally occurring amino acid
  misc_feature (516)..(517): Xaa can be any naturally occurring amino acid
MPDAVIIGGGPGGGTAATLLARRGYSVVLLEREIFPRAHVGESLLPASMPVLEELGVLGQIESENFPKKYGATMVWGRDDTPWSWYFRETNRTYPHAYQVSRPRFDQILLDNAKSSGVDVRENCNVFETLPDSESGAIHGVRYRRDSGIVESVEADFVMDASGQSALLARSMNLRTWDTFFQNLAVYGYYRGAKRLPSPDENNIFIESYGQGWTWTIPLKDGLTSVGAIVDSESAQAMLADIGPDEFLIQQISQTARTNDMLSDAELTGPPRVVRDWSYTTNHMVGDGWILLGDAACFVDPLFSSGVHLALMSAVMAAAYVHGAKTDPTLRVPAGQVYEQLYRKEYAHFRELASLFYASNRTEESYYWQARRLLGDSNVGARESFIRAVAGQPPRGYERSALSRGELPSEISEMFASVASDKRLRDATVAMGLSLNLVPXLAGEAKLERRPIFAEGEXQWSAVLSSATRPEGTPLSNFVAALVXXVDGXRNIGQILDRFTQGVEDSEQIEQAHESXXNAISILYVDGAIDSLMG

SEQ ID NO: 85225 - protein, 504 aa, Sphingomonas sp.
  misc_feature (1)..(504): tr|A0A196MT96|A0A196MT96_9SPHN Tryptophan halogenase OS =Sphingomonas sp. TDK1 OX=453247 GN=A7X12_04745 PE=4 SV =1
MGGQQSLRVVIVGGGTSGWMTAAALARLLPARCSLHLIESEAIGVIGVGEATLPHIRSFVEKLGIPEADFMAWTRGTFKLGIEFRDWGKIGDSYIHPFGTFGRGKGEVDFHHYWTRLRRAGADVPSLEAFSYACMLARANRFDVPATDPAQLASTYGYAYQFDALLFAPYLRAIAEELGATRTEGKVVEVLRDGTSGNITAVRLDDGQLVEGDLFIDCSGFRSLLLGEAMKEPFEDWNHWLPADRAVAMPCRTETSVTPYTSAIAMPAGWRWRIPLQHRTGNGYVFASAFTSDDAAAQALTQAVEGAPLADPRFLRFRAGRRRRSWVNNCVAIGLASGFLEPLESTSIYLVQQAITALIELFPETRISPVDRDEFNRLIDLEYDRIRDFLILHYHATTRSDSEFWNYVRTMAVPDSLAEKIELFRRAGRVVKYREGVFLDASWIAVYVGQGIVPEGYDPRADLPDSDSLMRGMQALRAEIDATVAQVPEHLRYIDRHCAMAAAA

SEQ ID NO: 85226 - protein, 513 aa, Sphingomonas desiccabilis
  misc_feature (1)..(513): tr|A0A4Q2J211|A0A4Q2J211_9SPHN Tryptophan 7-halogenase OS=Sphingomonas desiccabilis OX=429134 GN=EO081_07955 P E=4 SV=1
MQQIQNIVVVGGGTAGWLTAGVIAAKHQGQRPHGFTVTLVESPNVPTIGVGEGTWPTLRTTLRRMGISESEFFRQCDAAFKQGARFNRWTTGAADDGYYHPLMLPQQFGKVNLAPHWLAEGGDESFCDTVTPQGRLCDEGLGPKTIATPEYEALANYAYHLDAGKFAQFLQRHCCNVLGVRHVLADVTEVKLAETGDIRSLDTAQGQTIAGDLFIDCTGFAALLIGKALGVPFRSCSDTLFCDTALAVQVPYDRPDQPIATHTISTAQSAGWIWDIGLPTRRGVGHVFSSSHVSADAAEQELRAYLGPAGHDLPIRQISIRSGHREQFWVRNCVAVGLAAGFLEPLEASAIVLIELSAKMIAEQLPACREVMDVVARRFNETTTYRWGRIIDFLKLHYSLTQRTDTEFWRDNLRPETIPDRLQGLMELWRYQSPWMHDEFDRAEEVFPSASYQYVLYGMGARTAVLPGTIDEDVEFARRARRENQIQTQRLVSSLPAHRDLIDRIVRHGLQPI

SEQ ID NO: 85227 - protein, 513 aa, Caulobacter rhizosphaerae
  misc_feature (1)..(513): tr|A0A561N2Q8|A0A561N2Q8_9CAUL Tryptophan halogenase OS =Caulobacter rhizosphaerae OX=2010972 GN=FHW61_110117 P E=4 SV=1
MTGKSIRKIVIVGGGTAGWMAAAGLSRALREHQPQPLKVEIQLVESEEIGTVGVGEATIPPLILFNQFLGVNEDEFVRATQATFKLGIEFVDWTRLNHRYLHPFGRYGADLASSAFHQYWLKLRSLGDPSDLGDYSLPTLAARLRRFDRPTANSASIMSTYSYAFHFDAGLYAKFLRGYAEARGVERVEGKVVDVSLRGEDGFIRSITLADGRVLEGDLFIDCSGFRGLLIEQALKTGYDDWSNWLPCDRAVAVQSQSVEDLTPFTRATAHAAGWRWRIPLQHRVGNGYVYSSPFISDDEAAATLLGELDGEPCIDPRFLRFTAGRRRRYWNKNCVALGLASGFMEPLESTSIHLIQTGITKLIQLFPDRTFSPVLLDEYNRLTDQEYEKIRDFLVLHYHANERTDSPLWRQVREMPIPDSLAHKMELFRETGRLASMGQDLFQEPSWLAVLIGQNVMPRAYDPLVDLMDAGVVEKNLRAMRIAMRQAAEAMPSHRDFIAAHCAAPDLPPRWK

SEQ ID NO: 85228 - protein, 533 aa, Streptomyces sp.
  misc_feature (1)..(533): tr|A0A2V2B1G8|A0A2V2B1G8_9ACTN Tryptophan halogenase OS =Streptomyces sp. CG 926 OX=1882405 GN=BCL76_106124 PE= 4 SV=1
MTSSDTRLQKVVILGGGTAGWMTAAYLGKALQGTVDITVLEAPTIPRIGVGEATVPNLQRSFFDYLGIAEDEWMRECNASFKMAVRFVNWRTDGQGESAARELPGGGPDHFYHPFGLLPDYDQTPLSHYWFKRKYEGRTTEPFDYACFREPPVMDAMKAPRWLDGRPATRYAWHFDAQLVADFLRRFSTEKQGVNHVQDEMVRVEQDERGYVTTLHTKGGLALDADLFVDCSGFRGLLINQAMEEPFIDMSDHLLCDSAVATAVPHDDEANGVEPYTSAIAMSSGWAWKIPMLGRFGTGYVYSSKFTDQDTATREFADMWGLDVEETKFNHIRFRVGRNRRAWVKNVVSIGLSSCFLEPLESTGIYFITAAIYQLAKHFPDKTFNDGLINSFNHEIEVMFDDTRDFIQAHFFYAPRNDTPFWQANKKLTLPDNIQQKISAYKAGLPINSPITDESTYYGNFEAEFRNFWTNGSYYCIFAGLGLEPDAPLPSLAHRPDSVAGAEPLFDAVKRQQQNLLETLPSAYDYLRQLHGA

SEQ ID NO: 85229 - protein, 496 aa, Porticoccaceae bacterium; identical to SEQ ID NO: 84489
  misc_feature (1)..(496): tr|A0A2D6ZEG4|A0A2D6ZEG4_9GAMM Tryptophan halogenase OS =Porticoccaceae bacterium OX=2026782 GN=CMK29_06895 PE= 4 SV=1

SEQ ID NO: 85230 - protein, 501 aa, Caulobacter rhizosphaerae
  misc_feature (1)..(501): tr|A0A561NPM3|A0A561NPM3_9CAUL Tryptophan halogenase OS =Caulobacter rhizosphaerae OX=2010972 GN=FHW61_103217 P E=4 SV=1
MTDHRLRKIVIVGGGTAGWMTAAALGRFLKDGHTRVTLVESEEIGTIGVGESTIPQINIFNRTLGLDENEFVRRTKATFKLAIDFVDWKEIGHRYYHPFGPYGLDMDGVSFHAYWLRLNAMGEAADLAEYSLQALASAQSKFMRANGQRNSPLGTLSHAYHIDAGLYALFLRDYAEARGVTRQEGRIVEIHQRAEDGFIEAVTLQGGQRIEGDLFIDCSGFRGLLIEQTLKTGFEDWSHWLLNDRAVAVPCELAGSRQPVTRATARPAGWQWRIPLQHRLGNGYAYSSAHISDDEATADLLAHLDGAPLRDPFTLRFTAGRRKKSWNKNVVAIGLSAGFMEPLESQSIHLIQVGIARLLAMFPDRRFQTPDIDRYNRVMRFEYETIRDFLILHFHATRRNDTPYWDYLREMPIPDYLADKIAVFQSYGRVFRENEELFTDTSWFAVMIGQGLEPRGHDPMADVMSDEDLRTRMANIHAVIAKSAQAMPDHMRFIAENCAAD

SEQ ID NO: 85231 - protein, 538 aa, Burkholderia cepacia
  misc_feature (1)..(538): tr|A0A107NYD7|A0A107NYD7_BURCE Tryptophan halogenase OS =Burkholderia cepacia OX=292 GN=WL94_18755 PE=4 SV=1
MSNPIKNIVIVGGGTAGWMAASYLVRALQQHTSITLVESAAIPRIGVGEATIPSLQKVFFDFLGIPEREWMPQVNGAFKAAIKFVNWRKSPEHARDDHFYHLFGTVPNCDGVPLTHYWMRKREQGFQQPMEYACYPQPGALDAKLAPCLSDGTRQMSHAWHFDAHLVADFLKRWAIERGVKQVIDEVEQVHLNERGYIASLSTKEGRTLEADLFIDCSGMRGLLINQALKEPFIDMSDHLLCDSAVASAVPNADARVGVEPYTSAIAMNSGWTWKIPMLGRFGSGYVFSSKFTSRDQATADFLNLWGLSDKQPLNQIKFRVGRNGRAWVNNCVAIGLSSCFLEPLESTGIYFIYAALYQLVKHFPDTSFDPRLADAFNAEIVHMFDDCRDFVQAHYFTSSRDDTPFWLANRHDLRLSDAIKEKVQRYKAGLPLTTTSFDDSTYYETFDYEFRNFWLNGNYYCIFAGLGLLPDRSLPLLQHRPESIDKAEAMFARIRREAERLRTSLPTNYDYLRSLRDGGAGLSRSQPGPTLAAPEIL

SEQ ID NO: 85232 - protein, 506 aa, Novosphingobium kunmingense
  misc_feature (1)..(506): tr|A0A2N0HK55|A0A2N0HK55_9SPHN Tryptophan halogenase OS =Novosphingobium kunmingense OX=1211806 GN=B0I00_1563 P E=4 SV=1
MNGDTARRIVIVGGGTSGWMTAAALGRFLGPPWQVTLVESEEIGTVGVGEATIPMIRNFNLALGIDEAEFLAATQGTYKLGIQFEGWGGFGQTYMHAFGMVGRSLGLLPFHQYWLRGRAEGLAGPLGDYVLNAVIAGQNRFAHVERRPGSPLPAVPYAYHFDASLYARFLRRFAELRGVTRREGRIAEVARHGENGDVAAVILTDGTRIEGDLFVDCSGFRALLLGEALGVPYVSWAKWLACDRAVAVPSRRCDPLVPYTRSIAEPAGWRWRIPLQHRTGNGHVWCSDHMGEDEATTRLLAGLDAEPLADPRVLRFTAGRRERFWERNVVAIGLASGFIEPLESTSIHLVQTAINRLLDFLPSGAVAAADRDGFNRLAVWEIERIRDFVVAHYVCNGRAGEPFWDYLRTVDLPETLAERIAMFRATGRIVREGDELFDVVGWAQVLIGQGVIPDAWHPLADQPDRDQLAGFLDTLTTAYLRDAERMPAHADHVARFCPAGDIDVAA

SEQ ID NO: 85233 - protein, 522 aa, Porticoccaceae bacterium
  misc_feature (1)..(522): tr|A0A2E8UF56|A0A2E8UF56_9GAMM Tryptophan halogenase OS =Porticoccaceae bacterium OX=2026782 GN=CMK38_03450 PE= 4 SV=1
  misc_feature (29)..(29): Xaa can be any naturally occurring amino acid
  misc_feature (71)..(71): Xaa can be any naturally occurring amino acid
  misc_feature (174)..(174): Xaa can be any naturally occurring amino acid
  misc_feature (195)..(195): Xaa can be any naturally occurring amino acid
  misc_feature (199)..(199): Xaa can be any naturally occurring amino acid
  misc_feature (201)..(201): Xaa can be any naturally occurring amino acid
  misc_feature (203)..(203): Xaa can be any naturally occurring amino acid
  misc_feature (217)..(217): Xaa can be any naturally occurring amino acid
MNDPQITDLVIVGGGSAGWLTAGIIAAEXLKTEQSSSRVKVTLVEAPNINTIGVGEGTWPSMRSTLKRIGXSETDFIRDCDVSLKQGTLFSGWTDGKDIYTHPFTVPHAYSQHNLSRDWQNKFSDLPFAEAVCPQSKLMLKNQAPKKISTPEYSFNVNYGYHLDAGKFAEKLRXHCTLELGVVHKKAEVIQVNSXENGXIXSXRLDTGESLTGDLFXDCSGSRCLLLGEHYGIPFKSIRDILFNDSAIASQVPYLSAGDSIASSTISTAQKHGWIWDIGLPSRRGIGHVYSSRYTDADNAEVTLFKHIEKLVGSKIAKKVKMRRISFSPGHRQKFWHHNCVAIGMAAGFIEPLEASALVLVELSASMIAEQLPQNRKVMDIVSKRFNEKFLYRWDSIIDFLKLHYVLSKREDSGYWRDNANKNSIPESLSEKVELWRWQGPYHKDTMHVDEMFPSASYQYILYGMGFKTNIGLSTKQSEVQTSKVAQELFDENLKYTNLLLNSMPSNRDFIEKVHQHGLQKI

SEQ ID NO: 85234 - protein, 502 aa, Sphingopyxis alaskensis
  misc_feature (1)..(502): tr|Q1GWR6|Q1GWR6_SPHAL Tryptophan halogenase OS=Sphingo pyxis alaskensis (strain DSM 13593 / LMG 18877 / RB2256 ) OX=317655 GN=Sala_0182 PE=4 SV=1
MTPMRIIIIGGGTAGWMAAACFTRFLPPGWSVTLVESDAIGTVGVGEATIPQIRLFNQALGIDEDEFLTATQGTIKLGIEFADWTRPGHRYMHAFGAIGRGLGLLEFQHYWLRARAAGVAGELGTYSLNETAAHARRMQRGAPRTSPHLAEMPYAFHFDAALYAAYLRRRAEAGGAQRVEGKVADVRLDGDSGNVAGVTLDDGRRIDGDLFIDCSGFRGLLIEGALATGYDDWSRWLINDRAIAVPCVHGATPQLPWTGATAREAGWQWRIPLQHRIGNGYVYSSHHISDEDAERTLLAHLDGAPQAQPNRLRFVSGKRRKLWNRNVVALGLASGFMEPLESTSIHLVQSGISRLLKMLPVGVADPAVAAEYNRQSDFEWERIRDFLILHFKATERRDTRYWQDRAAMPIPDTLAAKIDQFRAQGLIFREHEELFTESGWLQVLIGQGIEPRAWHPLADGIGEAELAKYMAGISLMIEREVAVMQSYDDFLAATRPAAGVAA

SEQ ID NO: 85235 - protein, 538 aa, Burkholderia cepacia
  misc_feature (1)..(538): tr|A0A0J5VZW4|A0A0J5VZW4_BURCE Tryptophan halogenase OS =Burkholderia cepacia OX=292 GN=VL15_38060 PE=4 SV=1
MSNPIKNIVIVGGGTAGWMAASYLVRALQQHTNITLIESAAIPRIGVGEATIPSLQKVFFDFLGIPEREWMPQVNGAFKAAIKFVNWRKSPDRSRDDHFYHLFGSVPNCDGVPLTHYWLRKREQGFQQPMEYACYPQPGALDGKLAPCLPDGTRQMSHAWHFDAHLVADFLKRWAVERGVSRVVDEVVEVRLNDRGYISSLSTKDGRTLEADLFIDCSGMRGLLINQALKEPFIDMSDYLLCDSAVASAVPNADARVGVEPYTSAIAMNSGWTWKIPMLGRFGSGYVFSSKFTSRDQATADFLNLWGLPDNQPLNQIKFRVGRNGRAWVNNCVAIGLSSCFLEPLESTGIYFIYAALYQLVKHFPDTSFDPRLTDAFNAEIVHMFDDCRDFVQAHYFATSREDTPFWLANRHDLRLSDAIKEKVQRYKAGLPLTTTSFDDSTYYETFDYEFKNFWLNGNYYCILAGLGMLPDRSLPLLRHRPESIDKAEAMFARIRREAERLRTSLPTNYDYLRSLREGDAGRSRSQPGPTLATPEIL

SEQ ID NO: 85236 - protein, 516 aa, Porticoccaceae bacterium
  misc_feature (1)..(516): tr|A0A2D6ZEN1|A0A2D6ZEN1_9GAMM Tryptophan halogenase OS =Porticoccaceae bacterium OX=2026782 GN=CMK29_07225 PE= 4 SV=1
MTMSTSANEGKISSIMIVGGGSAGWLTAGILAARYGQTMTITLVESPDVKIIGVGEGTWPTMKGTLKEMGISETDFFRECDASFKHGAKFAKWVSGDEADYYYHPLMLPQDFTKLNLAPYWLKNNGDRSFSESVCFQEALCERALAPKTVTMPEYNSAANYAYHLNAGKFTKFLTGHCTGKLNVKHKLATISEVLTSEDGDIRCVKTTDGQELVADLFVDCTGMASLLLGKTLGVEFIDKNDSLFIDRALAAQKPYESEEEPILPYTVSTAQKAGWIWDIGLTSRRGIGHVYSSKHTSEAEAEKALSDYIGPLFKDLSIKKISIRSGHREIFWKQNCVAIGLSAGFLEPLEASALMLIEISAKFVRDQLPETRNTMPIIARRFNKTMTYHWERIIDFLKLHYVLSKRDDSDFWIDNRCPSTVPDSLAELLELWRYHTPYRQDFSHKEEVFPAASYQYVLYGMGFQTEVSNRHVESTDDAYRAAVAENERMVSKAVELLPDNRQLLQKINRFGMSAF

SEQ ID NO: 85237 - protein, 493 aa, Porticoccaceae bacterium
  misc_feature (1)..(493): tr|A0A351Q5T5|A0A351Q5T5_9GAMM Tryptophan halogenase OS =Porticoccaceae bacterium OX=2026782 GN=DCW94_05615 PE= 4 SV=1
MMKVVIAGGGTAGWMAAFSLSARLGSLLDITLIESDEIGTVGVGEATIPPMRNFHRIMNVDEQEFMRETQATFKLGIEFDNWGEIGDSYIHSFGEIGQRSWMAEFHEFWMEARAQGFGGSLEDYCLELKAAKAGKFATQIDDTRLNFAFHLDATRYAKYLRKKSEAAGVRRVEGLIKDVQKDPQSGDIKALLLDSGELIEGDLFVDCTGFRSLLLGESLGVEFEDWSHWLFSDRAIAVQTTSVDEPRLYTRAIAHTSGWQWQIPLQSRVGNGIVYSSRFMSDDEAKDTLLSNISGEMITEPRFIKYRTGRRQKSWHKNCVALGLASGFIEPLESTSIHLVMTAIIRLIRLFPFGDSSEALADRFNEESTTEIETVRDFIILHYKQTNRTDSDFWNAYRTMDIPESLAHRLEIFKKNGYVWADDVALFRVDSWVQVMMGQGLAPAGFHGAGKLTDKTVLQESLAKIKASIDEKVEKLPTHQQFIDHYCKAPSAD

SEQ ID NO: 85238 - protein, 572 aa, Planctomycetes bacterium
  misc_feature (1)..(572): tr|A0A5C6AS78|A0A5C6AS78_9BACT Flavin-dependent tryptop han halogenase RebH OS=Planctomycetes bacterium Pla52n OX=2528005 GN=rebH_1 PE=4 SV=1
MEPNSHTTAPPGTPPPDSLQGKSLREMHIAIVGGGTAGWMSAATLRRRLGCRVTLVESSDVASIGVGEATIPAMVDWIENMGIDEDEFLRRCGGTYKLAIRFDDWVTPEHQYWHPFGSCGRIKGHDLIHQWRRGIAEGWIDSNCQYTDFCLQKQLCQSRRSLRPARPSNNPAAMSTNWSDHDYGAVGMPRFDSPIVENYAFHLDAGLLAKFIQSIAVTDGVTHRVGHVCGVQRSENGDITCVEVRDQPAIHADLYIDCSGFASVLIEKSLQSDWTDWSDQLLCDRAVTARQPVDHQDDNVTENSPSSARNSGDSLDSFQQPSDAPFTICTGRTAGWTWRIPLMHATGNGYVYSSNHLSRDEAESEFLRYLSDDVELNSVRFRVGHRRQSWQNNCVAIGLSSGFIEPLESTGIFLIQRALDELVNCLPGSGSITSRPDLFNRRMTDVYEEIRDFVLLHYVLSDRDDTPFWRDARSVRLPDSLDATIQLYEQRGHVELPEHDPVFAEANHHFIFQGAERLPPVNDSASSSLLDRPHAVALMSSILQRHNEINTSLPSNRQLLQSIHIQCPTVYC

SEQ ID NO: 85239 - protein, 506 aa, Porticoccaceae bacterium
  misc_feature (1)..(506): tr|A0A2D6ZAW2|A0A2D6ZAW2_9GAMM Tryptophan halogenase (F ragment) OS=Porticoccaceae bacterium OX=2026782 GN=CMK2 9_00545 PE=4 SV=1
  misc_feature (286)..(286): Xaa can be any naturally occurring amino acid
  misc_feature (330)..(330): Xaa can be any naturally occurring amino acid
  misc_feature (391)..(391): Xaa can be any naturally occurring amino acid
  misc_feature (453)..(453): Xaa can be any naturally occurring amino acid
  misc_feature (467)..(467): Xaa can be any naturally occurring amino acid
  misc_feature (477)..(477): Xaa can be any naturally occurring amino acid
AITLLESPDIPRISVGEATIPSLRHLLAVIGIDETDFMRSTDATFKQSIKYVNWSQKDDTFYHHPFSRFRQAPLDQSGLQWFQSDRSIPYMETVSAQPVLCEMDRSPLMMGQWDMGAKLNYAFHMNAQKFADYLRDYSVARGVAHVQENLTEVNRRENGFIESIITDNASVIEGNLFIDCTGFRAKLIGEVMNVRVEDCSQWLLCDQAVTMHVPYESHYPGTVRPYTTATALSNGWIWDIPMQSQRSIGYVHSSHFISDDAAEREMRNYQGKDTESLNSRKIKFSXERRHKVWEGNCIAIGLSGGFIEPLESTGLYLSDLGAVAFAEHFXYEDKHIEAMAYRYNRVLANRFYEILDFINMHYCLTRRCDTDFWKTVQQPDHINDRLKAKLXYWEIKPPTPMDFEDQCFRGLSTEATGNTAFSHAPVDTAALWNHESYTCILAGMNFLAEEYEXESEIKRPRPHVYEXVLSRLREGNXKLPPHALWLQQKVGMKQYETASKPLGWVA

SEQ ID NO: 85240 - protein, 496 aa, Porticoccaceae bacterium
  misc_feature (1)..(496): tr|A0A2E6G9L9|A0A2E6G9L9_9GAMM Tryptophan halogenase OS =Porticoccaceae bacterium OX=2026782 GN=CMK42_05055 PE= 4 SV=1
MDKPSVEKIVIVGGGTAGWLAAASISKLLGDNLQVTLIESDEIGTIGVGEATIPTMLVLHHLLKINEQEFMSAVNGSFKLGISFENWRALNEKYIHSFGLTGKGCWAAGFHHFWLKGKKLGLSDDFGNYCTELMAAKSDRFAISVDNEKLNYAYHFDAGLYAKFMRKIAEESNVKRIQGKIINVTTDETTGFISTLDLQSGEQIQGDLFIDCSGFAGLIIEKALNTKFDDWSEWLPCNRAVAVQTASTSEPAPYTRAIARDAGWQWKIPLQSRVGNGLVYCSRYISDTEAESLLLSKVDGSLLTKPRLIKFRTGQRKLHWNKNCIALGLAAGFVEPLESTSIHMVQKGIIRLLQMFPREGIKAADRNEFNYQMREEFLFIRDFIVLHYHLTERTDTSFWNHCRSMAIPETLRHRLDLFRESGRIFQKDRDLFAENSWAQVMLGQGLMPAHYHPIVNMMTDADLSSFLKDIEGRATRRVTQLPKHKQFIDRYCKAIV

SEQ ID NO: 85241 - protein, 538 aa, Burkholderia cepacia
  misc_feature (1)..(538): tr|A0A3P0X0Y2|A0A3P0X0Y2_BURCE Tryptophan 7-halogenase OS=Burkholderia cepacia OX=292 GN=DF038_17985 PE=4 SV=1
MSNPIKNIVIVGGGTAGWMAASYLVRALQQHTSITLVESAAIPRIGVGEATIPSLQKVFFDFLGIPEREWMPQVNGAFKAAIKFVNWRKSAEHSRDDHFYHLFGTVPNCDGVPLTHYWMRKREQGFQQPMEYACYPQPGALDAKLAPCLSDGTRQMSHAWHFDAHLVADFLKRWAIERGVKQVIDEVEQVHLNERGHIASLSTKEGRTLEADLFIDCSGMRGLLINQALKEPFIDMSDYLLCDSAVASAVPNADARVGVEPYTSAIAMNSGWTWKIPMLGRFGSGYVFSSKFTSRDQATADFLNLWGLSDKQPLNQIKFRVGRNGRAWVNNCVAIGLSSCFLEPLESTGIYFIYAALYQLVKHFPDTSFDPRLADAFNAEIVHMFDDCRDFVQAHYFTSSRDDTPFWLANRHDLRLSDAIKEKVQRYKAGLPLTTTSFDDSTYYETFDYEFRNFWLNGNYYCIFAGLGLLPDRSLPLLQHRPESIDKAEAMFARIRREAERLRTSLPTNYDYLRSLRDGGAGLSRSQPGPTLAAPEIL

SEQ ID NO: 85242 - protein, 498 aa, Porticoccaceae bacterium
  misc_feature (1)..(498): tr|A0A2D8WR84|A0A2D8WR84_9GAMM Tryptophan halogenase OS =Porticoccaceae bacterium OX=2026782 GN=CMK26_01670 PE= 4 SV=1
  misc_feature (30)..(30): Xaa can be any naturally occurring amino acid
  misc_feature (61)..(61): Xaa can be any naturally occurring amino acid
  misc_feature (86)..(86): Xaa can be any naturally occurring amino acid
  misc_feature (156)..(156): Xaa can be any naturally occurring amino acid
  misc_feature (425)..(425): Xaa can be any naturally occurring amino acid
MKANKKSINQIVIVGGGTAGWMTAASISAXIGKGLSVTLIESDQIGTVGVGEATIPTFFAXHQLLKIDESEFLSAVQGTIKLGISXENWHTLGESYIHAFGHTGKSCWAAGFHHFWLKGKENGFSEDYGCYSPELTAAKSEKFGFLKQNPLNYAYXLNAGLYAKFLRKIAEQNGVIRKEGKIVQVSKTDDENISNVALESGEIIGGDLFVDCSGFAGLLIDKALETPYTDWSNWLPCDRAVALQTQSTGAPVPYTRSIAHQSGWQWRIPLQSRVGNGLVYSSKYMEDKEALDVLMANVDGEILSKPNFIKFKTGQRVKHWSKNCVAIGLSAGFLEPLESTSIHLIQRAIIRLMQMFPSNGFTDSDRDEFNKQMSDEYEYIRDFIIMHYHVTKRDDSAFWRYCRTMDIPATLQHKLDLFLEAGRVXHGEGDVFAENSWTQVMLGQGLTPEQYHPIVNMMSNKELESFLANLKAMVDHSVGQLPSHDVFLSKYCPAPNIA

SEQ ID NO: 85243 - protein, 510 aa, Sphingomonas desiccabilis
  misc_feature (1)..(510): tr|A0A4V1QNT1|A0A4V1QNT1_9SPHN Tryptophan 7-halogenase OS=Sphingomonas desiccabilis OX=429134 GN=EO081_15085 P E=4 SV=1
MRPDPIRRVVIVGGGTAGWMAAAAITRVLGEMPGLSIELVESEEIGTVGVGEATIPQIVLFNKMLGIDEAEFVRETRATYKLGIEFVDWVRPGHRYVHPFGFYGLDMKGIEFHHFWLKGRELGDPTPLDAYSLGIVGGLQGRFAHPRPDQPSSPLSRLGYAFQFDAGLYARFLRRLAEANGATRTEGRIVDVERDPETGHVAAVVLQSGARIEGDLFLDCSGFRGLLIEGAMAAGFEDWTQWLPCDRAVAVPCANGGDRQPLTRSTARGAGWQWRIPLQHRIGNGYVYSSAHLSDEEAAATLLANLDGVPLADPRLLRFTAGHRRRAWIGNVVALGLAGGFLEPLESTSIHLVQSAIARLLTYWPTRRFDQLEIDRFNAAHVCDYLEIRDFLVLHYKATERADTPFWDYCRTLEPPPGLAGKLAIFGANGRIFREGNELFTETSWLSVMVGQGVEAGGYHPAADLLSDAETLTRLQHIRQVIADTASLLPHQDELLRQMGCGPVPLAAAS

SEQ ID NO: 85244 - protein, 504 aa, Sphingomonas desiccabilis
  misc_feature (1)..(504): tr|A0A4Q2IMN2|A0A4Q2IMN2_9SPHN Tryptophan 7-halogenase OS=Sphingomonas desiccabilis OX=429134 GN=EO081_15075 P E=4 SV=1
MPDGGCRVTMLDEPVRKVAVVGGGIVGWSAAVALKRRVPGLSVTIVPVAPPDNALADRMPQTLPSAIGFHDDVGLREEDAVLRTGGGWRLGTLFEDWVQGQPAYVHAYGSYGQPFGTASFHHHWTRAAQAGSAAPYDSHSPAAMLARAGRMLPPDPEPGSPFADIQAGLVLDIGRYRAMLEAFARHLGVGVREGAVAEVQLRGGDGFIERVALADGGSVEAELFVDASGPGGVVRGAIEAAWEDWRPWLPCDRLTHASAAATAPTTLDHVMALPAGWRWQSSLPGATLHGLCYASDFLSDEDASRLLAEASGVEALPVIGFHQGTRPEPWARNCVAIGDAAVVIEPLEWTNLHLAHSAIDRIVSAMPGRACHPLEIADYNRQAVAEGTRVRDFVLCHYATARRPEPFWQPHAALPESLARTLRLFAERGRLPFFEEETFARDSWLAILLGQGLIPRRIDPLIGTTPPQQSDAAMAGYRAAITRALLQFPTAAQHHAAQHARITR

SEQ ID NO: 85245 - protein, 558 aa, Chloroflexi bacterium
  misc_feature (1)..(558): tr|A0A2D9WMH7|A0A2D9WMH7_9CHLR Tryptophan halogenase OS =Chloroflexi bacterium OX=2026724 GN=CL718_05940 PE=4 S V=1
  misc_feature (110)..(110): Xaa can be any naturally occurring amino acid
  misc_feature (150)..(150): Xaa can be any naturally occurring amino acid
  misc_feature (355)..(355): Xaa can be any naturally occurring amino acid
  misc_feature (374)..(374): Xaa can be any naturally occurring amino acid
  misc_feature (425)..(425): Xaa can be any naturally occurring amino acid
  misc_feature (434)..(434): Xaa can be any naturally occurring amino acid
  misc_feature (446)..(446): Xaa can be any naturally occurring amino acid
  misc_feature (454)..(454): Xaa can be any naturally occurring amino acid
MADVCDIVVIGGGPGGSAVATFLADAGYAVTIVERERFPREHVGESLLPASIPILEQLGVMPEVEAAGFVVKHGATLVWGSDPDPWSWYFSDDPGQRPTSFQVVRSEFDXILLKNAATHGVDVQEDAQVLDVLFDEGRASGVRFLQDGTXSEITARFVVDASGQAAILSRKLGLLEWDTHFNNLAVYGYFKGGSHLESPNDGNIFIEAFEHGWLWKIPLHTGVDSVGAVVDKDIGHDRLRELGPEGFLQAQINEAPHVKEMLSDASFVGEPKVVRDWSYKSTAFSGDGYILVGDAACFVDPLFSSGVHLALGSASLASTYVQTVLKDPSASERAAATYRDIYEKQYQYFHLTAQXFYGTNRASDSYFWEARRIXGDDSKTPREAFVKVVGGQPPQGYERAVIERGEIPDGILDDVSRMEAHLKEXTAATERLTXNNGEDLLNGIPXLPRHIRLXQKPILSGSEYKQTFHLVVDSDKNLAHGYPLSPVMAGLIAKMDGSKTMSAVISEFEAEHGVAQPGAIRSLILKDLPPIITIGMLDVTPPGKTRAERRRFERLARK

SEQ ID NO: 85246 - protein, 447 aa, Thauera sp.
  misc_feature (1)..(447): tr|A0A0C3MM18|A0A0C3MM18_9RHOO Tryptophan halogenase fa mily protein OS=Thauera sp. SWB20 OX=1572758 GN=PO78_17 50 PE=4 SV=1
MAADGIVILGAGPAGAAVAIGLARMGEPVVLVGEPRRFAAVEGVSARVIDALRGLGLQRALTAFAPPSPRRAVWNGTYTEANVESLVDRQRFDQGLLEDLERLGVPVVRGRVTALHPAPGGHELEIDTDAGPRRMAAGFLVEARGRAAPGGGAPRVRGVETVSLLQYWQGPAGEAGSTVLSVEDGWMWMAALADGRRYLQLTVDVASADLPPKRALGDYCSARFHAVEAAAPFVRDAQPVGEPHARTSTAVLNESVAGDDWIRVGDAAMAVDPLSGNGIFQALSSALQAPAVVATLRHDRGRTALAQHFHTRRIEHLFHRFARIGRDFYAQEARWPQAPFWAARRGWPDALPLHAKVRPETVRVARGPVVCAGRIVEQDVVVTPDQPLGVWHLDGLAVAPMLAALRREGGDALEKAAGEALLCARFGLERARAAALLAWMRAQNWLD

SEQ ID NO: 85247 - protein, 498 aa, Porticoccaceae bacterium
  misc_feature (1)..(498): tr|A0A2D5YGJ9|A0A2D5YGJ9_9GAMM Tryptophan halogenase OS =Porticoccaceae bacterium OX=2026782 GN=CMK23_08650 PE= 4 SV=1
MKANKKSINQIVIVGGGTAGWMTAASISALIGKGLSVTLIESDQIGTVGVGEATIPTFFALHQLLKIDESEFLSAVQGTIKLGISFENWHTLGESYIHAFGHTGKSCWAAGFHHFWLKGKENGFSEDYGCYSPELTAAKSEKFGFLKQNPLNYAYHLNAGLYAKFLRKIAEQNGVIRKEGKIVQVSKTDDENISNVALESGEIIGGDLFVDCSGFAGLLIDKALETPYTDWSNWLPCDRAVALQTQSTGAPVPYTRSIAHQSGWQWRIPLQSRVGNGLVYSSKYMEDKEALDVLMANVDGEIISKPNFIKFKTGQRVKHWSKNCVAIGLSAGFLEPLESTSIHLIQRAIIRLMQMFPSNGFTDSDRDEFNKQMSDEYEYIRDFIIMHYHVTKRDDSAFWRYCRTMDIPATLQHKLDLFLEAGRVFHGEGDVFAENSWTQVMLGQGLTPEQYHPIVNMMSNKELESFLANLKAMVDHSVGQLPSHDVFLRKYCPAPNIA

SEQ ID NO: 85248 - protein, 511 aa, Porticoccaceae bacterium
  misc_feature (1)..(511): tr|A0A356CJG2|A0A356CJG2_9GAMM Tryptophan halogenase OS =Porticoccaceae bacterium OX=2026782 GN=DD440_03815 PE= 4 SV=1
MSDSGKIRSILIVGGGSAGWLTAGILAARYGQTMDITLIESPDVKIIGVGEGTWPTMKSTLKEMGVSETDFFRECDASFKQGAKFAKWVTGAEDDYYYHPLMLPQDFTQTNLAPHWLQDSGGRSFSESVCFQEALCEHALAPKTLAMPEYNAAANYAYHLNAGKFTTFLTKHCTEKLNVKHVLATIHDVKQRENGDIDYVVTTANDHLSADLFIDCTGMASLLLGKTLGVEFIDKSDVLFIDSAMAVQKPYDSEEEPILPYTVSTAQDAGWIWDIGLTSRRGIGHVYSSRHTTDEQAELALATYVGPRFKDLSVKKIPIRSGHRKEFWKNNCVAIGLAGGFLEPLEASALMLIELSARFVRDQLPETTSTMPIIAKRFNETLTYHWGRIIDFLKLHYVLSKRDDTAFWRDNRDAVTVPESLTELLRLWEFHTPYRQDFSHKEEVFPAASYQYVLYGMGFKTQVSSRVDNSHARACERAVQENEKIMDKALTLLPDNRQLLRKIHEYGMSSI

SEQ ID NO: 85249 - protein, 533 aa, Streptomyces diastatochromogenes
  misc_feature (1)..(533): tr|A0A233SRJ3|A0A233SRJ3_9ACTN Tryptophan halogenase OS =Streptomyces diastatochromogenes OX=42236 GN=BEK98_050 05 PE=4 SV=1
MTDTDSRIRKVVILGGGTAGWMTAAYLGKALQGTVDIQVLEAPAIPRIGVGEATVPNLHRVLFDYLGIPEEEWMRECNASFKMAVRFVNWRTPGQGEPEARTLEDGRPDHFYHPFGILPDHDNTPLSHYWFKNKHEGRTDVPFDYSCFREPPAMDAKLSPKWLDGTPSTRYAWHFDAALVADFLRRFATDKQGVEHVQDEMVSVEQDERGYVTALHCKSGRVLEADLFVDCSGFRGLLINKALGEPFLDMSDHLMCDSAVATAVPHDDEANGVEPYTSAIAMSSGWAWKIPMLGRFGSGYVYSSKFTSQEEATREFCELWNLDPAETKFNHVRFRVGRNRRAWVNNVVSIGLASCFLEPLESTGIYFITAAIYQLAKHFPDRTFNPALVDSFNHEIEVMFDDTRDFIQAHFYYAPRNDTPFWQAQKKLTLPENIQQKISAYKAGLPINSPIADESTYYGNFEAEFRNFWTNGSYYCIFAGLGLEPDAPLPALAHKPESVAGAEPLFEQVRQQQEHLLQTLPSAYDYLRRLHGK

SEQ ID NO: 85250 - protein, 498 aa, Hyphomonas sp.
  misc_feature (1)..(498): tr|A0A2E7B7E7|A0A2E7B7E7_9RHOB Tryptophan halogenase OS =Hyphomonas sp. OX=87 GN=CMF02_10470 PE=4 SV=1
  misc_feature (66)..(66): Xaa can be any naturally occurring amino acid
  misc_feature (71)..(71): Xaa can be any naturally occurring amino acid
  misc_feature (83)..(83): Xaa can be any naturally occurring amino acid
  misc_feature (429)..(429): Xaa can be any naturally occurring amino acid
MVQSILVVGGGSAGWITANLLNAHIRRAGRPTTVTLVESPDIPTIGVGEATVPTIRRTLSDIGLPXQDLLXSAEATFKTLIRXRDWNPGESYDHPFDRRQRPHTDAAVRGWTVQNGQAFDRAFSALTQLADFNIAPKSPHAPQYRGNFPYAYHLDAIKLAKRLSEFGQARGIRHKLANITDVKVSPEGLISSVETDQGETLTADLYVDCTGFRSALLGKALDVPMKSYAKYLLCDRAVTMRVPYEVYKPERILTYTLATAREAGWQWDINLQTRRGIGYVYSSQFLSDDAAETALRGFEGPHSDGLEARHIKFTSGKRETSWKGNCVAVGLSDGFLEPLESSGLYFIEFAALAIASMLEDYAAAPEATVRYYNRISNELFQEILGFINLHYVTSKRRDTPFWQAATADEAILDDLRDRLELWKRRSPTXFDFPGADRLFAQDSYEFILHGMKYVEGPAGTAPMPPDLSGMVAKSRSELPEHEAFLALVQKAAAARPAG

SEQ ID NO: 85251 - protein, 503 aa, Caulobacter vibrioides
  misc_feature (1)..(503): tr|A0A258D3V1|A0A258D3V1_CAUVI Tryptophan halogenase OS =Caulobacter vibrioides OX=155892 GN=B7Z12_12120 PE=4 S V=1
MREAIQSIVILGGGSAGWMAAALLNAALGKKCAVTVVESAEIGVVGVGEATIPAIRQFNAMVGLKEPAFMRVTRATLKLGIEFVDWGCSGERYLHPFGVLGGQPTLGVFPQHFLRLMAADPDANLEDYSVCALAARLGRAGPTATDLTSPLSQLMSAYHFDAVLYGRFLRRLAEGRGVRRIEGEVVAVDQRPEDGFVERLRLKDRREVEGELFIDCSGFRGLLIEGALAAGYDDWSRWLPVDRAIAAPCAKVGPAAPYTQSIAQEAGWRWRIPLQHRTGNGYVYSSAFTDDDRAETVLRDGLDGALEAEPRKLRFVTGRRRAAWKANVVALGLASGFIEPLESTSLHMVHSGLQALLKFFPDRSFSPVLRAGYNAAVKAEGELIRDFIILHYHATRRAGDPFWDYVRTMPVPDSLSERVALYAERGILVSGGDELFSPSSWLAVMHGQGIRARRASPLYDGVNPAALATEYAATARRLRRSVEALPLHEAYLADAGAWAEPEA

SEQ ID NO: 85252 - protein, 490 aa, Brevundimonas subvibrioides
  misc_feature (1)..(490): tr|D9QNK3|D9QNK3_BRESC Pyridine nucleotide-disulfide ox idoreductase OS=Brevundimonas subvibrioides (strain ATC C 15264 / DSM 4735 / LMG 14903 / NBRC 16000 / CB 81) OX =633149 GN=Bresu_2932 PE=4 SV=1
MQETDPGAIRSIAIVGGGTAGWMSAVLLGHALRGSDVRITVVESAEIGIVGVGEATIPPILDFLDLVGIDREAFIRETEATLKLGIRFQDWKTVGEHYWHPFGTFGVAIDRRPFHHHLQRAAAWDEPRGVVDFSLAAALAEAGRFTPPDPREGPARAGLRYALHFDAALVARTLRTVAERRGVRRLDRTVVDVTRTPAGHVDELLFREGDRLGADLFIDCSGFRGLLIEGAMAAGYEDWTRWLPCDRAVAGPTALNGEPQLYTLSHARDAGWRWRIPLQHRAGNGYVYSSRHIDDQAALDDLTRQVGGTFLAEPRQLRFTTGRRKAFWKGNVVALGLASGFLEPLESTSIHLVTSGLYKLLDHFPDRTFDPANIAAYNASLIEEYETIRDFIVAHYGLSARRDTPFWRDVTGQSLPDSLQSRIDLYRATGRCRARPGDLFADVNWFYVLHGLGLRPRHPDPLTGMSDAAAVRGVFDQVARDVAAGVSAAR

SEQ ID NO: 85253 - protein, 538 aa, Burkholderia cepacia
  misc_feature (1)..(538): tr|A0A1Z3YL57|A0A1Z3YL57_BURCE Tryptophan 7-halogenase OS=Burkholderia cepacia OX=292 GN=CEQ23_04965 PE=4 SV=1
MSNPIKNIVIVGGGTAGWMAASYLVRALQQHTSITLVESAAIPRIGVGEATIPSLQKVFFDFLGIPEREWMPQVNGAFKAAIKFVNWRKSPERSRDDHFYHLFGTVPNCDGVPLTHYWMRKREQGFQQPMEYACYPQPGALDAKLAPCLSDGTRQMSHAWHFDAHLVADFLKRWAIERGVKQVIDEVEQVRLNERGYIASLSTKEGRTLEADLFIDCSGMRGLLINQALKEPFIDMSDYLLCDSAVASAVPNADARVGVEPYTSAIAMNSGWTWKIPMLGRFGSGYVFSSKFTSRDQATADFLNLWGLSDKQPLNQIKFRVGRNGRAWVNNCVAIGLSSCFLEPLESTGIYFIYAALYQLVKHFPDTSFDPRLADAFNAEIVHMFDDCRDFVQAHYFTSSRDDTPFWLANRHDLRLSDAIKEKVQRYKAGLPLTTTSFDDSTYYETFDYEFRNFWLNGNYYCIFAGLGLLPDRSLPLLQHRPESIDKAEAMFARIRREAERLRTSLPTNYDYLRSLRDGGAGLSRSQPGPTLAAPETL

SEQ ID NO: 85254 - protein, 510 aa, Sphingomonas sp.
  misc_feature (1)..(510): tr|A0A1I5GTA6|A0A1I5GTA6_9SPHN Tryptophan halogenase OS =Sphingomonas sp. OK281 OX=1881067 GN=SAMN05428984_3819 PE=4 SV=1
MIDGLGQHIVILGGGTAGWMTACLIAHRWRDRGVRVTLVESPEIGIVGVGEGSTPQLKHFFDTLGIAEAEWMPACDATYKLGIGFEGWSDREGYERYFHPFPTALDGHTVPQFFYNARAKRTGRDVDAHPDQFLLPARLAAAHCAPQPADNFPFEVSYGYHFDAYKVGVFLAAHATETLGVVHLQRRIASVERTQFGNVAALIDTNGERIAGDVFVDASGFRSTIFSALEMPFISYVDALFNDRAVVMPTAHAPGAPIPSQTRATALSAGWAWHIPLTSRNGNGYVYSSRHLTEAQAEAELRANIGGEAGEARHLKMRVGRVRDSWSHNALAVGLAQGFLEPLEATALHLVIATVEAFLDMVEQGGATSAVRTAFNARIAARYDGVRDYIVAHYRLNQRHDDPTGYWAEARSVDALSDDLKMLMSTWFTGADMVAAIDRAGLDRYYSAISWHCLFAGYGTFPDAARLIPPGADIDPIDLPKIDDFLTRCASNFGSHASRLRAAADHKDHV

SEQ ID NO: 85255 - protein, 505 aa, Sphingopyxis alaskensis
  misc_feature (1)..(505): tr|Q1GUN9|Q1GUN9_SPHAL Tryptophan halogenase OS=Sphingo pyxis alaskensis (strain DSM 13593 / LMG 18877 / RB2256 ) OX=317655 GN=Sala_0915 PE=4 SV=1
MGTSIHNVVIVGGGTAGWLSACVLAARRPDLSIILIEAPGIATIGVGEGTWPTMRETLATIGIEETEFLRECDASFKQGSLFVGWVTGAPEDRYLHPFSAPPPIDMRDVLAAWRADENARSFAAAVTPQAAICERDLAPRHPAMPDYAGTLNYAYHLDAGKFAQLLARHATERLGVTHVAAEVTGIIADGDGDIAALALHDGTAIGGELFIDCSGQAALLIGGHHGVEWIDRSDVSFNDRALAVQVPTQAESAIASQTIGTAHRAGWIWDIALPTRRGIGCVYAARFMSEAEADTVLRNYIAAHMPEADAGNLTPRALSFRTGYRARFWQKNCVAIGLSAGFIEPLEASAIVMIELSVRALADNFPASRAIMDIHAQRFNTLFRYRWERIVDFLKLHYALSQRQEPYWKAHRDPATIPSRLAEQLALWRDQPPSAWDFPQVDEVFSAASQQYVLYGMRPGETVSLSRPRSEACVRLAEISERARALVAALPENRAYFSALRAHAA

SEQ ID NO: 85256 - protein, 496 aa, Sphingomonas sp.
  misc_feature (1)..(496): tr|A0A1I5B6N5|A0A1I5B6N5_9SPHN Tryptophan halogenase OS =Sphingomonas sp. OK281 OX=1881067 GN=SAMN05428984_0253 PE=4 SV=1
MTPAPQTPPPRKRVVIAGGGTAGWVAATALIRQLAGLIDVTLVESDDIGTVGVGESTIPTIRTFHHFIGVDEDAFIRATNATFKLGIAFEGWDRTDARYFHAFGSVGRSTFVADFQHFWMEARRHGFAGDYGDYSLELQAAAQHRFALDRDETLAYAYHLDATAYARFLRSIAEPAGVRRVEGRITQVQQAADDGRITALVLESGERIEGDLFIDCTGFRALLIEQTLKTGFDDWSHWLPTDRAFAVQSTATEAPVPFTRAVAHGEGWRWKIPLQHRVGNGLVYSSAHLSDDEARARLLAGIDGEPLFEPRLLRFTTGMRRQVWNGNCLSLGLASGFVEPLESTSIHLVMVAVTWLIQHFPFGDDSAALAERFNARSRREWEQVRDFIILHYHLTHRDETPFWQSRRTLDIPDSLATRIALFRESAMAYQDQDELFRTDSWVEVMLGQGILPNAHHRLPSTMPAAQLQTALTDLKRGIAAKVGGLPKHADFLRRYA

SEQ ID NO: 85257 - protein, 394 aa, Brevundimonas sp.
  misc_feature (1)..(394): tr|A0A258JK89|A0A258JK89_9CAUL Tryptophan halogenase (F ragment) OS=Brevundimonas sp. 32-68-21 OX=1970328 GN=B7 Y85_03340 PE=4 SV=1
MDDPRIRSVVIVGGGTAGWMTAAALVQHFRTAPLKITVVESSDIGTIGVGEATIPTIRRFYGQLGLRDDDVMRATQATCKLGIRFLDWSGPGSDFIHPFGLYGQDVKGIGFHHYWLKQRRAGDAAPLAAYSLGAALAAGGKFTLPSPHPPSQLSVFDWALHLDAGLFAQHLRAYAEAGGCARIDARIRSVELRPEDGFVRALTLDDGREVEGDLFVDCSGFKGLVIGEALGVGFEDWGRWLPCDAAYAVQSENRPGDAPAPFTRVTARSAGWQWGIPLRHRAGNGLVFSSAHLSDDQALAELMPHLLGDPLTEPRRIPFRPGRRSQAWAKNCVAIGLSSGFLEPLESTSIALIETGIERLKALFPDRRFAQPILDEFNDQTAREMERVRDFIIL

SEQ ID NO: 85258 - protein, 559 aa, Chloroflexi bacterium
  misc_feature (1)..(559): tr|A0A2E7R341|A0A2E7R341_9CHLR Tryptophan halogenase OS =Chloroflexi bacterium OX=2026724 GN=CL729_04115 PE=4 S V=1
MTDSCDILVLGGGPAGSASATMLSDAGYKVVILEREKFPREHVGESLLPASIPILEQIGVMPEIERAGFVTKHGATLVWGADPEPWSWYFADDPGQRPTSFQVVRSEFDDILLKNASKHGVEVIEEAQVLDVIFENERATGAVYLHEGSEKQVSARFVVDASGQAALLSRKLGLLEWDTHFNNLAVYGYFKNARHLDSPNDGNIFIEAFEHGWLWKIPLHIGMDSVGAVVDKDVAHERLRELGSDGFLLKQIEDAPHVSELLESAELVGESKVVRDWSYKSTQFSGDGYILVGDAACFVDPLFSSGVHLALGSASLASTYVQTVLKDPSSRSQADQTYRDIYEKQYQYFHLTAQLFYGTNRTADSYFWEARRILGDDSKTPKEAFVKVVGGQPPQGYERAVIERGEVPDGILNDVKRMESYLEERKNTTERLTQDGGKELLESIPSLPNHIRLVQKPILSGQEYKQVSHLVVDGQDTLTHGYPLTAVMADLISRIDGGTILSDIIGQFESDHGVADKGAMNAVVLKTLPELITIGMIDVTAPGATRAERRRFERQLQKK

SEQ ID NO: 85259 - protein, 480 aa, Burkholderia pseudomallei
  misc_feature (1)..(480): tr|A0A0E1U0D8|A0A0E1U0D8_BURPE Putative tryptophan halo genase OS=Burkholderia pseudomallei 576 OX=557724 GN=BU C_1980 PE=4 SV=1
MHLPNRTQVLVIGGGPAGATGAAFLAREGVEVTLVDKEVFPRYHIGESLLPSCLEILTLMGARDTFDRHGFQRKPGAYFNWKGETWKLDFGELGGTYRYSYQVRREEFDHLLLQHARAVGAQVHEGVSVREILFDDGRPCAALCVAQSTEEASTVEFDYLVDASGRNGLMSTRYLDNRKFHEIFRNVAAWGYWEGLSWPDDCAPGSILVSSIPDGWWWAIPLADRPTSVGVVMHRDAFVAARRTGTLEQVYAQALALSPVMANLTEHARLVTPLKTEQDYSYTCDSFAGNGYFLSGDAACFLDPLLSTGVHLAMYSGMLAAASLASILRAEVTEREAAAYYRDSYRQAYLRFLVFVQTFYEAHGKLGYYSKADELSHYMIEAGDIRRAFLNLVSGLEDIADAEQATSHLMGEMSRRIDQNLALRKDKRALSSAIGSTQVEDNARFFDAIEGLPCLSANMALDGLYVSTRPRLGLQRVAAM

SEQ ID NO: 85260 - protein, 501 aa, Alteromonas sp.
  misc_feature (1)..(501): tr|A0A4U0Z9F7|A0A4U0Z9F7_9ALTE Tryptophan 7-halogenase OS=Alteromonas sp. HB161718 OX=2565549 GN=E5672_12080 P E=4 SV=1
MTVSGLDSSKNQTPVKNVVIAGGGTAGWMAATALSRLLGKSIKVTLVESKDIGIVGVGEATIPPIRTFHKLLGIDEKAFMRATQATFKLGIEFENWREQGHSYIHSFGITGRECWAGEFHHFWLRAKEYGFGGEFGDYCPELIAAKQNKFATSEAMPLNFAYHFDAVAYGRFLKSLACEAGVMHKEGDIEKVAVCPQAGNIQSLQLASGEVINGDFFIDCTGFKGLLIEQALHTGYDDWRHYLFCDRAVAMQTELTAPPVPYTKSVAHRAGWRWQIPLQERMGNGLVFCSRFMSDEDAINTLKSQVTGVPINEPRVIRFTPGKRRRGWNKNCVALGLSSGFIEPLESTSIHLIMTGLIRLMRLFPFDGITQSAIDEYNNKFDSEMSAILDFIVMHYKVTQREDSPFWQQCQRMEIPPSLKHKLALFAETGRVFLDDGDIFRVDSWTQVLMGQGMTPSQYHRVADEMSEQSLKQFMAGLKQQVDNHVAKLPLHEAFLTKYLR

SEQ ID NO: 85261 - protein, 499 aa, Brevundimonas sp.; identical to SEQ ID NO: 85169
  misc_feature (1)..(499): tr|A0A258JHU2|A0A258JHU2_9CAUL Tryptophan halogenase OS =Brevundimonas sp. 32-68-21 OX=1970328 GN=B7Y85_03145 P E=4 SV=1

SEQ ID NO: 85262 - protein, 374 aa, Caulobacter vibrioides
  misc_feature (1)..(374): tr|A0A258D7B2|A0A258D7B2_CAUVI Tryptophan halogenase OS =Caulobacter vibrioides OX=155892 GN=B7Z12_10120 PE=4 S V=1
MRRVLIVGAGIDAWMTAAALAKASQGLAEVVVAETGPPPAGRIAALPSLQGLHARLGISDEILAQATRTRPRLAARYGDGLEPFGETGVAIDGVAFHHYWLAAGRPGPLSDWCLAAQAAVRRRFAPPSPDPRSPLSSLSYGLTLDAAGYAELLKRIAVTAGAKVVEGRPDADLKVDASGDQRLLVAHAPWTDWSAWLPTGVTLAEDGLISTFAPTPARTGHIIEAMTGDTVAVGAAYGVIGAGDGGDLHLLQGDVSRLIALFPTGPAAVAEYNRLAESALERARDMAILRWGDLSNPPEPLARKIEQFASRGRVVTYDDEAWPESAWIHAMLARGIIPTRWDPLADRVPPERIREMLSRMKAMLEQTAEAMPRV

SEQ ID NO: 85263 - protein, 516 aa, Caulobacter vibrioides
  misc_feature (1)..(516): tr|A0A290ML11|A0A290ML11_CAUVI Tryptophan 7-halogenase OS=Caulobacter vibrioides OX=155892 GN=CA606_10600 PE=4 SV=1
MTTTHPNALRKIVIVGGGSAGWISAAMLSHYFQNGGCAVELIESEEIGTIGVGESTIPPFLQLLASLGVDEREFIQATQASFKLGIRFEDWKQKGQRYYHPFGAIGGPIGPHEFYQCWLRAKANGHPSNLQDFAPGTVMADQWKFIPPMKAQRTLIAGASYALHVDARLVAKFLRDYAEARGVKRTEGIVTDVVTHPDGSVAKVIMKDGREVEGDLFIDCTGFRSLLIGKTLDVPFNDWSDMLLCDRAVVVQTENVGAPHPYTVSKAEDAGWRWRIPLQHRAGNGYVFSSRHLSDDAARATLVQNVEGQMLMNPMFIAFKTGMRQRLWHKNVVAVGLAGGFIEPLESTALHLIYRGMDFLLRFFPDRDFDPALAAEYNRRMTADYEEIRDFIVLHYCTTQRDDTPFWRDVRNAPIPDSLKERMALFQAQGVLREGVDDMFRNPSWQSVMEGMGVRPRRYQQLVDTAPYDVIAQTLDQSAPILAAQVAGLPSHGEFLEKHCPAPKPEAVVAPFGAVA

SEQ ID NO: 85264 - protein, 503 aa, Hyphomonas sp.
  misc_feature (1)..(503): tr|A0A350ZRC7|A0A350ZRC7_9RHOB Tryptophan halogenase OS =Hyphomonas sp. OX=87 GN=DCY26_06785 PE=4 SV=1
MAPQIRRIVILGGGTAGWMTAAAISHVLAARKADITLIESEEIGTVGVGEATLPHIRFFNQRIGLDEPELMRATQATMKLGIQFVDWARKGDAYIHPFGDYGQPAGGVDFLQIWARLHAAGRTSRICDYSLPVVMAEAGRFGFPVEDPASVMSTFSYAYQFDAGLYARYLRRVSEGRGVVRVEGKVTSVRQNPETGHVEALSLGEGREVEGDLYIDCSGFRAMLIDEAMGSGFEDWSRWLPCDRAIAIPTENAGPPVPYTRATARTSGWQWRIPLQHRVGNGHVYSSAFLDDQSAEDELLRHLDAPAMRQPNRLKFRAGQRRQQWVGNVVAIGLASGFLEPLESTSIHLIQQGITTLMELFPDGPLDARDIAEFNRVMSLEYDRVRDFLVLHYHATEREDSEFWNHVRTMDVPGSLDEKITMFRERGIVMKYRDGLFLLPSWIAVFVGQRVIPRHWDPRADALPMEQTAESLARMKRHIAEVVEALDTHDAALARYCPAEVMA

SEQ ID NO: 85265 - protein, 503 aa, Massilia phosphatilytica
  misc_feature (1)..(503): tr|A0A2S8H9Z5|A0A2S8H9Z5_9BURK Tryptophan halogenase OS =Massilia phosphatilytica OX=2026176 GN=C5614_09630 PE= 4 SV=1
MENNNQQDRGRPIRRVVIAGGGTAGWMAAAALARTLGKVVDIKLVESDDIGTVGVGEATIPSLVHFHRLLDIGEQEFMAATQATFKLGISFEGWRARGEDYIHSFGMTGTDHWTAGFQHFWLKGRERGLASDYGDYCLELVASQEKRFGHLPNQGINYAYHLDATRYARYLRRFSEHFGAERIEAKIARVDTDPATGHITALVLDSGSRVEGDLFIDCTGFRSLLLGQTMGVEYEDWSQWLFNDCAIAVQTESTGPAVPLTRSMAHDWGWQWRIPLQHRTGNGIVFSSRHTDEATARATLLGNIEGKVLTEPRVIRFTPGQRKQVWAGNCIGLGLASGFLEPIESTSIHLIQRGIVRLLQIFPTHGIQQSDVDEYNAQAEEDIRTIRDFIILHYKVTNRRDTPYWHDAATMPVPASLQHRIDLFRDGGRVFREGNELFAENSWVQVMLGQGLTPERWHPSADLMGDDELRGFLDGIRNGVRRTVSQLPPHQQYVERYCPAGKP

SEQ ID NO: 85266 - protein, 511 aa, Pseudoalteromonas piscicida
  misc_feature (1)..(511): tr|A0A2A5JPS0|A0A2A5JPS0_PSEO7 Tryptophan halogenase OS =Pseudoalteromonas piscicida OX=43662 GN=CEX98_13240 PE =4 SV=1
MINSYVVVGGGTAGWLTACILAKKLSEYSDKTVTLIESPDIPPIGVGEGTVPSIRETLKMIGISETDLFSKCDATFKQSIKFESWLKPGADNSQHYYHHLFDFPFPFGESLSPLWQNLKQSGVDTPSFASLASIQEYQAELGRAPKRITDPEYTGISDYAYHFDALKFARLLKEHGTSNLGIRHVTDNVVTVNKKSDGSILNLNMQSGITLEFDFFVDCTGFKSVLLGDALEVPFIPKSDVILTDKALTIQVPNLSEDIPPYTISKAHRCGWIWDIALTSRRGVGFVYSSKHLSDDDAINEFGNYLGMKLNADDVRVVDMRIGFREKFWYKNCVAIGLSQGFIEPLEATAILLSDFSANLFCNKLPQAHDDLEVLSERFNERVSSAWNSVVDFVKLHYCISDRDDSQFWLDNRNDSTIPDSLLEKLALWKLHGPTKDDFTNNFEVFRLENYLYVLLGMEYSAKYNPVSENQLKRLQEQAERVKSTAEQVAQQTQKQLKVIEAIKQYGLSKC

SEQ ID NO: 85267 - protein, 495 aa, Pseudoalteromonas piscicida
  misc_feature (1)..(495): tr|A0A2A5JLG9|A0A2A5JLG9_PSEO7 Tryptophan halogenase OS =Pseudoalteromonas piscicida OX=43662 GN=CEX98_18480 PE =4 SV=1
MKKIHSLTILGGGTAGWMCAAYLAKHQPNLSITVIESPSIGRIGVGEGSTPHLQHFMQSLGVHESDWMPACQASYKTGIYFDNWNGDNGSYFHPFFSEMDAKTAEVYFVNANARRRGSEYIDKPEHYFLAAVLANKQQAPQPQRSLPRTLEYGYHFDAQKLADWLREFSLTRHVKHLQSTVNSVQHHAQEVIGLTLESGEQVKSDFYVDASGFNALLIEKALEVPFISFTDQLLNDSAVAIAGDIINPLPSSTSAIAMPCGWRWQIPLQDRTGHGYVYSSAHITAKQAETQLRQAAQLDKGQAKHLTMRVGMMARSIEGNVFAIGLAQSFIEPLEATALMVTSHSIELLNRLLSQQLEAEAINQQLSDLVLGIKEYVLAHYATSKRVDTRYWQDAKVAALNVSELDALLTHWRGGGDFDAWLHQYRQQSPYIRPSWYCLLGGMDHRDSSCHMHFDQAPQHIEQAAKAYLEKLCDEHFIDHTNALEQLQRTQAFSA

SEQ ID NO: 85268 - protein, 504 aa, Sphingomonas desiccabilis
  misc_feature (1)..(504): tr|A0A4Q2IQX1|A0A4Q2IQX1_9SPHN Tryptophan 7-halogenase OS=Sphingomonas desiccabilis OX=429134 GN=EO081_15070 P E=4 SV=1
MAGPDRQRVVVVGGGTSGWMTAAALVKLLPDRCHVHLVESEAIGIIGVGEATLPHIRAFNERLGIVEAEFMATTRATFKLGIEFRNWARIDDSYIHPFGTFGRGAGDVQFHHYYARLLHAGVQLPPIEAFSMACTLARANRFAPPSPDPRQIASTFGYAYQFDAVAFAPYLRHLAEGLGAERTEGRIVHVERNGETGDVTAVLLEGGRRIEGDLFVDCSGFASLLLGKALEEPFQDWSRWLPADRAVALPCRTVTEVTPYTSAVAMPAGWRWRIPLQHRTGNGYVFSSAFLSDEHAADALTAAVEGVPMASPRVLRFTAGRRERSWAHNVVAIGLSGGFLEPLESTSIYLVQQAITALVELFPERRISAVDRDEFNRIVDMEYDRVRDFLILHYHATERNDSEFWNYVRTMTVPDSLAEKMALFRRRGRIVKYREGAFLDASWVSVYLGQRVTPAGFDPRAAGPTLESLVAGMKQMRAEIQAAASAMPDHLSYLGRYCPMAAAA

SEQ ID NO: 85269 - protein, 510 aa, Caulobacter vibrioides
  misc_feature (1)..(510): tr|A0A0V2FBJ3|A0A0V2FBJ3_CAUVI Tryptophan halogenase OS =Caulobacter vibrioides OX=155892 GN=AS593_01870 PE=4 S V=1
METSTPLDIVIVGGGTAGWMVGTALVSGLRPHQARVWLVESDEIATVGVGEATIPAMRDYNRFVGIDEVEMMRETNGTFKLGIEFLDWGFKGSSYHHPFGVHGVGIGGAGFHHHWNRARLAGHEFDIEQFSYAIAAARADRFEFPNPDPDKIDSTYSYAYHFDASLYARYLRKVAEGRGLTRTEGKVVDVTRDGQTGDVASITLASGEVIKGDFFVDCTGFRGLLIGQTLNSPFEDWTDWLPCDRAWAVPCARADRFTPFTRSTAREAGWQWRIPLQHRTGNGYVYSSRYISDDEAASVLMANLDGEALAEPRLIRFKAGRRTASWTRNVMAAGLASGFLEPLESTSIYLVQVAVMNLLKLFPGKRVEPALVEDFNRRVDMEYDRVRDFLILHYHANTRTDGELWKHCREMEIPESLKDKLELFRHRGVAPNHRDGLFAQPSWISVLLGQGVLPGGYDRMADNVPLSQALAEMERQRAAIARRVPAMPSHADFIARHCAVTQRPVAEAMA

SEQ ID NO: 85270 - protein, 508 aa, Frateuria terrea
  misc_feature (1)..(508): tr|A0A1H6U2T0|A0A1H6U2T0_9GAMM Tryptophan halogenase OS =Frateuria terrea OX=529704 GN=SAMN04487997_1859 PE=4 S V=1
MGEDSDTRVRDIVIVGGGTAGWMTAALLSRALGDQVHIRLIESDEIGTVGVGESTIPSIRLVNGFLGLDEDDLLRSVQGTIKLGIQFNDWHRIGQSYLHAFGDIGLPLGLLPFHPYWLRSQRDPAAPDLWAYSLNARAIAAHRFARMERIDGTPLAGLRWAYHLDAGRYARYLRQHAAQGVQRTEGKVIKVDLRAADGFIESVQLASGETIAGDLFVDCSGFRGLLIEDALKTGYEDWRHWLPCDRAVVAPSSRVEPLRPFTQANARPAGWQWRIPLQHRSGNGHVYCSQFTGDDEAAALLVENIEGELLEQPRLLRFTSGMRRQSWNRNCVALGLAAGFMEPLESTSIHLIQSGVQRLLSLFPDRHCDTALVAEYNRQTRFEYERIRDFLILHYRAIERRDTPFWQHCAHIAMPEPLERKLALFRSGGRIVRDGDELFAEPAWLQVMLGQGIEPDGHHPLAGALPQAQLDEFLSHIRTLLDRAVGSMPEHAQFIARHCAAGDTVVAA

SEQ ID NO: 85271 - protein, 506 aa, Colwellia sp.
  misc_feature (1)..(506): tr|A0A2N1CAD4|A0A2N1CAD4_9GAMM Tryptophan halogenase OS =Colwellia sp. 75C3 OX=888425 GN=CXF85_00590 PE=4 SV=1
MNKNKIENIVIVGGGTAGWMTASLLAKVLGKTVNITLIESDKIGIVGVGEATIPPIVSFNKAIGVDETEFIKATQGTIKLGIEFNNWYQDGDSYMHAFGNIGKNFPFCDFHHFWLRHQQNTNNSSGSSSGSTPSYWDYSLNYQAARYNKFSPLRSIPNTNLPGLTHAYHFDAGLYAKFLHKHAVGLGTKRIEGKIVQVQQNHDSGFIESVLLENGTAVTGDLFIDCSGLAALLTEKTLSTGYEDYSHWLPCDRAIAVPCEKVEPIEPYTRSTAHKVGWQWRIPLQHRTGNGLVYSSKHMSDEEAKELLLNNLDGKPLAEPRVISFKTGRRLKQWHKNVIAIGLSSGFFEPLESTNIHLVQTAALRLLDFFPHNGINIEEVEEFNRQSKVELEGIRDFIILHYKLNNRGDSEFWRACQRMEIPESLLNKIELFKKTGKVFCKPDDLFTEIAWQQVMIGQGNIPEDHHPLVDTLSKEQLIDLMASLTTLINRTVDKLPSHDEFLQLLK

SEQ ID NO: 85272 - protein, 495 aa, Pseudoalteromonas piscicida
  misc_feature (1)..(495): tr|A0A290TUK5|A0A290TUK5_PSEO7 Uncharacterized protein OS=Pseudoalteromonas piscicida OX=43662 GN=PPIS_a3547 P E=4 SV=1
MKTIQSLTILGGGTAGWMCAAYLAKHQPNLSITVIESSSIGRIGVGEGSTPHLQLFMQSLGVKERDWMPACQASYKTGIYFDNWNGDNGSYFHPFFSEMDAKTAEVYFVNANARRRGSEYIDKPEHYFLAAVLADKQQAPLPQRPLPRALEYGYHFDAQKLADWLRAFSLARGVMHIQSTVSSVQHHAKEIIALTLESGAQVKSDFYVDASGFNALLIEKTLEVPFISFADQLLNDSAVAIAGDKINPLPSSTSAIAMPCGWRWQIPLQGRTGHGYVYSSAHTTTEEAEAQLRQAAQLDKGQAKHLTMKVGMMTRSVEGNVFAIGLAQNFIEPLEATALMVTGYSIELLNRLLSQQLEVQAINQQLSDLVLGIKEYVLAHYATSKRADTQYWHDAKVAALSLSELDELLTHWRSGGDFDAWLNQHRMYSPYIRPSWYCLLGGMDHRDSTCQMPFDQAPQHIEQAAKAYLTKLSDEHFTAHTTALEQIQRAQAFRA

SEQ ID NO: 85273 - protein, 437 aa, Nostoc sp.
  misc_feature (1)..(437): tr|A0A2L2N4J5|A0A2L2N4J5_9NOSO Tryptophan halogenase OS =Nostoc sp. 'Peltigera membranacea cyanobiont' N6 OX=12 61031 GN=NPM_2040 PE=4 SV=1
MNIPQQCDVVIIGGGPAGSTAATFLSQKGYDVVLLERHKHPRHHIGENTIPQFWKYTDLAQVSDKIAAEGFIQKAGGTTFWNGRIRQVDFKDFGYSRQALHVERDRFDLILLENAREKGVQIFEEVSVLSVDLQDGQQEQSLTYRLLKDKSLGKITCRFIVDASGQNAVIAKQMGIRTIDKDFRFMSLWGYFKNSKYIGLNGKAHSVENLRTILPTTFICSFAETGNWGWSWHIPLRESTSVGLILPLEFMKTVQLNGGSWESYFRQKCCEIPILEDLLANAQFCEGSFAKIQDYSYRSTQLAGPGFFLIGDAAGFIDPIFSIGIVLGMYSAYTATWAIDRSFKNPSSLVHNQALFSSQLQGRLEVARSLALPHYQSGDRACDLAKTTIQMERALEQELMATWSTMTTRPENFQAIASSLKGREINSNKFRVIEEMI

SEQ ID NO: 85274 - protein, 504 aa, Pseudoalteromonas piscicida
  misc_feature (1)..(504): tr|A0A290TNC6|A0A290TNC6_PSEO7 FADH2 O2-dependent halog enase I OS=Pseudoalteromonas piscicida OX=43662 GN=prnA PE=4 SV=1
MNITKIAIVGGGTAGWLAANHLGLALSSNSNVEITVIESLDIPSIGVGEGTVPYIVKSLKKFGISEAELLGSCDATFKQGIRFVSWLDEKVHGAHNFYYHPFEAPYPEGLDITNIWLNLGKKIPFDYVGIQSRVCESGLAPKLKTDGNYQGVLPYAYHFDAAKFAKLLKRNALDRFNVRVLNGTVDESKLDQTGHIESLCMTNGDILHFDFYVDCTGFSAKLISSVSNDSFQDKSEQLLVDTALVQQIERDDPSSLNPYTTATAHKAGWMWEIPLTSRTGTGFVYASKYMSHKEALETYARMLNVDSVNPRKIEMRVGYRNQSWSKNCVALGLAQGFVEPLEATSILLTDFSAEFLSKNFPLSRAEISVFSDHYNDAVNCAWESTIDFIQLHYILSDRVDSDFWVEYRSEVKLSDSLERKLAKFKLRSPQQMDFWSRFELFNEKNFLYVLYGMKFNTHPQTTSQAEFDIGLKLLDKNNEQLRRAKGALLDHGEWLKQLKQYMSS

SEQ ID NO: 85275 - protein, 499 aa, Hyphomonas sp.
  misc_feature (1)..(499): tr|A0A355K964|A0A355K964_9RHOB Tryptophan halogenase OS =Hyphomonas sp. OX=87 GN=DHV57_03185 PE=4 SV=1
METQNIRRVVIAGGGTAGWIAAASLSRLLGPLLDITLVESDAIGTVGVGEATIPTHRTFHHLMGIDERDFMRATKATFKLGIAFEEWGGLGDRYIHSFGQVGKSNWMGEFYNIWMYAQERGIGAELDAYCFELQAAEAGRFFTSDKANINYAYHLDASLYAKFLRTFSEAKGVKRVEGLIEEVEQDGESGFITALKLQSGERIEGDLFIDCTGFRGMLIEQTLKTGYEDWTHWLPTDSALAVQTRSVGPAQPYTRAIAHHAGWRWRIPLQHRVGNGLVFCSENMQPDEAKEYLLGHVDGEPLTEPRLIRYKTGRRKKVWNKNCVALGLSSGFVEPLESTSIHLIQVGATRLVQQFPFAGISEAIANHYNEQAERELEKIRDFIVLHYKLTERDDSDFWRARRDMPVPDSLAQRISLFRENGLAYQATDDLFRVDSWLQVMLGQRLKPKGYHHMGHLMTDDQLMTALGGLEANISKAVSQMPSHQDFIDQYCAVPESETV

SEQ ID NO: 85276 - protein, 552 aa, Chloroflexi bacterium
  misc_feature (1)..(552): tr|A0A432KDL3|A0A432KDL3_9CHLR Tryptophan halogenase OS =Chloroflexi bacterium OX=2026724 GN=DSY78_02020 PE=4 S V=1
MSTASKPDSNLDLNADVIVIGGGPAGSAAATMLARKGWQVTVLEREKFPRDHVGESLLPASIPVLEELGALPAVESAGFLPKYGATMVWGSGDAPWSWYFKETSQRYPHSYQVWRPQFDQILLDNAKAQGVTVLEGHHVTEVIFDGGEAVGVEFTSANGETGEGQARFIVDASGQSTLLARHLESKEWDPFFQNLAVYAYFTGAKPLPEPDQNNIFIESYRYGWLWTIPLHTGRSSVGVVVDSDTGKEGIQQNGAKAFLEAQLAQSSHTRAILENAMMDSEPTVVMDWSYTAGKMYGPGYILAGDAACFVDPLFSSGVHLALMSGVLAAAYVTTALNTPSMAEEAGEVYQELYLKEYNQFREMARLFYSSNLSAESYFWEARRITNSDEYSPRHSFIQAVAGQPPRGYERVVLERGQAPEKFIESVKTVETERLARTQWLAALAADPQRNQILNAVPRLAEGVQVQRKPVLAEGEFVPGQVLNTVSQPEGTPCSPLVAAVIGEIDGQKSVADIVDGMGQHLDQAAHAQLEEAVSRTIEILYVDGTVAGLVTD

SEQ ID NO: 85277 - protein, 485 aa, Porticoccaceae bacterium; identical to SEQ ID NO: 84820
  misc_feature (1)..(485): tr|A0A2D6ZE12|A0A2D6ZE12_9GAMM Uncharacterized protein OS=Porticoccaceae bacterium OX=2026782 GN=CMK29_06150 P E=4 SV=1

SEQ ID NO: 85278 - protein, 509 aa, Caulobacter vibrioides
  misc_feature (1)..(509): tr|A0A258D843|A0A258D843_CAUVI Tryptophan halogenase OS =Caulobacter vibrioides OX=155892 GN=B7Z12_10115 PE=4 S V=1
MTPSPIRNVLIVGGGTAGWMTAAALAKALPKTIAVTLVESEQIGTVGVGEATIPPINTFNQILGLDEAAFMRATKASFKLAIEFVDWMGPGHRYLHPFGSFGLDIEAVKFHQVWLRAHHEGWAPPIDAFNLSAQAAHLNRFAPPSKDPGQVLSSLKYAFHFDAGLYAKFLRDYAEPRGVTRVEGKVASVQQHGETGFVTSVTLDDGRVLEADLFVDCSGFRGLLIEQTLKAGYDDWSHWLPNDRAVAMPCVTGGDGLTPYTRATADAAGWRWRIPLQHRTGNGYVYSSRDISDEDAVARLRATLDGEPLAEPNFLRFQAGRRKAAWVKNVVAIGLSSGFLEPLESTSIHLIQAGITKLLALFPDRGFDPIEIAEYNRLTALQVELIRDFIILHFKANARSEPYWVRAREMDIPESLQRKIDLFAASGRLFPSDLDLFAEPSWIAVLLGQGVMPRRHDPLVDAFDEAFLKSQLSRLAGLIRQTAQALPTHEQFIARYCAAPHASRPEFKA

SEQ ID NO: 85279 - protein, 491 aa, Caulobacter vibrioides
  misc_feature (1)..(491): tr|A0A0V2FBD6|A0A0V2FBD6_CAUVI Tryptophan halogenase OS =Caulobacter vibrioides OX=155892 GN=AS593_01880 PE=4 S V=1
MTAAALAQTVGTQRYSITLVESEQIGTVGVGEATIPMILLFNKVLGLDEDVFIRETNATFKLGIEFADWRRLGHRYFHPFGLYGADMDGVGFQHFWLRWARQSGDWDHGAFNAETLAAAGGRFMRTPPAPNLPKINYAFQFDAALYAAFLRRYAEARGVVRAEGKITTVERDGQSGHVSRLVLDDGRAIGGDFFVDCSGFRGLLIEETLGAGYDDWSRWLPCNRAAAVPCARAGELTPYTRATAREAGWQWRIPLQHRTGNGYVFSDAFIGEDEAVRLLGERLDGAALADAKVLKFTAGRRRKSWIGNVLAIGLSSGFLEPLESTSIHLIQAAIAKLLTLFPKTGFDPWVVDKFNREMALEYEQVRDFIIAHYKVTERDDTEFWRWCQAMVPPDSLAQRLEVFRTRGEVLVDQKELFKETNWFAILAGQGLLPDDYHAVADKISPEELSLRLGRIRAAIKERAAGMPPHDLYLEKAGLLGAAAKAARIVTA

SEQ ID NO: 85280 - protein, 501 aa, Pseudoalteromonas piscicida
  misc_feature (1)..(501): tr|A0A0F4NSC7|A0A0F4NSC7_PSEO7 Tryptophan halogenase OS =Pseudoalteromonas piscicida OX=43662 GN=TW75_19250 PE= 4 SV=1
MKTHLPMKTIQSLTILGGGTAGWMCAAYLAKHQPNLSVTVIESSSIGRIGVGEGSTPHLQLFMQSLGVKERDWMPACQASYKTGIYFDNWNGDNGCYFHPFFSEMDAKTAEVYFVNANARRRGSEYIDKPEHYFLAAVLADKQQAPLPQRPLPRALEYGYHFDAQKLADWLRAFSLARGVRHIQSTVSSVQHHAKEIIALTLESGEQVKSDFYVDASGFNALLIEKTLEVPFISFADQLLNDSAVAIAGDKINPLPSSTSAIAMPCGWRWQIPLQGRTGHGYVYSSAHTTPEEAEAQLRQAAQLDKGQAKHLTMKVGMIARSVEGNVFAIGLAQSFIEPLEATALMVTGYSIKLLNRLLSQQLEAQAINQQLSDLVLGIKEYVLAHYATSKRADSPYWQDAKIAALSLNELDELLTHWRSGGDFDAWLNQHRMHSPYIRPSWYCLLGGMDHRDSTCQMPFDQAPQHIEQAAKAYLTKLSDEHFTAHTTALEQLQRAQAFRA

SEQ ID NO: 85281 - protein, 420 aa, Caulobacter vibrioides
  misc_feature (1)..(420): tr|A0A258DAC1|A0A258DAC1_CAUVI Tryptophan halogenase (F ragment) OS=Caulobacter vibrioides OX=155892 GN=B7Z12_0 5800 PE=4 SV=1
RYYHPFGAIGGPIGPHEFYQCWLRAKANGHPSNLQDFAPGTVMADQWKFIPPFKAQRTLIAGASYALHVDARLVAKFLRDYAEARGVKRTEGIVTDVVTHPDGSVAKVVMKDGREVEGDLFIDCTGFRSLLIGKTLDVPFNDWSDMLLCDRAVVVQTQNVGAPHPYTVSKAEDAGWRWRIPLQHRAGNGYVFSSRHLSDDEARATLVKNVEGQMLMNPMFIAFKTGMRQRLWDKNVVAVGLAGGFIEPLESTALHLIYRGMDFLLRFMPDRDFDPALAAEYNRRMTADYEEIRDFIVLHYCTTERDDTPFWRDVRNAPIPDSLKERMALFQAQGVLREGVDDMFRNPSWQSVMEGMGVRPRRYQQLVDTVPYAVITQTLDQSAPILAAQVAGLPSHGEFLEKHCPAPKPQAVVAPFGAVA

SEQ ID NO: 85282 - protein, 551 aa, Chloroflexi bacterium
  misc_feature (1)..(551): tr|A0A2E2V599|A0A2E2V599_9CHLR Tryptophan halogenase OS =Chloroflexi bacterium OX=2026724 GN=CL753_01765 PE=4 S V=1
  misc_feature (153)..(153): Xaa can be any naturally occurring amino acid
MLTNNSGSYRTSALIVVVGGGPAGTTVATMLARKGLSVILLERAKFPRDHVGESLLPASMPVLKELGVITEVEQSGFLPKYGATMLWGSQPDPWSWYFSETNHQYPHAFQVWRPTFDNILLENSRKNGVDVRESHQVTSVDFLDTGSVTVNYXHEVDKKGSIDADFIVDASGSNCLLARQLDLREWDQFFQNLAVYGYFKGGSTLPDPDQTNIFIESTTNGWIWNIPLHTGVASVGAVVDSTYGQTQISQIGIKDFLLQNINQSKYTAKMLKDAELVSKPLVIKDWSYTNNPMAGDNYILVGDAACFIDPLFSSGVHLAFMSGILAAAHITTAMKDKDLEKESRRVYTNLYSQEYQHFRELAKLFYSSNRTVDSYFWEARRLLGVDTSYDSRKSFIHAVAGQPPRGYERAVMERGQLSEELLKEINEVSEIRSSRKLEADSLLSAMNISSPSISQLTPILIAGTKIEVKPVLGDGEFRWGYVLITPDRPEGTECSRLVSELVSLMLTKSSLDTIWNNLRNKFENIESQRLEGDILNTINILYTDGTITKFI

SEQ ID NO: 85283 - protein, 499 aa, Caulobacter vibrioides
  misc_feature (1)..(499): tr|A0A290MZP8|A0A290MZP8_CAUVI Tryptophan 7-halogenase OS=Caulobacter vibrioides OX=155892 GN=CA606_10410 PE=4 SV=1
MEPQTIRKVVIAGGGTAGWMAAAALARQLGPLLDITLVESEDIGTVGVGESTIPTARTFNALLGIDEAEFMRTTQATFKLGISFENWGEIGDRYIHSFGQVGKSTWMGGFHHFWLQAVAQGFGGDLGDYCFELKAAEGQRFYTGEESPLNYAYHLDAGLYGQFLRRMAEADGARRIEGKIASVRQRETDGFVEALVMESGQVVEGDLFIDCTGFRGLLIEQTLKAGYEDWSHWLPTNSALAVQTRSTEPAVPYTRAIAHRAGWRWKIPLQHRVGNGLVYCSDHISDDEAMAMLTSQIEGETLISPRLIRYRTGRRRKTWDKNVVALGLSSGFVEPLESTSIHLIMIGITRLMQLFPFGGISQAAIDRYNRQADDELEKIRDFIILHYKVTERSDSTFWDQVRTMDIPDSLAHRIALFQESAQVFQAPGELFQVDSWLQVMLGQRIMPRTYHHMGRLMPPQQLKQALDDLKRNIAGAVSRLPQHQAFLDHYCAPPVSKSA

SEQ ID NO: 85284 - protein, 510 aa, Alteromonas sp.
  misc_feature (1)..(510): tr|A0A4U0ZBI8|A0A4U0ZBI8_9ALTE Tryptophan 7-halogenase OS=Alteromonas sp. HB161718 OX=2565549 GN=E5672_15920 P E=4 SV=1
MNHSSNTSQKQRIVIVGGGTAGWLTAAIVAAKHKVAMGECGLDITLVESSDIPTVGVGEGTWPTMRNTLKDIGLSEKEVFRRCSAAFKQGGKFVNWVNGDGDFYYHPFTVPLGYGRVEMAPYVGDIANFANATNFQQHVCERNMAPRTLNEQEYSSAQSNYAYHLDAGAFADMLRDFSKTELGVKHIVATVEDVAATSNEHIESVTLNNGMVLKADLFVDCSGFRSLLLGETLGESVVSTDGVLFNNSALALHVPHEEDFEIKPYTQATAQEAGWIWDIGLSSRRGVGHVYSTEFTTDERAEEVLRQYVGDKHGDLKARTIRFNSGYKKRIWKGNCIAVGLSAGFVEPLEATALMLIEISARYIAEQMPLPESAMPIVSQRFNKQMNYRWQRIIDFLKLHYIFNQRSEPYWVANRDPSTIPDSLKEDLEIWKYRGPQIADFSAAIELFPAASYQYVLYGMGFSPDFSLQSHFYNERDLADKVIQQNQLITQQKLSSLPNHRDYIEQWLAS

SEQ ID NO: 85285 - protein, 500 aa, Hyphomonas sp.; identical to SEQ ID NO: 84374
  misc_feature (1)..(500): tr|A0A350ZRK7|A0A350ZRK7_9RHOB Tryptophan 7-halogenase OS=Hyphomonas sp. OX=87 GN=DCY26_07200 PE=4 SV=1

SEQ ID NO: 85286 - protein, 545 aa, Chloroflexi bacterium
  misc_feature (1)..(545): tr|A0A2E6XD99|A0A2E6XD99_9CHLR Tryptophan halogenase OS =Chloroflexi bacterium OX=2026724 GN=CL759_04675 PE=4 S V=1
MNVTDLSADVVVIGGGPAGSAAATMLARKGWQVTVLERENFPRDHVGESLLPASIPILEELGVLPAVEEAGFLPKPGATMVWGSGSSPWSWYFKETSQRYPHSYQVWRPQFDQILLDNARAAGVTVVEGAHVSDVIFDDGEAVGVEFTNADGVEGEAECRFIVDASGQSTLLARHLEYKQWDPFFQNLAVYAYFTGGDPLPEPDQNNIFIESYQHGWLWSIPLHTGRTSVGAVVDSKIGQEGIQKEGAKAFLESQLSQSTHTKNMLAKAAMDSEPTVLLDWSYTSEKLFGPGFILAGDAACFVDPLFSSGVHLALMSGVLAAAYVTTALNDPSLAEDAGQVYQELYLKEYNQFREMARLFYSSNLSAESYFWEARRITNASHYSPRESFIQAVAGQPPRGYERVVLERGHAPEEFTESIRAVETERRARTEWLAALAGDPQRNQLLNAIPQIAEGVKVEEKPVLAEGEFVRGHVLNTISQPEGTPCSPIVAAVITAVDGQKSVADIVDSLGQHLDQSAHAQLEEAVSRTIEILFVDGAITGLTTE

SEQ ID NO: 85287 - protein, 506 aa, Xanthomonas campestris
  misc_feature (1)..(506): tr|G0CAT9|G0CAT9_XANCA Tryptophan halogenase OS=Xanthom onas campestris pv. raphani 756C OX=990315 GN=XCR_4464 PE=4 SV=1
MIPAPLRNIVIVGGGTAGWMAAAAFARVLGPSFNVQLIESEQLGTIGVGEATVPHIKAFNNLLGIDEAEFVRQTQGSFKLGIEFVDWQRPGTSYIHGFGTQIGHPLGLLPFHQYWIKQQRRGKAQPLGAYTLNTVAATRGKFMTSAGDVPANSPLANIAYAYHFDASQYARFLRGYAEQRGVTRLEGLIEQVQLDAHTGNVQSVQLASGQVVRGDLFIDCSGFRGLLIEEALHTGYHDFTHWLPCDRALAVPCEKAGPPTPYTRSTARAAGWQWRIPLQHRTGNGYVYSSAHISDDEAAATLLANLDGTPLADPRPLRFTTGRRKQFWNRNVVALGLASGFLEPLESTSIHLIQSGISKLLELFPREGISPVLVQRYNDRLAFEFDRIRDFLVLHYHATERDDSAFWRDCRTMPITPELQTTLDLFRDSGRFYRNAEEMFAEISWVQVMVGQGILPQGYHPLVDQVPDTDAEGFLASVAQTISHCVDVMPTHQQFIDRYCRADPMR

SEQ ID NO: 85288 - protein, 496 aa, Sphingomonas sp.
  misc_feature (1)..(496): tr|A0A196N4D2|A0A196N4D2_9SPHN Tryptophan halogenase OS =Sphingomonas sp. TDK1 OX=453247 GN=A7X12_22275 PE=4 SV =1
MDVQKFRVVIAGGGTAGWVAAAALVRHLGPSLDITLVESDAIGTVGVGESTIPTAWTFHKLLGINEQVFLRETNATFKLGISFENWRREGDRYFHPFGSIGRGLPLCDFQHFWLEARRRGFGGALGDYSLETQAALAQKFATGDPMPLAYAYHLDATAYAAFLRSLAEPAGVRRVEGRITEVEQADNGDIAALVLEGGLRIEGDLFIDCTGFRALLIEETLKTGFDDWSHWLPTNRAFAVQSETTEAPVPYTRAIAHGAGWRWRIPLQHRMGNGFVYASDHLSDDEAREQLLAAVPGRALFDPRLIRFTTGMRKKAWSRNCVALGLASGFIEPLESTSIHLVMIAVTRLLQNFPTRHDMAALAARFNAQSRAESEHIRDFIILHYKLNDRPEPFWREHAARAVPDSLSARIALFREGAVAYQEGTDLFRTDSWNAVLLGQGVTPRDHHPMPSQIPDADLQRAFADLRAGIAAQLAQLPGHAEFICRYAAAKVPAAA

SEQ ID NO: 85289 - protein, 518 aa, Thalassotalea sp.
  misc_feature (1)..(518): tr|A0A099KG89|A0A099KG89_9GAMM Uncharacterized protein OS=Thalassotalea sp. ND16A OX=1535422 GN=ND16A_2274 PE= 4 SV=1
MSNELKHIVIVGGGSAGWIAAGTLAANHHANQPGGIKITLIESPDVKTIGVGEGTWPTMRNTLRNMGVSETDFMRECDASFKQGAKFAKWVTNSDDDFYYHPLVLPQGYFDVDLFKPWKMAKSPVSFSNAVCYQEQLCERDLAPKLISTPEYAAVANYAYHLDAGKFADFLKNHCTKNLGVHHILDHVSAVNSAENGDIASVSSRSHGDIAGDLFIDCTGFSALLIGKHYNVPSVCKKDILFIDTALAVQVPYDSADSPIASHTISTAQESGWIWDIGLPTRRGIGHVYSSKHSSQERAEQLLRDYLAESIGDKAKDLNFRKIDINPGVREKFWVNNCVAVGMSAGFLEPLEASALVMIELACASISEQLPANRETMDIVAKSYNDKIQYNWDRVIDFLKLHYVASKRDDSAFWRDNRDPQTIPESLQELMALWQHRSPSEYDFPRKREMFSAASYQYVLYGMDYNHSTETGFVSDDVQRKAAKMFAENQQLTKRYVTALPSNRELINKVCQFGFQKV

SEQ ID NO: 85290 - protein, 538 aa, Chloroflexi bacterium
  misc_feature (1)..(538): tr|A0A2D9WMU1|A0A2D9WMU1_9CHLR Tryptophan halogenase OS =Chloroflexi bacterium OX=2026724 GN=CL718_06165 PE=4 S V=1
  misc_feature (19)..(19): Xaa can be any naturally occurring amino acid
  misc_feature (31)..(31): Xaa can be any naturally occurring amino acid
  misc_feature (59)..(59): Xaa can be any naturally occurring amino acid
  misc_feature (84)..(84): Xaa can be any naturally occurring amino acid
  misc_feature (87)..(87): Xaa can be any naturally occurring amino acid
  misc_feature (109)..(109): Xaa can be any naturally occurring amino acid
  misc_feature (137)..(137): Xaa can be any naturally occurring amino acid
  misc_feature (149)..(149): Xaa can be any naturally occurring amino acid
  misc_feature (151)..(151): Xaa can be any naturally occurring amino acid
  misc_feature (211)..(211): Xaa can be any naturally occurring amino acid
  misc_feature (250)..(250): Xaa can be any naturally occurring amino acid
  misc_feature (355)..(355): Xaa can be any naturally occurring amino acid
  misc_feature (360)..(360): Xaa can be any naturally occurring amino acid
  misc_feature (379)..(379): Xaa can be any naturally occurring amino acid
  misc_feature (418)..(418): Xaa can be any naturally occurring amino acid
  misc_feature (444)..(445): Xaa can be any naturally occurring amino acid
  misc_feature (525)..(525): Xaa can be any naturally occurring amino acid
  misc_feature (531)..(531): Xaa can be any naturally occurring amino acid
MPLEAEYHTVVVGGGPAGXTTAALLAMKGLXVLLLERELFPRAHVGESLLPASLPIFDXLGVRDSIDNAGFVKKYGAAMVWGNXRSXWSWLFAETKGPYSHSYQVTRPXFDMILLENAREKGVHIRQKCQVLGPLFXENDSTVAGVEFXNXDGNHEKITAQIVIDASGQQTLFANQFDLKDWDTAFKHLAIYGYYSGGEHLPAPDHGSILXESFENGWVWKIPLHDGSTSVGVVMDAAWAQHEIRKSSVXQVFKTQVGLTNEISNLISQATFKEETHLIKDWSYVTTKMTGDGYVLVGDAACFIDPLFSSGVHLALQSGVLAAAYAATAISSPDLAKSAARQYEATYRRRYGYFXELARXFYGSNKSLDSQFWQDRALXEENWSDTSREEFINVVAGNAPEGYERVVIDQGHAPENFXSAIEEAESSRVNRATRSQQFGNDELXXRSPRLIDQARLVKGATLGDGIYELGYLLQTSARPEGYPVIPPIALLLNLMDKERSVATLAKEVASNLDLDDAITEELVLXAIRNLXADGLIEL

SEQ ID NO: 85291 - protein, 501 aa, Alphaproteobacteria bacterium
  misc_feature (1)..(501): tr|A0A257EQ77|A0A257EQ77_9PROT Tryptophan halogenase OS =Alphaproteobacteria bacterium PA4 OX=2015572 GN=CFE37_ 02695 PE=4 SV=1
MPQGPLQEIVIVGGGTAGWMTAAALSRFLEGACRIRLIESDAIGTVGVGEATIPQIRLFNAGLGIDEDEFIRETQGSYKLGIEFVDWHHVGSRYMHAFGSVGRDIGLLPFHHYWLAGRNAGTAADFGAYSFNAAAARANRYNRGAPSVAGLPELVHAYHFDAGLYARYLRRYAEARGVVRHEGRITRVERDGESGDVRQLTLEDGSVIAGQLFIDCTGFRGLLIGETLGTGYEDWSQWLACDRAYAVPCASADFTPYTRATARAAGWQWRIPLQHRTGNGHVYSSAHISDDEAAATLLAHLDGEALGEPRPLRFTAGRRERMWAHNVVAIGLASGFLEPLESTSIHLIQSGIARLLTLLPDAGMAPALRDEFNRQSAWEIARIRDFIILHYKATARDDTPFWRRARDMAIPDDLADRIRLFAETGRVRRDHDELFTEIGWTQVFLGQGIVPAAPHPLAGLVAPADLAGFLAQLQGAITREVASLPDHAAFIRRHNAANRQV

SEQ ID NO: 85292 - protein, 504 aa, Caulobacter vibrioides
  misc_feature (1)..(504): tr|A0A258CU86|A0A258CU86_CAUVI Tryptophan halogenase OS =Caulobacter vibrioides OX=155892 GN=B7Z12_18495 PE=4 S V=1
MAQEPIKAVTIVGGGTAGWISAALLSRTLGQSVAITLVESDEIGIVGVGEATIPAIRLLNGLLGLDENDFLAATHGTIKLGIEFVDWRTVGHSYLHAFGPIGRPLGMAPFHHYWLRRRQAGHDESLWDYSLNARAAKAGRFDRVTQVGGGYLEGLVYAFHFDAALYAQYLRRYSEAQGVTRIEGRIVSVDQDPESGFVTGLTLQDGRKVGGEFFIDCSGFRGLLIEETLKSGYEDWRAWLPMDSAIAVPCASVTPLTPYTRATAHGAGWQWRIPLQHRTGNGHVFCSDYIDAAQATDVLMANLDGAPLAEPRQLRFTTGRRKQFWNRNVVALGLASGFMEPLESTSIHLVQSALSRLLALFPDRGFNPVEIAEYNRQTALEYEYIRDFLVLHYKATTREDTPFWQAVRRMDMPDSLKARIALFSQSGRLFSQDDDLFKEASWIQVLIGQGVIPEAFHPLTGVVTDAQLDEYLANLRQIMSRAVEGLPRHDDFIAKTCASRPAGG

SEQ ID NO: 85293 - protein, 511 aa, Sphingomonas sp.
  misc_feature (1)..(511): tr|A0A196MSM0|A0A196MSM0_9SPHN Tryptophan halogenase OS =Sphingomonas sp. TDK1 OX=453247 GN=A7X12_04815 PE=4 SV =1
MSRHIESICIVGGGSAGWLTAALIAAKHGPDLQVTLVESVRLSIIGVGEGTWPTMRNTLRKIGISETDFLRACKASFKQGAKFAGWRTGAADDFYYHPLVLPEGFPSIDLAPFWNAQADAAGTPSFSDAVCFQEFLCEHHLAPKQITSPEYGGIANYAYHLDAVRLGEMLREHCVGKLGVRHVDDDIIEVQQAENGDVTAVIGQRHGGIAADLFVDCSGFSSLLLGQTLGVPFIDCSDVLFIDRALAVQVPYESEDAPIVSHTVSTAQDHGWIWDIGLQNRRGVGYVYSSRHAGADRVEEALAAYVGPAFAGLTPREITIRSGHRETFWKNNVVAVGLAAGFLEPLEASALVLSELSADYIASAMPATRGAMDIVARRFNDMTRYRWDRIIEFLKLHYMLSQREDTAFWRDNRDPATIPQPLQDLLELWRHTPPGEHDFASAHEMFPAASYQYVLYGMGFRTAPRAGALAARDAAEDAFERVAAMKRRLVAAMPTNRALLDKLAQYRFQPV

SEQ ID NO: 85294 - protein, 505 aa, Caulobacter vibrioides
  misc_feature (1)..(505): tr|A0A0V2FCF5|A0A0V2FCF5_CAUVI Tryptophan halogenase OS =Caulobacter vibrioides OX=155892 GN=AS593_16625 PE=4 S V=1
MDRVIGSIAILGGGTAGWMAAALLARVLAGTPTTITLVESAEIPTVGVGEATIPPIVDFLRLLEIDQGQFMAATEASFKLGIRFDDWGAIGERYWHPFGTFGPSVDRRPFHHIWHRLRAAGDDPRVEAYSLATALGDAGRMAFADSPGHGQGQGPLGGLRHALHFDAGLVAKFLRTWSEQRGVRRLERRVEGASLRDDGFVEALVLDGGERLAADLFIDCSGFRGVLIEGALSTGYEDWSAFLPCDRAVAGLTVRDANPPPFTQAAARPAGWRWRIPLRHRTGNGYVYSSAHVSDDEALADLEREAGKLLTEPRVLKFTGGRRKAFWNRNVVALGLSSGFIEPLESTSIHFVTSGLMKLLDHFPDKGFDAANIADYNNALIAEYEAARDFIVLHYQPTRRDEPFWRERAAAALPPDLAERLALYRGTGRIPHRPTELFTELSWFYVLEGMGVRPAAHDPLVDLSNLSQVREGLAGWRQRVAETVRSAPSHDAALDRVAGRARPAA

SEQ ID NO: 85295 - protein, 538 aa, Chloroflexi bacterium
  misc_feature (1)..(538): tr|A0A2E6HSM1|A0A2E6HSM1_9CHLR Tryptophan halogenase OS =Chloroflexi bacterium OX=2026724 GN=CL771_03730 PE=4 S V=1
MSTDFDAIIIGGGPAGSTAASLLAIEGKHVLLLEREVFPRAHVGESLLPASLPIFDALGIREKISNAGFVEKYGAAMVWGNTREIWSWLFAETKGPYEHSYQVTRPEFDQILLENAGSKGAVVKESCQVIKPLVDDTGTVTGVEYFDEQQNLQMASAPITIDASGQQTLFANFFGLKNWDNDFRHLALYGYYIGGDHLQPPDQGSILIESYENGWAWKIPLHNGKSSVGLVLDESWGQEKIKQFGTDALFAGEIDKLVEIKNLLRSATFDGETILIKDWSYLTKQMTGDGYILVGDAACFIDPLFSSGVHLALQGGVLAAAYAVTLLEDPQLARSAARQYEATYRRRYGYFHELARLFYGSNSSLKSQFWTERTISADDWSTQSREEFVNIVAGNSPEGYERVVIEQGHAPETFVTAIQTAEIERVNRATKSQDLNNQQLVEGIPQLIEGARLVKGAVLGSHKYELGYILQTDQRPEGYPVITPIALLLNLCDGKRTVEQIAEEMQDHLSPDGNEIVTMVVEAVRNLLADGLVHLAAD

SEQ ID NO: 85296 - protein, 507 aa, Caulobacter vibrioides
  misc_feature (1)..(507): tr|A0A290MSI6|A0A290MSI6_CAUVI Tryptophan 7-halogenase OS=Caulobacter vibrioides OX=155892 GN=CA606_05625 PE=4 SV=1
MKPLKKILIAGGGSAGWMTAALCSRLFQGLYEIVLVESEEIGTVGVGEATIPAIKKFNELLGLEEDDFLRKTQGSFKLGIQFRNWWRQGESYLHGFGVIGQDLGWLRCHQYWLRMRELGRAGDFDNLSINNAMALSNRFMRARADMAESPIGHIAHAFHFDAGLYAKHLSTYAQARGVTRREGKIVDVTLRAEDGFVQSVTMDDGEVITADLFVDCSGFRGLIIEQALKTGYEDWTHWLPCDRAVAVPCDRSEHFTPYTRSTAHTAGWQWRIPLQHRTGNGHVYSSQYIDDDEAERVLLANLDGAQRADPLRIRFKTGKRKKIWNKNCVAIGLASGFLEPLESTSLHLIQSAVIRMVRLLPDAGFDQATIDEFNRQSDFEYERIRDFIILHYKATERDDSPFWRYCRDMEIPATLQRKMDLFRANGRVFREDDELFTEESWIQVFLGQGVFPRAYDPLVHVQSDEEIARFLGNIETVVGKCLNVMPSHAEFVAHACQAPPLAPVPTS

SEQ ID NO: 85297 - protein, 531 aa, Colwellia sp.
  misc_feature (1)..(531): tr|A0A2N1C8H9|A0A2N1C8H9_9GAMM Tryptophan halogenase OS =Colwellia sp. 75C3 OX=888425 GN=CXF85_02225 PE=4 SV=1
MSKSLKHVVIVGGGSAGWITAGRIAAMHNSKSAQGVKVTLIESPDVNIIGVGEGTWPTMRGTLQKMGVSETDFMRECDVSFKQGAKFAKWVTGDEDDFYYHPLVLPQGYFDIDLFKYWQQNNQQPSNSQNSEQSSQPKSFSAAVCFQEQLCENGLAPKLITSPEYAAIANYAYHLDAGKFAAFLKSHCINKLGVEYVSDHVGTINSTDSGDIASVNTNNHGDISGDLFVDCTGFSSLLIGKHFQVPLISKKDVLFIDTALAVQIPYEKGDDAIASHTISTAQDAGWIWDIGLPSRRGVGHVYSSKHTSQGDAENALRKYLKSSIGEKSEDLTFRKIDINPGIREKFWVNNCVAVGMSAGFLEPLEASALVMIELAATTISEQLPANRECMDIVAKHYNERFSYNWDRIIDFLKLHYIASKREDTAFWRDNKDPETIPESLQELMTLWKHRSPSEYDFSQKREVFSAASYQYVLYGMDYEFTQSNSEKDEKEQNLAQRMFAENEKITVKYSAALPSNRELIEKIAQFGFSKV

SEQ ID NO: 85298 - protein, 498 aa, Colwellia sp.
  misc_feature (1)..(498): tr|A0A2N1CA86|A0A2N1CA86_9GAMM Tryptophan halogenase OS =Colwellia sp. 75C3 OX=888425 GN=CXF85_00595 PE=4 SV=1
MQPKSIVIVGGGTAGWMAANLMAKKWRNSNIDITLVESPDIGIIGVGEGSTPQLKAFFDKMDIAEHEWMPQCNATYKLGINFKNWSTKKGFEQYFHPFDSALDLHTRKKFILNCYGRRLGDDVKTLPNDFFIAAYLAKQNLGPHANSNFPFPVNYGYHFDSHLLGKFLCDKAIELGVEHISGNVTDVALHLNGDIEKLSVDSVGWLSADFFIDSTGFRSLLLQNTLKVPFVNFKENLFNNSAVIIPSPSSNKRPPQTTSTALKNGWAWDIPLTNRTGNGYVYSSDFCSSEEAEIELREKLNLLDSDVEARHLKMKVGRVEQHWAKNCLAVGLSQGFIEPLEATALHLVQETIEHFISAWDKGNFTNTHAAAFNKNINQRFDGIRDYIVCHYKLNSRTDSEYWQQNARNTKTSGSLAEIINVWLNREDLAQYWEQSTQAKSYSVVSWHCILSGYGIFPELNQKINTQAMSVNMDEVHQFLSQCSRNFPDHTQQLNNLLK

SEQ ID NO: 85299 - protein, 552 aa, Chloroflexi bacterium
  misc_feature (1)..(552): tr|A0A432JJV2|A0A432JJV2_9CHLR Tryptophan halogenase OS =Chloroflexi bacterium OX=2026724 GN=DSY79_03275 PE=4 S V=1
MSTASKPDSNLDLNADVIVIGGGPAGSAAATMLARKGWQVTVLEREKFPRDHVGESLLPASIPVLEELGALPAVESAGFLPKYGATMVWGSGDAPWSWYFKETSQRYPHSYQGGRPQFDQILLDNAKAQGVTVLEGHHVTEVIFDGGEAVGVEFTSANGETGEGQARFIVDASGQSTLLARHLESKEWDPFFQNLAVYAYFTGAKPLPEPDQNNIFIESYRYGWLWTIPLHTGRSSVGVVVDSDTGKEGIQQNGAKAFLEAQLAQSSHTRAILENAMMDSEPTVVMDWSYTAGKMYGPGYILAGDAACFVDPLFSSGVHLALMSGVLAAAYVTTALNTPSMAEEAGEVYQELYLKEYNQFREMARLFYSSNLSAESYFWEARRITNSDEYSPRHSFIQAVAGQPPRGYERVVLERGQAPEKFIESVKTVETERLARTQWLAALAADPQRNQILNAVPRLAEGVQVQRKPVLAEGEFVPGQVLNTVSQPEGTPCSPLVAAVIGEIDGQKSVADIVDGMGQHLDQAAHAQLEEAVSRTIEILYVDGTVAGLVTD

SEQ ID NO: 85300 - protein, 505 aa, Massilia phosphatilytica
  misc_feature (1)..(505): tr|A0A2S8H7T4|A0A2S8H7T4_9BURK Tryptophan halogenase OS =Massilia phosphatilytica OX=2026176 GN=C5614_10830 PE= 4 SV=1
MSDKAIRKIVIVGGGTAGWMTAAPLALKLGGSCEIVLVESPEIGTVGVGESTLPTIRYYNHALGIDGADFVRRTKATFKLGIDFRDWGHLGNRFFHGFSDFGPTIENRPAFMYWLRLARDNPNMPSYEEWSISTAMAHQNKFVPPHGDQPGPTNAYTYAFQFDAGLYALYLRDYATARGVQRVEGTVGNVEQHPETGFITALQLQDGRRIEGDLFVDCTGFRGLLIEGVYKAGYEDWSAMLPCNSAQAVPSALADRLTPYTRSTAKTAGWQWRIPLQHRNGNGHVYCNAFMSDEEAGRVLLAGLDTEPLDTPRQLRFTTGRRRKSWIKNCVAVGLSSGFLEPLESTSINIIELAVGWLIQYFPDRDCNPELADEFNRLITQRYEFVRDFIVLHYKLTNRTDSEFWRYCANMPIPDTLQHQIDLFRTTGRITIYDREGFQADSHAAIMLGHGIRPERTDPLIDRMDLARMADHFRKVRATIRDVVGTMPTHEALVGQIAMESMRKS

SEQ ID NO: 85301 - protein, 538 aa, Streptomyces sp.
  misc_feature (1)..(538): tr|A0A2S6WLC8|A0A2S6WLC8_9ACTN Tryptophan halogenase OS =Streptomyces sp. 46 OX=1777322 GN=BV882_19555 PE=4 SV= 1
MTDIGTNDTDSRIRKVVILGGGTAGWMTAAYLGKALQGTVDIQVLEAPAIPRIGVGEATVPNLHRVLFDYLGIPEEEWMRECNASFKMAVRFVNWRTPGRGEPGARTLDDGRPDHFYHPFGILPDHDNTPLSHYWYKNRHEGRTDEPFDYACFREPPVMDANKSPKWLDGTESTRYAWHFDAALVADFLRRFATDKQGVEHVQDEMVRVEQDERGYVTALHTKSGRVLDADLFVDCSGFRGLLINKALGEPFVDMSDHLMCDSAVATAVPHDDEANGVEPYTSAIAMSSGWAWKIPMLGRFGSGYVYSSRFTSQDEATAEFCEMWGLDPAETQFNHVRFRVGRNRRAWVNNVVSIGLSSCFLEPLESTGIYFITAAIYQLAKHFPDRTFNPALVNSFNQEIEMMFDDTRDFIQAHFYYAPRDDSPFWRAQKELKLPENIQRKIDAYKAGLPVNSPIADESTYYGNFEAEFRNFWTNGSYYCIFAGLGLEPDTPLPALAHKPESVAGAQPLFDKVKQEQQHLLDTLPSAYDYLRRLHGK

SEQ ID NO: 85302 - protein, 511 aa, Massilia phosphatilytica
  misc_feature (1)..(511): tr|A0A2S8HA16|A0A2S8HA16_9BURK Tryptophan halogenase OS =Massilia phosphatilytica OX=2026176 GN=C5614_09645 PE= 4 SV=1
MMSKPIEHVVVVGGGSAGWLTAAVLAAEHPRLTVTLVESPGVPPIGVGEGTWPSMRETLQRIGVSEAAFFRECDAAFKQGSRFDRWVDGSDDDTYFHPFSLPQGYGEANLVAAWQQAHRDVPFADLVSYQPHLCVQGRAPKQPQTPEFAGVANYGYHLDAGKFGVFLQKHCVEKLRVRHVLAHVVDIVSHEDGDIAALRTREAGVVEGDLFIDCTGMASLLLGRHYGVPLVSQRDVLFNDRALAVQVPYPADDTPIASQTTSIAQSHGWIWDIGLPTRRGVGYVYSSAHVDDDAAEQTLRAYLARTGSDAGIPAPRKIAFDPGYRARFWERNVVAIGLSAGFIEPLEASALALVELSAAWLADDLPATRAQMDTISARFNEAFTYRWERIIDFLKLHYVLSKRTDTAYWLDHRAPRTQSPRLRELLALWRTRAPSRRDFPRIEEIFPSASWQYILYGMGFRPELTARASDLPERADHYFREAARLTARMLPQLPPNREMLHHIRQYGMPPG

SEQ ID NO: 85303 - protein, 505 aa, Caulobacter vibrioides
  misc_feature (1)..(505): tr|A0A0V2F6C1|A0A0V2F6C1_CAUVI Tryptophan halogenase OS =Caulobacter vibrioides OX=155892 GN=AS593_00745 PE=4 S V=1
MSDQRVRSVVIVGGGTAGWMTAAALAKTLGAQGLKITLVESEAIGTVGVGEATIPPILTFNAMLGIDERAFMRATKASFKLGIEFVDWGALGETYHHPFGTFGLDLEGIKFHQAWRKFEQAAGPIGDYNLTEAAARRWRFALPDPDPAKVMSSLKYAYHFDAGLYARFLRGFSEQRGVVRIEGRIGRVDQNGETGFVEAVLLEDGRRVEGDFFVDCSGFRGLVIGQALKVPYQDWGRWLPNNRAVAIGCELGGDGLTPFTRATAREGGWQWRIPLQHRIGNGYVYSSHHVDDQRALETLLANLDGAPTDEANFLRFTPGRRERAWEKNVCSIGLSAGFIEPLESTSIHMIQAGITKLLALFPGNGVDPLEIDEYNRLTAEQVDRIRDFVILHFHATRRDDTDYWRYLSSMTVPDSLARRMELFAHRGRWFPSEYDLFHETNWLAVLLGQGIVPQEWDPLVDSLPESEVRQRLAHLSALIARTAEAMPSHAEFVARYCGAPQGVAA

SEQ ID NO: 85304 - protein, 507 aa, Massilia phosphatilytica
  misc_feature (1)..(507): tr|A0A2S8GWA8|A0A2S8GWA8_9BURK Tryptophan halogenase OS =Massilia phosphatilytica OX=2026176 GN=C5614_30855 PE= 4 SV=1
MQQNPIRKIVIVGGGTAGWMAAAPLAQRMGKRCEIVLVESPDIGTIGVGEATLPTIRFYNAALQLDHADFIKKTQATFKLGIEFKDWGHVGNRFFHGFGDFGPPLNGIQAHHYWLRLARTFDQMPAMENWSMASIMARENKFTMPHDAQPGVTDAYSFGYQFDAGLYAAYLRDYAMARGAKRVEGTITSVDQHPETGFVTAVRLADGRTLDGDLFIDCSGFRGLLIEGTLKAGYEDWSEHLPCNSALAVPSARVEPLTPYTRSTAKGSGWLWRIPLQHRTGNGHVYSNAFTTDDKARQDLLDGLDGAALDEPRQLRFVTGKRKKSWVKNVVAIGLSAGFVEPLESTSISLIETAVGTLIEQFPDRDFRPELADEFNRIIGGRYESIRDFIVMHYKLTKRDDTEFWRYCANMAIPDSLAHQIELFRETGRVAILDRDSFLLPSFVSMLVGLGVEPKRYDPFVDDVDMRQLHGHFAGLRDLIAQTVAKMPGHGAYLEKNAKGAPLGKVA

SEQ ID NO: 85305 - protein, 499 aa, Thalassotalea sp.
  misc_feature (1)..(499): tr|A0A099KES2|A0A099KES2_9GAMM Uncharacterized protein OS=Thalassotalea sp. ND16A OX=1535422 GN=ND16A_2636 PE= 4 SV=1
MNQDKIQNVVIVGGGTAGWVTAALLSRVLGKTLNITLVESEQIATVGVGEATIPPIITINNALGITEKEFINATSATIKLGIEFENWKQQGDSYMHAFGGIGKNFPFCDFYHYWLKAKELGDKSDFWDFSLNYQAAKHNKFSKAAKIEGTNLPGLTYAYHFDAGLYAQFLRKFSEAKGVKRIEGMVCKVNLNDDNGYVDSIELKDGNIIRGDLFVDCTGLAGLLIEKALNTGYVDWSHWLPCDRAMAIPCESVTPISPYTKSIAHDSGWQWRIPLQHRIGNGLVYSSKYMSDQQAKQLLLNNLDGKPLAEPKIIPFRTGRRRKQWHKNVVSIGLSSGFLEPLESTSIHLIQTAAIRLIKLFPHNGIKANEVVEFNRQAKIEIEQIRDFIILHYKVNEREDSQFWRECQRMDIPESLQRKIELFRSTGKLFREQDDLFTEIAWQQVLIGQGIMPEDHHALADALTDQQITELMQNLKILIDRSVDNMPGHDDFINRTKAM

SEQ ID NO: 85306 - protein, 534 aa, Chloroflexi bacterium
  misc_feature (1)..(534): tr|A0A2E3AKB4|A0A2E3AKB4_9CHLR Tryptophan halogenase OS =Chloroflexi bacterium OX=2026724 GN=CL749_00740 PE=4 S V=1
  misc_feature (452)..(452): Xaa can be any naturally occurring amino acid
METTDIVVIGGGPAGSTAASMSARAGLSVVLLERERFPRDHVGESLLPASMPILEELGVYSRIADAGFPPKYGATMVWGKDNTPWTWRFAETNNTYKHSYQVSRRDFDLILLNRSRELGVDVREECTVNKILLDGDRIVGVEYQDREDNRVSLMARFVIDGSGQSAIISRLKGARKWDKNFRNLAVYAYFKGIARLPSPDQNNIFVESYADGWIWNIPLKDGLSSVGAVVDAKKATKVLKHQSIQEFFENQISATSHNREMIKIAEQVGHPTVVRDWSYISEEMAGPGWASAGDAACFIDPLFSSGVHIALMSGILSSAYAVTSLESPDMSEPTAAVYQEMILREYSLFRELANLFYESNRSVDSYFWEARRIAGTREDTDARSAFVRAVSGQSVRGYERAVLERGDLPNTVSLALDGVAKELKMRQDVLHNIGSSIPDAVPVLHPDARIVXKPVLSEGRFEYGVLLYSPGRIEGTVCSRFVEMLVNYIDGRSTVNQITKRLAKEAENTSEETLRDYVKEAIKILYFEGAIQRL

SEQ ID NO: 85307 - protein, 374 aa, Caulobacter vibrioides
  misc_feature (1)..(374): tr|A0A290MMN1|A0A290MMN1_CAUVI Tryptophan 7-halogenase OS=Caulobacter vibrioides OX=155892 GN=CA606_01215 PE=4 SV=1
MKRVLIVGAGIDAWMTAAALATATKGLAEVVVAETSPPPAGRIAALPSLQGLHARLGISDEVLAQATNARPRLAARYGDGLEPFGETGVAIDGVAFHHYWLAGGRPGPLTDWSLAAQAAVRGRFAPPSPDPRSPLSSLSHGLTLDAAGYAALLKRIALAAGAKRVEDRPDADLKVDASGDQRLLAPQEPWTDWSAWLPTGVALAQDGLISTFAPTPVRTGHIAEAMTGDTVAVGAAYGAIGAGDGGDLHLLQGDVSRLIALFPTGPAAVAEYNRLAEAALERARDMAILRWGDLSDPPQTLARKIEQFESRGRVVTYDDETWPESAWIHAMLARGIIPTRWDPLADRVGAERTREMLSRMKAMLEQTAEGMPRV

SEQ ID NO: 85308 - protein, 534 aa, Chloroflexi bacterium
  misc_feature (1)..(534): tr|A0A2E4H4Y1|A0A2E4H4Y1_9CHLR Tryptophan halogenase OS =Chloroflexi bacterium OX=2026724 GN=CL744_02035 PE=4 S V=1
MPDAVVIGGGPGGGTAATLLARRGYSVVLLEREIFPRAHVGESLLPASMPVLEELGVLGQIENENFPKKYGATMVWGRDDTPWSWYFRETNRTYPYAYQVSRPRFDQILLDNAKSSGVDVRENCNVFETLSDSESGAIHGVRYRRDSGIVESVEADFVMDASGQSALLARSMNLRTWDTFFQNLAVYGYYRGAKRLPSPDETNIFIESYGLGWTWTIPLKDGLASVGAIVDSESAQAMLADIGPDEFLRQQISQTARTNDMLSDAELTGAPRVVRDWSYTTNRMVGDGWILLGDAACFVDPLFSSGVHLALMSAVMAAAYVHGAKTDPTLRVPAGQVYEQLYRKEYAHFRELASLFYASNRTEESYYWQARRLLGDTNVGARESFIRAVAGQPPRGYERSALSRGELPSEISEMFASVASDKRLRDATVAMGLSLNLVPRLAGEAKLERRPIFAEGEFQWSAVLSSATRPEGTPLSNFVAALVNLVDGKRNIGQILDRFTQGVEDSEQIEQAHESMINAISILYVDGAIDSLMG

SEQ ID NO: 85309 - protein, 483 aa, Thalassotalea sp.
  misc_feature (1)..(483): tr|A0A099LF06|A0A099LF06_9GAMM Uncharacterized protein OS=Thalassotalea sp. ND16A OX=1535422 GN=ND16A_3203 PE= 4 SV=1
MSDERINHVVVVGGGTAGWLTAANLAKQFNSNNSNSVQVTLIESPDIPTIGVGEGTWPTMRKTLAKLGISETTFLRRCNASLKQATKFVNWQQAPKAGVDNHYYHLFTSIFDPSDFNLAPYWQLGKIGDNLSYADSVSVQGQICEMNLAPKAITSKEFEGIQNYAYHLDAGLFTDLLREHATEQLGVKHISANVTGVNLDDDGYIQSITTDTNGTIDGGFFVDCTGFKSLLLGEALNVPFKSVANTLLTDHAVTMQVPYENEEVDVASCTISTAQAAGWTWDIALSNRRGTGYVYSSKHTSHEDAEQLLRDYIGPQAENLVARKIKMNVGYREKFWHKNCLAVGLSAAFVEPLEASAIFLIEAAANMLSELFPKNRKSMPLIEQKFNDSFQFRWQKTIDFIKMHYLLSKRSEPFWQDNKHPDTIPATLLQSLERWQEQALTDYDFDNVYEPFPLESYQYVLYGMGFEQNLTYKQSAFDMADTA

SEQ ID NO: 85310 - protein, 501 aa, Pseudoalteromonas piscicida
  misc_feature (1)..(501): tr|A0A3B6Y692|A0A3B6Y692_PSEO7 Tryptophan 7-halogenase OS=Pseudoalteromonas piscicida OX=43662 GN=D0N37_18400 PE=4 SV=1
MKTHLPMKTIQSLTILGGGTAGWMCAAYLAKHQPNLSITVIESSSIGRIGVGEGSTPHLQLFMQSLGAKEHDWMPTCQASYKTGIYFDNWNGDNGSYFHPFFSEMDAKTAEVYFVNANARRRGSKYIDKPEHYFLAAVLADKQQAPLPQRPLPRALEYGYHFDAQKLADWLRAFSLARGVKHIQSTVSSLQHHAKEIIALTLESGEQVKSDFYVDASGFNALLIEKTLEVPFISFADQLLNDSAVAIAGDRINPLPSSTSAIAMPCGWRWQIPLQSRAGHGYVYSSAHATPKEAEAQLRQAAQLDKGQAKHLTMKVGMMARSVEGNVFAIGLAQSFIEPLEATALMVTGYSIELLNRLLSQQLEAQAINQQLSDLVLGIKEYVLAHYATSKRADTQYWQDAQIAALSLSELDELLTHWRSGGDFDAWLNQHRKHSPYIRPSWYCLLGGMDHRDSTCQMPFDQAPQHIEQAAKVYLTKLSDEHFTAHTTALEQLQRVQAFRA

SEQ ID NO: 85311 - protein, 430 aa, Burkholderia vietnamiensis
  misc_feature (1)..(430): tr|A4JRJ4|A4JRJ4_BURVG Tryptophan halogenase OS=Burkhol deria vietnamiensis (strain G4 / LMG 22486) OX=269482 G N=Bcep1808_5972 PE=4 SV=1
MNEMKSNSVDVAIIGAGPSGAVAAALLRNAGRSVLVLERQHFPRFSIGESLLPQSMRYLEEAGMLQAVVEAGFQFKNGAYFVHRDRMSSFDFRDKFSDGWGTAYQVERAAFDDLLIRCAEKQGAQVRFGHAVRAFHAGDTPRLDVVDEAGHEYSVQASFVLDASGFGRVLPRLLGLEAPTGLPTRAAIFSHVEDRLPAGSTDRDKICIAVHPERRDVWYWMIPLTNGRSSVGCVADAAFLDVPEAEQEALLRELLQTEPTLSRLVGSKPFVMPVRRICGYASNVESLHGHGYALLGNAGEFLDPIFSSGVTIALRSAHLAVATLERQLRGETVDWARDYDVALRKGIDTFRAFVERWYSGALQDIVFHEDKASDVKRMVCSILAGYAWDETNPFVREPARGLDILAQLCCPTGASGNAAQAATPDGARRR

SEQ ID NO: 85312 - protein, 515 aa, Colwellia sp.
  misc_feature (1)..(515): tr|A0A2N1CAG9|A0A2N1CAG9_9GAMM Tryptophan 7-halogenase OS=Colwellia sp. 75C3 OX=888425 GN=CXF85_00750 PE=4 SV= 1
MVSEQVKSIAIVGGGSSGWMTALYLNKLYNHSQATVAITLIESPEIPTVGVGEATVHSIRSYFAAMGLDEKELLQATNGTLKTGIMFRNWMKPNEDGSTHEYFHSFDQQNIARSIDISSAWFLSKGYNKQRFDEATSISPHLIKDKLSPKHANSRPYEGVVPYGYHLDAIKMAAFMAKKGVAAGITHVKAVVDDVEVEGENIVRVRTSKGSFTADLFIDCTGFKGLLINSVKERKDNWQSFEDALPCNKAVAVQLAYSDDQEPKPYTEATALSNGWAWQIDLMNRRGTGYVYDGNRLSKDEAETELLNYLNEGNGREKEVLRTVHLDMNIGCLKEFWVGNCLALGLSGGFIEPLESTGLHLVNTSARLLGTHLTGTNTAQAVRDSYNKIMNSTYQDLKHFIVLHYCLTDRDDTEFWREVGETVQYCDGLKQKLATWQHKVCEFMDIGGGYTTMFSDSNYRSVLYGMKHYPQLNLAVDKDENNKMFHEFDNRVTHVSNIVMPYRDYLKNLHKPQKL

SEQ ID NO: 85313 - protein, 503 aa, Caulobacter vibrioides
  misc_feature (1)..(503): tr|A0A290MRW1|A0A290MRW1_CAUVI Tryptophan 7-halogenase OS=Caulobacter vibrioides OX=155892 GN=CA606_01205 PE=4 SV=1
MTNDHRLRRIVIVGGGTSGWMTAAALGRFLKDGYTKVTLVESEAIGTVGVGESTIPQINIFNRMLGLDENDFVKKTKATFKLGIDFVDWQRIGHTYHHPFGPYGVDMEGVSFHAYWLKLRAMGLDDDLGAYSLQTVGARQSKFMRPNGQANSPLGQIAYAFQFDAGLYAKFLRDYSEARGVTRQEGKIASVQQDGQSGHVTSVTLESGQVIEGDLFIDCSGFRGLLIEQTLKTGYEDWSQWLLNDRAVAMPCTLGGSMSPVTRATARPHGWQWRIPLQHRLGNGYAYSSQHVSDDEALADLLSQLDGEPLADPNLIRFTPGRRKKSWNGNVVAIGLSAGFMEPLESQSIYLIQVGISRLLAHFPDRHFRAAEIDRYNRTMAFEYEKIRDFIILHFKATARNDTPYWNYLREMPIPDYLTDKIDLFKGSGRVFRENDELFNDTSWFAVFIGQGIFPDGYDPMVDNMDEGLFKARMAEIKSVIAKSAEVMPGHMAFIRENCAAEG

SEQ ID NO: 85314 - protein, 506 aa, Hyphomonas sp.
  misc_feature (1)..(506): tr|A0A350ZRC9|A0A350ZRC9_9RHOB Tryptophan halogenase OS =Hyphomonas sp. OX=87 GN=DCY26_06795 PE=4 SV=1
MNSPHTLSHIVIAGGGTAGWVAAAALSRLTNNGETRITLVESEEIRTVGVGEATIPPIAMFLRLLGIDLSEFMRETQATIKLGIEFEGWLREGHRYIHPFGDYGRDINAVRFYQYWLKLRAFGKDVGEIEEYCLAAMAARHQRFAPPDPDPRTVQSSMAYAFHFDAALYAAYLRRYSEARGVRRVEGKIADVTLRSEDGYVSSLKLADGREIEGDLFIDCTGFRALLIGKAMGVPYVDWSHWLPMNSALAVQSERVADPLPYTRSTARPAGWQWTIPLQHRTGNGHVYCSDYMNDEDAGKILLASISGRPLTAPSQLRFTTGRRAEFWSRNVVALGLSSGFMEPLESTSIHFIQAGVTKLIALLPDKRFNPIERDTYNRLSIMQFEQTRDFLILHYKATERTGPFWDYVRNMDIPDTLAQKIELFRSNGRLFRFEDELFGEANWQSVLMGQGIMPERWDPMADALDVNVVAKQVQGIREAVRETALRLPTHQEFLTRFCAAPEPVD

SEQ ID NO: 85315 - protein, 519 aa, Thalassotalea sp.
  misc_feature (1)..(519): tr|A0A099LG66|A0A099LG66_9GAMM Uncharacterized protein OS=Thalassotalea sp. ND16A OX=1535422 GN=ND16A_3201 PE= 4 SV=1
MSKVINNVLVVGGGTAGWLTASILAKQLNSVSKDAVQVTLVESPNIPIIGVGEGTWPTLRTTLQNLGVDEGEFMRECDATFKQGSQFVNWAETPEKDKSESYYHPLSAVFHSSYDFNLAPYWLLGKAGDKNYDKAVASQSHVCDLGLGPKKITTPAYDAIQNYSYHLNANKFAGFLAKHSTAKLGVKQIKANVTDVNLDNDGYIVSVDTDTAGTINADFFVDCSGAKALLINGALDIDWLKIDDVLFNDTAIAMQVPYESADTPIATHTIATAHEAGWTWDIGLHNRRGVGYVYSSDYTSDERAEQVLRDYAGPMSTGIEIRKIPLNLGYREKFWHKNCVAIGMSAAFIEPLEASAIFLVEAGANMLADQFPRTIDAMQYVEQKYNTTFRLRWDKSVDFVKLHYCISKRQDTPYWLDNCKPESIPATLKQRLGHWKSHPPTKYDFDYAYEPFVLDSYLFVLYGMKFDVDIDLNRSAFSCDRQAKALFDNVEQMNELLTKELPGHRELIEKVYKYGMPKL

SEQ ID NO: 85316 - protein, 504 aa, Pseudoalteromonas piscicida
  misc_feature (1)..(504): tr|A0A0F4P8U6|A0A0F4P8U6_PSEO7 Tryptophan halogenase OS =Pseudoalteromonas piscicida OX=43662 GN=TW75_03835 PE= 4 SV=1
MKSQKIVILGGGTAGWMAANMMAKSWADKAIEITVVESSSIGTIGVGEGSTPQFKGFMDYLGISEAEWMPVCNATYKNGIRFIDWSTKPGFSSYFHPFPAQPDDYSAPAFFHNSFVRRKAIDVEGHPDHFFLATHLADLNKSPIAAESFPFEINYGYHFDSALLGQLLARKAAEFNVKHLDATITDVRKHVDGDIAALITSDGTEIAGDIFIDCSGFKSLLLQHTLGVGFESFESNLFNDAAVVIPTKQLDTIRSETQSVARQFGWSWHIPLTNRIGNGYVYSQRYCDADQAETELRAALGLLDSEVEARHIKMKVGQVKAHWSKNCIAIGLSQGFIEPLEATALHIVQETVQSFIDCYQDADFTDGNRDKHNRALSERYQAIRDYIVAHYRVNSRTDTNYWLDNANNNYLSRSLYQILQTWVSGNNLSDELVRQNVERYYPSVSWHCLLAGYGIYPEQAQLKSGNALANQHSIEKVNDFIRRCGLNFKDHRMELESFVANVHK

SEQ ID NO: 85317 - protein, 535 aa, Chloroflexi bacterium
  misc_feature (1)..(535): tr|A0A2E2YKU2|A0A2E2YKU2_9CHLR Tryptophan halogenase OS =Chloroflexi bacterium OX=2026724 GN=CL752_03010 PE=4 S V=1
  misc_feature (61)..(61): Xaa can be any naturally occurring amino acid
  misc_feature (69)..(69): Xaa can be any naturally occurring amino acid
  misc_feature (82)..(82): Xaa can be any naturally occurring amino acid
  misc_feature (86)..(86): Xaa can be any naturally occurring amino acid
  misc_feature (95)..(96): Xaa can be any naturally occurring amino acid
  misc_feature (153)..(153): Xaa can be any naturally occurring amino acid
  misc_feature (270)..(270): Xaa can be any naturally occurring amino acid
  misc_feature (292)..(292): Xaa can be any naturally occurring amino acid
  misc_feature (336)..(336): Xaa can be any naturally occurring amino acid
  misc_feature (467)..(467): Xaa can be any naturally occurring amino acid
  misc_feature (497)..(497): Xaa can be any naturally occurring amino acid
  misc_feature (500)..(500): Xaa can be any naturally occurring amino acid
MEKFDVIVIGGGPAGSTAATLIARQGKSVILVEKDYFPRDHIGESLLPASLPILETLGVHXEIKAAGFXKKFGATMVWGASXDPWXWYFSETNRXXTHSYQVVRSTFDQILLNNSIKAGVDVREGHQVTKIHHENNHISGIEIKTPDNTTIDXAAPITIDASGQSAIIARNMNLLEWDHFFQNLAVYGYFNNAKRLNKPDENNIFIEAHSEGWNWLIPLHNGSVSVGVVVDSGKAAEHVHGANLEAFLNKYIAYSPHIADLLSNAILNTXPQAVRDWSYAADSFIGDGYILXGDAACFIDPLFSSGVHLAMNAGVLASAYVNTLFSDSALALESRXIYTKLYRQQYEHFRELAKLFYSSNRTTNSYFWETRKLTPEAFDLPARTAFINAVAGQPAQGYERVVIEQGEAPDFVMTAIKEVEDSRSQRQLEIETSMQNFSNYIPKLDTKVALKNEPVLDDDKFIKNYVXYTENRTIGYPVSNLIAASFPFINGKDSVEXIVXKISNEYDIDRNTIFPAITDAFKIMYIDGIIESFIL

SEQ ID NO: 85318 - protein, 499 aa, Alphaproteobacteria bacterium
  misc_feature (1)..(499): tr|A0A257EMP8|A0A257EMP8_9PROT Tryptophan halogenase OS =Alphaproteobacteria bacterium PA4 OX=2015572 GN=CFE37_ 07565 PE=4 SV=1
MVIVGGGTAGWLTACILAARHPAMAITLVESPDIATIGVGEGTWPTMRETLAAIGIAESEFLTACDASFKQGSRFDGWVTGAADDSYLHPFSLPPAGDMAALLHGWAQTAPDRAFAAAMTAQAAVCAQHLAPRQRAMPDYAGALNYAYHFDAGKFAQLLARHGTTRLGITHIAATMVGTSAAENGDIAQLQLDDGRCLAADLFIDCTGLAARLIGGHCAVDWIDRSDVSFNDRALAVQVPVLPGSAIAAQTIATAHRAGWLWDIALPTRRGIGCVYSTRFMADAEAETILRAHVAAQVPGADAAALVPRQLAFATGHRARFWQGNVVAIGLSAGFIEPLEASAIVLIELSARAIAEALPASPATMAIHARRFNTLFRTRWDRIIAFLKLHYVLSRRSEPYWQAQRDPATIPERLAEDLALWREHPPSARDFPLQDEMFPAASQQFILYGMGYPLPPAPPAAPIADAAMRIAEVQGRARHIAAALPDNRSYFAALAAQAA

SEQ ID NO: 85319 - protein, 520 aa, Xanthomonas campestris
  misc_feature (1)..(520): tr|G0CK89|G0CK89_XANCA Tryptophan halogenase OS=Xanthom onas campestris pv. raphani 756C OX=990315 GN=XCR_0306 PE=4 SV=1
MHAPAPSESQRLVRRVVIAGGGTAGWMAAAALSKLLGRQLQITLVESDEIGTVGVGEATIPSLVTFHRLLEIDEAQFMAATQATFKVGIAFEHWRDVDRHYIHSFGHTGTDHWSAGFQHFWLKARARGVARAFGDYCLELRAAQEGRFAHLPNGGMNYAYHLDAGLYARFLRRFSEEFGVQRIEGRIGSVQTDAHSGDIAALVLDDGTRIEGDLFLDCTGFRALLIGQTLGVGSEDWSRWLFADSALAVQTESVGAPVTFTRARADRAGWMWRIPLQHRVGNGIVYSSRYMDQDSAAQVLEHNLQGRALTTPRALRFTPNQRHRVWEKNCVALGLASGFLEPIESTNIHLIQRGIVRLLQTFPQVIDPVDIAEYNRQAAEEIAHIRDFVILHYHATDRRDTAFWRDCAGMDIPDSLRHRMELFRQSGRVFHQGNELFAENSWIQVMLGQGIVPRHHHPVADLMGDAELSQFLEGIRQRVEATLARLPPHAEFLRRYCPAPALPAPMPQPAPGTPLAAPAA

SEQ ID NO: 85320 - protein, 504 aa, Caulobacter vibrioides
  misc_feature (1)..(504): tr|A0A0V2FBW1|A0A0V2FBW1_CAUVI Tryptophan halogenase OS =Caulobacter vibrioides OX=155892 GN=AS593_14160 PE=4 S V=1
MAENRIDRIVIVGGGTAGWMSAAMLARALGPGVAIRLVESEAIGTVGVGEASIPQLRNFNAFLGLDEDAFLRATEGTIKLGIEFVDWLRPGHRYMHAFGPVGRPLGVTPFHHYWLDARRRGTAGEDFWAWSANALAARAGRFGRTPPHPAQPGGEPLTWAFHFDAALYARHLRAYAESRGVERIEGRVTGVDQHGETGFLRAVTLEGDRRVEGDLFIDCSGFRGLLIEEALKTGYEDWRKWLPMDSAWAVPSRDDAPPVPYTRAWARDAGWQWRIPLQHRTGNGHVFSSAWTDKDAAVRVLMDNLEGEALAEPRLLTFTTGRRKASWNRNVVALGLAAGFMEPLESTSIHLVQSGLARLLALFPDKGFDPVLTAEFNRQTADEYACIRDFLVLHYKATEREDTPFWADRRAMEIPQTLAERMALFAGPGRVFSRDEDLFKEGSWVQVLLGQGVTPAASHPMTAVVADDQVDGWLDDLSRIAARTAAALPSHAAFLDRAETRLAG

SEQ ID NO: 85321 - protein, 416 aa, Myxococcus stipitatus
  misc_feature (1)..(416): tr|L7UDF1|L7UDF1_MYXSD Tryptophan halogenase OS=Myxococ cus stipitatus (strain DSM 14675 / JCM 12634 / Mx s8) O X=1278073 GN=MYSTI_04793 PE=4 SV=1
MNKVRIGQVVIVGGGVAGSTLAIYLARAGRDVLIVDRPLKLDLLVGESLLPPATTILQDLGIEEQVKACSTLKQGVAFVMRTGRVLLLNLQRLTGLSASYAYNVPRPQFDQLLRTRAQEVGVRVVQHAARLRVEGGRVELDAETLEACGLKGQPDLVIDATGRARMFGRAMELPGVAGKRNDTCHFAHYENVDLGVSLSGCAVITAMKTGWAWRIPLPDRMSVGVVQDTAHLTAYGSTPEERLENALRDDPIMAAALREGRRLTSVRVYNNYQWRYERFRGPNWILVGDAAGFVDPTLSSGVLLSLQGASGLAQALTADDVSSALTRWEATYRENIATWQELVDSFYDGRLFAMIMQGEDFARNNEMLGPFNRHMERNVAGAVLGARTTHWYGKRLVRMIINHGLVRYQPGEWAIR

SEQ ID NO: 85322 - protein, 508 aa, Sphingomonas sp.
  misc_feature (1)..(508): tr|A0A196N4E3|A0A196N4E3_9SPHN Tryptophan halogenase OS =Sphingomonas sp. TDK1 OX=453247 GN=A7X12_22330 PE=4 SV =1
MNPMRRILILGGGTAGWLTAAYLARYLDIAHQQRFAITLLESPALGIVGVGEGGFPTIRETLQFLGIDERRFVRQTRATFKQGIRFDDWLYAPLPDGTRHRFLHPFEAPFHTEGAGLVPYWLLQPEARRTPFAEAMTIQNRVAANGRAPKRAEEAGFGGPLTYAYHFDAVRLAQLLRDRAIELGVTHLEGEVFSAHTDAEGAIDRIETREHVSLTADLYIDCSGFEPALIGKALGAPFTSVRHQLFTDRALACKLPYADPEAPIATTTVAAAHEGGWTWDIGLQHARGIGCVYSSAHLCDDRAAEILDAHLGGAPHEARLIKFEPGYRRTPWVKNCVAIGLSGGFLEPLEATGVVLIEAAAAMIAELFPHAGPVDAPAARFNALMTARYERIVDFLKLHYCLSRREEPFWRDNRDPASIPETLQALLEQWRHRPPSRFDFLLDVESFAFFNYQYILYGMDFRTDLSGARDGFPHAEAAARQFARIRGFGEQAVADLPAHRELIRQLAG

SEQ ID NO: 85323 - protein, 587 aa, Microcystis aeruginosa
  misc_feature (1)..(587): tr|L8P1B4|L8P1B4_MICAE Tryptophan halogenase family pro tein OS=Microcystis aeruginosa DIANCHI905 OX=1235808 GN =C789_307 PE=4 SV=1
MNTTQALHYDVVIMGAGFAGLCQARHLMLNIPNIRVALIDPRPENRPDTDLKIGESTVEIAALLICKELGLHDYMIENHPPKAGLNFHWPKNPAETDSIDDYYHVWINRQPPIPTFQINRAKFERDLLKMNKEMGAIFYNGRVVDVDLTEGDQLKTVTVKLEDTTIEITAKHIVDAAGRRFIIGKKTDNLIFGSDQLLGVNNGSAWVRIKDVDRTIFHSGYHPAGTTVSHYYATNHYFGPGHWLWMIPIDRDSKELSLGVIHHHDVIPAATINTQEKFTAFLKANHTVLYKLLQNSELVDFHYLHRVAHKSKVMFSPDNWYVVGDSACIFDAFYSLGTTMIAIAVESITEIIRAKLTNEANAEEKRAVYNDFNLAFTDSVNTFMQEHQKQLGHASIMSWRIYFEYMWWFGVLVPMYIGKWHLDPAFLKQFTGPFRTFLNGLFVDVYQDCNQLVERGVNMGLMDAIRADQLIGSYYTFKHFEDFLENSKLEPQRCNIFTSMKNTFFYVAIWYAMFQWKGFGWRGLLKPRNLAHFSYLLAQSGLSALGEMQHNFLTRSLPDNSEIEEMRQEFKEYRYQGKLQPWSAELS

SEQ ID NO: 85324 - protein, 501 aa, Hyphomonas sp.
  misc_feature (1)..(501): tr|A0A350ZSA9|A0A350ZSA9_9RHOB Tryptophan halogenase OS =Hyphomonas sp. OX=87 GN=DCY26_08500 PE=4 SV=1
MDGAKKQKVVIAGGGTAGWMTAAALGKVLEKVCDVTLVESDAIGTIGVGEATIPTLVTYNRLLGVDEAKWMAAVRGSFKLGIAFENWTDLGHRYIHSFGITGKDHWTAAFIHFWHRGKELGLAEDFGNYCLELIAAEQERFAHLPDLGLNYAFHIDATAYAGLLRGLAEHHGVKRREGKIAEVRRNEEGDLESLVLEDGSVIEGDLFVDCTGFRALLIGETLGVGYHDWSHWLPCDRAIAVQTLSTRHPRPYTRSIAHEAGWRWQIPLQHRTGNGIVFCSRYMSEDEAKAKLLADIDGEVLTEPRVIRFRTGSRRMHWHRNCVAVGLSSGFIEPLESTSIHMIQRSVMRLMQMIPRGRVEQSSVDEFNRQTAYEMEHIRDFIILHYHLTNRTDTPFWRHCRTMHVPENLRHRMKLFKETGRVFRANDELFAENSWTQVMLGQGLMPCSHHPVADVMSEEEVRRFLSHITENVNRTAAGLPMHQDYLNKYCPADVAVSNRSN

SEQ ID NO: 85325 - protein, 510 aa, Caulobacter vibrioides
  misc_feature (1)..(510): tr|A0A290ML19|A0A290ML19_CAUVI Tryptophan 7-halogenase OS=Caulobacter vibrioides OX=155892 GN=CA606_10605 PE=4 SV=1
MQDNRIRKLVIVGGGTAGWMAAAALRRHFHGGPLEITLVESEDIGTVGVGEATIPTIRGFYQQLGLSDIEVMRATQATCKLGIRFNGWLREGAAFIHPFGHFGQDLRGVPFHHYWRKLAQAGEPTDIADYSLGASLAAAGKFMAPPRNPTSTLSVFDWALHFDAGLFAQLMRRVAEDNGVRRIEGKITKVNLRPEDGFVASLDLEGGARVEGDLFIDCSGFRGLLIEEALHTGYESWSDLLFCDRAWAVQSEGQGDPPPYTDVTAHSAGWRWRIPLQHRYGNGYVFSSRHISDEDALAELKAAVPDPLLHEPRLIRFNPGRRKQVWNKNVIALGLASGFLEPLESTSIALIETGVEKIKALFPDRDFALELADEFNDWSRREMERVRDFIILHYWANKRGDTAFWRDCNAVTLPDTLQRKIDLFVGRGHFVRYRWEMFAPPSWMAIYAGFELLPSAVDPSLDGVDPKALSAPLAEMRKAVREVVASAPPHQAFLDQYCRPAQTQASSAAE

SEQ ID NO: 85326 - protein, 513 aa, Sphingomonas sp.
  misc_feature (1)..(513): tr|A0A196MS25|A0A196MS25_9SPHN Tryptophan halogenase OS =Sphingomonas sp. TDK1 OX=453247 GN=A7X12_06630 PE=4 SV =1
MKRVRNIVIVGGGTAGWLTAGVIAARHQGRMPGGFTVTLVESPNTPIIGVGEGTWPTLRTTLAKIGVSETDFFRECDAAFKQGALFARWTTGAEDDAYYHPLMLPQGFHQLSLVPHWITDSKGRSFCDTVTPQGRICDAGLAPKTIATPEYDGQANYAYHLDAGKFAPFLTRHCTTKLGVRHVLADVRAVERAENGDIVAIDTEQAGRIEGDLFVDCTGFRSLLLGETMGVGFKDCGDVLFCDAALAAQIPYSEENAPIATHTLSTAQDAGWIWDIGLPTRRGTGYVYSTRHTSDDQAEATLRAYLGPAGADVPVRRIPIRSGHREIFWKNNVVAVGLAAGFLEPLEASAIVLIELSAKLIAEQMPAVREVMDVVAKRFNATTLYRWGRIIDFLKLHYVLTKRTDSAFWRDNLRPETIPERLQELLTLWRYQPPWFHDEFDRVEEVFPPASYQYVLYGMGFHSEVEAEALSGDQRLAERAMRENAAQTEKLCGGLPRHRDLIRKIHEHGLQPV

SEQ ID NO: 85327 - protein, 539 aa, Chloroflexi bacterium
  misc_feature (1)..(539): tr|A0A2D9LPY0|A0A2D9LPY0_9CHLR Tryptophan halogenase OS =Chloroflexi bacterium OX=2026724 GN=CL698_05025 PE=4 S V=1
  misc_feature (157)..(157): Xaa can be any naturally occurring amino acid
  misc_feature (224)..(224): Xaa can be any naturally occurring amino acid
  misc_feature (332)..(332): Xaa can be any naturally occurring amino acid
MSESFDVVVIGGGPSGSCAASMAAKAGLSVVLLERHKFPRDHIGESLLPASMPILRELGVEAEIAAAGFPVKHGATMVWGSGSEPWTWSFSETNQEYTNAYQVNRPEFDTILLNKARVVGVDVREENQVIEVIFLDERAVGVRCNNRLGTELFIESXMVIDCSGQSSLISRAKNLRQWDDSFQNLAIYGYFENSTPLPKPNENNIFIESFSEGWIWNIPLKENXASVGIVLDSKKASQELQSRDVEDYFQVNLSYAKESSRMLQSAKLLKPPQVVKDWSYTSSQIAGLSWVLAGDAACFIDPLFSSGVHMALMSGVLASAYAVTVLSDPDMXIATARVYEDMIRREYSLFRELAQLFYQTNRSVDSYFWEARKILGRGGISTGREAFIKAVSGQSVRGYERAVLEKGELPESFKYALESQQNDRDSRRRELEMYVNDWNHLVPYLHEDTYVVRKPVLSAGRFEWGLVLHSPERQDDTDCSSFVALLLDLIDGEANMRLISERVRDKVNSPDKTVINEYLKKTVEILYVEGAISKLQLVK

SEQ ID NO: 85328 - protein, 419 aa, Verrucomicrobia subdivision
  misc_feature (1)..(419): tr|A0A5C9DHT6|A0A5C9DHT6_9BACT Tryptophan halogenase OS =Verrucomicrobia subdivision 3 bacterium OX=2052186 GN= FD140_2740 PE=4 SV=1
MNSENTYDAIVIGGGPSGSSSSYILSEHGHRVLLLEREKFPRYHIGESMIPFTYGPMERLGLIPRMRQSHFVKKYSVIFISPNGKVSTPFYFFNRYDRDTVAQTWQVLRSELDQMLLDHTRSKGTTVKEETTVKELLREDGRVVGVRAQHKDGSVVEYRAPITLDCTGKEAFAAVRNGWRTPDPYLNKVAVWTYYKGSKREPGIDEGQTAVAYVPEKGWFWHIPQHDDMVSVGVVAEGKYLTRGGVREPKDIFHREVEQNVWIKEHLATGQQVGPYYLTSEYTQHARHCGSAGLLLVGDAFAFLDPVFSSGLMLALKSGVFAGDEVHQAIVAKDFSPARFTHYATTMRQGVENMRKLVYAFYEPKFSFKDVIVKYPEAAGEITDCLSGDVNKDFEPLWRKIREFVPLPDDLPLGQPLAN

SEQ ID NO: 85329 - protein, 499 aa, Unknown
  misc_feature (1)..(499): tr|A0A0N1BXT2|A0A0N1BXT2_9PROT Tryptophan halogenase OS =alpha proteobacterium AAP38 OX=1523418 GN=IP70_06785 P E=4 SV=1
MAGNLPGSILIVGGGTAGWMAAAALARAVGRHTRIQLVESSAIGTVGVGEATIPAIRGFNHMLGLDEADFLRHTQGTYKLGIEFRDWTRLNHSYFHPFGVHGASLDANYTHQYWLRLNAMGEGGRLEDYSLCTIMAEQGRYMAPVTDPRNIMSVVGSAYHFDASLYADYLRRYAERLGVIRLDRKVVDVALRGEDGFVEAVICDGGERLAADFFIDCTGFTGLLIEKALKAGYEDWTHWLPCDRAWAVPSSGDGRITPFTRSTAREAGWQWRIPLRHRVGNGHVFSSAHVSEERAREVLLANIDGQALAEPKLLRFVTGRRKQAWVKNCLSLGLASGFLEPLESTSIHLIQTGITKLLDFFPGRQIDGAEVREYNALAQGEFEAVRDFLILHYHVTERSDSAFWNHCRTMDIPDSLKSRIELFRRRGRVSTRTRALFTDTSWIAVMIGQGIMPETYDPLVDLHPLPAVRDRMATMRARIRQAADSMPTHEAFLGKQAAA

SEQ ID NO: 85330 - protein, 522 aa, Colwellia sp.
  misc_feature (1)..(522): tr|A0A2N1C9B2|A0A2N1C9B2_9GAMM Tryptophan halogenase OS =Colwellia sp. 75C3 OX=888425 GN=CXF85_03720 PE=4 SV=1
MNKVVKSVVIVGGGTAGWLTAGIIAAEHQANSAQGIELTLIESPDIKPIGVGEGTWPTMRNTLQTIGISEKEFIRCCDASFKQGSQFIGWVNGQNNDNYYHPFIAPQGFGQTNVAGYWQKNDQHTPFAHAVSFQPHLCDHGCAPKQKQTPEFAAVANYGYHLNAAKFATLLQQHCIDNLGVKHIVDHVEQVNGAIEGNIESVSTRCHSDIPADLFIDCSGSNAILLSKHYQIPFLNKKDILFNDSAIAVQVPYNTVDAPIASHTLSTAQQAGWIWDIGLPTRRGVGYTYASDYLSDEAAEQALRDYLAKELSAAKIAELTFKKIAFTPGHREKFWHKNCVAVGMAAGFLEPLEASALALVELSAKMIAKELPANHSIMAITAERFNQRFHYRWQRIIEFLKLHYVLSQRSDSKYWLDNRLAKTIPARLQQLLSLWQHQEPTYNDFTEIEEIFPAASYQYILYGMGFNTQTRATTRRYDNSQISKKNIEENQQLCRKYLAGLPSNRELIDYILQNKVQNKVNN

SEQ ID NO: 85331 - protein, 473 aa, Caulobacter vibrioides
  misc_feature (1)..(473): tr|A0A258D6A3|A0A258D6A3_CAUVI Tryptophan halogenase (F ragment) OS=Caulobacter vibrioides OX=155892 GN=B7Z12_1 0125 PE=4 SV=1
LPIAIELVESAEIGTVGVGEATVPHIRYFNARLGLDEADFMRKTQATIKLGIEFRNWGRLGEGYIHPFGAYGHAIDGLPFHQHWLAARARGEAGPIEAYSLPIIASRAGKFAPPSSDPRSLGSTFNYAYQFDASLYAQYLRAYSEARGVKRTEGKITSVQQRPQDGFVTGVTLDDGRVIEGDLFIDCSGFRGLLIEGALQAGYEDWTQWLPCDRAVAAPCEAVEPPTPYTRATADKFGWRWRIPLQHRVGNGHVYCSSYVSDDEAARALVENLDGKLQQDPRFLRFITGRRKKQWLKNVVAVGLSSGFLEPLESTSIHLIQVAVTTLIEMFPHRGFEQADQDEYNRVMDLEFERIRDFLVLHYHANQRDDSPFWIERREGPIPDSLAYKMALFRERGAVVGYKDGFFLEPSWLAVYFGQNIMPDGHDPLVAASDPARTAKIMADLAAAVTRTVEAMPTHESFLRAMAQTRSPA

SEQ ID NO: 85332 - protein, 517 aa, Pseudoxanthomonas sp.
  misc_feature (1)..(517): tr|A0A0Q8EXF3|A0A0Q8EXF3_9GAMM Tryptophan halogenase OS =Pseudoxanthomonas sp. Root630 OX=1736574 GN=ASD72_0380 0 PE=4 SV=1
MDSPVRHVVILGGGSAGWLTAAVLAAEHQTASETGLRITLIESPEVATVGVGEGTWPTMRDTLRRTGVSETDFIRECDAAFKQGSKFVRWREEVDGDYYHHPFVLPPGFLETHLATGWMAHRDVPFSLLTCFQAHLCEAGKSPKQMSTPEWASVANYAYHLDAAKLGVFLRKHCVEKLGVRHVADHMVEVQAHENGDIAALRTREHGAIEGDLFVDCSGMRALLIGQHYGVEIESQKDVLFNDRAIATRVPYADPHVEIACQTISTAQEAGWIWDIGLQSRRGIGHVYSSTHTSDEAAEAALRRYIVATGGREQDIDTLPKIMIRPGFRRGAWHRNCVAIGLSSGFMEPLEASSLVMVELAAGMLADQMPATRAAVDIVARRYNDTFSYRWDRIVDFLKLHYVLSKRDDSDYWRDNRRPETIPERLRDLLEFWRHQPPSRYDLNRVEEVFPSASYQFILYGMGFTPGARPATRRMDDVQCAEGYFRQSADIARKMLSALPGHREMLDHVMTRGMPRI

SEQ ID NO: 85333 - protein, 499 aa, Alishewanella agri
  misc_feature (1)..(499): tr|I9P1C4|I9P1C4_9ALTE Tryptophan halogenase OS=Alishew anella agri BL06 OX=1195246 GN=AGRI_10056 PE=4 SV=1
MKNTDLNQVRRVLIVGGGTAGWMTAAMLARILGEQIDLQLVESDTIGTVGVGEATIPAIQHFNAALGINEAEFLRETKGSIKLGIQFENWGRQGDSYMHAFGPVGRQLGMASFHHFWLAAQAKGDNSSFWDYSLNYQAAKAGKFSPQSQLPNSPLPGLQYAYHFDAGLYAAFLRRYSEQRRVKRIEGLIAKVEQKPSGDIAAVVLTDGQVLSADLFIDCSGLRALLIEQTLAAGYDNWQHWLPCDSALAVPSEARYPIVPYTRAIAHGGGWQWRIPLQHRTGNGLVYSSRFLDDEQAKQTLLSNLDAPALAEPRKISFVTGRRKQQWRRNCVAIGLSSGFLEPLESTSIHLIQSAVVRLVQCFPATQDMTALSNEFNRQSQQEFEAIRDFIILHYHLNQRTDHPLWQYCREMALPDALAQRLELFRHSAQIFRQQDELFTEVAWQQVLLGQNLLPASYHPLADSLTKAQLTGFFADLKQVISKTVAALPSLQSFLQSQS

SEQ ID NO: 85334 - protein, 499 aa, Thalassotalea euphylliae
  misc_feature (1)..(499): tr|A0A3E0U5E5|A0A3E0U5E5_9GAMM Tryptophan 7-halogenase OS=Thalassotalea euphylliae OX=1655234 GN=DXX94_15575 P E=4 SV=1
MNKPFNIVILGGGTAGWMAANLFAKRWGNKVKVTLVESPDVGIIGVGEGSTPSLKRFFEILGIEEHQWMARCQATYKLNIRFNDWSPASGITSYSHPFPAQVDTFTKRAFMVNAQTRRMGLDTHIQPEDFLLNGVLARQGKGPKVGAHFPFKMEYGYHFNSALLGEFLAEFAQGLGVDYQQAHIADITRLENGNINSLVTDQGEAISADFFVDCTGFAGLLMEKTLGVGFNSYKENLFNDAAVVLQTPYSPEQAAQIPVETESTALSAGWCWKIPLTERFGNGYVYSQDFISAEQAEQEFRQHLGVLDDNVEVRHLKMKVGQLNQHWSHNCLALGLSQGFIEPLEATALHLVQVSIELFMQKLEAGHFSAQYQAEYNELVSERFERVRDYIVAHYKLNTRNDSEYWRANRDNMKLSDSLKEILHVWYSRGDIAKEIARKNISSHFDEISWHCLLAGYGAFPLLHPNQPGKGDLYQEKDIQAFLAGCALNFDRHNTNLSM

SEQ ID NO: 85335 - protein, 409 aa, Amycolatopsis rifamycinica
  misc_feature (1)..(409): tr|A0A066UA86|A0A066UA86_9PSEU Tryptophan halogenase OS =Amycolatopsis rifamycinica OX=287986 GN=DV20_06900 PE= 4 SV=1
MSATEEDYDVVVIGGGPGGAATAGLLAGMGHKVLVLEREKFPRYHIGESLITGALPTLDDLGLIKRLDAMGFTRKYGGTLLWGKNQGTWGFRFTESALYDYAYQVRRADFDALVLGRARELGAKVLEEVTVREPLFDGERMVGVSYAEKGSKETKEAHAKFVIDASGQTHMLAKHFDSVVWHDDLRNIATWTYWQGCNLYSGTKAGDIISENRPTGWFWFIPLHDGTVSVGYVTPLEEYQKSGKSLEELYFEELGKTEEVSTLVKGATRASGFRNIKDWSYTAERFHGPGWALVGDAAAFVDPLLSTGVTLALRGARALADAIDGVLHDPSVEDELLGLYEESYRTFLDSVLDFVRFFYDRTKNKEDYWNKAQEQIDPQKLRPRETDFATMLSGLTGINDIFQQRRRAA

SEQ ID NO: 85336 - protein, 516 aa, Pseudoalteromonas sp.
  misc_feature (1)..(516): tr|G7G5P9|G7G5P9_9GAMM Tryptophan halogenase OS=Pseudoa lteromonas sp. BSi20495 OX=386429 GN=P20495_3237 PE=4 S V=1
MTKPITKIVVLGGGTAGWLSAGLLAAEHPHLNVTLVESANVPILGVGEGTWPSMRNTLQRIGIKESDFITQCDASFKQGSKFINWRNLSEGENYYHPFMNPQGYEHTNLHASWQRIAPNQKFADVVNMQSFVCQAALAPKQLQTPEYAAVTNYGYHLDAGKFAEFLKNHCVKNLNVTHITDDVTEVINDEHGYIASLKTNNNGDITGDLFIDCSGSCARLIGEHFNSEFIAQDHILFNNSAVAAQIPNAHIDQPIASATLSTAQSNGWIWDIALPTRRGTGYVFSSKYQSDESATNTLKSYIAKSTNEQQAEQLTYRVLKFSPGYRQKFWIKNCVAVGMSAGFLEPLEASALAMVELSISMISEQLPQNRTHMSQLASRFNSRFSTRWQRVIEFLKLHYVLSERDDTPYWQDIGNLNTAPERLQNLLKLWQFQPPSRFDFIENEEVFSSSSYQYVLYGMGFNTQTVSAQNTFNDPRTGDYYYQQNREKIAQCLNGLPSNRALLNHLLSNNGQPHND

SEQ ID NO: 85337 - protein, 506 aa, Lysobacter maris
  misc_feature (1)..(506): tr|A0A2U9TFJ3|A0A2U9TFJ3_9GAMM Uncharacterized protein OS=Lysobacter maris OX=1605891 GN=C9I47_2713 PE=4 SV=1
MNSDNRIRNVVVVGGGSAGWMAAAALATYLGKGASIRLVESEQIGIVGVGEASVPHMKTFNSEMLGIREVDFVTRTQGTFKLGIEFRDWGRLGDSYVHGFGRIGQGLGPLPFHQFWLKLFLAGRAADIGAYSLQTAAATQGRFMVSPDNAPVGSPLSDIAYAYHFDAGLYARFLRELSERRGVKRTEGKVVDVVQRADDGFIEALVMESGERIEGELFIDCSGFRGLLIEQTLKTGYVDWSHWLPCDRAMAVPCEIVGAPTPYTRSTALKAGWQWRIPLQHRVGNGYVYSSGHLGDDEAAATLLANLDGRALADPRPLRFTTGMRRKFWNRNVVALGLASGFLEPLESTSIYLVQSGIQRLLGLFPGRDFDPLLVDRFNRESAFEYERTRDFLILHYNATERDDTPFWDYCRTMSIPDTLREAIELFRADGRYFRNGEDFFALPSWIQVMLGQRIMPRGYHPIVDEMPEDDLVEHVERVRRVIANCVGAMPRHQDFIDQYCKAPSP

SEQ ID NO: 85338 - protein, 502 aa, Alphaproteobacteria bacterium
  misc_feature (1)..(502): tr|A0A257JPD2|A0A257JPD2_9PROT Tryptophan halogenase OS =Alphaproteobacteria bacterium PA3 OX=2015571 GN=CFE32_ 08420 PE=4 SV=1
MEPQAVEKIVIVGGGTAGWMTASALSKVLGPRVNIRLIESEEIGTVGVGEATIPQINIFNAILGIDENDFVAKTNGTFKLGIEFVNWHRQGERYMHAFGGIGRNLGFVPFHHYWMRQNLAGKETSLWDYSAATKAAYSNKFDRLERLGASPLPGPTWAFQFDAGLYARYLRGYSEYHGVKRTEGKVRSVELNGLSGFIQSVTLESGEIVSGDLFIDCSGFRGLLIEGALETGHEDWSNFLPCDRALAVPCESVAPLTPYTRATARHAGWQWRIPLQHRIGNGHVYCSAFTSDEEAERVLMSNLDGRPLADPRPLRFLTGRRKKLWNKNCIAVGLASGFMEPLESTSIHLIQSAVSRLITLFPTKACEAVLSDEYNQQAIEEYALIRDFLILHYHANARTDSPFWLHCQNMAIPDSLSHKIELFRKTGRIERRANDLFAEPSWLQVLLGQGIRPESYHALARDLSDDDLDGFLGNVSTIIDKAVAQMPSHEDFIARNCRAPAA

SEQ ID NO: 85339 - protein, 519 aa, Thalassotalea euphylliae
  misc_feature (1)..(519): tr|A0A3E0UGB3|A0A3E0UGB3_9GAMM Tryptophan 7-halogenase OS=Thalassotalea euphylliae OX=1655234 GN=DXX92_10165 P E=4 SV=1
MTKDVTQIVVVGGGSAGWLSAGIIAAHYQTQGDNAINVTLVESPDVATIGVGEGTWPSMRGTLKKLGISEAEFILHCDASFKQASKFNNWLYEEDNGGDSYYHPFTIPTGFFEANIAEQWLQYREQINFANATSSQSHLCEQGKAPKQIATPEYAFLQNYGYHLDAGKFSNFLTKHCTQKLAVKHIKDNVTAVNTHDDGAIASIATAQHGDVEGDLFIDCTGFTGLLVDKHYGISLKPQDHILFNDRALAAQVPYSQADAPIASHTVSSAQDNGWIWDIGLQSRRGVGHVYASNFTSDEQAEIDLRRYISRTSDIKEDDINVRKLVINPGYREKFWHKNCVAIGLSAGFIEPLEASAIALIELSANFVAEQLPANSDVMAITAARFNRKFSHRWQRIIEFLKLHYVLSERESDYWQANRRAQTIPEELQELLSLWRYQTPYQYDTHQTEELFPAASFQYILYGMGFETQLPAREKRASVAANAQQIFNENKQRTAKLMHALPSNRELINKIKQYGLSKV

SEQ ID NO: 85340 - protein, 508 aa, Brevundimonas sp.
  misc_feature (1)..(508): tr|A0A069IRQ2|A0A069IRQ2_9CAUL Tryptophan halogenase OS =Brevundimonas sp. EAKA OX=1495854 GN=ER13_04550 PE=4 S V=1
MTLLASAPLHPDAIREVLIVGGGTAGWMTAAAMTRLPAGIRVRLIESEEIGSVGVGEATIPPLVTFNAMLGIDEASFIKATQGTFKLGIEFVDWGRQGDRYMHPFGEVGMDMEGVKFHQHWLRQAQGGDPTPIEDYCLSAVAARLGRFTPASSDPRTVLASLRHAYHFDAALYAGFLRRFSEARGVERVEGKVVGVSLRDSDGFIESVRLADGRRLDADLFIDCSGFRGLLIEEALAAGYEDWSHWLPCDRALAVPSANTGPLTPFTRATADRAGWRWRIPLQQRTGNGHVYASAFTTDEDARASLLAGLEGEPLAEPRPLRFTTGRRRRQWVRNCVSLGLSSGFLEPLESTSIHLIQSGISRLMALFPTRRFDPVLIDQFNRLSQTQFEQVRDFIILHYKATQRDDTDFWRHVAAMDVPESLERRIALFRAGGRFMRDGDELFSEASWVAIFTGQHILPQDHDPLADGVPYAAMARKLAGLRGIIRKTAEAMPTHEAFIARCCQPSA

SEQ ID NO: 85341 - protein, 505 aa, Caulobacterales bacterium
  misc_feature (1)..(505): tr|A0A1F8IQI4|A0A1F8IQI4_9PROT Tryptophan halogenase OS =Caulobacterales bacterium RIFOXYB1_FULL_67_16 OX=17975 88 GN=A2352_07450 PE=4 SV=1
MVDHSLGPVRRVAVIGGGTAGWMAAAALARRFARPGGLAVEVTLVESDAIGTVGVGEATIPPIRQFIQMLGLAEDDFIRSTAATAKLGIEFRDWMTPGAAYFHGFGDYGPVVGGQAWRHYLFRLKAAGRIESLEPWSLPAVMARAGRFAPPVDDPRSALSHYAYAFQFDAGLFARRLRSLAEDLGVARCEGRIVEVLQEGDRGHVSSVRLEDGRQIAADLFIDCSGFRGLLIEQTLKAGYEDWSRWLPCDRAVALPCASTRPPEPFTTARARAAGWQWRIPLQHRVGNGYVYSSAFIDDDAAVADLIGELESPPLAEPNRLRFVAGRRREAWKSNVVSLGLASGFLEPLESTSINLIQNGIGRLLELFPDRDFDPALAREYNRRSAGELERIRDFIVLHYHLAQRTDGELWRHCRETPPPDSLQDKIELFRARGEIALLDDESFREDSWAAVFTGLGVWPRKATPLVGLDPLDTVERQASRFADLIRQAVSSLPAHTAHFTGYAA

SEQ ID NO: 85342 - protein, 500 aa, Thalassotalea euphylliae
  misc_feature (1)..(500): tr|A0A3E0UP92|A0A3E0UP92_9GAMM Tryptophan 7-halogenase OS=Thalassotalea euphylliae OX=1655234 GN=DXX92_14905 P E=4 SV=1
MLHSQPIRKVVILGGGTAGWISAALLKKLLGEAVAIELVESETIGTVGVGEATIPPIQVLNSVLGINEAEFLRETKATIKLAIRFENWKQQGHQYYHSFGAIGKSMAFCHFHHLLKRAGGLNDESQLWQYDLNYLCAEAGKFAKIKTKDPIIDMPYAYHFDAGLYAQYLRKFSEKLGVVRTEGLVEQVVQCQQSGNIQALVLKSGQKVTGDLFIDCSGFKGLLIQDTLRTGYEDWSHWLQCDSALAVPSERHEKTAPYTRSIAHSAGWQWRIPLQHRNGNGLVYSSSHYSAQEAADVLMSNLDTKPLADPKLIRFQTGRRYQQWHKNVIAVGLASGFLEPLESTSIHLIQSAVVRLVHLFPHQGITTDIVDEYNKQSKVEFEQIRDFLILHYHVTERTDSQFWRDMRAMEIPDSLRHKIALFQENGRLFRDQNDLFLENSWLQVMVGQGIIPKDYHPTANSMSLEYIEETLKKIKAIKADPVSKLPSHDEFLAHYCQLGK

SEQ ID NO: 85343 - protein, 179 aa, Alphaproteobacteria bacterium
  misc_feature (1)..(179): tr|A0A257JAP1|A0A257JAP1_9PROT Tryptophan halogenase (F ragment) OS=Alphaproteobacteria bacterium PA3 OX=201557 1 GN=CFE32_24655 PE=4 SV=1
ANTLKQDCDIKLVESELIGTVGVGEATIPPIRTFNEMLGIDEREFVAKTKGSFKLGIEFVNWGSQGNRYFHPFGPHGRAFDIVGLHHFWLKAREAGDTTSFDDFSMAWSLAQRGRFTRPSPDPRQVMSTFDYAYHFDAGLYARLLRDYAEARGVTRHEGKLVSVRQHGETGFVEGVTLE

SEQ ID NO: 85344 - protein, 506 aa, Acinetobacter junii
  misc_feature (1)..(506): tr|D0SKS0|D0SKS0_ACIJU Tryptophan halogenase OS=Acineto bacter junii SH205 OX=575587 GN=HMPREF0026_01718 PE=4 S V=1
MLLLFQIGKRRMINLRGMNRVVVVGGGTAGWFAALQLRQLFSPSVEVMVISAPEIPIVGVGEGGVLNLLSVLHDLNIDLKDFIEQTGSTLKLGFRYERWRTGKQEDYYYHLFPLPTPDFAWNEFGFNPYLSGLFNHGIDVSRYMASYEFSEERKPFQEVLQILLEGKNNFGASLHFDTFRVGQYLKKIALARGIIHVEQKIENFVFNPTTENVSAIQCVNHEISCDFVIDASGFSRLLIGKKYQSQWCSFSDTLPMNRALPFHLPHKNKIELVTRATAMSSGWVWQIPLQERIGAGYVYHDQFITDQEAQLEVENWLGHSINPVKPIAFEAGYFQQVWIKNVVGIGLASGFIEPLEATSIGQMLSQLQLLVSFIRENHGVISQQNIDFYNQQNAQYWEGIRDFIRMHYDTGRSDTPFWKYMLNVPRSESYQELKKCWVHRTPRDIDFVEHSMGGMSMFSAASWFAVGAGVGVIKPEATSAELYALSTEKKQKLAKYLQQIKQQLFL

SEQ ID NO: 85345 - protein, 494 aa, Cellvibrio sp.
  misc_feature (1)..(494): tr|A0A3D4Q657|A0A3D4Q657_9GAMM Tryptophan halogenase OS =Cellvibrio sp. OX=1965322 GN=DIW64_19945 PE=4 SV=1
MKNNQTIIIVGGGSAGWMSAAALSNAFGATKKIVLIESDAIGTVGVGEATIPAVKSFNKLLGIDEAEFLKVTQGTFKLGIQFENWGAQGDAYMHPFGLVGKDSWMANFQHFWLKAKRMGLAKSYFDYSLNIRTAKSNKFFIDPNSGVDYAYHFDAGLYAAYLRKYSEARGVVRIEGMIDKVQTRSENGFIESLTLQSGEVIKGDIFVDCSGFRALLIEHTLHTGFEDWSHWLPCDRAVAVQTESVGEPIPYTRSIAHHSGWQWRIPLQHRVGNGLVYCSRYSSDEDAKKLLLENLEGTVKTEPRLIKFRTGRAIKQWNKNCIAIGLASGFLEPLESTSLHLIQTGVVRLIRMFPGDAINQSEIDEYNRQSQFEYERIRDFIILHYHVTQRTDSPFWNYCRTMSIPETLARKIQVYKNTTSVFKEQDELFHEGSWQQVMLGQGITPQDYHPVVDKLSDEELVRLMSSIESEHDQRLMQFPGHQQFINHYCKALAP

SEQ ID NO: 85346 - protein, 498 aa, Pseudoalteromonas sp.
  misc_feature (1)..(498): tr|G7FY55|G7FY55_9GAMM FADH2 O2-dependent halogenase I OS=Pseudoalteromonas sp. BSi20495 OX=386429 GN=prnA PE= 4 SV=1
MKSIKHVVIAGGGTAGWITAALLNKVLGKVINITLIESSSIGTVGVGEATIPPIIQLNNALGINEKEFINETNATIKLGIEFENWKKPTHSYMHAFGPIGKDFPFCDFYNFWLKGRITGCEDDLWDFSLNYQAAKQHKFAPLNTIPNTELPGLSYAYHFDATLYAEYLKKLAISRGVKHIDAKISEVTQCLATGNVETLILDDNKQINGDLFIDCTGLRALLIEKTLNTGFVDWSHYLPCDSAIAVQTKSNDELKPYTQSIAHSAGWQWQIPLQSRIGNGLVYCSRYLSDEDAKALLLNNLPADPITEPRFIKFKTGRRVKQWHKNVVAVGLSSGFLEPLESTSIHLIQSAVTRLIKLFPHHGISDALASEFNKQSVTEIERMRDFIILHYKLTERDDSAFWRQCIQMDIPDSLIHKLNLFKQTGKVIRENNELFAEIAWQQVMIGQGLIPDDYCTIANSFTDEQLSDLFISLKTLVNSTVEKLPTHKEFLASIKRAS

SEQ ID NO: 85347 - protein, 499 aa, Thalassotalea euphylliae
  misc_feature (1)..(499): tr|A0A3E0UHZ3|A0A3E0UHZ3_9GAMM Tryptophan 7-halogenase OS=Thalassotalea euphylliae OX=1655234 GN=DXX92_14900 P E=4 SV=1
MDKPFNIVILGGGTAGWMAANLFAKRWGNKVKVTLVESPDVGIIGVGEGSTPSLKRFFEILGIEEHQWMARCQATYKLNIRFNDWSPASGITSYSHPFPAQVDTFTKRAFMVNAQTRRMGLDTHIQPEDFLLNGVLARQGKGPKVGAHFPFKMEYGYHFNSALLGEFLAEYAQGLGVDYQRAHIADITRAENGNIHSLVTDQGEAISADFFVDCTGFAGLLMEKTLGVGFNSYKENLFNDAAVVLQTPYSTAQAANIPVETESTALSAGWCWKIPLTKRFGNGYVYSQDFVSSEQAEQEFRQHLGVLDDNVEVRHLTMKVGQLNQHWSHNCLALGLSQGFIEPLEATALHLVQVSIELFMQKLEAGQFSAQYQAEYNELVSERFERVRDYIVAHYKLNTRNDTEYWRANRDNMKLSDSLKEILHVWYSRGDIAKEIARQNISSHFDEISWHCLLAGYGAFPPLHPNQPGKGDLYQEKDIQAFLAGCALNFQAHAENLSA

SEQ ID NO: 85348 - protein, 498 aa, Thalassotalea euphylliae
  misc_feature (1)..(498): tr|A0A3E0TYE5|A0A3E0TYE5_9GAMM Tryptophan 7-halogenase OS=Thalassotalea euphylliae OX=1655234 GN=DXX93_10970 P E=4 SV=1
MPVNMPVKKVVIAGGGTAGWMAAAAISKLLGKAVSVTLVESDQIPTIGVGEATIPTLHILHQLLGINEAEFMVATNATFKLGISFENWKDLDQDYIHSFGYLGQDCWACGFHHFWRKGLDLGLVSEIGDYCPEHLASREGRFAVMANQDLNHAYHLDAGLYAKFLQGIAFKHGGERVEGKISQVHQDNHTGFITAVTLDNGQHVSGDLFIDCTGFRGLLIEQALHTGFDDWSHYLPCNSAIAVQTETVGAPVPYTRSIARDAGWQWRIPLQNRTGNGFVFCDKYISNEQAIDTLLSNIEGKTLNDPRVIKYTTGTRRQHWNKNCIAVGLSGGFVEPLESTGIHLFQKAIVRLLQLFPHTGIDDAIVDEFNKQTQEEMDNIRDFIVLHYYQTERNDTAFWRHCANMAIPDSLKHRMALFKESGRVFKKAEELFGEASWVQVMMGQGLLPDQYHPIVDQMSEQELANFLNRIKQNTSKKVASWPSHIDFINHYCRSKMMT

SEQ ID NO: 85349 - protein, 299 aa, Alphaproteobacteria bacterium
  misc_feature (1)..(299): tr|A0A257JF58|A0A257JF58_9PROT Tryptophan halogenase (F ragment) OS=Alphaproteobacteria bacterium PA3 OX=201557 1 GN=CFE32_20180 PE=4 SV=1
MAIERIIIVGGGTAGWMAAAALSRIKAGRAVDIVLIESEAIGTVGVGEATIPPFVGFNQLLGIDEREMLAQVGGTFKLGIQFENWGKLGDSYIHPFGAYGYTMGGVSFHHVWHRMAEGGDKRPIQVFNLETMAAYFGKFARTEDYEREDLPPVNYAYHLDAGRYAAFLRRLAEGRGVVRHEGKVADVALDGETGFVTGVTLDDGRVFAGDLFIDCSGFRGLLIEQALHSGYDDWSQYLPCNRAVALPCLREDGSPPPPFTRATAHSAGWQWQVPLQHRNGNGHVYCSGFMEDQAALDIL

SEQ ID NO: 85350 - protein, 500 aa, Streptomyces afghaniensis
  misc_feature (1)..(500): tr|S4MVN9|S4MVN9_9ACTN Putative Tryptophan 2-halogenase OS=Streptomyces afghaniensis 772 OX=1283301 GN=STAFG_1 982 PE=4 SV=1
MSSAKSTQDFDVIVVGGGPAGATVSTAVALRGHRVLLLEKETFPRYQIGESLLPSTVHGVCRILGVDDEMARAGFKPKRGGTFRWGRNRDPWQFSFALSPRLADPTSFAYQVERSRFDAILLDNARRVGVDVREGCRVTGVLAGEGAQERVRGVRWTAPGGEVREAGARYVVDASGNGSRIHPHVGGKRIHSDFFRNIAVFGYFAGGARLPAPNDGNIFCAAFDEGWLWYIPLRDDLTSVGAVVARESAEAIQRDPAAAWRRLIDACPEVRGFLDGVPQATQRPYDQVRVRKDWSYWKSQLWRPGMALVGDAACFVDPVLSSGVHLATYGGLLAARSINGCLDGNPDENRLFAEFEARYRHEYGLFHEFLVSFYDLHQDERSYFWKARKVTNVGTTELEAFVELVGGLASGDASLTGAGPAGERLTAAADDFERAVRRLPDADDLRNPLYESETFRQVFQEGTVLQERGLFGGPLEPEAPLRPGGLVASEDGLTWVEADA

SEQ ID NO: 85351 - protein, 507 aa, Lysobacter maris
  misc_feature (1)..(507): tr|A0A508B7H4|A0A508B7H4_9GAMM Tryptophan 7-halogenase OS=Lysobacter maris OX=1605891 GN=FKV24_05245 PE=4 SV=1
MTSSDNRIRNVVVVGGGSAGWMAAAALATYLGKGASIRLVESEQIGIVGVGEASVPHMKTFNSKMLGIREVDFVTRTQGTFKLGIEFRNWGRLGDSYVHGFGRIGQGLGPLPFHQFWLKLFLAGRAADIGAYSLQTAAATQDRFMVSPDNAPAGSPLSDIAYAYHFDAGLYARFLRELSERRGVKRTEGKVVDVVQRADDGFIEALVMESGERIEGELFIDCSGFRGLLIEQTLKTGYVDWSHWLPCDRAMAVPCEIVGAPTPYTRSTALKAGWQWRIPLQHRVGNGYVYSSGHLGDDEAAATLLANLDGRALADPRPLRFTTGMRRKFWNRNVVALGLASGFLEPLESTSIYLVQSGIQRLLGLFPGRDFDPLLVDRFNRESAFEYERTRDFLILHYNATERDDTPFWNYCRTMSIPDTLREAIELFRADGRYFRNGEDFFALPSWIQVMLGQRIMPRGYHPIVDEMPEDDLVEHVERVRRVIANCVGAMPRHQDFIDQYCKAPSP

SEQ ID NO: 85352 - protein, 483 aa, Caulobacterales bacterium
  misc_feature (1)..(483): tr|A0A1F8IPK4|A0A1F8IPK4_9PROT Tryptophan halogenase OS =Caulobacterales bacterium RIFOXYB1_FULL_67_16 OX=17975 88 GN=A2352_01220 PE=4 SV=1
MTAAALARLAAPSGVDVCLVESEAIGTVGVGESTLPHIRAFNERLGIDEATFVKATQATFKLGIRFDDWRAVGGRYIHPFGDYGAPGGEAPFHHYWLRAAKLADVGPIDDYALAVVAAREGRFAPPADDPRSMMSTYGYAYQLDATLYARFLRDYAETRGARRIEGRIVEVAQDGESGAIRSLRLETGETVEGDLFVDCSGFRALLIEGTLKAGFTDWSHWLPCDRAIAIPCQTDQPTVPYTTARALEAGWRFRIPLQHRVGNGYVYSSRFIDADTALERLTAELEGAALASPNHLKFTAGQRTRNWVGNCVSVGLSSGFIEPLESTSIYLIQIAITKLLELWPTGVVDPVSAAEFNRQMDLEYERIRDFIILHYCATERNDTPFWDYVRTMPLPQSLAEKIELFRARGVVQEYREGLFLHPSWVAVYLGQGVLPRAHHPLADAPSDDQLLASLARLRTVVQQSASRLPPQDAFIARMTAASA

SEQ ID NO: 85353 - protein, 444 aa, Rhodocyclaceae bacterium
  misc_feature (1)..(444): tr|A0A5C9BVC1|A0A5C9BVC1_9RHOO Monooxygenase FAD-bindin g:FAD dependent oxidoreductase:tryptophan halogenase OS =Rhodocyclaceae bacterium OX=1898103 GN=FD131_2485 PE=4 SV=1
MMEQVQGVERKQCDVLVIGGGPAGCTVAPMLAEKGYKVVVLEKAHHPRFHIGESLLPANLPLFERMGIAEEVKAIGMHKPGAEFVSPNHEMSSVFVFAEAWDKSMPHAYQVKRDQFDTILIRNAAKKGVEVHEGCKAKSVDFLPDNTATVRAMHDDGRESEWQARFVVDASGRDTFLANRFQIKHRNPKHNSSAIYGHFTGCKRHEGVAEGNITIFWFEHGWFWFIPMQNDITSIGMVTWPYYMKTKGERSLEQFLRDGFAQCPKLTERLKDTKLINEIEATGNFSYVSERNHGNNYVMLGDAYAFIDPVFSSGVLLAMNSGVIAAEAIDTCLKTPAKAPAALKKFDALMKHGPKEFSWFIYRVTNPIMREFFMGPRNFFRAKEAVLSMLAGDIFGKTPIWSSIFAFKMLYYIANITQPRLAFKGWKQRRFNIRKVDDAVVYNA

SEQ ID NO: 85354 - protein, 533 aa, Myxococcus stipitatus
  misc_feature (1)..(533): tr|L7U9R8|L7U9R8_MYXSD Thioredoxin reductase OS=Myxococ cus stipitatus (strain DSM 14675 / JCM 12634 / Mx s8) O X=1278073 GN=MYSTI_03293 PE=4 SV=1
MDTAIREVVILGGGTAGWMTAAYLQKVFEGTVQVTLLEAATIPRIGVGEATVPNLQRVFFDRLGIPENEWMRECNAAFKTAVKFVNWRKKEPGAPDNHFYHAFGLIPNVDNIPLSHYWVLRNEGRATPDEQVDYACYREPPMMDAKLAPRFRDGRPAVNYAWHFDAQLVADYLRRLSTGWGVKHVVDELASVEKTPDGHIKALHTKGGRVLGGDLFVDCSGFRGLLINQAMEEPFLDMSDHLLCNSAVATAIEHDDAKHGIEPYTSAIASKHGWMWKIPMLGRFGTGYVYSSEFCSQDEAIREFSAKWGLDPEKTAFNRIRFRVGRNRRAWVKNCVSIGLASCFVEPLESTGIYFITASIYQLAKHFPDKGFNPVLMDRFNREVEMMFDDTRDFLQAHFLTSSRDDTPFWLANKNDLKLSDALKDKLETWKTGLTVNMPVSGEEAYYGNFETEFRNFWTNSSYYCVLSGMGWMPEQPLTTLKYRPSSVAHAEEAFQRVKLQQQALLQGLPTNHEFLQRLHRKNGMDLAATGTG

SEQ ID NO: 85355 - protein, 618 aa, Frankia casuarinae
  misc_feature (1)..(618): tr|A0A1X1PWT0|A0A1X1PWT0_FRACC Tryptophan halogenase OS =Frankia casuarinae (strain DSM 45818 / CECT 9043 / CcI 3) OX=106370 GN=UK99_11035 PE=4 SV=1
  misc_feature (84)..(84): Xaa can be any naturally occurring amino acid
MRDHYDVIIAGGGPAGSTLAALLARTSDLKVAIFEKDEFPREHIGESFAHPLIPVLAESGALAKVLASNCWVKKFGGIYSWARXGPSRAFFDHANWAVDGVHRWALHVNRSEFDQILLEHARDLGVDVTTGMAVTDFAAAANGCQVTLADGTAVSGAYFVDASGRQQSLVTKKPREWLSGYRNIAIWQHYLGGLPAQGLDGDWNIFREKNLSPIGCFAFPDGWCWYIPVPRIVNGERVLTHSIGIVTSPEVLKEPGKDFTDSEVFLRTVRGVPRLADLVAEVTPISDQMMTVTNYSRVNERFADLDRHWILIGDASYFVDPLFSSGVAFAANQAASAALLLRTTLRAELSPGLVRDLWQDYDHEWHGMAEVFALSIDQWYHMIGADNPGSAYWHRRNSSPHLDMPDRSFDALLNTAFTPDLLLIMTRGTGRMSDLAIDGPYQQARAHVMLTEPEPDAVLVAAPGVRMRAGVALDVPGFKAVLPPADLELDTPAAVRAAVAEYWTDPVAAEANGGLGVPSPTASPVPCHRFEFDSDALVDSGSGATGFSVRGVDSHDGAPQLWEILSRGPVVYGELGSRLAPGQRVLLQRLIKAGMVTVKTAARQTTPGTEAAEVTLAD

SEQ ID NO: 85356 - protein, 517 aa, Enhygromyxa salina
  misc_feature (1)..(517): tr|A0A2S9YN53|A0A2S9YN53_9DELT Flavin-dependent tryptop han halogenase PrnA OS=Enhygromyxa salina OX=215803 GN= prnA PE=4 SV=1
MTPHSITSIVIVGGGTAGWLSAAYLNRALGSSVRITVVESASVGRVGVGESTVPTMVSTLAFLGIDERAFMRRCNATFKAAIKYVNWATGGSGERVDEFYHPFFDRPELLAQPYGVMHFPFVGEGFSSADIWAAGGERREPRFDRVCSAIPAVSDALAFAPERLPGSQTLQYAYHIDASLFADMLAEVAIERGVERRIDHVLSVELDERGFVGSLVTKSGAKLTADLFIDCSGFRGLLINGALDEPFESDAKYLPCDAAVALPAASAPERDGIFPYTMATALSAGWSWRVPLFHRLGCGYVYSSDHLDASAAEQELRDLLGPAAGEDANHLRMRIGRCRRSWVNNCVAIGLSSCFLEPLESTAIFFVEYQLAQLVNMFPSRRFAPARLHRYNETINDMYDHLRDFIVMHYCTTSRGDTAFWRRIRDDMPIPDSLATTLEEYRVGVMPQDRLRFRLFRSRSYAAILSGMGVYPEYGPPILDHAPTAPGAALLADVAERTAALLQQLPTHYEYVRKLHE

SEQ ID NO: 85357 - protein, 519 aa, Thalassotalea euphylliae
  misc_feature (1)..(519): tr|A0A3E0TRB7|A0A3E0TRB7_9GAMM Tryptophan 7-halogenase OS=Thalassotalea euphylliae OX=1655234 GN=DXX93_10955 P E=4 SV=1
MTKDVTHIVVVGGGTAGWLSASIIAAHYQTQGDKAINVTLVESPDVATIGVGEGTWPSMRGTLKKLGISEAEFILHCDASFKQASKFNNWLYEEESGGDSYYHPFTIPTGFFEANIAEHWLPYREQINFANATSSQSHLCEQGKAPKQIATPEYAFLQNYGYHLDAGKFSDFLTKHCTEKLAVTHVKDNVTKVNSHDDGAIASVATAQHGEIEGDLFIDCTGFTGILIDQHYGISLKLQDHILFNDRALAAQVPYSQADASIASHTVSTAQDNGWLWDIGLQSRRGVGHVYASNFTSDEQAEIDLRRYISRTSDIQEDDINVRKLVINPGYREKFWHQNCVAIGLSAGFIEPLEASAIALIELSANFVAEQLPANSDVMAITAARFNRKFSHRWQRIIEFLKLHYVLSKRESDYWQANRRTQTIPDELRELLSLWRYQTPYQYDTHQTEELFPAASFQYILYGMGFETQLPAREKRASVAAQAQQIFNENKQRTAKLMHALPSNRELINKIKQYGLSKV

SEQ ID NO: 85358 - protein, 557 aa, Streptomyces kanasensis
  misc_feature (1)..(557): tr|A0A100Y477|A0A100Y477_9ACTN Tryptophan halogenase OS =Streptomyces kanasensis OX=936756 GN=ATE80_18605 PE=4 SV=1
MFDKEVFPREHIGESFAHPVVPALQESGALAKVLASPCWVKKFGGVYAWDPGKPAVALFDQAPFEKDGVRRWTMHVDRAEFDHILLDHAADVGVEVFQGVAVTAYEPDRNGGLVRLGDGGAVRAGYFVDASGRQSSVSAARNKRGWLSNFKNIAIWQHFTKGGQTQNLAEDWNIFTEDNLSPIGCFAFRDGWCWYIPVPKVIDGRRVLTHSVGIVTNPAVLKEPGRDYTDQKTFLEAVRQVPYLKDLIQEAVPVADTMLTATNYSRVSDEFADYDERHLLVGDAAFFVDPLFSSGVAVALTQAAAAALLIRKTVDGSLDETDQRHLWQDYNAKWHGTAETFALMIDQWYHAIAKNNPGSVYWNTRGTGADLGIREQTFDALLNTAFQPALLEVMTHGSRKVEDLDAAGPYLTATALAEPAELTDDALVSLAPTAGIRDSVTFVVPGFKATNPPANVQLPPAIIDGMTEYWRNPITNAGASPSPLRDTIPCRRIFSTEDPHGPTIDADPQRDGVDELWKLLGEGPVKFGELAPRLTPPQTRLVKRMCVSGFLTVQPAS

SEQ ID NO: 85359 - protein, 488 aa, Unknown
  misc_feature (1)..(488): tr|A0A0N1LMR4|A0A0N1LMR4_9PROT Tryptophan halogenase OS =alpha proteobacterium AAP38 OX=1523418 GN=IP70_04345 P E=4 SV=1
MAAALLSNVLPRDRLRLTLVESPDIGTVGVGEATIPPIQFFNRAVGIDEAEFMRATEGTFKLGIAFRDWVRPGHRYMHPFGQPGQAIKGVSFHAWWLRLRTAGYTVPLSDFWLAEKLADEGRFDTPSPDARSPKSTLAYAYHFDAGLYAAYLRTIAEPRGVTRVEATVADVALDPTDGTVSHVILADGRRVDGDYFIDCTGFRALVIGQALGRPYEDWSHWLPANRAVAVPSARTRDPVPFTTATARSAGWQWRINLRHRTGNGYVYVADHIDDDQAAATLLANLDGQALADPRFLRFTTGRRTQSRYKNVLAVGLSSGFLEPLESTSIHFIQHALIKFAATFPLSKDDPLSANLYNRMIGEELEQVRDFLILHYHANQRVGDPFWDRMRHMDVPDSLAEKIALFRARGCAIFPNQTLFQEPNWLAVLLGQEVEPASYDPLADAGDLSDIRQGFDATRQIIAQTARAAPRHMDYLSRLNAGSNRRGAA

SEQ ID NO: 85360 - protein, 618 aa, Frankia casuarinae
  misc_feature (1)..(618): tr|Q2J9C6|Q2J9C6_FRACC Tryptophan halogenase OS=Frankia casuarinae (strain DSM 45818 / CECT 9043 / CcI3) OX=10 6370 GN=Francci3_2756 PE=4 SV=1
MRDHYDVIIAGGGPAGSTLAALLARTSDLKVAIFEKDEFPREHIGESFAHPLIPVLAESGALAKVLASNCWVKKFGGIYSWARQGPSRAFFDHANWAVDGVHRWALHVNRSEFDQILLEHARDLGVDVTTGMAVTDFAAAANGCQVTLADGTAVSGAYFVDASGRQQSLVTKKPREWLSGYRNIAIWQHYLGGLPAQGLDGDWNIFREKNLSPIGCFAFPDGWCWYIPVPRIVNGERVLTHSIGIVTSPEVLKEPGKDFTDSEVFLRTVRGVPRLADLVAEVTPISDQMMTVTNYSRVNERFADLDRHWILIGDASYFVDPLFSSGVAFAANQAASAALLLRTTLRAELSPGLVRDLWQDYDHEWHGMAEVFALSIDQWYHMIGADNPGSAYWHRRNSSPHLDMPDRSFDALLNTAFTPDLLLIMTRGTGRMSDLAIDGPYQQARAHVMLTEPEPDAVLVAAPGVRMRAGVALDVPGFKAVLPPADLELDTPAAVRAAVAEYWTDPVAAEANGGLGVPSPTASPVPCHRFEFDSDALVDSGSGATGFSVRGVDSHDGAPQLWEILSRGPVVYGELGSRLAPGQRVLLQRLIKAGMVTVKTAARQTTPGTEAAEVTLAD

SEQ ID NO: 85361 - protein, 501 aa, Unknown
  misc_feature (1)..(501): tr|A0A0N1BN20|A0A0N1BN20_9PROT Tryptophan halogenase OS =alpha proteobacterium AAP38 OX=1523418 GN=IP70_21285 P E=4 SV=1
MHKPIRSIVIVGGGTAGWMSAAALARVAGKTHRLHLVESEEIGTVGVGEATIPPIATFNRVLGIDEDEFLRATNGTIKLGIEFKDWYRQGHRYMHAFGALGRPLGMTHFHHVWRRAHALGLDGDWEQYVYNTVAARALRYGRPGPQRRTPLEPLTHAFHFDAGLYAAFLRRFATERGVVRTEGKIRRTILNAFNGHVEAVELEDGTKIEGDLFIDCSGFRGLLIEQALGTGFEDWSHWLPCDRAWAVPCANGGPFTPYTRSTAHSAGWQWRIPLQHRIGNGHVFASRYMGEEQARDILMANLDGTPQAEPRLLRFTAGRRKKMWNRNVVAVGLSSGFLEPLESTSIHLVQSAITRILMALPNDGIDAVEVDDFNEKARAEYERIRDFIILHYKATERDDSPFWRDCRTMDIPEELERRMRVFASHGRVSRVFDELFLDVSWIQVFLGQGVIPRSWHPLADQLSEAELKEFLGEIKAMIGHEMAALPTHADFIARHCAARPS

SEQ ID NO: 85362 - protein, 507 aa, Thalassotalea euphylliae
  misc_feature (1)..(507): tr|A0A3E0UM85|A0A3E0UM85_9GAMM Tryptophan 7-halogenase OS=Thalassotalea euphylliae OX=1655234 GN=DXX92_10180 P E=4 SV=1
MQVNMPVKKVVIAGGGTAGWMAAAAISKLLGKAVSVTLVESDQIPTIGVGEATIPTLHILHQLLGINEAEFMSATNATFKLGISFENWKDLNQDYIHSFGYLGQDCWACGFHHFWRKGLDLGLVSEIGDYCPEHLASREGRFAVMANQDLNHAYHLDAGLYAKFLQGIAFKHGCERVEGKISQVHQDNHTGFITTLTLDNGQQVSGDLFIDCTGFRGLLIEQALHTGFDDWSHYLPCNSAIAVQTETVGSPVPYTRSIARDAGWQWRIPLQNRTGNGFVFCDKYISDEQAIDTLLSNIEGKTLNDPRVIKYTTGTRRKHWNKNCIAVGLSGGFVEPLESTGIHLFQKAIVRLLQLFPHTGIDDAIVDEFNKQTQEEMDNIRDFIVLHYYQTERNDTPFWRHCANMPIPDSLKHRMALFKESGRVFKKAEELFGEASWVQVMMGQGLLPDQYHPIVDQMSEQELANFLNRIKQNTSKKVASWPSHIDFINHYCRSKVSRSKTNSAEAS

SEQ ID NO: 85363 - protein, 505 aa, Thalassotalea euphylliae
  misc_feature (1)..(505): tr|A0A3E0TM51|A0A3E0TM51_9GAMM Tryptophan 7-halogenase OS=Thalassotalea euphylliae OX=1655234 GN=DXX93_03075 P E=4 SV=1
MSHPVKNIVIVGGGTAGWLSAAVIASYHQGANDEQFRITLVESSDVPTLGVGEGTWPTMKNTLRQIGLSEREVFARCHAAFKQGGKFVNWVHGNGDFYYHPFTVPLGYGKLDLAPYVENVENFAIESNFQHHICEAGLAPRGHADLDYQGPCNYAYHLDAGELATMLKEHCTAKLGVHHLVDTLQETVIAEDGSIAAIALEKTGQLSADLFVDCTGARSLLLGKALGVGYHSLDDVLFNDSALAMQVPYDNDDSPVASHTIATAQDAGWIWDIGLTHRRGVGHVYSSRFTSDDHAEANLRKYLGKAAEGLTARKISYKPGHREKFWHKNCVAVGMAAGFVEPLEATAIMLIELSSRFIGENLPADKGLMPVVAKRFNQQMDYRWQRIADFLKLHYMLTQRPEPYWQAHCDESTFPQSLKDDLAIWQYRGPATNDFDSAIELFPAASYQYVLYGMEFKPDFTSQAYLYNQGQQAQQLIRRNQQITQQMLQNLPAHRAYIEQWLATG

SEQ ID NO: 85364 - protein, 559 aa, Plesiocystis pacifica
  misc_feature (1)..(559): tr|A6G2J2|A6G2J2_9DELT Tryptophan halogenase OS=Plesioc ystis pacifica SIR-1 OX=391625 GN=PPSIR1_22846 PE=4 SV= 1
MLGGGSSGYFAALAIQRRFPELEVTVIASSKVPIIGVGEATTTLMPPFLHAQLGLSMEAMCRAVEPTFKLGIRFEWGRPGAYHFNFPFGDADPLLAHHFDGDLRHQSLMSMAMDQGLAPVLRGPEGEVVSLLRQVKFAYHLDNAPFVAFLAEAARAAGIGHIDATICDASTRAGASGEPEIASLRTEDGRELAYDLYIDASGFRSVLLGGALEERFQSYASSLFCDRAVVADVAEGAGVEPYTTAETMDAGWCWRIPVRRACHRGYVYSSAFQSDDEAVAHMRAANPSMGEAKLIRFRSGRRERAWVGNVAAVGNAYGFVEPPRVHGPAHGHRRARLRARGDRGPASRGRGRGRGADLPRVRQRVPGRALGLPALVSGGALQVQPAPGQRLLAGRPGRGRRLGPRAGDRALSEPGAVAGRGRPGLRRGRSSLRLQRADDHAARPARREPGRCGAQNQAEPGPVARADRASAHRPALRRGSAHGLGLARGPPRAPARVRGAPQLVVPGRRRAGRGDRRGSAAGTAQERHARGASRLAASGWGLARGPRPDPRMGERLTRA

SEQ ID NO: 85365 - protein, 502 aa, Xanthomonadales bacterium
  misc_feature (1)..(502): tr|A0A2M7D1C8|A0A2M7D1C8_9GAMM Tryptophan halogenase OS =Xanthomonadales bacterium CG02_land_8_20_14_3_00_62_12 OX=1974108 GN=COS34_02560 PE=4 SV=1
MTESPIKTVVIVGGGTAGWMAAAVLAKAMGPQLAIRLIESDEIGVVGVGEATIPQIRLINQFLGLDEDEVLRQSQGTFKLGIQFNDWRRIGDSYLHAFGDIGLPLGMLAFHPYWLRARQTTATSADLWAYSLNAQTAMANRCARLGPAADSPLSGIKHAFHFDAMLYSQMLRRHCEGQSLHRSEGRIVDVRLRADDGFIESVVLASGETISGDLFIDCSGFRGLLIEGALKVGYEDWSHWLPCDRALAVPSARTAPMRPYTQASARAAGWQWRIPLQHRTGNGHVYCSRYLSDDEASAILLANLEGEALAEPRPLRFTTGRRRQFWQRNCVALGLASGFMEPLESTSIHLVQSGISRLLNLFPDRHCDAALSAEYNRQTTFEYERIRDFIILHYHASERSDTPFWRDCAAMSIPESLQRKIDLFSSSGAIVRDGEELFTEVAWLQVMLGQGICPRRYHPLADAISAAQLKEFLANIRALIDARVASLPSHADFVARNCAAAM

SEQ ID NO: 85366 - protein, 500 aa, Thalassotalea euphylliae
  misc_feature (1)..(500): tr|A0A3E0U7J7|A0A3E0U7J7_9GAMM Tryptophan 7-halogenase OS=Thalassotalea euphylliae OX=1655234 GN=DXX94_15570 P E=4 SV=1
MLHSQPIRKVVILGGGTAGWISAALLKKLLGEAVAIELVESETIGTVGVGEATIPPIQVLNSVLGINEAEFLRETKATIKLAIRFENWKQQGHQYYHSFGAIGKSMAFCHFHHLLKRAGGLDDESQLWQYDLNYLCAEAGKFAKIKSKDPIIDMPYAYHFDAGLYAQYLRKFSEKLGVVRTEGLVEQVVQCQQSGSVQALVLKSGQKVTGDLFIDCSGFKGLLIQDTLRTGYEDWSHWLQCDSALAVPTERHEKTAPYTRSIAHSAGWQWRIPLQHRNGNGLVYSSSHYSQQEAADILMSNIDTKPLADPKLIRFQTGRRYQQWHKNVIAVGLASGFLEPLESTSIHLIQSAVVRLVHLFPHQGITTDIVDEYNKQSKVEFEQIRDFLILHYHVTERTDSQFWRDMRAMEIPDSLRHKIALFQENGRLFRDQNDLFLENSWLQVMVGQGIIPKDYHPTANSMSLEYIEETLKKIKAIKADPVSKLPSHDEFLAHYCKLGK

SEQ ID NO: 85367 - protein, 529 aa, Dyella jiangningensis
  misc_feature (1)..(529): tr|A0A023NRR3|A0A023NRR3_9GAMM Tryptophan halogenase OS =Dyella jiangningensis OX=1379159 GN=CH75_07495 PE=4 SV =1
MARLKKVLVVGGGTAGWLAACYLAKAVNAVDPGSVQVHLVESSNIGLLGVGEATFPSIRGTLSAIGLDERRFLVGATATYKQGIHYRHWVRPPGTPGNTHFFHPFSQPSQRPGGPELLPYWLLGAAPEGMPFADAVTMQSRLVERGRAPKRSTDADYQGPMNHAFHFDAACFARVLAEHGQESLGIKRHVATVERTELDETGAIARVITTELGELTADLYMDCTGLRGALIGGVMQSPFRSRRDVLFADRAVAMQVPYERPDTPIPSYTISTAQEAGWIWDIGLQKRRGVGYVYSSRHTDDARAEEVFRRYLGPAADDLKAMHIKFETGYRPEHWRKNCVAVGLAGGFVEPLESTGIALIELATYLLTHLLPGDTDDMERAARHFNEMMVARYDRIIDFIKMHYCLSQRRDSSFWIDNADPASIPQTLQDKLALWRHRPPHRLDFVSDLEMFLVSSWQYVLYGMEYKTDLEPMRSAYPRFEEARQEFAMIQQVAAHAASDLPEHRALVEQFCREFHERSGAAVASEAMA

SEQ ID NO: 85368 - protein, 206 aa, Alphaproteobacteria bacterium
  misc_feature (1)..(206): tr|A0A257JG06|A0A257JG06_9PROT Tryptophan halogenase (F ragment) OS=Alphaproteobacteria bacterium PA3 OX=201557 1 GN=CFE32_19105 PE=4 SV=1
MGRRIAKVVIVGVGEATIPPIQHLNAVLGIPEGEFLRETRASIKLAIRFEGWRVPGESYFHTFGAPGRNHAFCDFQHFWRRGQQLGVAQDLGDYDLNHLCCQTGRFGRPRSQDPFLDVPYAYHFDAGLYARFLREVSEARGVQRLEGKITEVLLRPADGFIDGLRLADGRTVTGDLFIDCSGFRGLLIEEALHTGYEDWTHWLPCD

SEQ ID NO: 85369 - protein, 505 aa, Cellvibrio sp.
  misc_feature (1)..(505): tr|A0A3D4PXZ1|A0A3D4PXZ1_9GAMM Tryptophan halogenase OS =Cellvibrio sp. OX=1965322 GN=DIW64_04120 PE=4 SV=1
  misc_feature (89)..(89): Xaa can be any naturally occurring amino acid
MNPLKKIVILGGGTSGWIAASMLAAHLKRELCEIELVESDEIGSIGVGESTIPPVVRLITSLGIDEEEFIRETQACYKLGIKFVDWRVXVKNQSYFHPYGALGKRIGSQDFYQCWLKSTMEGEHFNLQDFSPCAVMAAQERFFPPAQAMNTPIGGAGYAVHLDAKLVAAYLRRYAEARGVVRNEGNCVNVLRKDNGFIEALELSDGRKIHGDFFIDCSGFKALLIEKELGVEFEDWSNYLPCDRAIVVKTQVAGSRMPYTTATARKSGWAWRIPLRNGTGHGYVYSSKFCSDAEAKTTLLKNLDAPRINDPRLISFNTGRRKEFWSGNCLALGLSGGFIEPLESTAIHLIARGMDFFLRFFPDADCEPSLQREYNRRMGADFEEVRDFIVLHYCTTERDDSDFWRWCKTMELPESLRERIDLFKGHGILREDNDELFRSTSWQSVFEGMGIRPQKYSPRVDNLDFEQISETLKLARSAIFNMVKSLPSHDAYLQEHYGASEPPKP

SEQ ID NO: 85370 - protein, 501 aa, Streptomyces sp.
  misc_feature (1)..(501): tr|A0A117S0M8|A0A117S0M8_9ACTN Tryptophan halogenase OS =Streptomyces sp. RV15 OX=909626 GN=AQJ91_20115 PE=4 SV =1
MNPNRETGETWETDEFDVIVVGGGPAGSTAATAVALRGHRVLLLEQQTFPRYQIGESLLPSTVHGVCRILGVEEEVARAGFKPKRGGTFRWGRNRDPWQFSFALSPRLADPTSFAYQVERSRFDAILLDNARRVGVDVREGCRVKGVLADEERVRGVNWTGPAGEIHEARARYVVDASGNGSRVHGEVGGRRTYSDFFRNIAVFGYFAGGARLPKPNDGNIFCAAFDEGWLWYIPLRDDLTSVGAVVGRDNAAAIQQDPVTAWRGLIDSCPEVRDLLHGVPQSTEAPYDQVRVRKDWSYWKARLWRPGMVLVGDAACFVDPVLSSGVHLATYGALLAARSINGGLAGTLGEGRLFDEFEARYRHEYGLFHEFLVSFYDMHQDERSYFWKARKVTHVDATEREAFVDLVGGLASGDTSLAGPGQAGARLTTTASELDQAVGRLPDSDGLRNPLFESASIRQVFQEGAVLQERGVFGGPLEEETPLRPGGLVASEDGLTWVAG

SEQ ID NO: 85371 - protein, 503 aa, Cellvibrio sp.
  misc_feature (1)..(503): tr|A0A3D4Q1Y7|A0A3D4Q1Y7_9GAMM Tryptophan halogenase OS =Cellvibrio sp. OX=1965322 GN=DIW64_05120 PE=4 SV=1
MQNNLNSICIVGGGTAGWMAASLLSSSLQGTGIKITVIESPDIAIIGVGESTVPSILEFLRVCRINLKEFVQATSASFKLGIRFEDWLKPGEHYFHPFGRVGQDLHGFEFYQAWLKTCADGHASRWVDHSPCAIMAENHRFMLRPPQDQNWVLRNTGHALHFDAVLVARYLREFSLSRGVERIEATVDKVVVDERQFISALELNNDTTITNDFFVDCTGFKGLLIAGALNVGYEEWTHYLPCNRAIAVQTSNTGEPPPYTTATAREAGWTWKIPLQHRTGNGYVFSGDHCSDDKAIDTLLKAVDGELLIEPRVIPFTTGRRKKIWHNNCLSVGLASGFLEPLESTAIHLVYKILLRFISHFPDQDFDPQVEQAFNQKINLDYQEVRDFIILHYCTTKRDDTEFWRWCQNMPIPDSLNEKIHLFRERGELEHSYGQFFSQDSWCSILEGMNVRPKKYHPLMDGFDSQGLAKTLQENVQDIYSTVMQMPKHGDYIRQHCAAKKVL

SEQ ID NO: 85372 - protein, 503 aa, Sphingomonas sp.
  misc_feature (1)..(503): tr|A0A430EGB7|A0A430EGB7_9SPHN Tryptophan 7-halogenase OS=Sphingomonas sp. ABOLE OX=1985878 GN=CA234_16235 PE= 4 SV=1
MATTTPYRIVIAGGGTAGWMAAAALIRFLGQGFAVTLVESDAIGTVGVGEATIPQIGMFNASLGIDEDAFVAATRASYKLAIEFVGWTRGGRYMHAFGDVGRDNGLLAFRHTWLRGMAEGVAAPLCAYALNNVAALGNRMQRGPTRTVRVLPEMPYAFHLDAGLYARFLRDYAEARGVVRHEGRIEAVTRNGADGDVAALHLDSDRRIEGDLFLDCTGFHARLIGEAMGVGYQDWSHWLPCDRALAVPSARARDFTPYTRATAHDAGWQWRIPLQHRTGNGIVYASRYLSDDEAAARLLAGLDEPALGDPRPIRFRTGRREQAWAGNVIALGLSSGFLEPLESTSIHMIQSAVERILKLLPGRRAPAPLRDSYNRQAAHESERIRDFLILHYWANDRDAPFWRERRETPVPHGLAEKIALWRETGEILREDGDLFSDVAWLQVLVGQGITARGHHPLADQPPRAQIAEYLDLLAKLNAREVAQMPPHSDFVRAHGAADAEIAA

SEQ ID NO: 85373 - protein, 493 aa, Cellvibrio sp.
  misc_feature (1)..(493): tr|A0A3D4Q6U6|A0A3D4Q6U6_9GAMM Tryptophan halogenase OS =Cellvibrio sp. OX=1965322 GN=DIW64_19990 PE=4 SV=1
MPDKKMKIVIAGGGTAGWIAAAALSHQMGEILDITLIESQEIGTIGVGEATIPPMRTFHRFLGINEQEFMRATSATFKLGIQFENWKQVGEKYFHSFGVTGKQTIITDFIHFWLRGRELGIAKEFGDYCLEYKAALENRFSLNDQTSINYAFHLDAGRYASFLRARAEARGVKRVEGKIAEVIQHPESGFITSIKMDSGQDIAGDLFIDCTGMRGLLIEQCLQTGFEEWDHWLPCDSAIAVQTESHGPAVPYTKSIAHHAGWRWQIPLQHRVGNGIVFSSSHLSDDEATNMLLSSMEGKVLTEPRVIKFKTGRRKKSWNKNCIAMGLASGFLEPLESTSIHMIMTAVTRLLQLFPHGEIKQSIVDEYNTQAKSEYERIRDFIILHYKATERDDSPFWRYCKEMEIPSDLKHRIALFKDFGRSNQVEGELFRLDSWTQVMLGQGIMPSSYHPIVGLMSDRDLQNFLNSIAADVDKSIAMMSTHQDFVNKYGGVL

SEQ ID NO: 85374 - protein, 510 aa, Streptomyces sp.
  misc_feature (1)..(510): tr|A0A0M8RWC3|A0A0M8RWC3_9ACTN Tryptophan halogenase OS =Streptomyces sp. NRRL F-5755 OX=1519475 GN=ADK86_04360 PE=4 SV=1
MGERAVANSANAGNPANPETYDVVIVGGGPAGSTLGALVARQGHRVLILEKEFFPRYQIGESLLPSTVHGVCRLTGVADDLAAAGFTRKRGGTFRWGATPEPWTFSFSVSEHMAGPTSYAYQVERSKFDEILLRHAGRCGAEVREGCAAADVIADEERVRGVRYTDADGAEREAYGTFVIDASGNKSRLFQRVGGQRTYSEFFRSLALFGYFEGGKRLPEPNSGNILSVAFDSGWFWYIPLSPTLTSVGAVVRREMAEKIQGDQEEALRALIAECPLISEYLANARRVTTGQYGQLRVRKDYSYHQTTFSRPGMLLVGDAACFVDPVFSSGVHLATYSGLLAARSINSVLAGLVDEAVALREFEARYRREYSVFYEFLLSFYEMHHSEQSYFWRAKKVTHHRRSEMEAFVDLVGGVSSGEAALIDADAMAERLRADSAEFAGAVDQLAHSEDGSMLPLFKSSVVSQVTREGSQVQMRALLGADAEPETPLLPGGLVSSPDGMFWLPAGSG

SEQ ID NO: 85375 - protein, 599 aa, Microcystis sp.
  misc_feature (1)..(599): tr|A0A2P1UFZ1|A0A2P1UFZ1_9CHRO Tryptophan halogenase OS =Microcystis sp. MC19 OX=1967666 GN=B5D77_11420 PE=4 SV =1
MVATNTNEYDVVIMGAGFAGVCQARHLLLNVPNIKIALIDPRPEERTDKDLKIGESMVEIATLFVCKELGLYEYMIENHPPKYALNFHWAKDADKTDTIDDYYHIWANRQFPLGTFQMNRAKFERDLLKMNKKMGASFYQGRVVDVDITPTDEMHTVKVKMIDGNYHELRAKHLVDAAGRKFIIGHKTDNVIVGADNLFGVDTGSAWVRVKNIDRTIFHDGYDPYGATCSHYYATNHWFGHGHWLWMIPTEKDSQEISIGIAQHRSVIANGQINTQEKFYAFLKANHNLLYRLVTSGENVDFHYLPRVSHTSKTMFSQDNWYVVGDAACIFDPFYSLGTSMIAFAIESITEIIRSQLAGEADTEEKRAAYNDFNLTYTRLNNHLIEHHDKQLGHASIMSWRIYAEYMWWFGIQIPLYVGKWHLDTGFISRYVPKVQADIKGYWHHLYEQFNQLVEQNKNIGFMDAHRTDQLIWGYHTLKHFDDFIENTKFEPRRCNVFAGIKATSFYTAVWYAKFLWKGFGFSAFLNPKNLSYLFGHLNGAVQSAITEMVYKYLTRKLSDNSQIEQMRQEFTHYRYRPQLNSWLKEEVKRSPEKIPIIV

SEQ ID NO: 85376 - protein, 515 aa, Catenovulum agarivorans
  misc_feature (1)..(515): tr|W7R035|W7R035_9ALTE Tryptophan halogenase OS=Catenov ulum agarivorans DS-2 OX=1328313 GN=DS2_05385 PE=4 SV=1
MAIVKSITIVGGGSAGWLTAAIIAAAHKHRVETGSLKITLCESPNIPNIGVGEGTWPTMPNTLQQIGISESEFIQRCDVSFKQGSKFVGWGQDDGQGFYYNPFDLPHGFAEGLSVEYWHHNKLTDSLANVFSAQQSICELNKAPKLITHPEYAHALTYGYHLNAGAFVELLKEHSLNKLGVKHILANVEHVELATNGEISQLQLDNGATLSADLFIDCTGFKRLLIAQALQVDFSPLKSCLFADTALATQVDYASTNDPIKSYTQSTAQTAGWVWDIGLPSRRGVGHVFSSDFQTDDAAEQALVKYIQNTGGQPANCNIRKISFTAGHMKKFWHNNCVAVGLSAGFLEPLEASALVLIELSAAKIAEVLPATTEVMHIAENRFNQTFKYHWQTAVDFLKLHYLMSARTDEFWRENRNSETVSPHLQALLNLWKHSVPKMLDFPAKNELFHAASYQFVLYGHNYKSELLFELPEHEKAYVQQIIQHNKQRIAQLTSALPSNRELINNIKKYGLSRA

SEQ ID NO: 85377 - protein, 507 aa, Cellvibrio sp.
  misc_feature (1)..(507): tr|A0A3D4Q1B1|A0A3D4Q1B1_9GAMM Tryptophan 7-halogenase OS=Cellvibrio sp. OX=1965322 GN=DIW64_03865 PE=4 SV=1
MKIKRVAIVGGGTAGWLAANHLGVELSRDPEIEITLIESKDIPIIGVGEGTVPQIKATLKRFGISEIDLLSSCDATFKQGIKFAHWMDAEKHGADNFYYHPFSSPYPSGFDVTNYWLNNKSAFEFSKLSEIYSVAELNRSPKQKSSPPYMGLVDYAYHFNALKFADLLAKNAREKFAVKHVFETISQVTLNADGGIKGFVYATGRAEEFDFFIDCSGFSSLLIGETLGVPFLDKSAQILTDTALAIQEPIAETDEILPYTLATAHKAGWSWDIPLTHRRGVGFVYSSRHMTESEAIGDFSTYLGRDLQNSSLRKIPMTIGYRESFWKKNCVALGLAQGFVEPLEATSILVTDFAASLLARNFPKMIDDIPVVSEYCNKAVRYTWERVIDFVQLHYLISDRRDSEFWIDNTENKVMSDVLRERLALWEIGAPKKTDFFSAFDIFGVENHLFVLYGMDYPTRPSVLGAKEAVRAKELVREVQEKSLQMANSLLSHRAWLDELKKALASR

SEQ ID NO: 85378 - protein, 501 aa, Streptomyces sp.
  misc_feature (1)..(501): tr|A0A0M8RDX3|A0A0M8RDX3_9ACTN Tryptophan halogenase OS =Streptomyces sp. NRRL F-5755 OX=1519475 GN=ADK86_32515 PE=4 SV=1
MPASSEEFDAVVVGGGPGGSTAAALIAMAGHRVLLLERERFPRYQIGESLLPSTIHGIGRLLGVEEELHEAGFMRKRGGTFRWGSAPETWTFSFADAPGLGETGGYAYQVERMRFDALLLKHAGRVGADVREECAVRAVHHHDGRVTGLTYRSPEGTEAEVRARYVIDASGNTGRLHTAAGGRRVYSPFFRNIAVFGYFEGGRRLPPPNQGNILCAAFDTGWFWYIPLTDRLTSVGAVVNREHADQVQGNPEQALAKLVDQCALVRDHLADARRVTEGTYGRVRVRKDYSYCNTRFWAPGVALVGDAACFIDPVFSSGVHLATYSAMLTARSVNSVLGAGMDEGRAFGEFEARYRREYTVFHDFLAAFYSMQAPKDTYFWQAHKVTGGQAGALASFINLVGGLASGDRALIDADQLTGRLATASRVLDETADGYQADPAGDPWDESPMLAETFAQSDALAGQGVARGDFAEKTPQFPGGLVATADGMHWAEPAGEPPGGTP

SEQ ID NO: 85379 - protein, 195 aa, Rhizobium fredii
  misc_feature (1)..(195): tr|A0A0B7MT05|A0A0B7MT05_RHIFH Partial tryptophan halog enase OS=Rhizobium fredii (strain HH103) OX=1117943 GN= SFHH103_psfHH103d_313 PE=4 SV=1
MVHGMRLDDRGHVNAFQLGGEELEVDFAVDASGFARLGLGKVFNTRWCSFANVLPTDRAIIVELEPRASSPVTRATAMKAGWMWEAPLNRSISAGYAFSSRYADAAMAIAEVENHYGFRVEAKHELSLDQGYFSTAWVNNFVALGTASGFVEPLEAALAAHTFEALRNLERILANGSGIVPARAIEGYNSANARC

SEQ ID NO: 85380 - protein, 500 aa, Cellvibrio sp.
  misc_feature (1)..(500): tr|A0A3D4PY96|A0A3D4PY96_9GAMM Tryptophan halogenase OS =Cellvibrio sp. OX=1965322 GN=DIW64_04730 PE=4 SV=1
MLNATINKIVIAGGGTSGWMLAAALSKLQGKDKYDITLIESEVIGSIGVGEATIPNIQLYTGFLGIDEGDFLQKTQGTYKLGIEFIDWTRKGESYFHPFGGIGAPLNGIDFIHYWLRNREEGGSSDFGLFNAETLAARENKCSRMEGNPRPDLPSVNCAYHFDAALVAKYLRTYAETRGVTRVEGEIVAVEQNPTTGHVESLVLKSGEKIAGHLFLDCTGFSSLLIGKTLGSEFIDWSHWLPCDSAVVMPCESDVGPLKPYTCSTAKEYGWQWRIPLQNRIGNGYVYASQYISDELATQSLVTSIEGKPLGEPRIIKFKSGYRKKIWDKNVIACGLSGGFLEPLESTAIYLVQSTITKLLAHLPKNNFDPYVITTFNQKIHAEYQNIRDFLIAHYKLTERNDTEFWRHCQDMELPESLKERLGLFKASASCNVQHAELFKEHSWFAVLIGQGLMPDSYHPLADMLSKGEHKNFLSNIHSAVSERVTLLDDHRDYLNKYLG

SEQ ID NO: 85381 - protein, 504 aa, Cellvibrio sp.
  misc_feature (1)..(504): tr|A0A3D4Q2V4|A0A3D4Q2V4_9GAMM Tryptophan halogenase OS =Cellvibrio sp. OX=1965322 GN=DIW64_14620 PE=4 SV=1
MPAEAIRKVVIVGGGTAGWMCAAALSRVLDLQQVAVTLVESDDIRTIGVGEATIPTLRDFNRLLGIDEADFVRKTQGTFKLGIQFDGWGQLDESYIHPFGSFGLDRPEVRFHQMWLKLRALEEGVGDISDYNLSLVAARLNRFNPPGNKGLLSTLRHAYHLDANLYGLYLREYAEARGVNRLQGTITGVTQGDDGFVNSVVLSDGRHLDGELFIDCSGFRALLIEDTLKAGYVDWSQWLPCDRAIAVPSESTGPLRPYTCAMADEAGWRWRIPLQHRMGNGYVYSSAYLDDEAAKQRLLATLEGQPLAEPRQLKFKAGHRRKLWEKNVVAIGLSGGFLEPLESTSIHLIQMGIARLLLLFPDKDFKPALREEFNRLSLLEYEQIRDFIILHYKATRRDDSAFWRYCRDMKIPDSLQQKFDLFRAGGRIIRFKDELFAENSWLAVMLGQGIIPEGYDPVADSIPVDEMRTAILTFKAAVLKTAQSLPEHAAYIASNCQGEVAKFK

SEQ ID NO: 85382 - protein, 508 aa, Pseudoalteromonas sp.
  misc_feature (1)..(508): tr|G7FWP8|G7FWP8_9GAMM Uncharacterized protein OS=Pseud oalteromonas sp. BSi20495 OX=386429 GN=P20495_0048 PE=4 SV=1
MNKTIKTIAVIGGGTAGWLSAAIIASYHQGKNGDGLKVMLVESSDIPTIGVGEGTWPTMKNTLQQIGLREVDVFKACNATFKQGGKFVNWTHGNNDFYYHPFTVPLGYGRIDLAPYLDNVEDFAQQTNFQHDICEASLAPRGIAQGEYQGNCNYAYHLDAGAFAEMLKQHCKSKLGVEHIIGTVDQVKLDDDGAINELTLKDQTRTISADLFIDCTGFSSLLLGQALNVPFKKMDHVLFNDSALAMQVPYDENDDSLASHTIATAQNAGWIWDIGLTHRRGVGHVYSSKFLSDDEAEQNLRNYLGDAANCLTARKISFESGYREKFWHKNCVAIGMSAGFVEPLEATAIMLVEISARFVAEHMPADTQVMPIVAKRFNEQMDYRWQRIIDFLKLHYMLTKRPEPYWQAHVQPDTIPQTLQEDLLLWGSRGPLIQDFHGALELFPAASYQYVLYGMGFKPDFTKQAYLYSQHVQAKQIIERNSQLTQQMLQTLPPHRAFIEQWLAANPV

SEQ ID NO: 85383 - protein, 495 aa, Frankia casuarinae
  misc_feature (1)..(495): tr|Q2JA60|Q2JA60_FRACC Tryptophan halogenase OS=Frankia casuarinae (strain DSM 45818 / CECT 9043 / CcI3) OX=10 6370 GN=Francci3_2465 PE=4 SV=1
MTDSAEFDVVVVGGGPAGSTLAALVAMQGHRVLVLEKEHFPRYQIGESLLPSTIHGVCRLTGAADELAKAGFPLKRGGTFRWGATPEPWTFAFSVSSRMAGPTSFAYQVERSKFDEILLRNARRVGAEVHEGCSATDVIEDGDRVVGIRYTDDGGNRREARASFVVDATGNKSRIYHRVGGTRQYSEFFRSLALFGYFEGGRRMPEPNRNNILCVAFDSGWFWYIPLSDTLTSVGAVVRSEMAEKVQGDSEQAMKALIEECPMISDYLAPARRVTTGQYGQLRVRKDYSYHQTTFWRPGMVLVGDAACFVDPVFSSGVHLATYSALLAARSINSVLAEIVDEKTAMQEFEARYRRDYGVFYEFLVSFYEMHHSEDSYFWQAKKVTGNSQPELEAFVELIGGVSSGESALTDADALALRLQANTADFTTAVDALVANNSESMVPFMKSQVIRGVMHEGSQMQMRALLGEDAEPETPLFPGGLVSSADGMFWLPTDA

SEQ ID NO: 85384 - protein, 501 aa, Sphingomonas sp.
  misc_feature (1)..(501): tr|A0A430ELN2|A0A430ELN2_9SPHN Tryptophan 7-halogenase OS=Sphingomonas sp. ABOLE OX=1985878 GN=CA234_06225 PE= 4 SV=1
MSAPLSHVAIIGGGTAGWMAAAALGRVLDTRAIAITLVESEAIGTVGVGEATIPPIQAFNALLGIDEGEFLRATKGTAKLGIEFVDWRAKGTRYFHPFGIHGIDFGGIPFEALWQRARLAGVAAPLEAYSICAEAARLGRFQRPATSGKNPLTHLGYAYHFDAALYAGFLREKAEQWGVRRQEGRIVTVERGEDGAIAGVVLEDGTRIAADFYIDCSGFRSLLLGEALGVAFEDWAQWLPNDRAVAVPCVLGPEGRSPFTRSTARGAGWQWRIPLQHRVGNGLVYASAHCSDAEAEAQLLGSLEGTPLAEPRLLRFQAGRRARFWEKNCVALGLASGFLEPLESTSIHLVQAGIARLLEMLPVGGGTPADIRRYNRLMATEFETIRDFLILHFHATARDDTDYWRQLRSMELPDTLAERIAIYRASGRLYREADELFSKTSWLAVLHGQGIDPSGYDPIADGMPRDEAAARLARIAEVTALAAARMPTHEAFLQESGALQR

SEQ ID NO: 85385 - protein, 509 aa, Caulobacterales bacterium
  misc_feature (1)..(509): tr|A0A1F8IIH0|A0A1F8IIH0_9PROT Tryptophan halogenase OS =Caulobacterales bacterium RIFOXYB1_FULL_67_16 OX=17975 88 GN=A2352_06480 PE=4 SV=1
MRQLKSILIVGGGSAGWMAAALFSKLFKGLYDITLVESEAIGTVGVGEATIPAIKKFNDLIGLDENDFMRRTQASFKLGIQFVDWDRLGSSYIHGFGVIGRDLEWLRCHQYWLKMRAAGKASDFAAYSINTAAALENRFMRADPARPTSPLGHIAHAFHFDAGLYARYLRGMAEAAGVRRREGKIASVQLRPEDGFVQSVTLETGDVLSADLFVDCSGFRGLIIEQAMKTGYEDWSHWLPCDRAMAVPCARTEPFTPCTRSTARPAGWQWRIPLQHRTGNGHVYSSRYMDDDEAERILVSNLDGAQMAEPNRIRFVAGKRRQIWNRNCVAAGLASGFLEPLESTSLHLIQSVLIRLVRMMPDAGFDPATIAEFNRQTDFEYERIRDFIILHYKATERDDTPFWRYCRDMDVPATLERKIDLFRANGRIFREDDELFAEESWIQVLLGQGIIPAGYDPLVDVTPEPDVERYLADVETVIRKCVAVMPSHADYVDRVCSATRGVDAAVRAS

SEQ ID NO: 85386 - protein, 476 aa, Sphingomonas sp.
  misc_feature (1)..(476): tr|A0A430EFI8|A0A430EFI8_9SPHN Tryptophan 7-halogenase OS=Sphingomonas sp. ABOLE OX=1985878 GN=CA234_17260 PE= 4 SV=1
MSLGQVLVVGGGLTGWSTAAALKRRVPTLSVSILPLAPPADALADRIATTLPSILGFHADLGIGLGDGVMRTGSIYRLGTLYSDWVDGLPDYVHAHGPHGEPVDGVSFHHLWARAARDDVAAPFDAFSPAAAMAREGRFVLPAEDGILGAHGFGLALDLRRYLGMLQAFARHVGVRTLDGALAGVERAADGSVAGVVLTDGIRVTADLYCDCSGPAARVHGVTGSARESWQRWLPCDRLVLEHAAPADDPAPMACVTATAQGWRWTSATQQGAVYSAAHSQRDDAAIRFEAGAALEPWRHNVVAIGDAAVTIEPLEWSNLHLAHSAIDRLITMLPAGAPHPLEAAEYNRQALAEARRVRDFVLLHYVTARRSGPFWHDVASAELPDSLAHTLRLFRERGRLPFYEEETFDRDGWLSVLFGQGVLPRRIDALADAVPHARAADAMARYRDRIAQAVRPLPTLAAFRAAQSRHLHERA

SEQ ID NO: 85387 - protein, 510 aa, Sphingomonas glacialis
  misc_feature (1)..(510): tr|A0A502FJ08|A0A502FJ08_9SPHN Tryptophan 7-halogenase OS=Sphingomonas glacialis OX=658225 GN=EAH76_18675 PE=4 SV=1
MSEAGSGRITKVVIVGGGTAGWMTAAALSRLVAGGVSVTLVESEEIGTVGVGEATIPSLLDFNRMLGIDEDAFVRATSATFKLGIEFRDWTRLGDAYLHPFGTHGRDVEGVSFHQLWLRQRASGAGDPGSIGDYCLSAVAARRGRFNRPSANPQSVLSTLSYAFHFDAALYAAFLRNLAEQDGVVRVEGRVVAVDKDPDAGSITAVQLADGRSIDGELFIDCSGFRSLLLGDALRVPFTSWQHWLPCDRAWAVPSARQGPLTPYTRATADTAGWRWRIPLQHRVGNGYVYSSAHIDDDAARDALLAGLEGTALGEPRQLRFVAGRRDRLWEKNCIAIGLSGGFLEPLESTSIHLIQSGITRLMTLFPDTGFSTVETAEYNRVMLREYEQVRDFIILHYHATQRSDSPFWEHCRTMALPESLQSKLELWSGKARVFREQGELFTPDSWIAVLLGQGIDPQSFDPLAAVLPAGETARFLAHVRDMIDKTAAAMPTHEQFIAQHCAAPMRQSA

SEQ ID NO: 85388 - protein, 508 aa, Proteobacteria bacterium
  misc_feature (1)..(508): tr|A0A1W9JZH5|A0A1W9JZH5_9PROT Tryptophan halogenase OS =Proteobacteria bacterium ST_bin13 OX=1978761 GN=BVN33_ 03295 PE=4 SV=1
MARIERLVILGGGTAGWMTAAALAKTLGRTVQIDLLESDAIGTIGVGEATIPTIHWFNELIGLDEADFVRATKASFKLGIEFVDWARPGHRYFHPFGRYGVDLGPVPFHQCWLKAGSDGATTPLADYSLATALAGSNRFARPVDDPRSILSTLGYAYHFDASLYAAYLRKLAEAQGVTRHEGRLVSVERDPETGFVTALTSDRGDRLAGDLFVDCSGFRALLIGDELGASFEDWSHWLPCDRAIAVPCARVAETTPYTRSTLRDAGWQWRIPLQHRTGNGYVYASGFLSDDEATATLLANLDGEPLADPRLIRFTAGFRRESWTKNIVAIGLSSGFLEPLESTSIHLIQSGIAKLIALFPNRDCDPALARQFNALFGRDMDAIKDFLVLHYHATQGHQAPLWQHTRHMTLPDSLVEKEEQYRRTGRLMLTSDELFREASWLAVLNGQGIVAEDHSPIADTLDAVTNRRQLDQIAALIARAAPTLPRHDDAIATLIGQAAPRAAVAAVP

SEQ ID NO: 85389 - protein, 516 aa, Catenovulum agarivorans
  misc_feature (1)..(516): tr|W7QWL3|W7QWL3_9ALTE Tryptophan halogenase OS=Catenov ulum agarivorans DS-2 OX=1328313 GN=DS2_11798 PE=4 SV=1
MNSPISSVVIVGGGNAGWLTAAILASKLKSKCAESVSITLIESPNIKTIGVGEGTWPSMRRTLKSIGISESDFIVSCNATFKQGAKFVGWVTGAKNDSYYHPLMLADNAEQTDVLHAWHQHFEHIDFSKAFCVQDYTCDNGLAPKSITSPEYAAVTNYAYHLDAGLFTNFLKKHCIEKLGVKFVADDVIDVNSSINGAIDKVLTRNCGYITGDIFIDCTGFNRLLINKHYQIPFQSCKHVLAADSAIACQVPYPSTESPITSHTISTAQTAGWIWDIGLQNRRGTGHVFASDYLSDYDAEAQLTKYIKNTGGDVEKCTFKTIRFEPGHLSKFWHKNCLAIGLSAGFIEPLEASALLLIEMSANTLAEHFPANQAAMNLVADKFNQTFLYRWQRIIDFLKLHYILNQRDGQAFWQDIKQPQSIPDSLQANLNLWQHQYPCMHDFEQAIEVFPIDSYLYVLYGMGFKTQYPFKVSQLQSDLLSRQYAEIKSNFSQLERVLEPNRHLLEKIKRYGLQKI

SEQ ID NO: 85390 - protein, 520 aa, Amphiplicatus metriothermophilus
  misc_feature (1)..(520): tr|A0A239PVE8|A0A239PVE8_9PROT Tryptophan halogenase OS =Amphiplicatus metriothermophilus OX=1519374 GN=SAMN062 97382_2182 PE=4 SV=1
MIGPAPEDRKKGRTMSPDDRLIRRIVIAGGGAAGWMTAAALANALQGSARITLVESEDIGIVGVGEATIPPIKVFNQSLKIDEADFIAATRGSFKLGIEFVNWTRLGHRYFHPFGQYGADFDVVPLHQYWLKLRAQGDETPLQEYSLAWAAAKRARFERPIPDRRRIQSTFDYAYHFDAALYARYLRGYAEARGVERLEGRIARVALRGEDGFVESLILEDGRTAEGELFIDCTGFRGLLIEDALKTGYEDWTHWLPCDRAVAVPCRHEDPDRLDPYTRATAREAGWQWRIPLQHRVGNGYVYSSAHIGDDEAAAVLSSNLEGEPLGEPRLLRFTTGRRKKFWNRNCVAIGLAAGFMEPLESTSIHLIQSGITRLLALFPDRAFHPIAAAEYDRATALEYERIRDFLILHYHATSRRDAPLWRYCASMSIPETLQYKLDHFRSYGRPVSPGFELFQNPSWLAVLIGQEATPARYDPLVDMRAKVDAAGIMAGLRRVIDEAAEAMPTHKAFIARLVPAQAQ

SEQ ID NO: 85391 - protein, 520 aa, Paucibacter aquatile
  misc_feature (1)..(520): tr|A0A2N8KXV7|A0A2N8KXV7_9BURK Tryptophan halogenase OS =Paucibacter aquatile OX=2070761 GN=C1O66_12605 PE=4 SV =1
MSESSSLDKDGSSRSPSPTHGPIRRVVVVGGGSAGWMAAATLATYLGRQASVRLIESEEIGIVGVGEASVPHIRMFNGQMLGIDEAEFVRRTQGTVKLGIEFRDWARIGDRYTHGFGVIGRSRGPLPFHQFWLKLFLAGRAGPIGDYSLQTVMAPQGKFIPGDPSAAPDSPLADIAYAYHFDASLYARFLREISERRGVQRIEGKIVRALQRTDDGFIEAVQLESGERVEGDLFIDCSGFRGLLIEETLKTGYTDWSHWLPCDRALAVPCEGVSPITPYTRATANTAGWQWRIPLQHRIGNGYVFSSQHLSEDQAAATLMANLDGKPLVDPRLLRFTTGMRKQVWNKNVIALGLASGFLEPLESTSIYLVQSGLSRLLSLFPGREFNPQLAERFNRETAFEYERVRDFLILHYHATERDDSDFWSDCRTMSVPDSLSEAMDLFRADGRYFRHGEDFFALPSWVQVMLGQRILPRSYHPIVDDMPEDRLLAFVEGTRHILSDAVAAMPTHQQWIERYWRAA

SEQ ID NO: 85392 - protein, 517 aa, Rubrivivax sp.
  misc_feature (1)..(517): tr|A0A3S2TJL5|A0A3S2TJL5_9BURK Tryptophan 7-halogenase OS=Rubrivivax sp. ICH-3 OX=2499835 GN=ENE75_22475 PE=4 SV=1
MNSTVQQVVVVGGGSAGWLTACLLAAEHGHGASGRLQVTLLESPDVGPIGVGEGTWPTMRDTLRRIGVSETTLVRECDASFKQGSRFNGWVDGGPTDVYHHPFVLPQGHTEANLVAAWLERHAKVPFADLVSFQPHLCAQGKAPKQVTTPEFAAVANYGYHFDAGKFGQMLQRHGVERLGVRHVLDHVDAVLSHDNGDIAALQTRAHGAVAGDLFVDCTGMAALLLGRHFGVPLVPQHEVLFNDRALAVQVPYVRDDAPIASQTLATAQAHGWIWDIGLPTRRGVGHVYSSAHTTDDAVEQALRDYITATGGPAEIATPRKLQFQPGYRQEFWHRNCVAVGLSAGFVEPLEASALALAELSAAMISADLPATRETMAIVARRFNDSFRYRWERVIDFLKLHYALTRRRDTAYWRDHADPASMPAQLRDLLALWQHRPPSRHDFPRAEELFPSASYQYVLYGMGFRPVPGAYTQGADDGSRADGFFREAAALTRKMLPALPSNRELIAHVRQHGLSRI

SEQ ID NO: 85393 - protein, 558 aa, Planctomycetes bacterium
  misc_feature (1)..(558): tr|A0A5C6AXG7|A0A5C6AXG7_9BACT Flavin-dependent tryptop han halogenase RebH OS=Planctomycetes bacterium Pla100 OX=2528006 GN=rebH PE=4 SV=1
MFHGAFQVRFRNSFTSVFHSDAAFCYFRNMTPPIPPETHVFFDRAGDCHIGIVGGGTAGWMSAATLKRRLGCRVTVVESSQIPSIGVGEATIPAMIDWLHNMGIDEDEFMRRTGATFKLGIRFDDWVEPQHRYWHPFGNCGGTIDGLDLVHHWNHAKQAGWIAPSVAYTDFSLQTRMCEQARGPRDQTGRCVLDNYAYHLDAGRLAVFLREIALAEGVEHRVGDVVGARCDRDGNLNEVFVENQASLVADLYIDCSGFASVLIDRAMHSGWTDWSSQLLCDRAVVCRKRPDFDSTSPLRPYTISTGMNAGWSWQIPLQENTGCGYVYSSAHIGDDDARQELSRLIGVDEDDTDFRTLGMRVGMRPNGWVGNCVAIGLSSGFIEPLESTGIFLVQRALDELVECGRAELFNARMNEVYCQTRDFVLMHYVVSRRRDTAFWRDAATVELPSSLARLLEVYQREGHVLLPDHAPTFAEANHHFILTPAGITPGRRFANCDMSQPEMREVTTEILESVVQQHHQLVAKFASHRRCLELITEPPPPLPPQGLSPFLAVEILCS

SEQ ID NO: 85394 - protein, 538 aa, Burkholderia pseudomallei; identical to SEQ ID NO: 82926
  misc_feature (1)..(538): tr|A3P8V3|A3P8V3_BURP0 Tryptophan halogenase PrnA OS=Bu rkholderia pseudomallei (strain 1106a) OX=357348 GN=BUR PS1106A_A2733 PE=4 SV=1

SEQ ID NO: 85395 - protein, 536 aa, Serratia proteamaculans
  misc_feature (1)..(536): tr|A0A4Z0E142|A0A4Z0E142_9GAMM Tryptophan 7-halogenase OS=Serratia proteamaculans OX=28151 GN=E5C26_01570 PE=4 SV=1
MSKPIKNIVIVGGGTAGWMSASYLVRALQQQANITLIESATIPRIGVGEATIPSLQKVFFDYLGIPEQEWMPQVNGAFKAGIKFVNWRTSPDHSRNDYFYHLFGNVPSCDGVPLTHYWLRKREQGFQQSMAYACYPQPGALDGNLAPCLHDGTRQMSHAWHFDAHLVADFLKRWAVDRGVNRVVDEVVEVNLNEHGFISSLFTKEGRKLEADLFIDCSGMRGLLINQALKEPFIDMSDYLLCDSAVATAVPNDDAQAGVEPYTSSIAMNSGWTWKIPMLGRFGSGYVFSSKFTSRDQATTDFLNLWGLSDNQPLNQIKFRVGRNKRSWVNNCVSIGLASCFLEPLESTGIYFIYAALYQLVKHFPDTSFDPRLADAFNAEITYMFDDCRDFVQAHYFTSSREDTPFWLANRHDLRLSDSIKEKVERYKAGLPLTTTSFDDSTYYETFDFEFKNFWLNGNYYCIFAGLGMLPDRSLPLLQLRPESIEKAEVMFARIQREAERLRASLPTNYDYLRSLREGEAGLSRSGPTPVSPESR

SEQ ID NO: 85396 - protein, 510 aa, Sphingomonas sp.
  misc_feature (1)..(510): tr|A0A4R2T2F6|A0A4R2T2F6_9SPHN Tryptophan halogenase OS =Sphingomonas sp. PP-F2F-A104-K0414 OX=2135661 GN=C8J46 _107144 PE=4 SV=1
MIEGRGQHIAILGGGTAGWMTACLVAHRWSDRGVRVTLVESPEIGIVGVGEGSTPQLKHFFDTLGIAEAEWMPACDATYKLGIGFEGWSDRAGYERYFHPFPTALDGHTAPQFFYNARARRTGRDVDAHPDQFLLPARLAAVYCAPQPAENFPFEVSYGYHFDAYKVGAFLAGHATETLGVVHLQRRIASVERALTGEITALIDTDGGRIAGDVFVDASGFRNTIFSALDVPFVSYADTLFNDRAVVMPTAYTTGAPIPSQTRATALSAGWAWHIPLTSRNGNGYVYSSRHLVEAQAEAELRAHIGNQAGEARHLRMRVGRVRDSWSHNALAVGLAQGFLEPLEATALHLVIATVEAFLGAIDEGGATDAVRAAFNTRIAARYDGVRDYIVAHYRLNQRHADPTGYWAEARGVEALSDDLKMLMSTWFTGADMVAAIDRAGLGRYYSAISWHCLFAGYGTFPDAARLVPPGADIDSIDLPKIDDFLTRCASNFGSHASRLRAAADHKDHV

SEQ ID NO: 85397 - protein, 507 aa, Gammaproteobacteria bacterium
  misc_feature (1)..(507): tr|A0A1J5N217|A0A1J5N217_9GAMM Uncharacterized protein OS=Gammaproteobacteria bacterium MedPE OX=1860093 GN=BM 565_07215 PE=4 SV=1
MPQKAIKTLVIVGGGSAGWMSASFLNHIFNLKEKQIDIKLIESSEVETIGVGEATIHSIRFFLSTIGISEREFMQKTQAIFKHGILFKDWSGQEKDEYYHPFEHPKVNDGIDVVRHWVNLNSNTEKSSRFDFSVSAQSLCASQNKSPKSQGNKDFEGYFPYGYHLDAAKFAHFLRDFSLTKGVKRIEGHVQEVILGTDGDIQRLILKNGLQIDGDFFIDCTGFSSVLMKAMGNKEWVDYSDSLLCDRAVTCQLEHNKENQEHRPYTIATAQKSGWIWDIDLQSRRGMGYVYSSSFCSTEQAEIDLSVYANTAREKLSFKHLQMKTGRMEKIWFKNCLAIGLSAGFIEPLESTGIYFIDMGIRFFGDYITSGNVNTLLIDKYNTVMGQLMDQSKDFISLHYTLSKRNDSQFWRAYQHDVPISETLSANLTLWKHKIPTAIDFSAQITQFTSANYTYILYGMKYFPEPAVTSNLFTSEDRSMKNIEYVKSRSNQMNNKLPTMSQFLKNI

SEQ ID NO: 85398 - protein, 524 aa, Streptomyces sp.
  misc_feature (1)..(524): tr|A0A2C8XJ83|A0A2C8XJ83_9ACTN Tryptophan halogenase OS =Streptomyces sp. OK228 OX=1882786 GN=SAMN05442782_9289 PE=4 SV=1
MANNVVIVGGGTAGWMTATYLRAAFGDDVGITLVESKNVPTIGVGEATFSTVRHFFSYLGLAEHEWMPECHASYKLAIRFENWRAEGHHFYHPFERPRNVQGFSLADWWLHTRPGEQFDRDTSLLAALCEAMSSPRHLDGAMFTSGFGAADESAKAAEDGRETQFPYAYHFDAALLARFLTRFGTERGVRHVLDDVLDVVLDDHGDISHVVTREHGSLTGDLFIDCTGFRGMLINKALGVPFESFRESLPNDSAVALRVPVNGEKAGMRPCTTATAQDAGWIWTIPLFGRIGTGYVYAGDYCTPEEAERTLREFVGPAADGLAANHIKMRIGRCAQSWVRNCVAIGLSSGFVEPLESTGIFFIHNAVEQLVKHFPGGRDDEHRRRTYNRQVAAVMDGVREFLVLHYYAAARDDNAYWRDAKKRPLPDGLAERIEAWSHRLPDAESVFPRFHGFEPYSYTAMLLGLGGLPVRPPAALSRMDDTAARREFALIRDQAQALAQRLPSQYAYLAHQQNASTGRPASAA

SEQ ID NO: 85399 - protein, 360 aa, Sulfopaludibacter sp.
  misc_feature (1)..(360): tr|A0A2U3LIR6|A0A2U3LIR6_9BACT Tryptophan halogenase OS =Candidatus Sulfopaludibacter sp. SbA4 OX=2043165 GN=SB A4_470011 PE=4 SV=1
MRYDVAILGGGPAGAAAGLSFKRLRPALRIAIIEASRDNLWRAGETLPPGSREILQSLGCWEAFCGEGFLESFGTRAVWGGLQPYENEFLFSARGHGWRLDRRRFDAMLARCAQAAGVDLFAGTRLVASRRTDAGWHLRLDGGPGEELDTAFVVDATGRAASFAVEQGARRLAGDGLMAAWAVFPRPRTADLCTMVEARPEGWWYSSEIPGGQVVVAWMSDADLIRSHGLHRLGRWFAHLGQSSLTAARVVSADPPGTLRVCATQSQKLSQATGAGWIAAGDAASTFDPLSSQGILKALRSGKLASFAALDCLDGRTQSLDRYQRLVDGEYQSYCETKASFYRQEQRWPQSPFWRRRQEP

SEQ ID NO: 85400 - protein, 447 aa, Streptomyces subrutilus
  misc_feature (1)..(447): tr|A0A1E5Q285|A0A1E5Q285_9ACTN Tryptophan halogenase OS =Streptomyces subrutilus OX=36818 GN=BGK67_24695 PE=4 S V=1
MEKHTADVVVIGGGPAGAVSALVLAQQGHSVVLLEKDEFPRFHIGESLLPYMMGLFDQIGLRKTVEAQGYVPKFGGEFIDPTEKKFFEGVFRADFTKQGDGRHPSAFQVERAKFDKMLTEQAAEAGAQVLFGANVTELLMDGDRMTGVRYQREGRDHEVRSAYVIDASGRAGRIANRFGLRKTLEKLRMVAVFRHYEGLDESHNPGVEGDIQVGAHDDGWVWAIPLSKDAISVGTVMPRDVLRATTQEKAFEEFVARIPRITARLTGTRPTTDLKVETDYCYHSDTVTGPGWLMVGDAGCFGDPMFSGGVLVATTTAFRAAETVGAALADPTAEDHLFEKYSNFFKTGYDTYIRLIHAYYDGELVSVAADAARSTDRDTLEKYLVRLIGGDFWSEHNSVAQEMRRRQEWDTFEPFKRVFGCPVYPELDEADRKERSEARVRRATAGK

SEQ ID NO: 85401 - protein, 507 aa, Paucibacter aquatile
  misc_feature (1)..(507): tr|A0A2N8KVX8|A0A2N8KVX8_9BURK Tryptophan halogenase OS =Paucibacter aquatile OX=2070761 GN=C1O66_08825 PE=4 SV =1
MSVQTLYSDGARPVRRVVIAGGGTAGWMVAALMGKLMGKLLDIRLVESEEIGTVGVGEATIPALHTYHELLGLNEAEFMAATQATFKLGIKFEGWKAPGEDYIHSFGLTGKDHWSAGFQHFWLKGRERGLAAPYGDYCLELRAAEEQRFAHLPNNGMNYAYHLDATRYARFLRGLAEAHGVRRIEGKIAAVLREQPGEGDLTALQMEDGSRIEGDLFVDCTGFRALLLGQTLGVGYEDWSHWLPCDRAVAVQTASVREAPPYTRSIAHPFGWQWRIPLQHRVGNGLVYSSRELSDADAPDMLRRHVEGELITEPRLLRFQPGQRHEVWHRNCVAMGLASGFIEPLESTSIHLVQRAAIRLMRLFPAGGIREVDVREFNQQTTQDLQHIRDFIILHYHVTERDDSALWRHVRTMAVPETLRHRIELFRETARVFRPLDELFAENSWIQVMMGQGISPQHHHPVADLMGDAELSQFLNNIRSQVSRQLAGLPPHQAYVERLCAPYRAAA

SEQ ID NO: 85402 - protein, 508 aa, Novosphingobium sediminis
  misc_feature (1)..(508): tr|A0A512AMT6|A0A512AMT6_9SPHN Tryptophan halogenase OS =Novosphingobium sediminis OX=707214 GN=NSE01_28520 PE= 4 SV=1
MAENGAIRSVCIVGGGSAGWLTAGLIAARHGRDLKVTLVESVRRGTIGVGEGTWPTMRNTLRKIGLSETDFMRATHASFKQGAKFARWRTGAADDFYYHPLVLPEGFPDLDLAPYWNADPNQSFSDAVCFQEALCEASLAPKLMTSPDYVGVANYAYHLDAVRLGELLAEHCTGKLGVHHIDDDIIDVRQSETGDVSAVIGERHGAIEADLFVDCTGFASRLLGEALGVPFIDRSDVLFVDRALAVQLPVEEDSPIASHTISTAQRHGWIWDIGLPTRRGIGYVWSSRHARNERIEEELAAYVGPDFARLSPREITIRSGHRAQFWKNNVVAVGLAAGFLEPLEASALVLIELSADYIATAMPANRAAMDFVARRFNTMTRYRWDRIIEFLKLHYVLSERKDSAFWRDNRDPATIPQDLQDQLELWRDSPPGEHDFSSAHEMFPAASYQYVLYGMGFRTRARPGRLANADAAQDAFDRTAALKRKLTATMPTNRELLGRLAQYRFPPL

SEQ ID NO: 85403 - protein, 516 aa, Novosphingobium sediminis
  misc_feature (1)..(516): tr|A0A512AFA7|A0A512AFA7_9SPHN Tryptophan halogenase OS =Novosphingobium sediminis OX=707214 GN=NSE01_02130 PE= 4 SV=1
MSSTDTSGSASATGPVRIVVAGGGTAGWMTAAAFGHFLDSGFTVTLVESEEIGTVGVGEATIPQIRMFNQALGIDEDAFIRATQATFKLAIEFVGWGAPGERYMHAFGDVGRDVGLCAFHHYWSRARRLGIAGPAGDYAINDVAAHAGRMHRGGPLTSRNIPEMPHAFHFDAGLYAAFLRQFGEARGVSRREGKIQEVRQNPLTGDITSLVLASGEEIAGDLFIDCTGFRGLLIGGTMGSGYVDWTKWLPCDRALAVPSGRVEDFTPYTRATAHDAGWQWRIPLQHRTGNGRVYCSSFISDDQAAESLLAHLDAPALADPRPIRFTTGRRAEAWRGNVIAVGLSSGFLEPLESTSIHLIQSAISRILKFLPGKDQTQAARDEYNRQFTSEMERIRDFIVLHYHVNQRPEPFWQAVRDMALPDSLSERIELFRANGHIFRHGDELFSEVGWFQVMAGQGIVPERSHALAETIDVADLKSYLETLNALYRREVERYLSHAEFIARNCAAPPLKLDAVA

SEQ ID NO: 85404 - protein, 495 aa, Gammaproteobacteria bacterium
  misc_feature (1)..(495): tr|A0A1J5MMU4|A0A1J5MMU4_9GAMM Tryptophan halogenase OS =Gammaproteobacteria bacterium MedPE OX=1860093 GN=BM56 5_07105 PE=4 SV=1
MNNSKIKNITIVGGGTAGWISAALLVKVLGKTHNIKLIESQAIGTIGVGEATIPPIIHLNNALGIDEKTFLSATKGTMKLGIEFENWSSENSKYMHAFGGIGKNLPFCDFHHAFLRAKEQGSEYEFGDFSLNYQAAKQHKFDKLPHITGTNLPGIVYAYHFDASLYAKLLSEYSQARGVERIEGKVVDVIQNQQSGNIEQLVLEDGQHIDGDLFIDCSGLRGLLIEQTLNTGYEDWRHWLPCDSAVALPCESPSPIAPYTRSVAKEAGWCWHIPLQHRMGNGMVYSSKFMTDEQALKTLSDSLPGKPLTEPNFIKFRTGRRLKQWNKNVVAIGLSSGFLEPLESTSIHLIQMGIIRLLKCFPHHGIKACEVDEYNRQSTVEIENIRDFIILHYKATKRQDSAFWQQCQRMDIPETLARKIALFKESGKVFREQDDVFTEVAWQQVLLGQEVLPQDTHPMASTLTDEQLTDLMDNLNTLIQRSVESMPQHEAFLNN

SEQ ID NO: 85405 - protein, 502 aa, Sphingomonas sp.
  misc_feature (1)..(502): tr|A0A4R2TT79|A0A4R2TT79_9SPHN Tryptophan halogenase OS =Sphingomonas sp. PP-F2F-A104-K0414 OX=2135661 GN=C8J46 _105468 PE=4 SV=1
MKRVQRLVILGGGTAGWMTAAALSATFGDLVTISILESDAIGTVGVGEATIPTIHWFNQLIGLDEAAFVAATKASFKLGIEFVDWARPGARYFHPFGRYGVDLGPVPFHQHWLRAKGDGLDRPLSTYSLAAQLAAAGRFAKPVDDPRSILSTLGYAYHFDASLYARHLRQLAEKRGVVRHEGLLRDIERDPDTGFVTALTSDRGERLKGDLFIDCSGFRALLIGETMGVQFEDWSHWLPCDRAVAVPCARIAATTPFTRSTLLPAGWQWRIPLQHRTGNGYVYASSFVSDDEAVATLLSNLDGEPLADPRMLRFTAGFRREAWRGNVVAIGLASGFLEPLESTSIHLIQSGIAKLITLFPDADCDPALARQFNTLFARDMDGIRDFLILHYHATQGHDAPLWQHTRHMTPPPTLVDKMAQYTRAGRLMLSPDELFREASWLAVLEGQGVGALSHAPLADTLDAGINRRQLDQIETVIARAAPTLPLHDAAIAALVSPRVAAR

SEQ ID NO: 85406 - protein, 505 aa, Xanthomonas sp.
  misc_feature (1)..(505): tr|A0A0Q5J582|A0A0Q5J582_9XANT Tryptophan halogenase OS =Xanthomonas sp. Leaf148 OX=1736275 GN=ASF90_10050 PE=4 SV=1
MNQARIRKVVIAGGGTAGWIAACALSHQFRDLLDITLVESDQIATVGVGESTVPPIRTFHRFLQIDEQEFLRAVAGTFKLSISFEHWRRQGERYIHPFGITGQSTLVCAFHHLWLESQRRGMPGAFGDYCLETVASRVDRFALPREPAVNYAYHLDAALYARFLRTRSEAHGVTRVEGKIQQVTLQPDSGDVAALVLEDGQVIEGDLFIDCTGFRGLLIEQTLHTGYEDWSHWLPCDRAVAVQTEAVGPPVPYTRAIAHEAGWRWHIPLQHRVGNGLVFSSQHMSDDEAHAKLLRDTAATPVKEPWLVPFRTGRRLKAWNKNVVSLGLASGFIEPLESTSIHLTIAAVVRLITLFPADGIAPSQVDVFNDISRTEMEHVRDFVTLHYHATQRDEPLWQQCRDMELPDSLRLRLRAWRERAHAWQGTDELFRVDSWTHVLLGQGVVPQQHHPLAAALSDTDLRRLLDGIAQPIQRVVEQMPSQQDFISAYCKADEQLWGGRRRVAM

SEQ ID NO: 85407 - protein, 517 aa, Altererythrobacter sp.
  misc_feature (1)..(517): tr|A0A0T2QD80|A0A0T2QD80_9SPHN Tryptophan halogenase OS =Altererythrobacter sp. Root672 OX=1736584 GN=ASD76_009 80 PE=4 SV=1
MSGSMAERSILIVGGGTAGWLTAAYLARFFDVARNPRIRITVLESPEIGIIGVGEGTFPTIRNTLRYIGIDESRFVRATSATFKQGIRFDNWVQTPAEGREEHFLHPFEAPFHAEGYSLVSYWLLQDERTRPPFAEAMSIQNRVAEAGRAPKRADEGDFAGPLNYAYHFDAARVAEVLSDHARALGVHHLQGLMTGVELDPVTGAIDHVVTREHGDLKADLYVDCSGFRAELIDGALGVPFKEVGDVLFTDRALACKLPYDEEGSPLRSYTVASAHQAGWIWDIGLSGAHGVGCVYSSAHMSDDEAAQALERYTGGRSLDVTPRKIPFRAGYRTRPWEKNCVAVGLAGGFLEPLESTGVVMIEAAAAMIAELFPHYGPADGPARRFNELMTARYESIIKFLKLHYCLSRRVEPFWRDNAAASSIPDQLQDLLEQWSYRPPSRFDFVLDHESFAFFNYQYILYGMGFRTDLSPVRDEFPHTDEAQKIFERIRHFGDQAARDLPAHRALIERMAAAEGS

SEQ ID NO: 85408 - protein, 518 aa, Burkholderiales bacterium
  misc_feature (1)..(518): tr|A0A257CVW5|A0A257CVW5_9BURK Tryptophan halogenase OS =Burkholderiales bacterium PBB3 OX=2015565 GN=CFE43_050 95 PE=4 SV=1
MTSKRRILIVGGGTAGWLTAAHLAKFLGLSERSHLEVTVLESPDIGVIGVGEGTFPTIRSTLQFLGIDEKRFIRETSATFKQGIRFVDWASTPVGDQHHQYVHPFEAPFYTEGTSLVPYWLLQDPAKRPPFAQAVTIQDRVVEGRRAPKRSSDAAYTAPLNYAYHFDAIKFAKLLAERARELGVQHVEATLSSVSLDATGAIDHIDTLQHGSFSADLYIDCTGFRAELIGQAMGTAFKSVRDQLFTDRALTCKLPLDHARDQPGAYEAHMESCTISTAHEAGWTWDIGLNGARGIGCVYSSSHISDDRATEILRAYIGPGHEDVVPRRIAFAAGYREQQWVKNCVAVGLSAGFLEPLESTGLVLIEAAAGMIAEMLPHSGPMQAPARRFNQLMTARFENIVNFLKLHYCLSQRQEPFWRDNVHPASIPGPLAEYLEQWKLRPPGRFDFELDTETFAFFNYQYILYGMGFKTDLSAGRDDFPQVDEANKLFAKIQRFGDRALGDLPSHRALIQQINAQA

SEQ ID NO: 85409 - protein, 496 aa, Sphingomonas sp.
  misc_feature (1)..(496): tr|A0A3M0FY60|A0A3M0FY60_9SPHN Tryptophan halogenase OS =Sphingomonas sp. PP-CE-3A-406 OX=2135659 GN=C8J44_1418 PE=4 SV=1
MTSPTAPVPLKTIVIVGGGTAGWIAAAMLARFVPRTTKISLVESDAIGTVGVGEATIPQIRLLTAALGIDENAMLAATHGTFKLGIEFVDWTGRGSRYMHAFGAVGRGLGVVPFHHHWLRAQASGTAAPLGDYIASARAAADARFDRHPDLAYAYHFDATLLARWLRGLAEASGVDRIEGRIVTAQRDGETGDLTGVTLDDGRAVEGDFFLDCSGFRSLLLGEALGVAFEDWSHWLPCDRAMAVACEVTTPLLPYTRATARPVGWQWRIPLQHRTGNGLVYAAAHLSDDEAAARLLANLDGPAIGDPRPLRFATGKRATFWERNVVALGLASGFMEPLESTSIHMVQSAVARLLSLFPSAGDNAAARAAYNRQTHIEYDTVRDFLILHYHANRRPEPFWQRCRDMALPDRLAEKIAQFRAAAILTPDVADLFTEPAWLQVMIGQGINPVTWSPLAEALSPDQLAGFLADIRDRHAATARALPAHADTVARHCMAKR

SEQ ID NO: 85410 - protein, 504 aa, Niveispirillum cyanobacteriorum
  misc_feature (1)..(504): tr|A0A2K9NL75|A0A2K9NL75_9PROT Tryptophan halogenase OS =Niveispirillum cyanobacteriorum OX=1612173 GN=C0V82_25 825 PE=4 SV=1
MTRSPDPIRQIVIVGGGTAGWMAAAALSRLSANGATRITLVESDEIGTVGVGEATIPPIRQFNALLGLDENEFVSQTQGSMKLGIAFEGWTTARPRYLHPFGSFGFDMEAVKFHQFWLKLHAQGLASGIDDYNLCATMANREKFARPVADPSSVLSQITYAYHFDAGLYAAYLRRYAEARGVKRVEGKVASVPLRATDGFIEAVVLADGRRLEGDLFIDCSGFRGLLIEGALNSGYEDWTHWLPCDRALAVPSATIGPPKPYTRAIARDGGWQWRIPLQHRTGNGYVYCSQFVTDEQAADTLLSNLEGPALADPRPLRFTTGRRRKMWNRNCVALGLASGFLEPLESTSIHLIQAGISKLLALFPDRSFNPANEDAYNRLSAMQFEQVRDFIILHYVANDRPEPFWQRAAAMDIPDSLRQKIDLFRACGRLFRFEDELFSDNSWVAVLLGQGVIPERWDPLVDTIDPGLVRHNLDRLRAVFARAADAMPGHGDFLARMIKGHGT

SEQ ID NO: 85411 - protein, 97 aa, Alphaproteobacteria bacterium
  misc_feature (1)..(97): tr|A0A4Q3XNY0|A0A4Q3XNY0_9PROT Tryptophan halogenase (F ragment) OS=Alphaproteobacteria bacterium OX=1913988 GN =EON59_15915 PE=4 SV=1
MPSEGDQNQPVRIVILGGGTAGWMCAAALVRHLDSRDYTVTLIESDEIGTVGVGEATLPHIKIFNDTLGIDEARFMAETKATFKLGIEFVGWDQPGD

SEQ ID NO: 85412 - protein, 499 aa, Alphaproteobacteria bacterium
  misc_feature (1)..(499): tr|A0A3M1Q1Z6|A0A3M1Q1Z6_9PROT Tryptophan 7-halogenase OS=Alphaproteobacteria bacterium OX=1913988 GN=D6740_02 840 PE=4 SV=1
MRVLVLGGGTAGWMAAAVLARGLGPLVHVSLLESPAIGTVGVGEATIPQIRHLNRFLGITDAELLAASEGTIKLGIRFIGWGRPGESYIHAFSDIGVALGQVGFHHYWLRARAAAPDRAGSFWDYSPNALAAAAGRFLPQEEPLAPGLTGLRWAYHFDAGLYAGLLRRKAEEAGVRHLTGLMQAAERDPHDGRVVALRLDDGRRLEAEFFIDCSGFRSLLLGQALAVPFVDWSQWLACDTALAVGSRRRGPPAAHTEAHAHAAGWRWRIPLRHRIGNGYVYCSSEMDEEAARRALLAALDGEPLGEPRLIRFKAGRRQRVWEANVVALGLAAGFLEPLESTSIHLVQSGLQRLLEMWPRGKDEAALRAEYNRRTAEEWEAIRDFLILHYHRNDRSEPFWRQLAGMTLPEGLAERIALFAQSARIYPDPLELFTEIAWLQVLLGQGVQPRGWHPAADLVPMERLLGYLGQLRERLRRAVRRMPDHEQALARIMDAHAAAD

SEQ ID NO: 85413 - protein, 521 aa, Alphaproteobacteria bacterium
  misc_feature (1)..(521): tr|A0A3M1GH68|A0A3M1GH68_9PROT Tryptophan 7-halogenase OS=Alphaproteobacteria bacterium OX=1913988 GN=D6782_00 105 PE=4 SV=1
MFSMSKAVRSVVIVGGGSAGWITAAVIAAHHRAHLPGALHVTLIESPNVPTVGVGEGTWPTMRSTLIKLGISETEFFRQCDASFKQGAKFARWVDGGDDDYYYHPLMLPQGFPKIDLAPYWHRFTEGEKKPPSFSQAVCFQEAVCERGLAPKMITTAEFGHVANYAYHLDTGKFAPFLQRHATEKLGVRHILDDVVEVVAAENGDIACLKTKNSGDLAGDLFVDCTGFASLLLGKHYGVPFIDCSDVLFIDTALAVHVPYAREDDPVIPYTVSTGQSAGWIWDIGLPTRRGVGYVYSSRYSSEDEAVRALRAYIGPRAEKLSIRKIPIRSGHRQIFWKQNCVAVGLSAGFLEPLEASALVLIELSADMLAKQLPACREVMDIAAKRFNSVFNYRWDRIIDFLKLHYMLSRREDSRFWIDNRDPASIPESLREQLELWRYQSPGDHDFTSNNEVFPAASYQYVLYGMGFRTDFRYRRDMLADEAKAKQQFAQNAQMKRKAVESLPTNRALIDKIHRHGLQPI

SEQ ID NO: 85414 - protein, 528 aa, Sphingobium sp.
  misc_feature (1)..(528): tr|A0A2M8QL67|A0A2M8QL67_9SPHN Tryptophan halogenase OS =Sphingobium sp. LB126 OX=1983755 GN=CAF53_19120 PE=4 S V=1
MSVDIPSLFMGSFFMVHPVRNIVIVGGGTAGWLTAGVIAARHGSRLGNDFTVTLVESPNTPIIGVGEGTWPTLRTTLSRMGISETDLFRECDAAFKQGARFARWTTGERDDGYYHPLMLPQNFGQVNLAPHWLAGAGDESFCDSVCSQGRICDDGLAPKTIATAEYDALANYAYHLDAGKFAPFLQRHCCEKLGVRHVLADVEQVLMKEDGDIRAIRTTQAGEIEGDLFVDCTGFKALLIEGAMKVPFKDCNDILFCDTALAMQVPYERPNSPMASHTISTAQSAGWIWDIGLPTRRGIGHVYSSNHISDEEAERELRAYIGPLAEGLSARKIAIRSGHRETFWKGNCVAVGLAAGFLEPLEASAIVLIELSAKIIAEQMPACREVMDIIASRFNATTHYRWGRIIDFLKLHYALTKRTDSDFWRDNVRDETMPDRLKELMLLWRYQSPWFLDEFDRVEEVFPAASYQYVLYGMGFRTEVDRAALARDTHLADRARRENRNMTAKLRAGLPRHRDLIDKIVTHGLQPV

SEQ ID NO: 85415 - protein, 142 aa, Alphaproteobacteria bacterium
  misc_feature (1)..(142): tr|A0A4Q3XT95|A0A4Q3XT95_9PROT Tryptophan halogenase (F ragment) OS=Alphaproteobacteria bacterium OX=1913988 GN =EON59_13680 PE=4 SV=1
LFNRNYIDPNLVDAFNREMEGEYVNIKDFLIAHYKVTEREDTPFWAYCKHMDIPESLKTRLEVFKARGESMVRQYELFKETSWFAVLAGQGMMPDAYHPVADVISDEELRQRLSRIRTAIQDRVNGMPSQERYLKDRGLTAA

SEQ ID NO: 85416 - protein, 491 aa, Amycolatopsis orientalis
  misc_feature (1)..(491): tr|A0A193C664|A0A193C664_AMYOR Tryptophan halogenase OS =Amycolatopsis orientalis OX=31958 GN=SD37_33695 PE=4 S V=1
MSVEDFDVVVAGGGPGGSTVATLVAMQGHRVLLLEKEVFPRYQIGESLLPATVHGVCRMLGVADELAGAGFPIKRGGTFRWGARPEPWTFHFGISAKMAGSTSHAYQVERARFDEILLNNAKRKGVVVREGCSVHDVVEDGERVTGAKYTDPDGNEREVSARFVIDASGNKSRLYSKVGGSRNYSEFFRSLALFGYFEGGKRLPEPVSGNILSVAFDNGWFWYIPLSDTLTSVGAVVRREDADKIQGDREKALNALIAECPLISEYLSNATRVTTGKYGELRVRKDYSYQQETYWRPGMVLVGDAACFVDPVFSSGVHLATYSALLAARSINSVLAGDLDEKTALNEFEARYRREYGVFYEFLVSFYQMNVNEESYFWQAKKVTQNQSTDIESFVELIGGVSSGETALTAADRIAARSAEFAAAVDEMAGGDGDNMVPMFKSTVVKQAMQEAGQVQMKALLGEDAEPELPLFPGGLVTSPDGMKWLPHHPA

SEQ ID NO: 85417 - protein, 528 aa, Sphingobium japonicum
  misc_feature (1)..(528): tr|D4Z7X2|D4Z7X2_SPHJU Putative tryptophan halogenase O S=Sphingobium japonicum (strain DSM 16413 / CCM 7287 / MTCC 6362 / UT26 / NBRC 101211 / UT26S) OX=452662 GN=SJ A_C2-02280 PE=4 SV=1
MSVDIPSLFMGNFDMIHPVRNIVIVGGGTAGWLTAGVIAARHRSRIGNGFTVTLVESPNTPIIGVGEGTWPTLRTTLSRMGISETDLFRECDAAFKQGARFARWTTGTPDDGYYHPLMLPQNFGQVNLAPHWLAGEGDESFCDSVCSQGRICDDGLAPKTIATAEYDALANYAYHLDAGKFAPFLQRHCTEKLGVRHVLADVEQVLMKEDGDIRAIRTTQAGEIEGDLFVDCTGFKALLIEGAMKVPFRDCNDVLFCDTALAMQVPYDRPDSPMASHTISTAQSAGWIWDIGLPTRRGIGHVYSSNHISDEEAERELRAYIGPPAEGLSARKIAIRSGHRETFWKGNCVAVGLAAGFLEPLEASAIVLIELSAKIIAEQMPACREVMDIVASRFNATTHYRWGRIIDFLKLHYVLTKRTDSDFWRDNVREETIPDRLQELMLLWRYQSPWFLDEFDRVEEVFPAASYQYVLYGMGFRTEVDRPALARDAHLADRARRENAAMTAKLRAGLPRHRDLIDKIVTHGLQPV

SEQ ID NO: 85418 - protein, 376 aa, Alphaproteobacteria bacterium
  misc_feature (1)..(376): tr|A0A4Q3XPA5|A0A4Q3XPA5_9PROT Tryptophan 7-halogenase (Fragment) OS=Alphaproteobacteria bacterium OX=1913988 GN=EON59_16785 PE=4 SV=1
MTVPATHPQRIRKVVIVGGGTAGWMTAAALSKVLGPDYCDIDLIESEEIGTVGVGEATIPQIRLFNDLLGLDENDFIRATQGTFKLGIEFVDWGQIGDRYIHPFGKYGIDMEGVSFHAFFLKGRAQGASHDLSDFSLEASAAREGRFMRSIKAGNSPLSNVRYAFHFDASLYAAYLRKFAEARGVVRREGKVVDVALRPQNGFVDSVRLDNGEVVEADLFIDCSGFRGLLIEQALKTGYEDWSHWLPCDRALAVPCARVTSPTPFTRSTARSAGWQWRIPLQHRTGNGYVYSSAHLSEEEATRTLMSNLDGDALADPRALRFVTGRRKRFWNRNVVALGLASGFMEPLESTSIHLVQSGIAKLLSMFPDRSFAPVE

SEQ ID NO: 85419 - protein, 511 aa, Altererythrobacter sp.
  misc_feature (1)..(511): tr|A0A0T2Q8P2|A0A0T2Q8P2_9SPHN Tryptophan halogenase OS =Altererythrobacter sp. Root672 OX=1736584 GN=ASD76_156 70 PE=4 SV=1
MNADRIRKVVIVGGGTAGWMAAAAISKIMGNLPDFSIDLVESEAIGTVGVGEATIPQICLFNAMLGLDEMEFMRETHATYKLGIEFVDWTRIGHKYIHPFGFYGLDMMGVEFHHHWLKGRLAGDTSELDEYSIAAMAALSNKYLPPAPDQPKSPLSKLGYAFQFDAGRYARYLRGRSERQGVNRIEGRIIEVEQDPESGFVTALKLESGARVEGELFLDCSGFRSLLLGQTLGVPFVDWSKWLPNDRAVAIPCTLGPNRKPITRATARSCGWQWNIPLQHRVGNGHVYSSAHISEDEATAVLLANLEGEPLAAPNPLRFLAGHRARVWEKNVIALGLAGGFLEPLESTSIHLVQSGIARLMTLFPTREFKPREIERYNQMTQQEYVDIRDFLVLHYSATERDDSEYWNYCRNIEPPEGLAEKLAMFRSSGRVFREHNELFTETSWEAVLVGQGIVADGYHPAADLLSDEETLKRLASIRGTVARTVEQMPTQEEFLAANGGAIDPALRLTA

SEQ ID NO: 85420 - protein, 526 aa, Rhodobacteraceae bacterium
  misc_feature (1)..(526): tr|A0A257EWB8|A0A257EWB8_9RHOB Uncharacterized protein OS=Rhodobacteraceae bacterium PARR1 OX=2015578 GN=CFE34 _14165 PE=4 SV=1
MTFWPRMATGCRNGRACHSARQAKTMWPRRICVVGGGTAGWLAAMMLGDSARRGGHPCEVTVIESSKIGTIGVGEGTTAVFRQMLQHFGLDEMEFLAETGATIKFGIRHRDWRRLGHSYDGPIDDPHRVTGFEVNALDLYQVSRGESVGQVHLFQHLLSRNKSPFAVVDGRHIAVGPFHHAYHFDQALAGKWLRSKAKAIATIDDQVLRVERLAESGDITALHLEGGARVEADLFVDCTGFRRALIGPMGGTWVSYRDMLPVNRAIPFWLDIPKGEEIDPCTLAWAQGSGWMWKIPTQSRYGCGYVFSDAHITPDQAKDEIERVLGRPIHVRNDIRIDAGRLDRQWIGNCVALGLSSSFLEPLEATSIHGTVVQLMLLASVLPNPDDRARLAFNAASARQVDDFRDFIRLHYVSERRDTPFWRDVAGNLPPHLADRLAAWGGRVPGAADFAPFPMGLPHTDHHLHVPVLDGLGLLDPAKAKDWLAAHPKLRAQARAEAAKLTGEYKRAAGRAMGHRAFLDGLGVTA

SEQ ID NO: 85421 - protein, 501 aa, Niveispirillum cyanobacteriorum
  misc_feature (1)..(501): tr|A0A2K9NL78|A0A2K9NL78_9PROT Tryptophan halogenase OS =Niveispirillum cyanobacteriorum OX=1612173 GN=C0V82_25 830 PE=4 SV=1
MSSDRRIRRITIVGGGTAGWMSAATFARILGPDYAEITLVESDEIGIVGVGEATIPQMATFNRMLGIDEDEFLRATKGSFKLGIQFVDWGRKGHTYFHPFGHIGLHMEGVSFHAYWLRLKQAGLVDRIEDWSLQAVASARGKFMRAINAGRSPLSEIAYAFHFDAGLYARYLRGFAEARGVVRREGKIVRVHQHPETGFVQSVELADGTKVEGDLFIDCSGFRGLLIEGTLKAGYADWSHHLPCNRAVAVPCEGTEAMTPYTRSTARAAGWQWRIPLQHRIGNGHVFCSEYMSDDEAVSVLLSNLDGKPLADPRFVPFQTGHRRKMWDKNVVAIGLSSGFLEPLESTSIWLIQSGLSRLMAMFPDLDFDPVTRDRYNRILTTEYAEIRDFLILHYKATERDDSPFWNYCRTMPVPERLQEKMDVFLAHGRTFRENEELFNDTSWFAVMLGQLMVPRGYDPVANILSLEETKARLAHIKDAISNSADYMPTHREFIRQHCGA

SEQ ID NO: 85422 - protein, 505 aa, Xanthomonadaceae bacterium
  misc_feature (1)..(505): tr|A0A1E4L1C8|A0A1E4L1C8_9GAMM Tryptophan halogenase OS =Xanthomonadaceae bacterium SCN 69-123 OX=1660170 GN=AB S96_00590 PE=4 SV=1
MQDQRIREVVIVGGGTAGWMAAAALAKVLGRSYSLRLVESDDIGTVGVGEATIPMIKLFNAALELDEADFIRRTQGSFKLGIEFVNWGQVGDSYIHGFGKIGQDLGIVPFYHYWLKLHQQGRAGHLDDYSINTAAARANKFIPARTDRPNSPLADIAYAYHFDAGLYARYLREYAEARGVRRTEGKVASVQQHPESGFIESITMESGERIPGQLFVDCSGFRGILIQQALKTGYIDWSHWLPCNRAVAVPCETRQAITPYTRSTARTAGWQWRIPLQHRVGNGHVFSSDFISEDEATSMLMANLEGKPLAEPRVLKFVTGKRRKFWNKNVVAVGLASGFMEPLESTSIHLIQSAIARLTAFFPHAGFDQTDIDEFNAHSHWEFDKIRDFLILHYHATERSDTPFWNYVRTMDIPAELRAKMELFRSNGRVFRDGHELFAEPSWVQVMHGQRMQPRGYHALVDAQDDEAVQKHVETVRDVIAACVQAMPTHEQFIDRHCAARPKAA

SEQ ID NO: 85423 - protein, 516 aa, Alphaproteobacteria bacterium
  misc_feature (1)..(516): tr|A0A3M1GJE0|A0A3M1GJE0_9PROT Tryptophan 7-halogenase OS=Alphaproteobacteria bacterium OX=1913988 GN=D6782_01 235 PE=4 SV=1
MATPLRSVVIVGGGTAGWMVACRLAAKHRGKGENGLQVVLIESPNIATVGVGEGTWPTMRASLRKIGLSETVFLRECDAAFKQGGKFARWTTGADDDFYYHPFGPPVGHGKITLAPYWAKMLAPRGIRFAEAVDMQHHICEKGLAPKTMASAEYEHVANYAYHLDAGKFASLLQRHAVEALGVRHIRDDVTAVRLGDDGAVAALETAASGVLAGDLYVDCSGFSALVLGKTLGVPFIDRNDVLFADRAMVAQMPHATPDAPLACQTNATAHQAGWTWDIALPTRRGIGHVYSSAHMTDEEAERGLRAYLGPEGKDLPLRTIAFRSGHRQRFWEKNCVAVGLSAGFLEPLEASALLLVEMSADMIADQLPACLEVMPAIAAQFNRLFAYRWDRIIDFLKLHYMLSKREDHDFWIDNRRPESIPDGLAERLSVWRYHPPSDYDFTGNNEVFSWASYHYVMYGMDFPIDYRMIDRSLHEGKLAQRFFAANARATRQALADLPMHRDLLCRLERHAFQPI

SEQ ID NO: 85424 - protein, 533 aa, Xanthomonas phaseoli
  misc_feature (1)..(533): tr|A0A1V9GS87|A0A1V9GS87_9XANT Tryptophan halogenase OS =Xanthomonas phaseoli pv. syngonii LMG 9055 OX=1437878 GN=IA54_013350 PE=4 SV=1
MGMWPVERGQLAPFAYSSAVLAQECIGMIPAPLRNIVIVGGGTAGWMAAAAFARVLGPTFKVQLIESEQLGTVGVGEATVPHIKAFNNLLGINEAEFVRQTQGSFKLGIEFVDWQRPGSTYMHGFGSQIGHPLGLLPFHQYWIKQHARGKAQPLGAYTLNTVAAARGKFMTSVGDVPANSPLANIAYAYHFDATQYAHFLRRYSQQRGVTRIEGLVEQVQLHPESGHVQSLQLASGQTVHGDLFIDCSGFGGLLIEQALHTGYHDFTHWLPCDRALAVPCEKVGPPTPYTRSTARAAGWQWRIPLQHRTGNGYVYCSAHISDDEAAATLLANLDGKPLADPRPLRFTTGRRKQCWNRNVVALGLASGFLEPLESTSIHLIQSGISKLLELFPREGISPVLVQRYNDRLAFEFDRIRDFLLLHYHATERDDSAFWRHCRQMPITPELQATLDLFRDSGRFYRNAEEMFAEISWVQVLVGQGVLPQGYHPLVDQVPDRDAEGFLTSVAQTISHCVDVMPSHQQFIDRYCKAAALP

SEQ ID NO: 85425 - protein, 516 aa, Streptomyces sp.
  misc_feature (1)..(516): tr|A0A2Z4IY92|A0A2Z4IY92_9ACTN Tryptophan 7-halogenase OS=Streptomyces sp. ZFG47 OX=2184053 GN=DN051_13765 PE= 4 SV=1
MVDKIVIVGGGTSGWMSASYLKAAFGERISVTVVESDRVPTIGVGEATFSTVRHFFEYLGLKETDWMPACNATYKLGIRFQNWSGVGEHFYHPFERLRVVDGFPLTDWWLKQRPSERFDADNFVMAALGDNLRSPRFLDGTLFERGNSDLGPGGAAFRSTLTEQDTQFPYAYHFDAALLAKYLTEYGVSRGVRHVVDDVVDVKLDDRGWISAVATAEHGDLEGDLFVDCTGFKGLLLNKALEEPFVSYQDTLPNNRAVALRVPVDTAERGIPPYTRATAMEAGWIWTIPLFDRIGTGYVYADEYCSPEEAERTLREFVGPGAEGLEANHIRMRIGRSRNSWTKNCVAVGLSSGFVEPLESTGIFFIQHGIEQLVKHFPQQDWSQRLRDSYNRAVNNCMDGVREFLVLHYRGAARNDNQYWQDAKTRKVPDALQGRLEQWQNKLPDAENIFPHYHGFEAYSYVAMLMGLKGIPLRAAGALDLMDGTAAAEEFERVRATAKDLLRTLPSQHEYLAQLH

SEQ ID NO: 85426 - protein, 551 aa, Streptomyces sp.
  misc_feature (1)..(551): tr|A0A3N6HDP4|A0A3N6HDP4_9ACTN Tryptophan halogenase OS =Streptomyces sp. ADI97-07 OX=1522762 GN=EES45_03535 PE =4 SV=1
MKNTMGRKEKYDVAILGSGMAGGMLGAVLARNGVKVLLLDAGTHPRFAVGESTIPYTSGMTRLVADRYQVPELRALSSFKGIRDKVSRNCGQKQNFGFVYHREGRSQNAQEINQLVVPSVLRTETHLFRQDIDAYLFHVAVKYGAHPRLNTRIVDIETDPDTGAVLRTDGGEEFRASYVVDGSGFRSPLAEKFSLRETPTRARTHSRCLFTHMTGVEAFDKSPAARAHDQPNPWHHGTLHHVFDGGWLWVIPFDNHADSLNPLCSVGLTLDPRVFPKGDQTPQQEFDDFLQRFPEIAHQFRGARSVRPWVSTGRLQYSAKQVVGERFCLTSHAAGFIDALYSRGLTNTLELVNSLGWRIIQASKDGDWSMERFGYLEELQQGLFDFHDDIVYSSFVGFGDYELWNAVNRTWMLGTMLGNVMLEDAYYRFERTGDDAVFRELETHGHPGSPLPVSSGFNEMGRITRELCREVEAGTERPGDAAQKILTYIRDADFIAPSFKFGERDTRCFAMSPAKMAMNARWCRNDAPPEIGKRMINASKGLVRMRLRAGR

SEQ ID NO: 85427 - protein, 521 aa, Xanthomonas phaseoli
  misc_feature (1)..(521): tr|A0A1V9GRT5|A0A1V9GRT5_9XANT Tryptophan halogenase OS =Xanthomonas phaseoli pv. syngonii LMG 9055 OX=1437878 GN=IA54_013960 PE=4 SV=1
MPDTTPSDPQQRPVRRVVIAGGGTAGWMAAAALSKLLGRHLQITLVESDEIGTVGVGEATIPSLVTFHRLLEIDEAVFMAATQATIKLGIAFEHWRDVDQHYIHSFGHAGTDHWSAGFQHFWLKGRQRGVARDFGDYCLELRAAQEGRFAHLPNGGMNYAYHLDAGLYARFLRRFSEGFGVQRIEGRIGQVETDPESGFLTALTLHNGARVEGDLFIDCTGFAGLLIGKTLGVGSDDWSRWLFADSALAVQTESVGPPVTYTRSRADQAGWMWRIPLQHRVGNGIVYSSRYMDQDGARAVLERNLTGRALTEPRPLRFTPNQRHRVWEKNCVALGLASGFLEPLESTNIHLIQRGIIRLLQTFPQVINAVDIAEYNRQAAQEITHIRDFVILHYHATDRRDTPFWRDCAAMDIPDSLRHRVELFRQSGRVFHQANELFAENSWVQVMLGQGIVPQQHHPVADLMGDAELGRFLETIRTRVEAALVRLPAHADFLQRYCPAPPLPEPAARVPAPQVMATPAG

SEQ ID NO: 85428 - protein, 485 aa, Sphingopyxis terrae
  misc_feature (1)..(485): tr|A0A142VVK5|A0A142VVK5_9SPHN Tryptophan halogenase OS =Sphingopyxis terrae subsp. terrae NBRC 15098 OX=121905 8 GN=AOA14_04315 PE=4 SV=1
MAAACLRRFLPAGWSVSLVESDAIGAVGVGEATIPQIRLFNDALGIDEDEFLAATQGTIKLGIEFNGWTRPGHRYMHAFGAVGRGLGLLEFHHYWLRARAAGVAETLDHYSLNERAAYARRMQRGAPRTSPHLLEMPYAFHFDAALYAAFLRRRAEVSGVERIEGKVVDVRLNGETGDVTGVACDDGRSVEGDFFIDCSGFRGLLIEDALETGYEDWSHWLLNNRAVAVPCAHGATPQLPWTGATTRDAGWQWRIPLQHRIGNGYVYSSDHVTDDEAVATLLANLDGPAQAEPNRLRFVSGKRRRMWNRNVVALGLASGFMEPLESTSIHLVQAGISRLLKMLPSGAADPAVAAEFNRQSDFEWERIRDFIILHFKATERRDTAYWRDRAEMPVPDTLAAKIELFRAQGLIFREHEELFTESGWLQVLVGQGIAPRAWHPLADGIGADDLARYMAGVAAMVEAEVAQMASYDDFLAATSRAAVAA

SEQ ID NO: 85429 - protein, 516 aa, Niveispirillum cyanobacteriorum
  misc_feature (1)..(516): tr|A0A2K9NFL5|A0A2K9NFL5_9PROT Tryptophan halogenase OS =Niveispirillum cyanobacteriorum OX=1612173 GN=C0V82_15 915 PE=4 SV=1
MRVQAAKRLRVVIVGGGTAGWMMASGLAKLLPADAYDLTLIESDEIGTVGVGEATLPHIKLFNDRLGIDEAEFMRATGATIKLGIEFVGWNQPTDRYIHPFGVFGEPWAGVDFQHHWARARLSGIDAGSLQDYSFAVALCRAGLFDHPVVDTQSIRSSFSYAYHFDAGLYAEFLRTWSNARGVTRVEGRILDVARDGESGHVTRLTLASGDGIEGDFFVDCSGFRSLLVGGAMQVPWCDWSHWLPCDRALAVPSGSVTPLTPYTRATARKAGWTWRIPLQHRIGNGYVFSSRWCGEEEARETLLSALDGPGLAEPRLLRFAAGRRARAWEGNCVAAGLSSGFLEPLESTSIFLIQAAMFDLVGLMPRPGGGIDPRLSTEFNRLFEIHYDRVRDFLILHYMANSRHGEPLWDHVRSMEMPDSLMHKLDLFRESAAAPDYKLGLFSRDSWLSVFEGQGVMPGAYARLADHLPLPELERRLSDLRGRIRDGLSGMPTHADFIAGHCAAPDRAGSQGNAA

SEQ ID NO: 85430 - protein, 441 aa, Amycolatopsis orientalis
  misc_feature (1)..(441): tr|A0A193BV42|A0A193BV42_AMYOR Tryptophan halogenase OS =Amycolatopsis orientalis OX=31958 GN=SD37_10910 PE=4 S V=1
MADKAFDVIVIGGGPAGSVCAAALADHGHSVAVLERQEFPRFHIGESMLPYMIGLLERLDLLDAVGKQGYVVKRGGEFIDPTGTKFITPGVYRADFSKQGEGRHSETFQVERAHFDQVLLEKARANGAEVITGASVRELVMTGDRITGVRYRHGGGEHEISASFVVDASGRAGTIANRFGLRKTTDGLRMVAIFRHYEGLDERYNPGHEGDIQIGSHADGWVWAIPLSGDKVSVGTVMPRAVFREGAKEDVFAEHVARVPRIVERLTGTRPSTELRVETDYSYHTDEVAGPGWLMAGDAGCFGDPMFSGGTLVAMVTAARAADTITRVLADPRAERALTDDYANFFKTGYDTYVRLIFAFYQSELISAVAEASTVAEREKLEMYMVRLLGGDFWSEHNPIAQALRANPAWRTFAPFQPVFGCPVYPELDAADRAEVAAARA

SEQ ID NO: 85431 - protein, 500 aa, Amycolatopsis orientalis
  misc_feature (1)..(500): tr|A0A193BY62|A0A193BY62_AMYOR Tryptophan halogenase OS =Amycolatopsis orientalis OX=31958 GN=SD37_16625 PE=4 S V=1
MSTARNEEFDVAVVGGGPAGSTLASLVAMRGHRVLLLEKETFPRYQIGESLLPSTIHGVCHLLGVDDEIAEAGFLRKRGGTFRWGANPTPWNFAFSVSPKVAGPTSFAYQVERSKFDKILLDNSARKGVDVRQNRTVTDVLESEDGRVRGLRYTDPDGTEHEVSARYVVDASGNTSRIHKRVGGSRKYSDFFRSLALFGYFENGKRLPAPNSGNILCVAFSHGWFWYIPLSDKLTSVGAVVRREDAAKIQGDPEAAMRNLIGECPLIGEYLDGATRVTTGQYGQLRVRKDYSYHQTNFWRPGMVLVGDAACFVDPVFSSGVHLATYSALLAARSINSVLDGSVGEQRAFDEFEGRYRREYGVFYEFLTSFYDMHIDENSYFWSAKKVTKSSNTELESFVELVAGMSSAEFDLTDTESGVLRLKQRSAEFADAVDTLVEAREENMAPLFRSSVVRQAMQEGSQVQTRAQLGDEAGEITPVFDGGLVATPDGMSWCEPDPGR

SEQ ID NO: 85432 - protein, 565 aa, Niveispirillum cyanobacteriorum
  misc_feature (1)..(565): tr|A0A2K9NLB4|A0A2K9NLB4_9PROT Tryptophan halogenase OS =Niveispirillum cyanobacteriorum OX=1612173 GN=C0V82_26 005 PE=4 SV=1
MESTRQAYPFALNLDSWPSLGTSCKSSIRDPFGPLKDPVARLLKCIREDVLDKPVKTVVIAGGGSAGWITAGRIAARNAQGPDAVRVILIESSAIGTIGVGEGTWPTMRNTLRKIGIKETDFIRHCDAAFKQGAKFVRWTDGTDADGYYHPLNPPQAATQINLSGHWQRLAGKGGPDFATAVDFQASLCEAGLAPKSITSPEYAGIANYAYHLDAGKFADLLRDHAVSRLGVIHMVDDITQVHQDEEGDITGLSLRSAGLVQGDFFIDCTGFASLLLGRTYGVGFKDCTDVLFCDRALALQVPYERDDAPVATHTISTAQDAGWIWDIGLPTRRGVGHVYSSRHTTDEQAEAALRRYAGPMANGLTARMIKIRAGHRETFWTHNCVAVGLSAGFLEPLEASALMLIETAVDFIADRLPARRSVMDVLSRQFNRAFLHHWDRIIEFLKLHYILTKRTDTAFWRDNCDPASIPDGLLERLELWRHHPPGPGDFPHQPEVFSWPSYQYILHGMGFETAYDGLPPLAGEAAGAQRAFAMAERAREQALRDLPRHRQLLNAIREHGLQAV

SEQ ID NO: 85433 - protein, 454 aa, Amycolatopsis orientalis
  misc_feature (1)..(454): tr|A0A193C1M5|A0A193C1M5_AMYOR Tryptophan halogenase OS =Amycolatopsis orientalis OX=31958 GN=SD37_23460 PE=4 S V=1
MDDYDVIVVGGGPGGSTVAGLTAAEGHRVLLLDKERFPRYQIGESLLPATIHGICAMLGVREEIERAGFVRKRGGTFKWGTGAEPWTFSFAASERMAGPTSYAYQVERTRFDTLLLDAARRLGAEVRQGHRALGTFRAGGRIGGVRYTDDTGHERRATARFVVDASGHGSRLHHDVGGTREYSPHFRNLALFGYFEGGRRMPEPGSGNILCVSFPDGWFWYIPLSDTLTSVGAVVKHESADKVQGDPDAAYTALIGACPLIGEFLRDARRATEPPYDRLRVRKDYSYDRTVLWCPGMVLVGDAACFIDPVFSSGVHLATYSALLAARSINSALSGLLAENRCFAEFEARYRREFGLFRDFLITFYELDADEGDYFRHARRLTSHHGAADEAFADLVGGVSSKDFSRKMFGEVLAEGVQLQLRGLLGDAAGDEPPMFPGGLVPTADGRRWRVPDA

SEQ ID NO: 85434 - protein, 505 aa, Xanthomonas phaseoli
  misc_feature (1)..(505): tr|A0A1V9HJM4|A0A1V9HJM4_9XANT Tryptophan halogenase OS =Xanthomonas phaseoli pv. syngonii LMG 9055 OX=1437878 GN=IA54_019865 PE=4 SV=1
MTQAQIRKVVIAGGGTAGWIAACALSHQFRNLLDITLVESEQIGTVGVGESTVPPIRTFHRFLQIDEQEFLRAVAGTFKLSISFEHWRRQGERYIHPFGITGQSPLVCAFHHLWLESQRRGMPGSFGDYCLETVASRVDRFALHGEPAVNYAYHLDAALYVKFLRARSEACGVTRIEGRIQQVTVQPHSGDVASLVLEDGQVIEGDLFIDCSGFRGLLIEQTLHTGYEDWSHWLPCDRAVAVQTQALGPPVPYTRAIAHEAGWRWHIPLQHRVGNGLVFSSMHLSDDEAHAKLLRDVAAPAVKDPWMVPFRTGRRLKAWNKNVVSLGLASGFIEPLESTSIHLTISAVVRLLALFPAEGIAPSQVQLFNDVSRAEMEHVRDFVTLHYHATQRDEPLWQQCRQMELPESLALRLRAWRERAHAWQGPDELFRIDSWTHVLMGQGIAPEQHHPLTRAFSDYDLRRLLDGIAQPIQHAVRQMPSQQDFIERYCKAGEQVWGMRSPVPA

SEQ ID NO: 85435 - protein, 507 aa, Sphingomonas sp.
  misc_feature (1)..(507): tr|A0A3M0GC36|A0A3M0GC36_9SPHN Tryptophan halogenase OS =Sphingomonas sp. PP-CE-3A-406 OX=2135659 GN=C8J44_0063 PE=4 SV=1
MTGTPAARITKVVIVGGGTAGWMTAAALSRLVATGVAVTLVESEDIGTVGVGEATIPSLRDYNRMLGIDEDALVRATGATFKLGIEFRDWRRLGDSYLHPFGTHGRDIEGVSFHQLWLRQANLGGDPGPIGDYCLSAVAARKGRFTRPASNPQSVLSTLSYAFHFDAALYAKFLRAMAEEAGVVSVEGRVAAVDRDAETGFITGLRLDGDRRIDGELFIDCSGFRSLLLGDALGVPFTSWQHWLPCDRAWAVASERQGTLTPYTRATAETAGWRWRIPLQHRVGNGHVYASDHVDDDAAMHALLAGLDGKPLAEPRQLRFVAGRRERLWEKNCVAIGLSGGFLEPLESTSIHLIQSGITRLMALFPDRGFGGIEIAEYNRVMLREYAQIRDFIILHYHATERSDSTFWNHCRTMTIPDTLQAKLDLWSGKARTFREQGELFTPDGWIAVLLGQGVRPVSTDPLVAALPPEESTRFMDHVRDMIGKTADAMPTHEQFIAQHCAATIAP

SEQ ID NO: 85436 - protein, 504 aa, Niveispirillum cyanobacteriorum
  misc_feature (1)..(504): tr|A0A2K9NHF9|A0A2K9NHF9_9PROT Tryptophan halogenase OS =Niveispirillum cyanobacteriorum OX=1612173 GN=C0V82_19 485 PE=4 SV=1
MKPLNRIVIAGGGTAGWITAAMLSFMTKGTGTAVELVESDEIGTIGVGESTIPPFVVLLRSLGIDEQDFIKSTNASFKLAIRFEDWFKRNQHYYHPFGTLGGLIDNHEFYQCWLRAKAAGHPSELQDFAAATVMADQMKFLLPFKAPRTMIASASYALHVDAKRVAQYLRRYAEERGVTRTEGRINRVRTHPDGSIAGLDLANGKVVDGDFFIDCTGFRALLIGQTLGVGYVSWAEELLCDRAVAVQTENTEDDADVHPYTLSQAQDCGWRWRIPLQHRAGNGYVYSSRFLSDDEAVATLMRQVKGRPLIEPNIIPFKTGMRAKMWEKNCVALGLAAGFIEPLESTAIHLVYRAVDYLFRFFPDADVDPSLQAEFNRRVAAEYEEVRDFIVLHYCTTQRDDTPFWRAAQRTPIPASLRARMDLFKATGILRQGLEELFGAASWQSVYEGMGVRPARYQPFVDKLPMSVITETLDRSAPLLKAQVAGLPHHAQFLRDHCRAERDF

SEQ ID NO: 85437 - protein, 499 aa, Niveispirillum cyanobacteriorum
  misc_feature (1)..(499): tr|A0A2K9NA56|A0A2K9NA56_9PROT Tryptophan halogenase OS =Niveispirillum cyanobacteriorum OX=1612173 GN=C0V82_07 105 PE=4 SV=1
MAGNLPGSILIVGGGTAGWMAAAALARAVGRHTRIQLVESSAIGTVGVGEATIPAIRGFNHMLGLDEADFLRHTQGTYKLGIEFRDWTRLNHSYFHPFGVHGASLDANYTHQYWLRLNAMGEGGRLEDYSLCTIMAEQGRYMAPVTDPRNIMSVVGSAYHFDASLYADYLRRYAERLGVIRLDRKVVDVALRGEDGFVEAVICDGGERLAADFFIDCTGFTGLLIEKALKAGYEDWTHWLPCDRAWAVPSSGDGRITPFTRSTAREAGWQWRIPLRHRVGNGHVFSSAHVSEEQAREVLLANIDGQALAEPKLLRFVTGRRKQAWVKNCLSLGLASGFLEPLESTSIHLIQTGITKLLDFFPGRQIDGAEVREYNALAQGEFEAVRDFLILHYHVTERSDSSFWNHCRTMDIPDSLKSRIELFRRRGRVSTRARALFTDTSWIAVMIGQGIMPETYDPLVDLHPLPAVRERMATMRARIRQAADSMPTHEAFLGKQAAA

SEQ ID NO: 85438 - protein, 533 aa, Streptomyces sp.
  misc_feature (1)..(533): tr|A0A0M8U7M6|A0A0M8U7M6_9ACTN Tryptophan halogenase OS =Streptomyces sp. H021 OX=1519486 GN=ADK97_22410 PE=4 S V=1
MTSTDTRLQKVVILGGGTAGWMTAAYLGKALQGTVDITVLEAPTIPRIGVGEATVPNLQRSFFDYLGIAEDEWMRECNASFKMAVRFVNWRTDGQGESTARELPGGGPDHFYHPFGLLPDYDQTPLSHYWFKRKYEGRTTEPFDYACFREPPVMDAMKAPRWLDGRPATRYAWHFDAQLVADFLRRFATEKQGVNHVQDEMVRVEQDSRGHVTTLHTKGGLALDADLFVDCSGFRGLLINQAMQEPFIDMSDHLLCDSAVATAVPHDDEANGVEPYTSAIAMSSGWAWKIPMLGRFGTGYVYSSKFTDQDTATREFADMWGLDVEETKFNHIRFRVGRNRRAWVKNVVSIGLSSCFLEPLESTGIYFITAAIYQLAKHFPDKTFNEGLIDSFNHEIEVMFDDTRDFIQAHFFYAPRNDTPFWQANKKLVLPDNIKQKISAYKAGLPINSPITDESTYYGNFEAEFRNFWTNGSYYCIFAGLGLEPDAPLPTLAHRPESVAGAEPLFDTVKRQQQNLLETLPSAYDYLRQLHGA

SEQ ID NO: 85439 - protein, 442 aa, Caballeronia temeraria
  misc_feature (1)..(442): tr|A0A158DEF6|A0A158DEF6_9BURK Tryptophan halogenase OS =Caballeronia temeraria OX=1777137 GN=AWB76_06833 PE=4 SV=1
MSETTQTWDVVVIGGGPAGSTAATLLADRGYRVRVLEKARHPRFHIGESLLPANLRLFEKLGIADEVRAIGMVKLAAEFVSPQHGNRMQRFLFADAWDKSMPSAYQVRRSELDDILLRNAAKHGALLSEGCRARDVVFAPDGSSATINAEHDDGRIEEVRARFVVDASGRDTLLANHFKTKRRNERHNSSALYGHFSNARRNEGENEGNITVFWFEHGWFWFIPLADGATSVGAVVWPAYLKQRPKGTPVDTFFRDTIAMCAPLAARLKDAELISEVHATGNYSYTGDMTHGRNFLLLGDAFAFIDPVFSSGVMLAMQSAFAGADAIDAALTNPANAQAALAKFDRDVRHGPREFSWFIYRMTSPTMRNLFMGPRNPLRMKEALLSLLAGDIFGATPIWRSLRAFKGIYYISAALDWRNSLRAYRQRRRNLREAQRAEPSVN

SEQ ID NO: 85440 - protein, 488 aa, Niveispirillum cyanobacteriorum
  misc_feature (1)..(488): tr|A0A2K9NFR1|A0A2K9NFR1_9PROT Tryptophan halogenase OS =Niveispirillum cyanobacteriorum OX=1612173 GN=C0V82_15 910 PE=4 SV=1
MNQPINHLVIAGRDAPLWLTAATLVRALSPSGLRITIVELPAKAGPGDLHASLPALEALHQQLRLDEKGLLALVGGAYTLGWNFADALGSVPPFLHPFGALGSPIGGQDFFAYWLRARRHGLSVPLEDFSLTAAAARQGRLFIPDAESEEYGRSDYGYHLPALPYAAVLKELALRAGVTVVPARSLSVLREGGVITGLMLENGRRIEGDFYLDVTGSDAQLIAGPENGLEPWDFPADRVLTARGPRMKALPPYAEVRGFNQGWIALRPAQSGTYLTAVWRSGPGEADVLRRLPPLCGFAPEDAVGRGSAPGLRTKAWAGNCVALGQAAVRLDPLHDLDLLALQQGLVHLLAHFPRHGGFRAAQAEYNRLTRAHFTHLRDFQAMHYHLARHVGPFWDIARDLPLSADLFHRLSLFRARGELAPWDEDDLAPDSWRAFLAGHGLVPDTYPPALELIPAEQLKARLRAMLVFVKAQVLRQPTHDAYLHHGQ

SEQ ID NO: 85441 - protein, 521 aa, Xanthomonas hortorum
  misc_feature (1)..(521): tr|A0A2S7DUP4|A0A2S7DUP4_9XANT Tryptophan halogenase OS =Xanthomonas hortorum pv. hederae OX=453603 GN=XhhCFBP4 925_18870 PE=4 SV=1
MPDTTPSDPQQRPVRRVVIAGGGTAGWMAAAALSKVLGRQLQITVVESDEIGTVGVGEATIPSLVTFHRLLEIDEAAFMAATQATIKLGIGFEHWRDVDRHYIHSFGHTGTDHWSAGFQHFWLKGRQRGVARDFGDYCLELRAAQEGRFAHLPNGGMNYAYHLDAGLYARFLRRFSEGFGVQRIEGRIGNVETDVHSGYLTALTLENGTRVEGDLFLDCTGFAGLLIGKTLGVGADDWSHWLFADSALAVQTESVGAPVPYTRSRADQAGWMWRIPLQHRVGNGIVYSSRYMDQDNAAQVLQRNLTGRALTQPRALRFTPNQRHRVWEKNCVALGLASGFLEPLESTNIHLIQRGIIRLMQTFPQVINDSDIAEYNRQAAEEITHIRDFVILHYHVTERRDTPFWRDCAAMEIPDTLRHRVELFRQSGRVFHQANELFAENSWVQMMLGQGITPKQHHPVADLMGDAELNHFLENIRTRVDAALVRLPAHADFLRRYCPAPPLPEPATRLPATPVLATPAA

SEQ ID NO: 85442 - protein, 521 aa, Sphingomonas sp.
  misc_feature (1)..(521): tr|A0A0Q6KJM9|A0A0Q6KJM9_9SPHN Tryptophan halogenase OS =Sphingomonas sp. Leaf339 OX=1736343 GN=ASG67_06665 PE= 4 SV=1
MDTPVAHIVIVGGGTAGWLAACLIAARADPAATAPLSVTLVESPDVPTIGVGEGTWPTMRRTLARIGIDEAEFLTACDASFKQGSRFDGWVTGAAGDSYLHPFVAPVEADPAAAVAAWREHGTGADFATMVGVQPHVCSRDLAPRQRGMPGYTGALNYAYHLDAAKFAALLTRHATERFGVRHVRDHVVGVDKAAGGDIAAVRTRASGAIGGDLFLDCTGHAALLIGGEYGVGVIDRSGELFNDRALAVQVPVAPGSPIASQTNATAHGAGWIWDIGLPTRRGVGCVYSSAHMDGDAAAATLAAYLDRTAPGVEMDALSVRRLTFRSQHRERFWVRNCLAVGLSAGFLEPLEASAIVLIELSLDALLDNFPATRGVMDIHAARFDVLFRYRWDRIVEFLKLHYVLSRRDEPYWRDHREAATIPPRLAELLQVWCHQPPSRTDFGMIDEVFPAASYQYVLYGMGFPPPGPAIVRGNARVNLGQLFQGVEQRARMLVASLPTNRAYLDALRDVRAAPAMEHSA

SEQ ID NO: 85443 - protein, 508 aa, Niveispirillum cyanobacteriorum
  misc_feature (1)..(508): tr|A0A2K9NH86|A0A2K9NH86_9PROT Tryptophan halogenase OS =Niveispirillum cyanobacteriorum OX=1612173 GN=C0V82_18 910 PE=4 SV=1
MIVAAPIRHIVIVGGGTAGWMAAALLSNVLPPDRLRLTLVESPDIGTVGVGEATIPPIQFFNRAVGIDEAEFMRATEGTFKLGIAFQDWVRPGHRYMHPFGQPGQAIKGVSFHAWWLRLRAAGYTVPLSDFWLAEKLADEGRFDTPSSDARSPKSTLAYAYHFDAGLYAAYLRTIAEPRGVMRVEATVAEVVLDPNDGTVSHLILTDGRRIDGDYFIDCTGFRALLIGQALGRPYEDWSHWLPANRAVAVPSARTRDPVPFTTATARSAGWQWRINLRHRTGNGYVYVADHIDDDQAAATLLANLDGQALSDPRFLRFTTGRRTQSRYKNVLAVGLSSGFLEPLESTSIHFIQHALIKFAATFPLSKDDPLSANLYNRMIGEELEQVRDFLILHYHANQRVGDPFWDRMRHMDVPDSLAEKMALFRARGCAIFPSQTLFQEPNWLAVLLGQEVEPDSYDPLADAGDLSDIRQGFDATRQIIAQTARAAPLHMDYLSRLIAPGNRRGAA

SEQ ID NO: 85444 - protein, 506 aa, Novosphingobium sp.
  misc_feature (1)..(506): tr|A0A257G4J9|A0A257G4J9_9SPHN Tryptophan halogenase OS =Novosphingobium sp. PASSN1 OX=2015561 GN=CFE35_20895 P E=4 SV=1
MTPSSDRRIRSIVIVGGGSAGWMTAAALANTLKQDCEIKLVESELIGTVGVGEATIPPIRTFNEMLGIDEREFVAKTKGSFKLGIEFVNWGRQGNRYFHPFGPHGRAFDIVGLHHFWLKAREAGDTTSFDDFSMAWSLAQRGRFTRPSPDPRQVMSTFDYAYHFDAGLYARLLRDYAEARGVKRHEGKVVSVRQHGETGFVEGVTLESGLELTGDLFIDCSGFRGLLIGEALKVGYQDWTHWLPCDRAVAMPCAKVGDMLPYTRSTACEAGWQWRIPLQHRTGNGYVYCSKFISDEDAEASLRANLDGEALAGPNKLRFTTGRRDKFWDKNVVAIGLSSGFLEPLESTSIHLIQAGISKLLALFPQRDFDPLIVDEYNHIASTEFERIRDFLVLHYKLTTRDDSPLWRYCASMDIPDTLKLKIDHFRRYGRHIARDMDLFGQPSWLAVHIGQGNIPQDVDPVFDFRGIDGRDYLGKLKAAMVASAEQVSSHQAFVNTHCAAEGAIA

SEQ ID NO: 85445 - protein, 522 aa, Sphingomonas sp.
  misc_feature (1)..(522): tr|A0A0Q6L8A8|A0A0Q6L8A8_9SPHN Tryptophan halogenase OS =Sphingomonas sp. Leaf339 OX=1736343 GN=ASG67_00075 PE= 4 SV=1
MFPGEEAVDGLVQHVVVVGGGSAGWIAACRLAAQAKRSGSGVRVTLVESTNVPSVGVGEGTWPTMRNTLAKIGITETDFIRSCDAAFKQGARFVGWTDGTPADAYYHPLNPPAGATEIDLAPHWLHRPATEATDFASWVDFQATLCDAGLAPKTILMPEYAGHANYAYHLDAGKFATLLRDHAVGNLGVEHVLGDVVRPHMADNGDITDIELADGRRLAGDLFVDCTGFAALLIGGVYGVPFRRCSDVLFADRAMAMQVPYGGEDDDITCHTVSTAQDAGWIWDIGLWTRRGVGHVYSSAHTSDDAAEAALRRYTGPRAEGLSVRRINIDAGHRERFWQNNCVAVGLSAGFIEPLEASALMLIETSMDAIADRLPRTRSAMDVMAHQFNDTFRHHWQRIIEFLKLHYVLTKRTDTAFWRDNTVASSIPDGLRERLDLWRHHSPAPQDFDHAREVFSWPSYQYVLHGMQFASDYPRVDAASPDAAMASRFVTRNDRARADLLHRAPRHRDLLRAVRDHGLQLV

SEQ ID NO: 85446 - protein, 508 aa, Pseudomonas sp.
  misc_feature (1)..(508): tr|A0A1B8TJV3|A0A1B8TJV3_9PSED Uncharacterized protein OS=Pseudomonas sp. AU12215 OX=1860123 GN=A9513_025385 P E=4 SV=1
MLNLSNYRRVAVVGGGSAGWFAALELRKLFLDQVEVVLVESETLGIIGAGEGSLPNFNRALDRYEIDRAEFMRETRSTYKLGLTLEGWRTGKKDDIFFHPFSFHSDGVDLNAWIEPNGSYPLASILLNQDLQLHHFPDAWRLYREGASQQQAEAYLQEQLKLYAVPPMAFHFDARKLAEYLREVALKRGVKRVNARVESVRLNERRHVTHLILENGELEVDFVIDASGLHRLIIDKALHSPWESYSDHLLLNQALPFFIPAQGAHPSLVTRAIAMKNGWMWCIPTQDRLGVGYVYSNQHTDKEGALREAQAYWGTEIEPVNHFAFSAGHFKEVWIGNVMAVGLSSGFVEPLEATSIGQTLVQLARFNQVVSACDGLIPQQLIDQFNRDITRHWDGIRDFLFLHYDTPRQDTEFWKAASSATPPSTYAELKRTFALRPPRDVDLEPYRGGTFSLFGPTSWMSVAAPLGVLTRKATAADLVPLSKEQRWNIGEFLAKVEPRMTAEAAMSI

SEQ ID NO: 85447 - protein, 499 aa, Sphingopyxis sp.
  misc_feature (1)..(499): tr|A0A1P8X1F3|A0A1P8X1F3_9SPHN Tryptophan halogenase OS =Sphingopyxis sp. QXT-31 OX=1357916 GN=BWQ93_17865 PE=4 SV=1
MTPMRLIIIGGGTAGWMAAACLRRFLPQGWSVTLVESEAIGTVGVGEATIPQIRLFNEALGIDEDAFLRATQGTIKQGIEFDGWTRPGHRYMHAFGAIGRGLGLLPFHQYWLRGRSLGIADSLDAYSLNEQAAHAGRFRRGAGGSAHAPAMPYAFHFDAGLYAAFLRKRAEGWGVTRVEGKVVSAERADNGDVAAVLLEGERRVAGELFVDCSGFRGLLIEGALATGYEDWSHWLPNDRAVAVPCGHGDTPQQPYTRAVAREAGWQWRIPLQHRIGNGYVYCSRFLDDDAAEAALLASLDGPAQAPPNRLRFTSGKRRKMWNRNVVALGLAAGFMEPLESTSIHLVQSGISRLLNLLPAGAPDPAIVAEFNQQSDFEWERIRDFIVLHYKATERADTPYWRERAAMDIPDTLAAKLDQFRAQGLIVREHEELFTEPGWLQVLVGQGVMPTAWHPLADTLSEADLKTFLDTNRLVIEREVAAMQPYDAFLNSMSPTGVAA

SEQ ID NO: 85448 - protein, 500 aa, Idiomarinaceae bacterium
  misc_feature (1)..(500): tr|A0A2D6I9Y9|A0A2D6I9Y9_9GAMM Tryptophan halogenase OS =Idiomarinaceae bacterium OX=1898113 GN=CMF17_10340 PE= 4 SV=1
MVKPLQRILILGGGSAGWMAAAALGKVLDTGNIEVTLVESEDIGTVGVGEATIPQLMLYNDLIGLDEDEFVRETGGTFKLGIQFTDWDKIGSQYFHAFGELGKNMEGVHFYQYWLRMQQQGLAGELDDYSLASQACLQKKFMRPIEAGNSPLSSIAYAFHFDAGLYARYLRKLAEGWGVTRIEGKVDTVQQHESGDIAGVTLENGDVLEADFFIDCSGFRALLIEQTLNAGFEDWQHWLPCDRAVTVGTKRNGDPWPFTRAAAQKAGWQWRIPLQHRTGNGHVYSSKFMSDDEALAILKGNLDGEMLGEPRLITFKTGMRRKSWSRNCLAVGLSSGFMEPLESTSLHLIQVAISKFFSFFPHQGYAQHDVDEFNQQMRFEYEAIRDFLILHYHATTRTDTPFWRYCKTMDIPPALQQKMDLFEENGRIFRYNNELFNDISWFEVMYGQGLQPKGYHALANRYTDEQLAHRMEEIRGVIRRSADYMPPHDEFIREHCLMRS

SEQ ID NO: 85449 - protein, 418 aa, Burkholderia plantarii
  misc_feature (1)..(418): tr|A0A0B6RXR2|A0A0B6RXR2_9BURK Tryptophan halogenase OS =Burkholderia plantarii OX=41899 GN=BGL_1c13030 PE=4 SV =1
MSQTISTQDTVDVAIIGAGPAGAVAAALLRKAGRSVLVLERQQFPRFSIGESLLPQSMAYLEEAGMLQAVVEAGFQFKNGAYFVHRDRVSSFDFRDKLTPGWGTTYQVERAVFDDLLIRCAAAQGAEVRFSHTVRAFTPGVRPRLDVLDEAGRDYVVEAGFVLDASGFGRVLPRLLDLEAPTGMPTRAAIFTHVEDRLPGGSTDRNKICVAVHPERRDVWYWMIPLANGRSSVGCVAESAFLDVPEAQREATLRELLRTEPTLARLVGDKPFLMPVRHIDGYSANVAQLHGAGYALLGNAGEFLDPVFSSGVTIALRSAHLAVKTLERQWHGEAVDWARDYGAALRKGVDTFRAFVERWYSGELQDVVFYEDKSPELKRMICSVLAGYAWDETNPFVREPGRRLDVLAELCRLHAVDA

SEQ ID NO: 85450 - protein, 515 aa, Burkholderiales bacterium
  misc_feature (1)..(515): tr|A0A257FLC4|A0A257FLC4_9BURK Tryptophan halogenase OS =Burkholderiales bacterium PBB2 OX=2015564 GN=CFE41_141 75 PE=4 SV=1
MTSAPTASPHFIIVGGGTAGWMSACLLARQLGPACRYTLVESSDIGIIGVGEGSTPYLRDFFRQLGLEERDWMPACHATYKAGIRFPGWSTVPGYESYVHPFFNEADRPLGQAFIQQANQRRRGEDVDANPADFFLAAELARQRRAPHYIHPAQHPATDYAYHFDSGLLGSFLKRHAQEQLGLQHCVDTVAAVERHAESGDITALRLQSSGQRLEGDFFIDCSGFRGLLINEALGEPFIPWVDRLFNDRAIAIPTALEPDQDIASETTSTALGHGWAWQIPLTHRYGNGYVYSSQFISDDTAEAALRAHLGPAAEGASARRLEMRVGRVARHWRHNCVAIGLSQGFIEPLEATALMLIQFSVQHLIEALQTGGDDPATLRERYNAEINRMFDGVCDYVQTHYLLNTREDTEYWRANRAKKPGSDRLAELLASWDAGTDFDAALGRHEAALMYQRPSWYCLLAGMGRFPSNAPGHKAAPSQAMALSGLQARASLVDQARKHFLPHREALRRLVTSA

SEQ ID NO: 85451 - protein, 533 aa, Sagittula stellata
  misc_feature (1)..(533): tr|A3K571|A3K571_9RHOB Tryptophan halogenase, putative OS=Sagittula stellata E-37 OX=388399 GN=SSE37_13838 PE= 4 SV=1
MHSMAEPVTSITVVGGGTAGWLAATYLRSKCAPKIAITLIESPNVPTVGVGEATVPHMPVTLREMGIDDKEFFRRCNTSFKMGVMFRGWNVDHKGRPFDYMNPFAPPPKIDGVEAGHYFQAFGAGRRDYIQSFSPLMDLLDAGKCPLSFNAKNDPMPRAGYAYHLDAGAFAKMLAEVGVARGVEHVLDDVDGVELDDTGHVAALNLRALGRRPVQLVIDCTGFKGLVIREALGEPFENYSDYLANDRAMALPIPHADPEVLPAATSSTALGAGWSWSVPLYHRIGTGYVYSSAHRTDDAARDDFMAHLGDRAPKGAEPRVIPMRIGRMRRAWVKNCVALGLSGGFIEPLESTAIHMIDMGIRWLLQYFPSRDYEESTRAAYNRCADEMYNEVRDFICLHYRLGNRTDTDYWCDARGLKITDRLEGWLDLWQRQLPVEMDIGRANLFDHNTFQAVLLGKRVYENGWGAARLNRSFALSEKRWKAFLRDSAARNMAVVKAKADHRRALRVLRGEATDGAVTRQSLGAVADEAVLF

SEQ ID NO: 85452 - protein, 495 aa, Sphingomonas taxi
  misc_feature (1)..(495): tr|A0A097EJ96|A0A097EJ96_9SPHN Tryptophan halogenase OS =Sphingomonas taxi OX=1549858 GN=MC45_16045 PE=4 SV=1
MKARRIVIAGGGTAGWMAAAAIARVMGRAAEVTLVESDTIGTVGVGESTIPPLITFNRLLGINEAEFMRATQATFKLGIAFDGWKQAGDSYFHSFGLTGTDHWAAGFQHYWLDGQTRGHGQPYDDYCLELIAAREGKFAHLPDDRMNYAYQLDSALYGRFLRRMAEADGAHRIEGKIAQVELDGASGDIAALRLESGTRIEGDLFLDCTGFRALLIEQALHTGFDDWTHYLPCDAAIAVQTESVAPAVPFTRAMAHDAGWQWRIPLQHRVGNGIVYCSRYLDHDAALDRLLGNVEGRVLTQPNRIRFVTGARRKQWHRNCIALGLSGGFMEPLESTSIHLIQRAILRLIRMMPAGDVSPRDVAEFNDQQHTDMLQIRDFLILHYKVTERRDSPFWRQCATMEIPDSLAQKIELFRETGRVFRKNEELFAENSWVQVMLGQGIVPRSHHPIAAKLGDDDMARLLSTLRRNVATTVRGLPPHAAYVAQYCGVAPDAA

SEQ ID NO: 85453 - protein, 502 aa, Sphingopyxis sp.
  misc_feature (1)..(502): tr|A0A1P8WWS0|A0A1P8WWS0_9SPHN Tryptophan halogenase OS =Sphingopyxis sp. QXT-31 OX=1357916 GN=BWQ93_08370 PE=4 SV=1
MDEGPFNLIIVGGGTAGWMCAAACAAKLDPALYRVRLVESEEIGTVGVGEATLPQMKDFNDFLGLDEVEFMQATQASFKLGIEFVNWGRQGDRYVHPFGTFGRPIGEADFFSYWVRAHNAGQAAPLFDYCFPIVAALQNRFMLPNGDANDVRNAFAYAYHLDAFLYARYLRRWAEARGIERVEGRIVDVERDGQTGNIAAVTLASGTKVAGDMFVDCSGFRSLLMGQTLGVALEDWSRWLPCDSAQAVPSVRSPDFTPYTRSTRRPAGWQWRIPLQHRTGNGYVYSSADISDDEAAATLLANLDGEALAEPRVLRFKAGKREKAWAHNVVGMGLAGGFLEPLESTSIYLVQMAIMHMLTLLPPGPAIDPALPAEFNRVMDVEYDRIRDFLILHYIANDADAPLWERVTTMDVPDSLAGKIDRFRHRAHVQAYRDGLFGPPSWQAVFVGQGVVPEAADRLADMLPDDQLAERLAGLHATIARGAASAPLHADFVAHYCPAPAP

SEQ ID NO: 85454 - protein, 500 aa, Novosphingobium sp.
  misc_feature (1)..(500): tr|A0A257GBI1|A0A257GBI1_9SPHN Tryptophan halogenase OS =Novosphingobium sp. PASSN1 OX=2015561 GN=CFE35_10410 P E=4 SV=1
MTQASTKRRIIVAGGGTAGWMAAAALARTMGDAIELTLVESDAIGTIGVGESTIPPLVAYNRLLGIAEADFMRATQATFKLGINFENWRVEGENYFHSFGTTGRDHWSAGFQHFWMHGLTKGHKESYDDYCIELQAAMKSKFAHLPDNRINYAYQLDSSLYAVFLRKLAEADGCRRVEGKIAEVELNPETGDIAALRLDSGQRLEGDLFLDCTGFRALLMEGALHVGYDDWSHWLPCDSAIAVQTASVRAPIPYTRAIAHDAGWQWRIPLQHRQGNGIVYCSRYLSQEAAQERLFATVEGERLTKPNVIRFTTGARRKQWHRNCVAIGLSGGFMEPLESTSIHLIQRAILRVIRMLPAGEISARDVAEFNEQQMTDMEQIRDFLILHYKATDRRDSPFWRQCAAMDIPDSLTHKIELFRETGRVFRKNEELFVENSWVQVMMGQGIMPKSYHPVATKLSDAELAHLLKGLRESVAKTVAGLPDHHAYVAQYCGAQEARAA

SEQ ID NO: 85455 - protein, 515 aa, Novosphingobium sp.
  misc_feature (1)..(515): tr|A0A257GBM0|A0A257GBM0_9SPHN Tryptophan halogenase OS =Novosphingobium sp. PASSN1 OX=2015561 GN=CFE35_10655 P E=4 SV=1
MTAPDPLRSILIVGGGTAGWSAAALLSAVLAPAGTAITLIETSDVPTVGVGEATIPPVFAFLANCGIDEIDFIRHCQATFKLAIRFDDWLEQGHSYWHPFGNIGVTINQRPFHHYWWKNKAAGHGESMGDLCPAIALAQDGKFAFPPPDGSFPGGALNYALHFDAGLVAQYLRRHAEARGVQHIDARIAGTVLAEDGAIAAVMLADGRQIAADFFIDCSGFRGLLIEEALHAGYEDWTKWLPCDRAVAMPTATVGAPAPYTVSAAHEAGWRWRIPLQSRVGNGYVYSSRHVSDEAAAETLRGSVTGEALAEPRFLRFNAGHRKAMWVKNCLAVGLSSGFLEPLESTSIHLIHTALNRLLDYFPDRRCDPVLAAAYNREAADEYAHIRDFLLLHYVPNRRFGEPFWDEIRATPLPDSLAAKLELFQRTGRVVSRRRELFADVSWFFVAAGMGIEPQALDPLADAAPFDEVRGVIGQIAEVMGRYRSAAPTHQDMLARLLDPALKGRPNFAQVWGGA

SEQ ID NO: 85456 - protein, 513 aa, Sphingomonas taxi
  misc_feature (1)..(513): tr|A0A2W4Z7P3|A0A2W4Z7P3_9SPHN Tryptophan halogenase OS =Sphingomonas taxi OX=1549858 GN=DI640_03480 PE=4 SV=1
MHEIQNIVIVGGGTAGWLTAGVIAAKHQARRQHGFTVTLVESPNVPTIGVGEGTWPTLRSTLKKMGVSETELFRQCDASFKQGARFNRWTTGAPDDGYYHPLMLPQHFGQVNLAPHWLADEGGTTFCDTVTPQGRICDEGLGPKTIATPEYDGHANYAYHLDAGKFSHFLQRHCCDTLGVRHVKADVTEVRLDESGDIASLDTEQGISIAGDLFVDCTGFAARLIGGPMKVPFRSCTDVLFCDTALAMQVPYDLPDDPIASHTISTAQSAGWIWDIGLPTRRGVGHVFSSSHISVDAAEQELRDYIGPAARDLTARRLAIRAGHREQFWARNCVAVGLAAGFLEPLEASAIVLIELSAKMIAEQMPACREVMDVVARRFNDTTSYRWGRIIDFLKLHYALTKRTDTAFWRDNVRPETIPDRLMGLMELWRFQSPWVHDEFDRAEEVFPSASYQYVLYGMGARTAVMPGTIDDDLALARRARHDNQMQTQRLVSSLPGHRDLIDKIKRHGLQSI

SEQ ID NO: 85457 - protein, 500 aa, Sphingomonas taxi
  misc_feature (1)..(500): tr|A0A097EJX4|A0A097EJX4_9SPHN Tryptophan halogenase OS =Sphingomonas taxi OX=1549858 GN=MC45_17590 PE=4 SV=1
MESRRIRRVVILGGGTAGWMTAGALSHSFGAAVTVTLLESEEIGTVGVGEATIPTIHWFNSLVGLDEADFLRATKATFKLGIAFVDWRAPGHRYFHPFGHYGAALPGVAFHHRWLKAATNGLALPLGALSLAERLADENRFARPSGDARSILSSLGYAYHFDAGLYAAYLRRVSETRGVTRVEGRLNTVERHPDTGFVSALTTSRGERLEGDLFIDCSGFRALLIDDVVGEPFEDWSHWLPCDRAVAVPCARVAPTTPYTRSTARAAGWQWRIPLQHRIGNGYVYASDQCSDDAAIATLLANLDGEPLAEPRLLRFKAGMRRRPWRDNVVAIGLSSGFLEPLESTSIHLIQSGIAKLLTLFPDRDCDPALASRFNTTFARDMDGIKDFLILHYHATGREEPLWRHCRAMSLPDGLRERIAQYRRSGRLILDPDELFREASWLAVLDGQGIKAQGYNPLADAIDPAANRAQVQQIADVIARAVPTLPMHDAVLAQMIGTPS

SEQ ID NO: 85458 - protein, 499 aa, Sphingomonas taxi
  misc_feature (1)..(499): tr|A0A2W5PC34|A0A2W5PC34_9SPHN Tryptophan halogenase OS =Sphingomonas taxi OX=1549858 GN=DI544_01580 PE=4 SV=1
MPAAIERVVIVGGGTAGWMTAALLARVLGGQVAITLVESDEIGIIGVGEATIPPIQNVNAVLGIDEAEFLRETKATIKLAIRFEDWGAIGDSYYHTFGAAGRNLPFCSFHHFWTRARRAGMDVDYWDFDLNQLCAREGKFAKIQSGGDPTWNLPYAYHFDSSLYGRYLRGYSERRDVRRVEGLVQHVRRDAQSGAVAALALRDGTEIAGDLFIDCSGTRGLLIQQQLNVGYEDWGHWLPCDRAMAVPSERFAHTAPYTRAIARRCGWQWRIPLQHRNGNGLVYSSRHCSDEQAAEILLNNLDGPALAEPRIIPFRTGRARRQWDRNVVAVGLSSGFLEPLESTSIYLIQAAIVRLLHLFPRDGIDERVVREYNRQSQIEYETIRDFIILHYHATRRDDSAFWRDVRAMPVPERLAAKIALFRASGVLTQDPLDIFMEPSWVQVLLGQGVLPADHHPLADGPSDAELAEQLRQVAAQKREPLPNMPLHDDFLRAFGGSAG

SEQ ID NO: 85459 - protein, 497 aa, Idiomarinaceae bacterium
  misc_feature (1)..(497): tr|A0A2D7YRV7|A0A2D7YRV7_9GAMM Tryptophan halogenase OS =Idiomarinaceae bacterium OX=1898113 GN=CMF19_08910 PE= 4 SV=1
MSEIKQVVILGGGTAGWMSAALIGKMLGKQLNITLVESADIGTVGVGEATIPPIVGFNRALGIDEKTLLQRTGATIKLGIQFEHWGQVGDSYMHAFGDIGKAFPFCDFHHIFHRAQSAGLADSLWDYSLNYQSAKAGRFAPLQNLPNTQLKGTEHAYHFDASKYAQLLRESAEQFGVTRKEGKVEEVVQTDAGDIEALILQSGERIAGDLFIDCSGQRALLIEKTLGVGFEDWSHWLPCDRAIAVQSSHDEGHEPVPYTRSIAHEWGWQWQIPLQHRMGNGLVYCSRYVDDASAKERLLSKLPGEALTEPRVIPFRTGMRRQQWHKNVVAIGLSSGFLEPLESTSIHLIQTAVTRLLKHFPHQQIMPASVTAFNRQFRTEMTQVRDFIIAHYALTQRQDSGFWRHCGMMDIPESLAARIDQFRQSGNVQRYQDELFAEVAWQQVLLGQNCRPQQHHPLAQQFTETQLRELLESLRALIAHGVSMMPSHNQFIQRSLT

SEQ ID NO: 85460 - protein, 514 aa, Hephaestia caeni
  misc_feature (1)..(514): tr|A0A397NIU5|A0A397NIU5_9SPHN Tryptophan halogenase OS =Hephaestia caeni OX=645617 GN=DFR49_3337 PE=4 SV=1
MTHPVKKIVIVGGGTAGWLTAGVIAAKHRSRMPGGFSITLVESPNIPTAGVGEGTWPTLRATLARMGVSETELFRTADAAFKQGAQFARWTTGADDDAYYHPLMLPQSFSQLNLVPHWLTSGEGESFCDAVCPQGRLCEDGLAPKTIATPEYEALANYAYHLDAGKFAPFLQRHCCDVLGVRHVLADVRRVAMAENGDIRAIVTEQAGEIEGDLFVDCTGFRSILLGEALGVAFKDCNDVLFCDRALAVQIPYASEISPIASHTISTAQSCGWIWDIGLPERRGTGHAYSSSHISDDAAEAELRAYIGPAADGLTVRRIKFRSGHRETFWKRNCVAVGLAAGFLEPLESSAIVLTELSAKMIAEQLPVCREVMDVIAARFNATTHYRWGRIIDFLKLHYVLTRREDTAFWRDNVRPETIPDRLKELLLLWRYQSPWFHDEFDRVEEVFPAASYQYVLYGMGYGTEVEPDAVAGDARMAERAMRENMRQTERLRAGLPRHRDLIRKIHEHGLQPV

SEQ ID NO: 85461 - protein, 524 aa, Duganella sp.
  misc_feature (1)..(524): tr|A0A4Y9SBP7|A0A4Y9SBP7_9BURK Tryptophan 7-halogenase OS=Duganella sp. DN04 OX=2561932 GN=E4L98_21810 PE=4 SV =1
MKTLPKQGVRNVLIVGGGTAGWLTAAFLARQLGTGADENAVRITLVESKEIGIIGVGEGTFPSIRGTLATIGIDEARFIRECDATFKQGIHFQHWVREPGMPGADHYFHPFSLPSQRPGGPELLPYWLQGGAPAGVGFAAAATMQKRVADAAHAPKRPSDADFMGPLNYAYHFDAGKFATLLATHAKSLGVQHVLATVERVELDDRGAIGAVHTREAGALTAELYIDCTGFRAALIGEALGTSFRNINDVLFVDRALAMQVPYERPDAPIPSYTISTAHEAGWTWDIGLHQRRGIGYVYSSRHTDDARAEQVLRNYIGPASKDLHPRQLKLNVGYRDVHWVKNCVAVGLSGGFLEPLESSGIGLIETAAYLISYLFPHDGDMEPVARTYNEMMKARYERIVDFVKLHYCLTQRKDSRFWTDNTDPASIPQTLQDKLAMWRHRAPHRMDFVVDYEMYPPSSWQYVLYGMEYPTDLYANARTLPRMEEARKEFAMIAQMSQRALADLPPHRAMVEHLAQRGQRKSA

SEQ ID NO: 85462 - protein, 525 aa, Pelagibacter sp.; identical to SEQ ID NO: 83663
  misc_feature (1)..(525): tr|A0A1Z9LTE2|A0A1Z9LTE2_9PROT Uncharacterized protein OS=Candidatus Pelagibacter sp. TMED197 OX=1986808 GN=CB D57_02650 PE=4 SV=1

SEQ ID NO: 85463 - protein, 484 aa, Sphingomonas naasensis
  misc_feature (1)..(484): tr|A0A4S1WHB3|A0A4S1WHB3_9SPHN Tryptophan 7-halogenase OS=Sphingomonas naasensis OX=1344951 GN=E5A74_12195 PE= 4 SV=1
MTAAALVRFLGPGFAVTLVESAEIGTVGVGEATIPQIRLFNAGLGIDENQFIAVTQATFKLAIEFVGWTRGGRYMHAFGEVGRDNGGVAFQHSWLRGLAEGVAQPLAAYALNNAAALANRMQRGPARTAQILPEMPYAFHFDAGLYARFLRDYAEARGVTRHEGKIVEVRRDAETGDVSALHLDGERAIPGDLFIDCTGFRGLLIAEALGAGFEDWSHWLPCDRAMAVPSERAADFTPYTRATAHPAGWQWRIPLQHRTGNGIVYASDALSDDEAAAQLLANLDGAPLGDPRPLRFTAGKRSAFWQANVIAIGLSSGFLEPLESTSIHLIQSAIERVLKLLPGRRISAAQRAEYNRQTNLEVDRIRDFLILHYWANDRDEPFWRARREMPLPDGLAHKIELWRASGQIVREEADLFSEVAWLQVLAGQGIAAESHHPLADQPPAAQIAEYLDLLAKLTAREVAQMPDHAAFIRQHCAAREEIAA

SEQ ID NO: 85464 - protein, 490 aa, Sphingomonas taxi
  misc_feature (1)..(490): tr|A0A097EKP8|A0A097EKP8_9SPHN Tryptophan halogenase OS =Sphingomonas taxi OX=1549858 GN=MC45_09825 PE=4 SV=1
MSGTPIGRVVIAGGGTAGWMAAAAASRFLNDGQRTITLVESDAIGTVGVGEATIPPIRGFNARLGIEEADFLRATGGTPKLGIEFVDWGARGERYMHPFGTPGRDIEGLNFHQLWLKLRERPGIGDFEGYAMAAVAARAGRFAPPSPDPRSPLSGVDYAYHFDAGLYAAFLRRRAEEQGTVRVEGRITGVEQDERGHVTAVRLEGDRRIAGDLFLDCSGFRSLLLGEAMGVGFEDWSHWLPCDRAIAVPTERTQPLLPYTRATAHDAGWQWRIPLQHRTGNGHVYASAFTDDDTAERILMANLDAAPTATPRRLSFTAGRRRQSWAGNVVALGLAGGFLEPLESTSIHLIQEGIAKLFALFPDDRFSPVVRDEYNRLMADHYTAIRDFIILHYAATRRRDTPFWRHVGSMALPETLARKLALFAEKGRIFRYDDELFTVPSWVAVLLGQGIVPTGYDPIVDALDADRVAEALRHMRRQNATLAQQLPPAG

SEQ ID NO: 85465 - protein, 543 aa, Idiomarina insulisalsae
  misc_feature (1)..(543): tr|A0A432YEQ1|A0A432YEQ1_9GAMM Tryptophan 7-halogenase OS=Idiomarina insulisalsae OX=575789 GN=CWI71_08265 PE= 4 SV=1
MTKRKILIVGGGSAGWMTAAYLNGALNRRGEDHRVDIELLESPDTPRISVGEATIPSMRHLLAVVGVNELDFMRATEATFKQSIKYVNWVHNDNSFYHHPFSSLRAQPIDYAGSDWLRSDRSVPFMETCSIQPLVCEWGRAPQMFGEWRMGARLNYAYQMNAQKFADYLRDFSNARGVRHIMANMQQVEKHANGDIRAVITDQGETLGADLFIDCTGFRSLLLEQEMGVGFEDFGKYLLCDRAVTMHVPYETHYPGMVRPYTTATALSNGWIWDIPMQSRRSIGYVHSSAFIDKEAAEKEMRAYQGNNTENLPCRFIPFKAGRRHQQWQGNCVAIGLSGGFIEPLESTGLYLSDLGAVLLAEHFPWHQDDMKPLANRYNRLMTNRYYEILDFINMHYCMTKRTDTEFWRTVQQREHITDRLLAKLDFWRSKPPSMHDFQDQFFPGMPTAAAAGVDSGDTRPPIDTGGLWNHESYECILYGMEFLQQECDKWFGTGRPPTRVNPAILQRLQMARQMLPPHELWLQRVLGMAEYRPAGTPAGWVV

SEQ ID NO: 85466 - protein, 517 aa, Shewanella sp.
  misc_feature (1)..(517): tr|A0A516G1D6|A0A516G1D6_9GAMM Tryptophan 7-halogenase OS=Shewanella sp. YLB-06 OX=2593655 GN=FM037_21320 PE=4 SV=1
MPEKNKITKVLIVGGGTAGWLAANHLGKRFSDLDGPNIEVTLIESPNIPNIGVGEGTVPMMRETLRYLGIDEGYFVQSCDATFKQSIKFVDWLYNPKEKSHSYHHLFDYPVSHDSAFYWHKTSASSRDSFANSVSVQGVLADAGFGPRLVTQPQFQGVTSYAYHLDARKFSAVLRLNALSKFGVSHILDDVLEVTLSDNGDISTVSTSQNGELEADLFIDCTGFSARLIEKACKVPFVDKGDVLFVDSALAVQVPYEKTDDAIPCFTLSTAKEAGWIWDIGLTERRGVGYVYSSRHSSRQDAEKVLSEYLGGKVSEAEFRHIPMRIGYREKAWHRNCVAIGLSGGFVEPLEATGLLVFDVTSRMLAECIPNKLSSMPLVAERFNKRTAETWNKVIDFIKLHYVVSKRNDTEFWSDNRKEASIPDSLKQKLALWSSELPNRYDFTSTLEIFNLENYQYVLYGMDFDTDLGCSEVSKDGLDKFLSEQNKIAEFIHQAKTQLEPHRELIDKIHKFGIQKV

SEQ ID NO: 85467 - protein, 504 aa, Sphingomonas taxi
  misc_feature (1)..(504): tr|A0A2W5ANU3|A0A2W5ANU3_9SPHN Tryptophan halogenase OS =Sphingomonas taxi OX=1549858 GN=DI640_13265 PE=4 SV=1
MANHPLRIVIAGGGTAGWMAAATFARFLETGYEIDLIESDEIGTVGVGEATIPQIHLFNDALGLDEDAFLRATGGTFKLGIEFVDWFKPGHRYMHAFGDVGRDVGLLPFHQYWLRARSLGLAGDLGAYSLNTHAALAERMQRGPARTARTLPSMPYAYHFDAGLYARYLRRYSETRGVNRIEGKIVRVTRDGESGDVAGLVLENGTTVAADLYIDCTGFRGLLIEEALGTGYEDWTHWLPCDRAIAVPSARSEKFTPYTRSTAHAAGWQWRIPLQHRTGNGVVFSSAHISEDEATATLLSGLDTPAMADPRTITFRTGRRKQIWNRNVVALGLAAGFMEPLESTSIHLIQSAISRLLKLLPGRVIADADRAEFNRQSDFEYERIRDFIILHYKATARDDTPFWRQCRDMAVPDTLAAKIELWRGNGHIVREHEELFTEVGWLQVLAGQGIIPAGHHPLADAISTNDLGEFMDTIDKLNAREVAQMQDHAAFVAQHCAASAGLGA

SEQ ID NO: 85468 - protein, 508 aa, Sphingomonas taxi
  misc_feature (1)..(508): tr|A0A097EF52|A0A097EF52_9SPHN Tryptophan halogenase OS =Sphingomonas taxi OX=1549858 GN=MC45_07120 PE=4 SV=1
MRDDAIRRVVIVGGGTAGWMAAAAMSRVLGEMPGLTIELIESDEIGTVGVGEATIPQIVLFNKMLGLDEAQFMRETRATYKLGIEFVDWVRPGHRYVHPFGSYGLDMKGIEFHHFWLKGQALGDTTPLDAYSLAIVAGLQGRFGHPRPDQPGSPLSKLSYAFQFDAGLYAQLLRRLAEANGVRRIEGRIVAAERDGETGHVSAVALAAGTRVAGDLFIDCSGFRGLLIEGEMQAGFEDWSAWLPCDRAVAVPCAHGGDRQPLTRSTARAAGWQWRIPLQHRIGNGYVYASDYLSDDEAAATLLANLDGAPLADPRFLRFTAGHRRRAWVGNVVALGLAGGFLEPLESTSIHLVQSAIARLLTYWPTRRFDRVEIDKFNAAHVADYLDIRDFLVLHYKATQRRDTAFWDYCRMLAPPPGLAEKLAVFAANGRVFREHDELFTETSWLSVMVGQGVAAGGYHPAADLLSDAETLSRLNHIRRVVEETAHLLPRQDELLAHYGCAMTGVAA

SEQ ID NO: 85469 - protein, 514 aa, Sphingomonas sp.
  misc_feature (1)..(514): tr|A0A3R9Y493|A0A3R9Y493_9SPHN Tryptophan 7-halogenase OS=Sphingomonas sp. HMF7854 OX=2315330 GN=HMF7854_02690 PE=4 SV=1
MQPVRTVTIVGGGTAGWMTAAALSQWLTKVEIRLIESEEIGTIGVGEATIPHIRNFLPLAGIDPLAMIARTKASFKLGIQFVGWGAEGESYVHGFGKIGRDMLWLHTHQLWLAARERGLPLRSFDHYALNCAAALRNRFCFPDARNPQSPLADLDYAYHFDASLFARFLRKESEQRGVRRIEGRIVAVDVNGEWGEVERVRLADGRELDGDLWVDCSGMRALLIGEALGVGYEDWSHWLPCDRAQAVPCESVSPLTPYTRATARAAGWQWRIPLQHRIGNGIVYSSALMSDEQAAETLLGSLDGAPLGDPRPVRFAPGRRLEAWRRNVVAIGLSSGFLEPLESTSIHLIQTGIQRLLAMFPANGMAEPDIAEFNRQARFEMEDVRDFIIAHYAVTRRTGEPFWDHVRTMAVPDSLAERLALFASSGRFFKHGAAELFAEESWVQVLLGQGFAARADPVTRFVDDRALGGFLGEVEEVIADVAGRMPDHGAFVAGLPERSPRSSAPAVSFGPVVR

SEQ ID NO: 85470 - protein, 488 aa, Sphingomonas taxi
  misc_feature (1)..(488): tr|A0A2W5PFU5|A0A2W5PFU5_9SPHN Tryptophan halogenase OS =Sphingomonas taxi OX=1549858 GN=DI544_01810 PE=4 SV=1
MKKRVVIAGGGTAGWLAAAALAVHLGPLIQVTLVESDEIGTVGVGESTIPTTRSFHQLLGIDEAAFVRATGATFKLGISFENWDRIGDRYFHPFGAIGRSVMMADFQHFWLEARARGLSGGFTDHSFEAAAAAAGAFAIGGEAPLSYAYHLDATAYGQFLRALAEARGAVRREGRIAQVARDERGDIAAILLADGTRVEGELFLDCTGFRALLSEGALATGFEDWSHWLGTDSAFAVQSEATAPPAPYTRAIAHDAGWRWRIPLQHRVGNGIVFSSAHLSDEAARDALLRSLDGAPLFEPRLLRFRTGRRRLAWHRNCIALGLAAGFVEPLESTSIHLVMIAVTRLIQSFPFGADSTALAQRFNDQSRAEWEHVRDFIILHYKLTHRDDSPFWRRCRDMAVPESLAARIALFRESAMAHQGQDELFRVDSWAAVMLGQGVMPAAHHGLPGVMATADLHRALADVRAKIAHDVARLPTHGDFVQRFASA

SEQ ID NO: 85471 - protein, 515 aa, Sphingomonas naasensis
  misc_feature (1)..(515): tr|A0A4S1WJB3|A0A4S1WJB3_9SPHN Tryptophan 7-halogenase OS=Sphingomonas naasensis OX=1344951 GN=E5A74_08930 PE= 4 SV=1
MRAPNALRKVCIVGGGTAGWIAAAVMAHHFKGKLFEIELVESDDIGTIGVGESTIPPFMELIARLDINEQDFVRATQASFKLGIEFEDWHRKGESYFHPFGAIGQQVELSDFYQCWLKAKHAGQPFELMDFAPAAAMARDGRFMLPFKAHKTPIGGAAYALHVDAKRVAQFLRAHAEERGVKRTEGIVSDVRLDDRGFVDTLTLNDGREVSADFFIDCSGFRALLIGKALGVGYEDWSEWLFCDRAIAAQTQNVGAPRPYTLAQAQDYGWRWRIPLQHRTGNGHVFCSEFLSDDEATRILLDQVEGEVVAGPMVVPFKTGVRDKIWHKNVLSLGLASGFIEPLESTAIHLVYRGMDFFFRYLPDRNCDPRLAAEYNRRMTADYVEIRDFIVLHYCATQRDDTPFWRKCRDMTLPDSLRERIELFRTSGVLREGLDELFRAVSWQSVLEGMGIHPASYHPLVDRIDEAWLFDAMDKVRSQLGQVVATLPTHQEFIDAHCRADAVDLGQPARPAAAR

SEQ ID NO: 85472 - protein, 513 aa, Sphingomonas naasensis
  misc_feature (1)..(513): tr|A0A4S1WUM5|A0A4S1WUM5_9SPHN Tryptophan 7-halogenase OS=Sphingomonas naasensis OX=1344951 GN=E5A74_02475 PE= 4 SV=1
MTGTVPRAPLARIVIVGGGSAGWMTAAALARLVAAGTTITLVESDEIGTVGVGEATVPPLLDFNAALGIDENAFVAATQGTFKLGIAFEDWGHVGNRYVHPFGKYGQLTFGIPFHQIWLRQRLLGVAAADPGPFDHYAISIAAAARGRFSKPIANPEAVLSGLAYAYHFDAGLYARFLRDRAEAQGVARVEGKIAHVEKSPDNGHLSGVLLADGRRIEGDFFVDCSGFRALLIGEALGVPYRSWQHWLPCDSAVAVPSATVGPPAPYTRSIAEKAGWRWRIPLQHRTGNGHVYSSAHIDDDAAARALTEGLDGAPLADPRVLRFTAGRREKLWEKNCVAIGLSAGFIEPLESTSIHLIQSGIFRLMALFPDRSFAPVEIDAYNRWLIDEYENVRDFIVLHYHASTRSDSDFWNYCRTMDIPDSLAARLELWRGKGRVFRGSNSLFTEESWTAVLFGQGIIPHDADPLTAMLPVDETTRFLTHMRTIIAQAAEAMPRHEDYIARHCAAAQRSAA

SEQ ID NO: 85473 - protein, 503 aa, Streptomyces sp.
  misc_feature (1)..(503): tr|A0A2A2YPW7|A0A2A2YPW7_9ACTN Tryptophan halogenase OS =Streptomyces sp. SA15 OX=934019 GN=CLM62_39605 PE=4 SV =1
MEEYDVIVVGGGPAGATVSAAVALKGHRVLLVERHTFPRYQIGESLLPSTVHGVCRILGVEDEVAAAGFKPKRGGTFRWGRGRDPWQFSFALSPRLADPTSFAYQVERSRFDTILLDNARRVGVDVREGCRVTGVLADEERVRGVRWTGPDGEPREAGARYVVDASGNGSRIHARVGGKRTYSDFFRNMAVFGYFAGGERLPAPNDGNIFCAAFDEGWIWYIPLRDDLTSVGAVVSQENAAAIQRDPAAAWRRLIDACPEVRDLLDGVPRATEAPYDEVRVRRDWSYWKSRLWRPGMVLVGDAACFVDPVLSSGVHLATYGALLAARSINSGLAGVLDEGRLFDEFEARYRHEYGLFYEFLVSFYDMHQDERSYFWKARKLTNVGATELEAFVELVGGLASGDASLTGPGAAGARLTAASSDFDRAVGRLPGSDGLRNPLLESATVRQVFQEGAILQERGVFGGPLEEETPVRAGGLVASEDGLAWVNPAPDKRVGGGQSISG

SEQ ID NO: 85474 - protein, 502 aa, Sphingomonas sp.
  misc_feature (1)..(502): tr|A0A429VBL6|A0A429VBL6_9SPHN Tryptophan 7-halogenase OS=Sphingomonas sp. HMF7854 OX=2315330 GN=HMF7854_11425 PE=4 SV=1
MSDADPARIASVLIVGGGTAGWMAAAALAKHFHGSGLVITLVESDEIGTIGVGEATIPTIRRFIARLGLSDETVMRATGATAKLGILFEDWHRKGEGFIHPFGLYGEDYGELGFHHLWLQRRRGGDERPINDYSFGAQLAERGRMAIPPRDTPRTPFAVFDWALHLDAAAFARLLRDYAVNSGVKRVEGRIISVEADAGMVRSVTLADGNTLAADLFIDCSGFRGLMIEKALGVGFEDWSEWLPCDAAVAVQSEWKAGDPPPFTRAKACDYGWQWRIPLRHRAGNGYVYSTRHLSADEATAALLADLPGKPLRDPLSIPFRSGRRTRAWQGNTVALGLASGFLEPLESTSIALIETGIERLKELFPTRDLDPALADEFNDATAREMERVRDFIILHYKLTRRDDTPFWVHCRDMAVPPTLERKLALWDARGEFVRYRWEMFHPASWLAMYAGFQRIPRSLHPALATVPAGLTGEGLDRIRAVIDRQVAASPSHQAFLDKVHG

SEQ ID NO: 85475 - protein, 467 aa, Sphingomonas naasensis
  misc_feature (1)..(467): tr|A0A4S1WCA0|A0A4S1WCA0_9SPHN Tryptophan 7-halogenase OS=Sphingomonas naasensis OX=1344951 GN=E5A74_13715 PE= 4 SV=1
MSDRAIRSLAILGGGIVGLSAAAAFARALPQLAVSVIETAPDPAALADRLPGSTSTIHRFHARIGLDEATLLRAGAAVPRLGLRFENWPAGAARWFHVHGEHGAPAGNVAFHQLWARARREGRAEAWHRHAVAGVLAEAGKFVHPRPGTPFAAFDYALRLVSERYCAALAALAASLRVTGLAGAFGGIERRADGGVAALLLAGGRRIEADLYIDASGPAAPLAAALAPGFEDWSATLPFDRLDLGAAPASAADPADTIIGGQAGWQFAAPLPGKTILGRVHGDRGEGQSIAIRPGRRSTPWTHNVVALGDAAVALDPLHWPNLHLAQSGIMRAIELLPGRDCHPVEIAEYNRRANAEAERMRDFQALHYLRLGLPIAVPNSLARILALFERRGQFVHEDEDSLLEEIWISALLGLGVLPQAIDPSAAGVPAEVAAAGMAEMRAGLAALPARVPAYAEYLARCEIPAV

SEQ ID NO: 85476 - protein, 519 aa, Sphingomonas naasensis
  misc_feature (1)..(519): tr|A0A4S1WWU2|A0A4S1WWU2_9SPHN Tryptophan 7-halogenase OS=Sphingomonas naasensis OX=1344951 GN=E5A74_02470 PE= 4 SV=1
MTNSVRNVVIVGGGTAGWLTAGYLAKLLAADRPGGAAITLVESSDIGILGVGEGTFPTIRKTLARIGVREADLVRRCGASFKQGASFINWRRAPGTPGRDDFLHAFQEADRDGPELLPYWLLGVAGDRPWDAASTPQRRAADACRAPKLPGHPDYVGPLNYAFHFDAGAFAELLREQGIANGVTHLVDTVDAVQLGEDGGIAGLSLRAHGQLTADLYIDCSGFRAELIGKALGQPWKSCRDTLFCDSAVALQLPDQAPDEPIASSTLATGQTSGWIWDIGLAARRGIGHVYSSAHCDADAAERALRAYVGQAGARLETRSFRFDAGYREISWYKNCVAVGLSGCFFEPLEATGIVFSEVAAALIANLFPWAGDFETAARQFNANMRRRYARTLDFLKLHYCLSERRDSDFWNDNVDPRSVPDSLHELLDRWRHRPPNELDIDTNVDIFPEASWQYVLYGMGWKTDLSAKAGVYRFADEARAAFAEVRRHGEFAVQQLPSNRALIRFAQGAAFGAGAHAA

SEQ ID NO: 85477 - protein, 520 aa, Novosphingobium barchaimii
  misc_feature (1)..(520): tr|A0A0J7XXQ8|A0A0J7XXQ8_9SPHN Tryptophan halogenase OS =Novosphingobium barchaimii LL02 OX=1114963 GN=V474_162 30 PE=4 SV=1
MTIDNPSSCRVVILGGGTAGWLAAAYLSRTLKMTGITLVESSEIGIIGVGEGTFPTIRSTLAGLGISEAEFLVRADATFKQGVLFEGWATGKDTYFHPFNIPIGGEDEALLPHWLADTSPQRPSWADAVTVQEQVIRAGRAPKRPEDPDFSGPMNYAYHFDAARFADYLREISIAAGVERIDGKVAAVQRKADGDIAALELANGRIVPGDFFLDCSGFRALLIGQTLGADFTSCAGSLFNDRALAMQVPYAQPGAPVRPYTLATAHEAGWTWDIGLTERRGVGYVYSSRHCSDDEAEATLRRYVGPQGDVLSPRQLRFETGYRQRQWIGNCVAVGLSAGFFEPLESTGIMLIEAALRMVGEFLVPNVLAGAARDARDAAARSFNRLMSARFERIVHFLKLHYCITRRSDTAYWRDNADPATIPEPLRDMLAQWRHRPPSRFDFVVDLETFLPPSYHYILYGMGFETSLGNARYSGAAQAREVFARVRSAHAGARGGLPDHRALLNHYHARTGIQSSKVSR

SEQ ID NO: 85478 - protein, 516 aa, Sphingomonas taxi
  misc_feature (1)..(516): tr|A0A2W5B879|A0A2W5B879_9SPHN Tryptophan halogenase OS =Sphingomonas taxi OX=1549858 GN=DI640_00770 PE=4 SV=1
MTKRILIVGGGTAGWLTAGYLAKRLGADLPGGVAITLVESRDIGILGVGEGTFPTIRRTLATIGIDEADLIRRCGATFKQGAKFVHWRHAPGQGATDHYSHPFQVADASDGLDLLPYWLLGHGGTENWDEVSNPQKKAADRHRAPKLPTNPDYVGPLNYAFHFDAVALAALLREQGVKNGVRHLTDTVSEVLLDADGAIGGVRTERNGMLDADLYIDCTGFRAELIGKAMKIPFRSCRDVLFCNRAIAAQMPYTRPDEPIASYTISTAQGAGWIWDIGLDRRRGIGHVYSSDHSDDEAAERILRGYLGAAGEKADVRHFKFEAGYREVNWYKNCVAVGLSSGFFEPLEATGIAFAEVSAGMIANLFPWGGDYETSARQFNANMLRRYERALDFIKLHYCISERRDTAFWRDNVADASVPDRLLEMLDRWRFRPPNELDIDGQVDIFTEASWQYVLYGMGWKTDLSAKAGALRYADDARRAFAEVQRQATYAIANLPSNRDLVNYAQSHSFGARAAA

SEQ ID NO: 85479 - protein, 506 aa, Sphingomonas sp.
  misc_feature (1)..(506): tr|A0A429VBW6|A0A429VBW6_9SPHN Tryptophan 7-halogenase OS=Sphingomonas sp. HMF7854 OX=2315330 GN=HMF7854_11430 PE=4 SV=1
MNEESGRPIRNLCIVGGGTAGWIAAALLGHYAGHLFRIRLVESEEIGTIGVGESTIPPFLQLIARLGISESEFIRETQASFKLGIRFDDWLDRGSSYFHPFGAIGAPNPPVDPYQLWLRARTADPSLELQSLAPASVMADAGRFMLPFKAATTPVGGAAYALHVDAKRVAAFLRRFAEGKGVVRTEGLVDRVEAEGDQVAAIVLRSGERIAADLFVDCTGFRSLLLGQALEVPLDDWSDLLLCDRAVVVQTENIGPPPPFTLAEAQDAGWRWRIPLQHRTGNGHVFSSRHMGADEARSILLAKVEGRPVTEPMLLSFTTGARREMWRGNVVAAGLSAGFIEPLESTAIHLVYRAIDFLLRYLPGTSRAPELAAEFNRRMTGDYVEIRDFIIAHYSLTRRRDAPFWRDVASIELPAGLRHRVAMFADAGMLPEVLDGLFSAVSWQSVLDGMGVLPRRPHPSVANAEPAALARDLRGLEQAIGRTVQQLPTHQAFLDQHCRAEKPLAA

SEQ ID NO: 85480 - protein, 516 aa, Sphingomonas sp.
  misc_feature (1)..(516): tr|A0A3R9WMX1|A0A3R9WMX1_9SPHN Tryptophan 7-halogenase OS=Sphingomonas sp. HMF7854 OX=2315330 GN=HMF7854_04690 PE=4 SV=1
MTDHRIKNVVIVGGGTAGWMAAAALSRFLNNGYTKVTLIESEEIGTIGVGEATIPPLISFNAMLGINENEFVAETQATFKLGIEFVDWGRLGDRYFHPFGSYGQDLQGIHFHQLYLREKMAGPVPDIGDWAISAVAAQRGRFARPGRAAQAPLASLRYAFHFDAALYAAFLRRYAERHGVRRTEGRIEHVALRPADGFVESVRLADGRSIDGDLFIDCSGFRGLLIEEALNTGYEDWSRWLPCDRAIAMPCALAGAEPEAFTRATARRSGWQWRIPLQHRVGNGHVYSSGFCSDDEAERTLRDHLEGEPGGDPRLLRFTTGRRSLAWNRNVVALGLAGGFVEPLESTSIHLVQSGIARLIALFPDKRFLAVERDEYNRQMQSLAERVRDFVLLHYKATERSDSDFWRQCAATAIPDSLAERIELFRAKGRIFAEGAELFSTSSWVAVMLGQHIVPDEYEPVVDALDENLVANAMEQMRRAIDQTVERLPSHGEFIAQCRSTLQAPSQPSALPEFAF

SEQ ID NO: 85481 - protein, 496 aa, Gammaproteobacteria bacterium
  misc_feature (1)..(496): tr|A0A2N1YA32|A0A2N1YA32_9GAMM Tryptophan halogenase OS =Gammaproteobacteria bacterium HGW-Gammaproteobacteria- 15 OX=2013797 GN=CVV11_18390 PE=4 SV=1
MQSQAIKRVVIAGGGTAGWMAAAAIAKLMGKHLQICLIESDDIATVGVGEATIPPLLTLHKLLGINEAEFMAATQATFKLGIQFENWRDQGHDYIHSFGTTGQDCWAAGFQHFWLKGQQLGLASDYGDYCPELLATKAGKFAHLPNRPLNYAFHFDAGLYAKFLRSMAEQHGATRTEGKIASVETCEQSGNISALRMASGERIVGDLFIDCTGFRALLIEQTLHTGFDDWSHWLPCDSAVAVQTRATREPVPYTRSIAHGAGWQWQIPLQHRVGNGLVYCSKYYSDEQAKALLLANVSGELLTEPRLIKFRTGMRRKHWNKNCIALGLASGFIEPLESTSIHLIQRSIVRLLQMFPLNGISQADIDEFNQQTEHEVLNIRDFIILHYHVTARRDTAFWRYCQNMPIPESLAHRIRLFKETGRVFKVPNELFGENSWTQVMLGQGIMPEQHHPIVELMSEQELNHFLSQIKQQNQRLVAQLPTHQTFLQSYCPAVSK

SEQ ID NO: 85482 - protein, 526 aa, Sphingomonas taxi
  misc_feature (1)..(526): tr|A0A2W4YVC5|A0A2W4YVC5_9SPHN Tryptophan halogenase OS =Sphingomonas taxi OX=1549858 GN=DI640_13335 PE=4 SV=1
MATNTGPEATSDHPITNIVVVGGGTAGWLAACLIAARADRGAQRPLSVILVESPDVATIGVGEGTWPTMRRTLERIGIAETDFLLACDASFKQGSRFDGWRTGAADDSYLHPFTAPVDGDPRDIVAAWAQNGGKFADIVGAQGEICHRDLAPRQRAMPDYAGTLNYAYHLDAGKLAALLMRHATERLGVRHVRDHVVGIDSTGDGDIAAVQTRASGAITGDLFLDCTGHAALLIEGHYGVASIDRGGELFNDRALAVQVPVAGGSAIASQTNATAHAAGWIWDIGLPTRRGIGCVYSSAHLGDDAAAQTLERYIRATAPDAPLPVFRQLKFQSRHRARFWERNCIAVGLSAGFLEPLEASAIVLIELSLDALLDNFPSTRGAMDIHATRFNALFRYRWDRIVEFLKLHYVLSERDEPYWRDHRDAASIPPRLAELLTLWRHQPPSRADFPMIDEVFPAASYHYVLYGMGFPPPTRGPIATTDRARTETLLAQVDQRRRMLAAGLPTNRAYLDALRHATAQVMELSA

SEQ ID NO: 85483 - protein, 500 aa, Sphingopyxis sp.
  misc_feature (1)..(500): tr|A0A1P8WXW1|A0A1P8WXW1_9SPHN Tryptophan halogenase OS =Sphingopyxis sp. QXT-31 OX=1357916 GN=BWQ93_10655 PE=4 SV=1
METNRIQSIVIVGGGTAGWMTAAALARILGPDYARITLVESDEIGTVGVGEATIPQINIFNRMLGIDEDDFVRRTKGSFKLGIEFVDWGGIGQRYFHPFGNIGVDMGGVSFHAFWQRLRGEPEFADVEDYSVMAKAARHGKFMRPTTAPGSLLSSIAYAFHFDAGLYALYLRELAEANGVRRVEGKITDVARNGETGHIEHVTMADGRVVGGQLFIDCSGFGGLLIGRALGVPYVDWSSFLPCNRAVAVPCEHGGEFTPYTRSTARSAGWQWRIPLQHRIGNGHVYCSDYISDDEAAAVLLANLDGKPLADPRFLKFTTGHRARFWEKNCVSIGLSAGFMEPLESTSIWMIQTGIARLLSNFPDRGFEPASIERYNRLMVEESELVRDFLVLHYHVTTRDDSDFWNYCRTMPIPDRLAEKIRVFQSSGRAFREHEELFNDTSWFAVMEGQRLGARGFDPVAELMPIEQTRDRLRQIKAAVTASVDHMPLHRDYIREHCAA

SEQ ID NO: 85484 - protein, 500 aa, Pelagibacter sp.
  misc_feature (1)..(500): tr|A0A1Z9LSY7|A0A1Z9LSY7_9PROT Uncharacterized protein OS=Candidatus Pelagibacter sp. TMED197 OX=1986808 GN=CB D57_02645 PE=4 SV=1
MSVNKITVLGGGTAGLVSALVLKARFEKLNIEVVKSDNIGIIGVGEGSTEHWKDFMEFIGVPLKELLLETDATFKYGIMFEDWTKEPYFHNITNELHKVALGQYYAGYAYATINKLKPDEYTSGHCFNNEVLPNYIPSQFHFNTHKLNTFLLKKCKDFGIEVHTDDITDVETDNHGIKRIRGDKGWYESDFYIDCTGFKKYLISKLGAKWVSYKDYLPMNEAIAFPTPDTDEYTPYTLAKAMSSGWMWRIPTYGRWGNGYVFDNRYINAEQAQKECEDYLGFKVNVAKNIKFDAGALDRPWIGNCVAMGLCASFIEPLEASSIGTSIQQSFLLMHTLINYKQTDIDQYNTKVGHIVENIRDFVLLHYIVKRNDSKFWKELKVNLPDSLKHNLDKWSDRMPIKEDFKTDYVLFNAQNFAVLLKELELANIDSLKREYDMLVEHNKNVVKKEVDHHIKTFKTDPMNKQCPIMGHKQYLMKLRSGKETLNQQIDYLQNENSNT

SEQ ID NO: 85485 - protein, 510 aa, Sphingomonas naasensis
  misc_feature (1)..(510): tr|A0A4V3QWN7|A0A4V3QWN7_9SPHN Tryptophan 7-halogenase OS=Sphingomonas naasensis OX=1344951 GN=E5A74_09005 PE= 4 SV=1
MTDTTRDNVPLETITIVGGGTAGWMTAALLSHVFRGYRIRLVESDEIGIIGVGEATIPAIRDYMAMAGIDQVEMIRASQATFKLGIDFVNWRDGNDRYFHGFGRIGQDFMWLHPHQLWLRLKRLGVPIRHLDDYALNCRAGMANKFCFPDPRNPGSPISGIDYAYHFDASLLARYLRVRAEAKGVERIEGRIVDTKLDGESGHVAHVVLADGRTVDGDLFVDCSGMRGLLIGQALGVGYEDWNQWLLNDRALAVPCESVSPLTPYTRVTARDHGWQWRIPLQHRIGNGHVFASAQISDDAAAATLLANLDGKPLADPRAVAFRPGKRHKAWEKNVVAIGLSSGFLEPLESTSIHLIQTGITKLIGLFPHRGFAAPDIAEYNRQHDFEFTDVRDFIVAHYKVTEREDTEYWRYLKHMPIPDSLAERLDLFASSGRFFRRAAAELFREESWVQVLMGQGLPVAYDPMVEMIPDETVAAFLHDTEEVIADVARAMPDHADFIARYCKAPLSPN

SEQ ID NO: 85486 - protein, 471 aa, Sphingomonas sp.
  misc_feature (1)..(471): tr|A0A3R9YLG0|A0A3R9YLG0_9SPHN Tryptophan 7-halogenase OS=Sphingomonas sp. HMF7854 OX=2315330 GN=HMF7854_04695 PE=4 SV=1
MIDRDIRRILVVGDGIVAWCAAAAIRRHLPVIAVDVLAQPVAPDALADRVAATLPSLVGFHEDLRLSERDTLGAAGSSRRAGNLMTDWSGIGERFVHAYGPVGEPVDGSNFHQQWLRSADAAPAAFDSFSENGGAALAGRIPEDSEHGLTLTPGRYRAMIRAFALHLGARERSGAAAATETDAEGRLEAVRTTTGDRLEADLFIDAAGPAGLPGTASAADWEDWSAWLPCDRVAIASAPASDPLPLDRVEGLPWGWGWSSRSPFEQSRGVAWSSRHASDREALAWLGAPDAAVVPLRQGRRRSPWTGNLLAIGDAAVAVEPLEWTNLHLALSLIDRLITMLPGSACAPVEVAEFNRQSAMEAARVRDFLGLHYAVSRRPEPFWRETRERPLPASLQHSLDQFRSRGRLPFYEEETFARDSWLAILIGCGERPRRIDPLATAVPRERALAALRRQHQARLARLPLSAMSPAQ

SEQ ID NO: 85487 - protein, 495 aa, Gammaproteobacteria bacterium
  misc_feature (1)..(495): tr|A0A2N1YB10|A0A2N1YB10_9GAMM Tryptophan halogenase OS =Gammaproteobacteria bacterium HGW-Gammaproteobacteria- 15 OX=2013797 GN=CVV11_13820 PE=4 SV=1
MQHHTVKKVVIAGGGTAGWVAAAALSKRLKGLIDVVLIESEEIGTVGVGESTVPPVQLFHNLLGINEQEFMQATDATFKLAISFENWGQQGDHYFHPFGVTGKGSFLSDFQHYYLHGLNQGIAAPFGDYCYELQAAKQHKFAKTEQSTINYAYHLDAGRYARFLRRFSEELGAVRIEGKIAQVQQHVNGDIRSVVLESGQEITGDLFIDCTGFRALLIEQTLKTGYERWDHWLPCNKAVVVQTEPGPTVPPYTRAIAHDSGWQWKIPLQHRVGNGLVYASDYLSDDKARQRLLNGLEAPAIMEPRVLSYQTGRRKKFWHKNCVAIGLSSGFIEPLESTSIFLFMSGIIRLLRLFPFNGVTPALTDEYNQQSITEVEKIRDFIILHYHQTERNDSPFWDYCRTMTIPDSLAHRIELFRESAHAFQTGDEMFRLESWSHVMLGQRLQPQSYHQLVAGLNNGELSRHLQQIRDTINSAVHRLPSHRDFLRQYCPSNLT

SEQ ID NO: 85488 - protein, 491 aa, Sphingomonas taxi
  misc_feature (1)..(491): tr|A0A2W5ANW2|A0A2W5ANW2_9SPHN Tryptophan halogenase OS =Sphingomonas taxi OX=1549858 GN=DI640_13280 PE=4 SV=1
MTACLVAHRWRDRGVRVTLVESPEIGIVGVGEGSTPQLKHFFDTLGIAEADWMPACDATYKLGIGFEGWSDRAGYERYFHPFPTALDGHTAPQFFYNARARRTGRDVEAHPDQFLLPARLAAAHCAPQSAANFPFEVSYGYHFDAYKVGAFLASHATEALSVVHLQRRIASVERAPNGNIAALVDTDGELIAGDLFVDASGFRSTIFSALDIPFASYADALFNDRAVVMPTAHAPGAPIPSQTRATAQSAGWAWHIPLTSRNGNGYVYSSRHLTEAQAEAELRAHIGVETGEARHLKMRVGRVRDSWSHNALAVGLAQGFLEPLEATALHLVIATVEAFLDMVDHGGATDAVRTAFNTRIAARYDGVRDYIVAHYRLNQRHDDPTGYWAEARGVEALSDDLKMLMSTWFTGADMLAAIDRAGLGRYYSAISWHCLFAGYGTFPDAARLIPPGADIDPIDLPKIDDFLTRCASNFGSHASRLRDLADHKDTV

SEQ ID NO: 85489 - protein, 496 aa, Sphingomonas taxi
  misc_feature (1)..(496): tr|A0A097EJ72|A0A097EJ72_9SPHN Tryptophan halogenase OS =Sphingomonas taxi OX=1549858 GN=MC45_16000 PE=4 SV=1
MNGPATPRRIVIAGGGTAGWLAAAILTRQLGPFADVTLVESDEIGTVGVGESTIPTVRAFHALIGVDEREFMQATGASFKLGISFENWAREGDRYIHSFGDVGQSTWMSDFHHFWLEAQARGVAEPFGSYCYEHEAAAADRFAIGGTPALNYAYHFDAGRYARFLRGKAEANGLRRLEGKIDRVVRDTESGDITTLILDDGTAVAGDLFFDCTGFRALLIGEALGVGFEDWGDWLPTNRALAMQTEATGPARPYTRAIAHDAGWRWKIPLHHRVGNGLVYCADYLSDDAAHARLLATVEGAALIEPRLIRFRTGRRKAAWQHNCVALSLASGFVEPLESTSIHLIMIALTRFLQLLPSERPSAAAIARFNVQAAQEIEGVRDFIILHYHLTGRDEPFWRDRRAMTIPDSLSDRIALFRDSANAYQADHDLFRVASWLQVMLGQRLAAASHHPLVRLMPSDQLRSALRDMRTTIARSVDGLPSHQVFLDGYVRTAAN

SEQ ID NO: 85490 - protein, 510 aa, Nitrospirillum amazonense
  misc_feature (1)..(510): tr|A0A560IEP4|A0A560IEP4_9PROT Tryptophan halogenase OS =Nitrospirillum amazonense OX=28077 GN=FBZ92_111105 PE= 4 SV=1
MTFAPLRDIVIVGGGTAGWMAAALFSHILGPGGHRIHLVESEEIGTVGVGEATIPPIAIFNRALGLDENDFLRQTQGTIKLAIEFVDWLRPGHRYLHSFGAFSRSLGLGHFQDFWLRAHRLGMTDDWEPYILNSVAARRGRFIQPDPRRQSPLEPLAHAFHIDAGLYARYLRRFAEQRGVRRTEGKIVRTVLRAHDGFVDAVEMADGTRVAGDLFIDCSGFRGLLIEQALNTGFEDWTHWLPCDRAWAVPSAHDGSAAALTPYTRSTARPAGWQWRIPLQHRTGNGYVYSSRHASDDEAAATLMANLDGEALAEPRQLRFTAGRRRRFWNRNIVAVGLAGGFMEPLESTSIHLVQSAISRLITLLPNHGFDPAVADEFNRASAVEYERIRDFIILHYTATERADSPFWRECRGRPVPEELARRMRVFRALGRVARDHDELFSEVSWLHVFLGQGVWPRDHHPLADQLSEEDLRRFLDDIKAAVAREVDAMPTHADFIARHCKADSLTRTA

SEQ ID NO: 85491 - protein, 493 aa, Sphingopyxis sp.
  misc_feature (1)..(493): tr|A0A1P8X397|A0A1P8X397_9SPHN Tryptophan halogenase OS =Sphingopyxis sp. QXT-31 OX=1357916 GN=BWQ93_10725 PE=4 SV=1
MLGGGTAGWMTAAALAKLLPGQADIHLVESEEIGIVGVGEATLPHLREFIRRLGLDEMDFMRKTRATFKLGIDFVDFGAIGEGYIHPFGAYGTDIAGVGFHHYWLRMKAAGRVPPICDFSLPIVASRARRFAPIPAGGDFLDSSYSYAYQFDATRMAPMLRAFAEAHGVRRSEGKVVGVERDAASGDIAALRTDRGDVIAGDLFVDCSGFRALLIGETLGSPWEDWSQWLPCDRAAALPCTAPDGPIEPYTRATAMPAGWRWRIPLQHRVGNGYVYSSAHLSDDEACGAILGAIEGEPLADPRVLRFRAGRRTKSWDRNVVAIGLASGFLEPLESTSIHLVQQAVTRLVELFPQRRIDTSDRDTFNALVDREYDRIRDFLILHYHATRRDDSDFWNHVRTMAVPETLQRKMDLWRTSGRVELYTQGLFLEASWVAVYLGQGVVPLSYDQRADTPAPDRLARSLTELDQAIRQRVAAWPDHGDYLRQSGAWEAA

SEQ ID NO: 85492 - protein, 511 aa, Nitrospirillum amazonense
  misc_feature (1)..(511): tr|A0A560JLK4|A0A560JLK4_9PROT Tryptophan halogenase OS =Nitrospirillum amazonense OX=28077 GN=FBZ87_106120 PE= 4 SV=1
MDRPIQHIVIVGGGTAGWLTAGVIAARHKARMASGFKVTLVESPNVAIIGVGEGTWPTMRTTLEKMGVSETEFFRHCDTAFKQGGKFVGWTTGAPDDAYYHPLMLPHGWSQVNLVPHWLQDGRGRTFSAAVCPQEAICEEGLAPKTIATPEYRGLANYAYHLDAGKFASFMQKHCTEKLGVHHVLADVTEVKQDESGDITGLVTEQAGEITGDMFVDCTGFRALLIEKTLGVGFKDCRDVLFCDTALAIQVPHESDDAPMASQTIATAQSSGWIWDIALPTRRGLGYVYSSDHIDEEAARAELARYAGTQAEARKIPIRSGHREMFWKNNCVAVGLAAGFLEPLEASAIMLIELSAKIIADQLPARRSVMDVVARRFNEVTHYRWGRIIDFLKLHYVLTQRTDTAFWRDNVDPASTPERLQDLLRLWKYRAPWFLDEFDRLEEVFPAASYQYVLYGMGFRTEVDPVENSADALLASRIMEENAAMAQKMRANLPKNRDLVRKIRDHGMQSI

SEQ ID NO: 85493 - protein, 511 aa, Nitrospirillum amazonense
  misc_feature (1)..(511): tr|A0A560G773|A0A560G773_9PROT Tryptophan halogenase OS =Nitrospirillum amazonense OX=28077 GN=FBZ88_103168 PE= 4 SV=1
MDRPIQHIVVVGGGTAGWLTAGVIAARHKARMASGFKVTLVESPNVAIIGVGEGTWPTMRTTLEKMGVSETEFFRHCDTAFKQGGKFVGWTTGAPDDAYYHPLMLPHGWSQVNLVPHWLQDGRGRTFSAAVCPQEAICEEGLAPKTIATPEYRGLANYAYHLDAGKFASFMQKHCTEKLGVHHVLADVTQVKQDESGDITSLVTEQAGEITGDMFVDCTGFRALLIEKTLGVGFKDCRDVLFCDTALAVQVPHESDDAPLASQTIATAQSSGWIWDIALPTRRGLGYVYSSNHIDEEAARAELARYAGTQAEARKIPIRSGHREMFWKNNCVAVGLAAGFLEPLEASAIMLIELSAKIIADQLPARRSVMDVVARRFNEVTHYRWGRIIDFLKLHYVLTQRTDTAFWRDNIDPASTPARLQDLLRLWKYRAPWFLDEFDRLEEVFPAASYQYVLYGMGFRTEVDPVENSADALLASRIMEENAAMAQKMRANLPKNRDLVRKIRDHGMQSI

SEQ ID NO: 85494 - protein, 504 aa, Idiomarinaceae bacterium
  misc_feature (1)..(504): tr|A0A2E4ZAG6|A0A2E4ZAG6_9GAMM Tryptophan halogenase OS =Idiomarinaceae bacterium OX=1898113 GN=CMF22_03345 PE= 4 SV=1
MSMSQPYHIVILGGGSAGWMTAAALSKVLDRQHYKITLIESAAIGTVSVGEATIPGIREFNQLLQIDENEFIRETHGSFKLGIAFENWQNIGDEYMHPFGTYGVTLNGVPFHHYYLRHEREQGSGNAIPLPELNLEWSAALAHKFTRPIADKRSPLGHIKYAYHFDAAAYARYLKNYATQRGVVALEDRMLEAKRHANGYVASLLLEKQGEVRGDFFIDCSGFKALLIGETLGVSYHDWRKWMPCDSAVALPGQHDADNILPYTRSIAHHEGWRWKIPLQHRTGEGWVYSSRFTDSDKAEREFRETIGNFDSKANHLRWINGRRDEAWKHNVCSIGLSAGFIEPLESTGLQLTQSGIMRLISLLPGKGDMTERAKAFNRYTAEEITNIRDFVMCHYKLTNRDDSEFWRYCRDMEIPDSLQERLDLYRENASIFRNSNNELFNEISWFSMFHGQGLTPEQVHPIAQQMPAATMQQHLTTIQRVFKQSVAQLPSHADFIRKHCQAS

SEQ ID NO: 85495 - protein, 531 aa, Luteibacter sp.
  misc_feature (1)..(531): tr|A0A1K1MPD9|A0A1K1MPD9_9GAMM Tryptophan halogenase OS =Luteibacter sp. UNCMF366Tsu5.1 OX=1502758 GN=SAMN02800 691_0531 PE=4 SV=1
MARLKNVLIVGGGTAGWLTACYLAKAVNALDPRSVQVHLVESPDIGLLGVGEATFPSIRGTLAAIGLDERRFLVGATATYKQGIHYRHWVRPPGTPGADHFFHPFNAPSQRPGGPDLLPYWLLGAAPEGMPFADAVSMQSTLVDHSRAPKRARDSDYQGPMNHAFHFDAACFARVLAEHGQQSLGVVRHVATVERTELDETGAIARVVTKEEGDLTADLYVDCTGLRGMLIGNVMQSPFRSRADVLFANRAVAMQVPYDTPDTPIPSYTISTAQEAGWTWDIGLQKRRGVGYVYSSRHTSDDRAEDVFRRYLGQAAENLKAMHIRFETGYRPEHWRKNCVAVGLAGGFVEPLESTGIALIELATYLLSHLLPSDTDGMESAARHFNDMMVARYDRIIDFIKMHYCLSQRRDSAFWIDNADPATIPTTLQEKLARWKHRPPHRLDFVTDLEMFMPCSWQYILYGMEFKTDLEPMRSAYPHVAAARHEFAMIQQAAIRALDDLPDHRALVEQMCGEHVRRGQSQEPGVVHATA

SEQ ID NO: 85496 - protein, 528 aa, Xanthomonadaceae bacterium
  misc_feature (1)..(528): tr|A0A411HH37|A0A411HH37_9GAMM Tryptophan 7-halogenase OS=Xanthomonadaceae bacterium AQ6-296 OX=2511995 GN=ELE 36_04695 PE=4 SV=1
MAALRKILIVGGGTAGWLTANYLARTLNIAAQQSAQNIQMESIQIELVESADIGIIGVGEGTFPSIRGTLAAIGLDEARFLRGANATFKQGIKFANWARTPTASATSHYFHPFSLPSQRGDSPELLPYWLLGAAAPGAAFADAATMQKHVADASRAPKRRTDSEYQGRLNYAYHFDAGRFASLLAEHGRSLGVQHKIAHVEKVELDEQGAIARVITREAGALTADLYIDCTGMRGGLIGDALGSPFRSTRDTLFVDRAVAIQVPYPRADTPIPSYTISTAHEAGWTWDIGLQARRGIGYVYSSRHTDDSRAEQVLRQYIGPAAENLNARLLKFETGFRPEQWRKNCVAVGLSAGFLEPLESTGIGLIEIAAYLIAHLLPNDGDMARVAKLFNAQMTTRYERIIDFIKMHYCISQRRDSSFWIDNADAASTPESLQDKLAMWRCRPPHRLDFVTDLEMFMPASWQFVLYGMEFKTDLSGMRHAYPRVDAAQREFEMIRAVAPHAIADLPDHRALIEEICAHGFASKPAA

SEQ ID NO: 85497 - protein, 515 aa, Nitrospirillum amazonense
  misc_feature (1)..(515): tr|A0A560FXS8|A0A560FXS8_9PROT Tryptophan halogenase OS =Nitrospirillum amazonense OX=28077 GN=FBZ88_108211 PE= 4 SV=1
MTFAPLRDIVIVGGGTAGWMTAALFSHILGPGDHRIHLVESEEIGTVGVGEATIPPIAIFNRALGLDENDFLRQTQGTVKLAIEFVDWLRPGHRYLHSFGAFSRSLGLGHFQDFWLRAHRLGLTDDWEPYILNSVAARRGRFIRPDPRRQSPLEPLAHAFHIDAGLYARYLRRFAEQRGVRRTEGKIVRTVLRAHDGFVDAVEMADGTRVAGDLFIDCSGFRGLLIEQALNTGFEDWTHWLPCDRAWAVPSAHDRSAAALTPYTRSTARPAGWQWRIPLQHRTGNGYVYSSRHVSDDEAAATLMANLDGEALAEPRQLRFTAGRRRRFWNRNVVAVGLAGGFMEPLESTSIHLVQSAISRLITLLPNHSLANGGFDPAVADEFNRASAIEYERIRDFIILHYAATERADSPFWRECRDRPVPEELARRMRVFRALGRVARDHDELFSEVSWLHVFLGQGVWPRDYHPLADQLSEEDLRRFLDDIKAAVAREVDAMPTHADFIARHCKADSPTRTA

SEQ ID NO: 85498 - protein, 507 aa, Pseudoalteromonas amylolytica
  misc_feature (1)..(507): tr|A0A1S1MRD4|A0A1S1MRD4_9GAMM Tryptophan halogenase OS =Pseudoalteromonas amylolytica OX=1859457 GN=BET10_1891 0 PE=4 SV=1
MKIKRIAILGGGTAGWLCANHIGHALSHHGDIQITVIESATIDSIGVGEGTVPYIQNSLKRFGISEAEFLVKCDATFKQGIKFVDWLNPDVHGANYYYHPFDEPFAQGYDITNYLLSKQIKFENVGIQARICELGLAPKRKSDTEYQGSLAYAYHFDAAKFAALLACNAKEKFSVKHQFATIVDATCDEHGNIVSLIDEQGEQLEFDFYLDCSGFRALLTDKALKIPFVDKSDELLVDTALVKQIPLEKDEQLPPYTTATAHKAGWIWDIPLTTRRGTGFVYASKYMSEDEAKASYADYLNIPVAELSVRKLDMKVGFREQCWHKNCVSFGLAQGFVEPLEATSILLTDFCGELLAKNFPKTIEESNAMSTYFNDVMRYVWERTTDFIKLHYCISDRIDSDFWQENRDMLASSAELKQRLDKFKFRVPTQSDFFSRFDLFDHKNFLYVLYGMEFKTELKELSDTEKQMSEQLLAQNTQMINSAKMQLLNHRQWLESLKTAYQKIHGE

SEQ ID NO: 85499 - protein, 504 aa, Niveispirillum cyanobacteriorum
  misc_feature (1)..(504): tr|A0A2K9NH69|A0A2K9NH69_9PROT Tryptophan halogenase OS =Niveispirillum cyanobacteriorum OX=1612173 GN=C0V82_18 905 PE=4 SV=1
MTNLRRILIVGGGTAGWMAACAMNQAVKRLGTVVELVESEEIGTIGVGEATVPTIRDFNRSIGLDEVAFMKATQGSFKLGIAFQDWRAKGTSFFHGFGDYIVNAGPYSTLNHWLVARHLAGQDAVGPFDDYHMAAVMAAAGRFAAPESDPRSPYAYFSYAFHFDASLYARMLRAKAEAEGVVRHEGRITQVDRHADTGFITQVHLADDRILAADLFIDCSGFVSLLSDKTLAEPWVDYSHWLPVDRAWAVPCAGTGTPAPFTRATALEAGWQWRIPLQHRTGNGYVFSSAHVTEDAARERLLAGLDGRVLAEPRLLRFRTGRRQRFWIGNCIAIGLSSGFVEPLESTSISLIQGGITRLVNLLPDMDFNPGLAAEYNRIQALEFDRIRDFIILHYALNGREDSEFWRERRRIPLPDTLAEKIETFRATGQVVLLNEETFVTPSWQALFIGLGLIPQRLDPLMAAQDRGEVLETLRLRQQSLAQAAARLPSHGDFINRFCKADPA

SEQ ID NO: 85500 - protein, 501 aa, Niveispirillum cyanobacteriorum
  misc_feature (1)..(501): tr|A0A2K9NKN0|A0A2K9NKN0_9PROT Tryptophan halogenase OS =Niveispirillum cyanobacteriorum OX=1612173 GN=C0V82_21 735 PE=4 SV=1
MHKPIRSIVIVGGGTAGWMSAAALARVAGKTHKLHLVESEEIGTVGVGEATIPPIATFNRVLGIDEDEFLRATNGTIKLGIEFKDWYRQGHRYMHAFGALGRPLGMTHFHHVWRRANALGLDGDWEQYVYNTVAARALRYARPGPQRRTPLEPLTHAFHFDAGLYAAFLRRFATERGVVRTEGKIRRTILNAFNGHVEAVEMEDGTKIEGDLFIDCSGFRGLLIEQALGTGFEDWSHWLPCDRAWAVPCANGGEFTPYTRSTAHPAGWQWRIPLQHRIGNGHVFASRYMGEEQARDILMANLDGTPQAEPRLLRFTAGRRKKMWNRNVVAVGLSSGFLEPLESTSIHLVQSAITRILMALPNDGIDAVEVDDFNAKAQAEYERIRDFIILHYKATERDDSPFWRDCRAMEIPEELERRMRVFASHGRVSRVFDELFLDVSWIQVFLGQGVIPRSWHPLADQLSETELKEFLAEIKAMIAHEMAALPTHADFIARQCAARPS

SEQ ID NO: 85501 - protein, 515 aa, Proteobacteria bacterium
  misc_feature (1)..(515): tr|A0A1W9K8A8|A0A1W9K8A8_9PROT Tryptophan halogenase OS =Proteobacteria bacterium ST_bin14 OX=1978762 GN=BVN32_ 00435 PE=4 SV=1
METLVRTVVIVGGGSAGWIAAARIAARNGTGPDAVRVVLVESAAIGTIGVGEGTWPTMRNTLRKVGISETRFIRKCDAAFKQGAKFVRWTDGTDADGYYHPLNPPQGATQINLSGHWQQRQHDTPMAFADSVDFQPALCEAGLAPKAITTPEYGAVANYAYHLDAGKFATMMRDHAVGTLGVEHFVDDVIGVRMAENGDIAGLDLEQHGALDGDLFVDCTGFAALLIGGVYDSKFRDCSDVLFADHALAMQVPYPEEDSPIACHTISTAQSAGWIWDIGLWTRRGIGHVYSSSHISHDQAEAELRAYIGPQSEALTARRIAIRAGHRETFWSHNCVAVGLSAGFLEPLEASALMLVETAVDCIADRLPRTRPVMETMARQFNAAFTHHWERIIEFLKLHYLLTKRTDTSFWRDIVAPESVPDGLRDKLEMWRYHPPTAQDFPHQPEVFSWPSYQYVLHGMDFANHYARLADLDAETGAARRWFANNERVRGQAMSQLPKHRELLGKIRTHGLQTV

SEQ ID NO: 85502 - protein, 505 aa, Niveispirillum cyanobacteriorum
  misc_feature (1)..(505): tr|A0A2K9NJV2|A0A2K9NJV2_9PROT Tryptophan halogenase OS =Niveispirillum cyanobacteriorum OX=1612173 GN=C0V82_23 630 PE=4 SV=1
MMQTKPLDITIVGGGTAGWMTAALLAKATKGRLGRITLIESAEIGTVGVGEATIPPIQFFNQLLGIDERDFVARTQASFKLGIEFRNWTRTGHSYIHPFGSYGANIDAVSFHHYWLRARALGDTTDIGDYCPAIVAARQGRFAPEIPQGPASAPLLSYAYHFDAALYAAYLRDFATRLGVTRIEGRITGIRQRAEDGYISNLDLADGGSVGGDLFIDCSGFRSLLLGQTLGVGFKDWSRWLPCDRALAVPCEGGREITPYTRSTAHTAGWQWRIPLQHRIGNGHVYSSAFMADEEAEALLLGHLDGRPLADARPLRFTAGRRDKAWVRNVLGVGLAGGFLEPLESTSIHLIQTALFRLLALMPTDVRDQATRDEFNRLSEIEYEQIRDFLILHYNATERDDSDFWNYCRTMPIPDSLRHKIDLFRARGRVARFDGQLFAEASWLAVFLGQGVDPVGYDPMADIMPAAELQQRLFRHRDYVQRAVATMPAHRDFIDRHCKAPATAA

SEQ ID NO: 85503 - protein, 529 aa, Sphingomonas sp.
  misc_feature (1)..(529): tr|A0A4R2SFB2|A0A4R2SFB2_9SPHN Tryptophan halogenase OS =Sphingomonas sp. PP-CE-1A-559 OX=2135657 GN=C8J42_1152 2 PE=4 SV=1
MATNTGPGITSDHPITHIVIVGGGTAGWLTACLIGARADRDTARPLSVTLVESPDVATIGVGEGTWPTMRRTLERIGITETDFLLACDAAFKQGSRFDGWRTGAADDSYLHPFTAPVDGDPRDLVSAWSEHGGRFADMVGAQGAICHHDLAPRQRAMPDYAGTLNYAYHLDAGKLAALLTRHATERLGVRHVRDHVVGIDGTEHGDIVAVRTRASGAIAGDLFVDCTGHAALLIGDHYGVATIDRDRELFNDRALAVQMPVAAGSPIASQTNATAHAAGWIWDIGLPTRRGIGCVYSSGHLSDDAAADTLTRHIRATAPDAPDAPLPTFRQLKFQSRHRAKFWERNCLAVGLSAGFLEPLEASAIVLIELSLDALLDNFPSHRGAMDIQATRFNTLFRYRWDRIVEFLKLHYVLSERDEPYWRDHRDAASIPPRLVELLALWRHQPPSRADFPMIDEIFPAASYQYVLYGMGFPPPTRGPIATADRARTETLLAQIDQRRRMLAAGLPSNRAYLDALRHTTAPAMELSA

SEQ ID NO: 85504 - protein, 490 aa, Streptomyces sp.
  misc_feature (1)..(490): tr|A0A429BY05|A0A429BY05_9ACTN Tryptophan halogenase OS =Streptomyces sp. WAC 01325 OX=2203202 GN=DMH25_04385 P E=4 SV=1
MTSDYDLIVVGGGPAGSTAATAVALRGHRVLLLERETFPRYQIGESLLPATVHGLCRILGVADEVARAGFTLKRGGTLRWGRTPDPWQFSFAMTPRLPEPTATAFQVERSRFDEILLRNAERVGVEVREGSPVRRVLTEGERVHGVEYTDRDGTTRTAHARYVIDGSGNTSRLHGKVGGARVYSDFFRNLAVFGYYAGGRRLPEPDSGNIFCAAFDAGWLWYIPLRDDLTSVGAVISPEHYPAVQQDPRAAWQDMIKACPEVARLLTDVPVATEQPYDQVRVRKDYSYWKSSLWIPGMALVGDAACFVDPVLSSGVHLATYGALLAARAVNSALDGSVPEDRGFAEFEARYRREYGVFYDFLIAFYDMERNEDSYFWAAKKVTEVDIDEVAAFAELAGGVASGDEAVGATGRLGTYWSAAAAELDAAVDHLTAPEEPRTNPLLTTEVVTNTFRTGNALQEQALYGGPLDAPTAPTPDALTVTEDGLSWVV

SEQ ID NO: 85505 - protein, 503 aa, Niveispirillum cyanobacteriorum
  misc_feature (1)..(503): tr|A0A2K9NHI0|A0A2K9NHI0_9PROT Tryptophan halogenase OS =Niveispirillum cyanobacteriorum OX=1612173 GN=C0V82_19 490 PE=4 SV=1
MPTDNRIRDLVIVGGGTAGWMTAASLANHFQGSGLKITLIESSAIGTIGVGEATIPTIRRFYQSLGLRDLDVLKATHGTVKLGIRFDGWLNKDSSFIHPFGVYGQDLRDIPFHQYWLRLRAAGEKVDLGDYSLAVALARGGRFTTPSPNPPSTLSVFDWALHFDAGLFAQLMRQTAEKLGVQRIDAKIEKVELNPENGHIAGLLLDSGATVTGDLFVDCSGFRGLLIEGAMSAGYEDWGQWLLCDRALAAQGYAITPPPPFTRVTAHNAGWRWTIPLQHRTGHGYVYSSRHISDSDAEAELLSAVGGDLKMAPRRITFTPGRRRQAWKGNCVAIGLSSGFLEPLESTSIALIETGIDKLKQLFPQRDIDPLLVDEYNDWSRREMERVRDFIILHYWLNRREDTAFWRDCRAIDLPDTLTRKVQMWKRRGHMVRYRWEMFQPASWLAIYAGFDFLPDGYDPALDGFDVPSLSRGLAGMRKAIADTVADCPTHQEFIDRYAKVVV

SEQ ID NO: 85506 - protein, 534 aa, Amycolatopsis orientalis
  misc_feature (1)..(534): tr|A0A193BSD0|A0A193BSD0_AMYOR Uncharacterized protein OS=Amycolatopsis orientalis OX=31958 GN=SD37_05170 PE=4 SV=1
MGVSGPQRSTSVARPIEKIVIVGGGTAGWLSAAYLNRAFGGKIDITLVESPRIPRIGVGEATVPTLRTTFSFLGMKEEDWMPKTNAVFKSAVRFNDWRKPHEGRDGHTYYHPFFTVPEPAVPNYEKPFHKRFGRGVSLAHFWLKQRLAGDTRVRETFGDAGMALQRLCELNKAPKPLPGTDAPDPGYRYAYHFDAALIAKYLRELATGRGVKHVSADVKSVTVDPRGTIEKIVTDTAGEIEADLFLDCTGFRGLLINETLKEPFVSANDVLLCDSAVALPAAHLDGGLRPYTSATAKPDGWIWEIPLADRDGTGFVYSSAFTTPEKAEEQLRQHLGGRDHDVPGNHIKMRVGHNRRSWVNNCVAVGLSSCFVEPLESTTIALIEYQLALLVLHFPDVEFDERRKARYNELMVGAFEDMRDFIVMHYTLTDRDDTEFWRAVREAPIPASLEEKLTEYADSVIIPDGSQLRLFETRSLWAILSGMDFDFRKAPPSVELMNDAAAWEMFEQIDKEREIYSASLPDHREYIEALHRGL

SEQ ID NO: 85507 - protein, 508 aa, Streptomyces bingchenggensis
  misc_feature (1)..(508): tr|D7C2E3|D7C2E3_STRBB Tryptophan halogenase OS=Strepto myces bingchenggensis (strain BCW-1) OX=749414 GN=SBI_0 0676 PE=4 SV=1
MDHVDNADNMDNADNFEEFDVVVVGGGPAGSTMAALVAKKGHSVLVLEKESFPRYQIGESLLPSTIHGICRLTGAADELAKAGFPLKRGGTFRWGANPEPWTFSFSVSPKMAGPTSTAYQVERSKFDEILLNNARRVGAQVREECDVIDVVEDGDRVTGVRYTDSQGVERHAAAKFVVDASGNKSRLYKRAGGKREYSEFFRSLALFGYFEGGKRLPEPTRYNILCVAFESGWFWYIPLSDTLTSVGAVVRREMAEKIQGDPEKALQALIDECPKISDFLSPAKRVTEGQYGQIRVRKDYSYHNTTFWRPGMMLVGDAACFVDPVFSSGVHLATYSSMLAARSINSVLDGVVEENAAMQEFEARYRREYSVFYEFLVSFYEMHRDENSYFWQAKKVTKASRPELESFVDLVGGVSSGEAALTSADALAERMQSHSKEFSDAVDQMGGTTGGGWGNLVNSSVVREAMVEGSKVQMQALLGEDAEDETPLFEGGLIPSPDGLSWVHAPTE

SEQ ID NO: 85508 - protein, 503 aa, Hephaestia caeni
  misc_feature (1)..(503): tr|A0A397ND54|A0A397ND54_9SPHN Tryptophan halogenase OS =Hephaestia caeni OX=645617 GN=DFR49_4169 PE=4 SV=1
MDMTSPDRIRSLVIVGGGTAGWMAAAALAKHFQRSDLAITLVESSAIGTIGVGEATIPTIRRFYARLGMSDMEVMRATHATAKLGISFEGWDHPGSRCLHPFGLFGQDYGGIGFHHLWLDARARGDETPLTAYSLGAGLADHGRMALPQPNPPTPLATYDWALHLDASLFAQHLRGFAERAGVTRIDARVEDVELAEDGRIAAIRLDEGRRIAGDFFIDCTGFRSLLLGETLGVDYVDWGQWLPCDTAIATQTENDAATPLPPHTRVIARDAGWQWRIPLQHRAGNGIVYSSAHASDDEALAALTADLPGTPVTEPRRIPFRPGRRRLSWAKNCVALGLAAGFVEPLESTSIAVIETGIERLKQLFPDTRLDPALASEFNDATGRELDRLRDFLVLHYKLARRGDTSFWRACAAIDVPETLRHKLAVWDAGGEFVRYRWEMFHPSSWLAIYSGFGRLPQRLSPALDGIDRAGLDAAMAKMRTSVAETVARAPSHAQFLSAIPQ

SEQ ID NO: 85509 - protein, 488 aa, Streptomyces sp.
  misc_feature (1)..(488): tr|A0A429BFQ7|A0A429BFQ7_9ACTN Tryptophan halogenase OS =Streptomyces sp. WAC 01325 OX=2203202 GN=DMH25_11800 P E=4 SV=1
MAVVGGGPAGSTLAALVAKQGHRVVVLEKENFPRYQIGESLLPSTIHGVCRLSGAADDLAKAGFPLKRGGTFRWGARPEPWTFAFSVSPRMAGPTSVAYQVERSKFDDILLKNARKQGADVREGCSVRGVIEEGERVRGLTYADADGNEREVRARYVVDASGNKSRLYNKVGGTREYSDFFRGLALFGYFENGKRMPEPNRFNILCVAFESGWFWYIPLSDTLTSVGAVVRREMAEKIQGDPEKALRALIDECPMIADHLSGATRVTEGQYGEIRVRKDYSYHHTTFTRPGMMLVGDAACFVDPVFSSGVHLATYSSLLAARSLNSALEGKVDEDAAMKEFEARYRREYGVFYEFLVSFYEMHRDENSYFWQAKKVTANSEPELQSFVELIGGVSSGEQGLMNTEALSERLADNSEEFATAVEKFAANEDGSSVPLFSSSVVRNAMQEAGQVQMRALLGEDAEPETPMFPGGLVSSPDGLYWLPATTA

SEQ ID NO: 85510 - protein, 510 aa, Niveispirillum cyanobacteriorum
  misc_feature (1)..(510): tr|A0A2K9NMJ6|A0A2K9NMJ6_9PROT Tryptophan halogenase OS =Niveispirillum cyanobacteriorum OX=1612173 GN=C0V82_25 815 PE=4 SV=1
MKLYNTNTQSPVSVLIVGGGTAGWMTAAALSAKLAGTGVSIRLVESAEIGTVGVGEATVPHIRHFNASLGFDEADFMSRTEATFKLGIEFRDWGRKGDAYIHPFAAFGRDIGGVPFHHHWTRARRAGRVPAGGLDAVSLPIQAARLGRFGHPSPDPNSFFSTFSYAYQFDAGLYAAYLRSYAEARGVVRTEGKVRDVSVSADGHVQAVTMENGERIEADLFIDCSGFRGLIIEGALKTGYEDWTHFLPCDRAVAVPCANDAPPAPYTRATARDAGWMWRIPLQHRAGNGHVYCSGFITDDAAEQALLAQLDHPPQATPRRLRFTTGKRKRQWVGNVVAIGLSAGFLEPLESTSIHLIQLGIGRLLDLFPTSRDMDPLDAVEFNRLMDLEYERVRDFIILHYVATQRDDTPFWNHCRTMAIPDSLATKMDLFKERGIVTLYRDGMFLEPSWIAVYLGQNILPDQVDPRAALVPDAEIDRLIAMEAENCRRAASSMPAHGEILSRYKAQVPA

SEQ ID NO: 85511 - protein, 414 aa, Rhodopirellula maiorica
  misc_feature (1)..(414): tr|M5RT10|M5RT10_9PLAN Tryptophan halogenase OS=Rhodopi rellula maiorica SM1 OX=1265738 GN=RMSM_00652 PE=4 SV=1
MMKSSYDCVVIGGGPGGCTAAAIVAQSGLSTLLIEREAFPRFHVGESLMPESYWPLERLGLLERMKEAQFQVKKSVQFVSHHGNESAPFFFRQHDMRDCSDTWQVERSEFDKMLFDRAEELGADCYDQTRLIDVRFDESQKIVGVRVRDRDGNERDIDCPVVIDGTGQQSFIANKLKLKVVNPDLRKVAFWSYYRDAVRDEGDNGGATIILNTESKESWFWFIPLSRGITSIGCVGDTDYMIKGRGKPEEVYFEELERCPGLKPRLENATRLGDIRAAKEFSYMTKQHAGDGWVLVGDALGFIDPVYSSGVYFALEMGVRAGDAVVEGFKKNDLSAAQLGGWTESFLEGVHWLRKLVAAFYTKEFSIGRFMKEYPEHRGRVTDLLIGRIFEESAEQLFKDMDTSIEKAKMEAAM

SEQ ID NO: 85512 - protein, 444 aa, Halothiobacillus neapolitanus
  misc_feature (1)..(444): tr|D0KWT2|D0KWT2_HALNC Tryptophan halogenase OS=Halothi obacillus neapolitanus (strain ATCC 23641 / c2) OX=5557 78 GN=Hneap_2237 PE=4 SV=1
MPRVETSEPVHHCDVLVIGGGPAGSTVAPLLVERGYRVVVLEKAHHPRFHIGESLLPANMPLFDRLGVGEEIRAVGMEKWGAEFVSPHHDHKQVFEFAEAWDKSMPMAYQVPRAQFDEILIRNARQKGAEVIEGCRAKNVEFLPDDHPSGPGARVTAVMDDGTQTEWKTKFVVDASGRDTFLANKMQSKQRNPKHNSSAVYGHMRGALRNEGKAEGNITIFWFDHGWFWFIPLMDGITSIGMVTWPYHMKSRGDRSLEQFLRDNIESCAPLAEQLRGAEFVNNVEATGNYSYLSDRTHGNNYVLLGDAFAFIDPVFSSGVLLAMQSAVLATDAIDTALQHPAKAAAALKKFDKQIRMGPREFSWFIYRVTNPAMRDLFMGPRNIFRVKEALLSLLAGDIYGKTPIWTSLRMMKVIYTVALLRNPLRAYRAWQARRFNIRPELDA

SEQ ID NO: 85513 - protein, 503 aa, Sphingomonas sp.
  misc_feature (1)..(503): tr|A0A4R2SEF1|A0A4R2SEF1_9SPHN Tryptophan halogenase OS =Sphingomonas sp. PP-CE-1A-559 OX=2135657 GN=C8J42_1151 9 PE=4 SV=1
MTEHPIRRVVIAGGGTAGWMAAAAIARTMGSTIELTLVESDAIGTVGVGESTIPPMITFNRLLGINEAEFMRETQATFKLGILFDDWKDRGERYFHSFGITGKDHWSAGFQHFWLHGLTKGHAQPYDDYCLELRAALQGKFAHLPDDRMNYAYQLDSTRYAKFLRKMAEADGTRRLEGRIAQVELNGESGDIAALVLESGARIEGDLFLDCTGFRALLIEGALHAGFDDWTHYLPCDSAIAIQTESVRPALPYTRAMAHDAGWQWRIPLQHRTGNGIVYCSRYLDRDAALDRLLANIEGKTLTEPNVIRFVTGARRQQWHRNCIAIGLSGGFMEPLESTSIHLIQRAVLRLLRLFPSSPVSPRDVAEFNDQQHTDMLQIRDFLILHYKATNRRDSAFWRQCAAMPIPASLEHKIELFRETGRVFRKNEELFAENSWVQVMLGQGIVPRSYHPIATKLRDDELARLLGGLRDGTNATVAGLPEHAEYVARYCGAAPAPSPVLAA

SEQ ID NO: 85514 - protein, 506 aa, Xanthomonas hortorum
  misc_feature (1)..(506): tr|A0A2S7DZA6|A0A2S7DZA6_9XANT Tryptophan halogenase OS =Xanthomonas hortorum pv. hederae OX=453603 GN=XhhCFBP4 925_16455 PE=4 SV=1
MIPAPLRNIVIVGGGTAGWMAAAAFARVLGPGFNVQLIESEQLGTVGVGEATVPHIKAFNNLLGIDEAEFVRQTQGSFKLGIEFVDWQRPGTSYIHSFGTQIGHPLGLLPFHQYWIKQHLRGKAQPLGAYTLNTVAAVRGKFMTSAGDVPANSPLANIAYAYHFDATQYARFLRGYAEQRGVTRIEGLVEQVQLHADTGHVQSLQLASGQVVSGDLFIDCSGFRGLLIEEALHTGYHDFTHWLPCDRALAVPSENVGPPTPYTRSTARAAGWQWRIPLQHRTGNGYVYSSAHISDDEAAATLLANLDGKPLADPRPLRFTTGRRKQFWNRNVVALGLASGFLEPLESTSIHLIQAGISRLLELFPREGISPVLVQRYNDRLAFEFDRIRDFLVLHYHATERDDSAFWRHCRTMPITPELQFTLDLFRDSGRFYRNAEEMFAEISWVQVMVGQGVLPQGYHPLVDQVPDHDAERFLASIAETIGHCVDAMPTHQQFIDRYCKAAAPR

SEQ ID NO: 85515 - protein, 511 aa, Hephaestia caeni
  misc_feature (1)..(511): tr|A0A397P2A6|A0A397P2A6_9SPHN Tryptophan halogenase OS =Hephaestia caeni OX=645617 GN=DFR49_1934 PE=4 SV=1
MIDDPIRRIVIVGGGTAGWMAAAATARILGAMPGLSITLIESEQIGTVGVGEATIPQIVLFNALLGIDEPDFVRATNATYKLGIEFIDWVRPGHRYTHPFGFYGLDMMGIEFHHHWLKGRTLGDRHSLDDYAISIVAARAEKFLRPRPDQPKSPLSKLAYAFQFDASAYARMLRGLAEAGGVTRVEGRIVDATQAGERGLIEHVTLADGRTIAGDLFIDCSGFRGLLIEQVMKAGFEDWSKWLPCDRALAVASERTADWQPLTRSTAKPAGWQWRIPLQHRTGNGYVYSSAHVSDDEAAATLLAGLDGAALGDPRPLRFTAGHRKAAWVGNVVALGLASGFLEPLESTSIHLVQTGIARLMTLFPTRAFDPRAIARYNAMTLREYVDIRDFLVLHYNATERDDTPFWDYCRNLPPPEGLKAKLEMFRASGRIFREHDELFTETSWLSVMAGQGIEAAGYHPAADLLADDETLTRLRHLREVVAHTAAAMPTQQEFLRQERSLAEQPLARAS

SEQ ID NO: 85516 - protein, 504 aa, Sphingomonas sp.
  misc_feature (1)..(504): tr|A0A0Q6KRX0|A0A0Q6KRX0_9SPHN Tryptophan halogenase OS =Sphingomonas sp. Leaf339 OX=1736343 GN=ASG67_10195 PE= 4 SV=1
MNQQPDRAIRSIVIVGGGTAGWMSAAYLARMLAHLPIAITVIDSAAIGTVGVGEATVPAIRDFLAAVELGEPEVLRETSGTIKYGIRFDGWVAPDKAFFHPFGLYGVPARGVAFHQYWLKLKAAGDDLPIGDYCLATQLAEQGLFLPPPDRPANDLGVFNFAVHFDASKFAAMLRRLSIANRVTHIDGRIDRVERDGEDGRVTAVHLEGDRRVEGDLWIDCSGFRSLLLGEALGVPYIDWRHWLPCDRAIALPCRAAAAPRPFTTATARPAGWQWHIPLQQRVGNGHIYSSDHMSDDEAEHILRANLEGEALAEPNRLRFTAGHRDRFWDRNVVGIGLSSGFLEPLESTSITLIQSGLERLVALFPDRDVDPRLAATYNRQSTLEFERVRDFLFLHYQANGRTGERFWDERRSVALPETLQRKLDAWRSGGEFVRYEWESFQDASWLSMYAGFGDLPPRHSPLADRFDTGALRGTFARMREAIAGTLAHAEPHAAFLARHAADT

SEQ ID NO: 85517 - protein, 505 aa, Sphingomonas sp.
  misc_feature (1)..(505): tr|A0A0Q6K838|A0A0Q6K838_9SPHN Tryptophan halogenase OS =Sphingomonas sp. Leaf339 OX=1736343 GN=ASG67_10755 PE= 4 SV=1
MTGADDRRIRRILIVGGGTAGWMTAAALAHALPRGCRIELVESEDIGTVGVGEATIPPIRLFNETLGINEAEFLRATKGSFKLGIEFVDWAKQEHRYFHPFGTFGKPFDMLAVHQHWLRARAAGSMVPLDDLSMAWGAASRNRFAPPMVDPRSVGSTFDYAYHFDAGLYAAFLRHYAEARGVVRVEGKVGDVALEGESGHVASVTLTDGRVLAAELFVDCSGFRGLLIEGALQTGYESWTHWLPCDRAVAVPCAHAPGGVLTPYTRSTARAAGWQWRIPLQHRVGNGYVYCSDHLSDDKAATTLLAGLDGEALGDPRFLQFQTGRRRQFWNRNVVAIGLASGFMEPLESTSIHLIQAGIAKLLAFFPTRDFEPLGIEEYNRVAITECERIRDFLILHYKLTQRDDAPLWRQCAAMAIPDTLAMKIEHFRRHGRLIARDMDLFGAASWLAVHVGQLNLPEGGDPLIDYAADPAASRRFVEQLAGAIGRAAETMPTHADYIARHCAA

SEQ ID NO: 85518 - protein, 500 aa, Sphingomonas sp.
  misc_feature (1)..(500): tr|A0A4R2SXG6|A0A4R2SXG6_9SPHN Tryptophan halogenase OS =Sphingomonas sp. PP-CE-1A-559 OX=2135657 GN=C8J42_1015 32 PE=4 SV=1
MSARIQVVIIGGGTAGWMTAATLAMSFAGRLADVTLVESEDIGTVGVGEATVPHIRFFNQKLGIDEADFIRRTNATFKLGIEFRDWGRIGDSYIHPFGDFGHDIDGLPFHQYWAHATRGGADGLPKLEDCSLPIVAARDNRFTPPLEDPRSIGSTYSYAYQFDATLYAAYLRDYSEARGVVRIEGRVDAVEQSAGGIDAVRLADGRRIAGDLFIDCSGFRALLIDGALKVGHEDWSHWLPCNAAWAVPTANAGALTPYTRATAREAGWQWRIPLQHRTGNGHVFSTRFTDPETARAVLMDNLEGEALAEPRMLRFRTGRRDRQWVGNCVAIGLSAGFLEPLESTSIHLIQLAIGKLIELFPSGGVFDPADAAEFNRAMALEYDRVRDFLVLHYCATERDDTPFWRYMRTMTLPSSLTEKIAEFRERGIVASYREGMFLPASWLAVYYGQRIMPDRVNPLIADITMATSRAHVTRVAAACASAAKAMPLHEDYIGRIKAAA

SEQ ID NO: 85519 - protein, 532 aa, Sphingomonas sp.
  misc_feature (1)..(532): tr|A0A4R2SS82|A0A4R2SS82_9SPHN Tryptophan halogenase OS =Sphingomonas sp. PP-CE-1A-559 OX=2135657 GN=C8J42_1029 68 PE=4 SV=1
MSMAGRLTPPRICPAVAAPDGFEAGTRTMANHPLRIVIAGGGTAGWMAAATFARFLETGYEIDLIESDAIGTVGVGEATIPQIHLFNDALGLDEDAFLRATGGTFKLGIEFVDWFKPGHRYMHAFGDVGRDVGLLPFHQYWLRARSLGLAGDLGAYSLNTHAALAERMQRGPARTARTLPSMPYAYHFDAGLYARYLRRYSETRGVNRIEGKIVRVTRDGESGDVSGLVLENGTSVAADLYIDCTGFRGLLIEEALGTGYEDWTHWLPCDRAIAVPSARSEKFTPFTRSAAHAAGWQWRIPLQHRTGNGVVFSSAHMSEDEATTTLLAGLDTPAMADPRTIAFRTGRRKRMWNRNVVALGLAAGFMEPLESTSIHLIQSAISRLLKLLPGRVIAEADRTEFNRQSDFEYERIRDFIVLHYKTTARDDTPFWRQCRDMAIPDTLAAKIDLWRGNGHIVREHEELFTEVGWLQVLAGQGITPAGHHPLADAISTSDLGEFMDTIDKLNAREAGQMQDHAAFVAQHCAASVSLGA

SEQ ID NO: 85520 - protein, 480 aa, Sphingomonas sp.
  misc_feature (1)..(480): tr|A0A0Q6KJB9|A0A0Q6KJB9_9SPHN Tryptophan halogenase OS =Sphingomonas sp. Leaf339 OX=1736343 GN=ASG67_07455 PE= 4 SV=1
MTAAALRGVACAACDVHLVESAEVGIVGVGEATLPHLRAFIERLGIDEAAFMAATSATFKLGIEFCDFGAIGDRYIHPFGTYGRDLAGVGFHHYWLRRASANAAAAPISDYSAAVVAAEARRFARPTGIDDPAASFGYAYQFDATRFAPFLREWSEARGAVRTEGRIVSVDRDAATGDVRAIVLANGSRIEGDLFVDCSGFRSLLLGEAMGEGWEDWSHWLPCDRAVAAPCASPPGPIEPFTRAVAMSAGWRWRIPLQHRVGNGYVYSSAHISDDDARTALLDALESEPLAEPRFLRFRAGRRQRSWVGNVVAIGLASGFLEPLESTSIYLSQMAITQLIEHFPERMVEDVDRDGFNASVDAEYDRIRDFLILHYHATTRTDSPFWDHVRTMAIPDTLASKMALWRETAQVSKYAHGLFLEPSWVAVYLGQGIVPTGWDQRADLPEPAALDRALATLASTIADRVAAMPDHATYLARGSA

SEQ ID NO: 85521 - protein, 501 aa, Sphingomonas sp.
  misc_feature (1)..(501): tr|A0A0Q6KIV1|A0A0Q6KIV1_9SPHN Tryptophan halogenase OS =Sphingomonas sp. Leaf339 OX=1736343 GN=ASG67_06680 PE= 4 SV=1
MSVGSVQGGSMRRVVIAGGGTAGWMAAAAIARTMGRTVELTLVESDAIGTVGVGESTIPPLVTYNRLLGINEADFMRATQATFKLGILFDDWKERGHRYFHSFGLTGKDHWSAGFQHFWLYGQEKGHLQSYDEYCLELVAAMQGKFAHLPDDRVNYAYQLDSTLYAKFLRGMAETDGTTRVEGRIAQVELDGERGDIAALVLESGARIEGDLFIDCTGFRALLIEQALHAGFDDWTHYLPCDAAIAVQTESVRPAVPYTRAMAHDAGWQWRIPLQHRTGNGIVYCSRYLDHDAALDRLLGNIEGRTLTEPNRLRFVTGARRRQWHRNCIAIGLSGGFMEPLESTSIHLIQRAVLRLLRLFPTGAISERDVAEFNDQQHTDMLQIRDFLILHYKATERRDSAFWRQCGAMVIPESLDQKIELFRETGRVFRKNDELFAENSWVQVMMGQGIIPRAFHPIVGKLRDEELARLLTTLRDEVGRTVAGLPDHAAYVARYCGAMAA

SEQ ID NO: 85522 - protein, 497 aa, Pseudoalteromonas amylolytica
  misc_feature (1)..(497): tr|A0A1S1MS80|A0A1S1MS80_9GAMM Tryptophan halogenase OS =Pseudoalteromonas amylolytica OX=1859457 GN=BET10_1910 0 PE=4 SV=1
MSAQQIKNVVIVGGGTAGWLSASFLAKVMGKLINITVLESADISTVGVGEATIPPLQPFNSAMGIDEQAFIRATKATIKLGIQFEGWGTETSSYMHAFGAIGKDFPFCEFHNHWLYAQQQGIGDDFWDYSLNYQAAKHHKFSKLNAIPGTKLPGISYAYHFDAGLYAKFLAAHAKQLGACHIQGTVERVIKDESSGNIRALELKDGQQVTGDLFIDCTGMHALLIDKALNSGFEDWSHWLPCDSALAVPCEHASTHIAPYTRSIAHEAGWQWQIPLQHRVGNGLVYASKHMSDEQAKDKLLSNLPGKALAEPKLIRFRTGRRLTPWHKNVVAIGLSSGFLEPLESTSIHLIQTAIVRLVKLFPHNGIEQSQVALYNQQSKTEFERIRDFIILHYKLNERRDSDFWRQCESMNIPESLLQKITLFKETGKLLREDDELFAEVAWQQVFIGQGLKPKQLHPLLHALSDQQRMELFSSLKTLIEQTVTAMPTHTQFLTDL

SEQ ID NO: 85523 - protein, 496 aa, Rheinheimera tuosuensis
  misc_feature (1)..(496): tr|A0A285INE8|A0A285INE8_9GAMM Tryptophan halogenase OS =Rheinheimera tuosuensis OX=1323745 GN=SAMN06297280_142 6 PE=4 SV=1
MNNAVKKIVVLGGGTAGWMAAALLKKVLAGAIDIELVESEDIGTVGVGEATIPPIRLFNNVMGINEAEFLRETKATIKLAIKFDNWRVPGEGYFHTFGAPGKSLAFCHFHHLWLRARQQGNKTDLWQYDLNYLCAMAGKFAPINAKDNILELPYAYHFDAGLYARYLRKLSEQMGVVRHEGKVQQVFQHPNGDIKCLVLDDGRELSGDLFIDCSGFRGLLIQDKLNAGYDDWSHFLPCDRAVAVPSERFEKTLPYTRSIAHSAGWQWRIPLQHRNGNGLVYSSAHYTDEQASDLIMANLERKALAEPKFLRFKTGRRRQQWQRNVVAVGLASGFLEPLESTSIHLIQSAVVRLIQLFPHNGICQSAVNEYNRQSELEYTQIRDFLILHYHVNERSDSQFWRDMQQLAIPDSLRQKMAIFADNGQLFRDQNDLFLESSWLQVMLGQGIEPKDYHPIANNFSPEKLRDMLANIQAIKQEPLSKLPDHDTYIQTMINRS

SEQ ID NO: 85524 - protein, 506 aa, Sphingomonas adhaesiva
  misc_feature (1)..(506): tr|A0A2A4IC56|A0A2A4IC56_9SPHN Tryptophan 7-halogenase OS=Sphingomonas adhaesiva OX=28212 GN=COA07_03760 PE=4 SV=1
MTGEAAMNGPVRSIVIVGGGTAGWMAATYLARRLGHLRPDITVIESAAIGTVGVGEATVPAIRDFLAAIELGEPEVLRETGGTIKYGIRFDGWKQDGHRFFHPFGLYGVAARGVAFHHYWLKMRAAGDATPLSDYCLATQLAERGLFLPPSDRPANDLGVFNFAVHFDASKFAALLRRLAVANNVRHIDARIEAVERDGADGRVAAVTLDDGRRVAGDLWIDCSGFRSLLLGDALGVPYVDWRHWLPCDRAIAIPCAAADGPTTPFTVATARKGGWQWRIPLRHRVGNGYVYCSDHVGDDEAERDLLASLEGEPLAAPNRLRFTTGHRARFWDRNVVALGLASGFLEPLESTSISLIQSGLERFVALFPDKDFDPRLAATYNRQSVLEFERLRDFLLLHYWSNRRIGEPFWDRMRALEPTEGLQIKLDAWRAGGEFVRNEWDTFQDPSWLSMYAGFDDLPARYSPLADQVSERDLADSLSRMRAAIAGTLAHAEPHDAFLARTVGA

SEQ ID NO: 85525 - protein, 516 aa, Nitrospirillum amazonense
  misc_feature (1)..(516): tr|A0A560G771|A0A560G771_9PROT Tryptophan halogenase OS =Nitrospirillum amazonense OX=28077 GN=FBZ88_103165 PE= 4 SV=1
MAAPHTSHQPSDDTATNAPLRRIVIVGGGTAGWMAAASLARFLRNLKCDIQLVESEQIGTVGVGEATIPPIMNFIRVLGIDEDDLIRQTNATFKLGIRFQDWTRLGHSYFHPFGHTGFEMEGIGFPAYWMRQRLAGAAAPLEEYSLQAQAAAHNRFMRPVKAPGSPLEGITYALHFDAALFARYLRTYSEARGVTRVEGKVVKVDLRPEDGFIDALRLEDGRRVEGDFFIDCSGFRGLLIEEALQAGYENWQSYLPCDSAVAVPSERAGAPPSYTLATAREAGWQWRIPLQHREGNGVVYARDFLDDEAARETLLANLVGKPLADPRILRFVTGRRRETWKRNCLSLGLASGFLEPLESTSIHMVHRGLALFIQMLPDRRCEPADIARYNRMVAFEYERIRDFLVLHYATNERRDTDFWRHCAGIEWPDSLKSKIELFQSHGRIQREDTELFPEQSWLYVFTGQGLVPRRYDPLTDLLDPEKMRGALANIHDVIGRVVQTMPHHQAFIDRYCAAQS

SEQ ID NO: 85526 - protein, 516 aa, Nitrospirillum amazonense
  misc_feature (1)..(516): tr|A0A560JMS9|A0A560JMS9_9PROT Tryptophan halogenase OS =Nitrospirillum amazonense OX=28077 GN=FBZ87_106123 PE= 4 SV=1
MAAPHTSPQPSDDTATNAPLRRIVIVGGGTAGWMAAASLAKFLRNLKCDIQLVESEQIGTVGVGEATIPPIMNFIRVLGIDEDDLIRQTNATFKLGIRFQDWTRLGHSYFHPFGHTGFEMEGIGFPAYWMRQRLAGAAAPLEEYSLQAQAAAHNRFMRPVKAPGSPLEGITYALHFDAALFARYLRTYSEARGVTRVEGKVVKIDLRPEDGFIAALRLEDGRRVEGDFFIDCSGFRGLLIEEALQAGYENWQSYLPCDSAVAVPSERAGAPPSYTLATARDAGWQWRIPLQHREGNGVVYARDFLDDEAARETLLANLAGKPLADPRILRFVTGRRRETWKRNCLSLGLASGFLEPLESTSIHMVHRGLALFIQMLPDRRCEPADVARYNRMVAFEYERIRDFLVLHYATNERRDTEFWRHCAGIDWPDSLRAKIELFQSHGRIQREDTELFPEQSWLYVFTGQGLIPRRYDPLTDLLDPEKMRGALANIHDVIGRVVQTMPHHQAFIDRHCSAGR

SEQ ID NO: 85527 - protein, 551 aa, Nitrospirillum amazonense
  misc_feature (1)..(551): tr|A0A560GCX4|A0A560GCX4_9PROT Tryptophan halogenase OS =Nitrospirillum amazonense OX=28077 GN=FBZ88_101136 PE= 4 SV=1
MADTNAPDGARAKGAPVRNVLIVGGGTAGWLAAAYLARTLSIGQPGGARITLVESADIGILGVGEGTFPNIQRTLRRIGIDESVFMRESEATFKQGIRFDHWQHAPGSGERDHYFHPFQSAISRQDLDLVPYWLLGAAGDGVPLDTALTMQKRVADAALAPKRSGDADYAAPLNYAYHFDAVKFARLLRVVATDLGVRHVVDTVDAVPLDETGAVAGVVTRESGTLTADLYIDCTGFRAQLIGQALKSPYQSCRKWLFCDRAVALQVPYDQPDAPIPSYTVSTAHEAGWTWDIGLETRRGIGHVYSSDHTDDARAEQVLRDYIGPAAGDKTARTFRFEAGYRPEPWVRNCVAIGLSSGFFEPLESTGIVLIEVASVLLTSLFPWAGDMATAARQFNRIMRQRYERALDFLKLHYCLTRRTDTAFWRDNADAATVPDTLHDLLDRWRHRPPEGLDFDLNLDTFSEASWQFVLYGMGYNTDLSAQAGAFRHMDEARQQFAAIRASTEQALAALPRHRDLITQIYRHGLRPRTPLGGAPSGRASLSSGMAGLAR

SEQ ID NO: 85528 - protein, 550 aa, Nitrospirillum amazonense
  misc_feature (1)..(550): tr|A0A560G1W5|A0A560G1W5_9PROT Tryptophan halogenase OS =Nitrospirillum amazonense OX=28077 GN=FBZ88_106304 PE= 4 SV=1
MTAAEGARRRILIVGGGTAGWLTAAYLAKTLGANLSGGTEITLIESSDIGIIGVGEGTFPTIRSTLAAIGIDEARFLRESTATFKQGVHFVDWAETPAPDASPTQALGTVAGHSHYFHPFNFPHQGNGPELLPYWLLGGAGDAPFAEAVTLQKAVADASRGPKRAIDPPYAAPLNYAYHFDANRLAVLLRTVAIELGVRHRVGTVTDVVLDGSGAVARVDTREHGSLSADLYIDCSGFRAEIIGRALKVPFKSYQDVLFNDRAVALQVPYDRPDAPIPSYTVATAHEAGWTWDIGLNDRRGTGYVYSSRHTDDARAEQVLRRYLGPAAEGRDVRLLKFDSGCRTAQWVGNCVAVGLSGGFFEPLESTGIMLIEVAAHMIAQYFPWGETGLDSAQTAASMAATARTYNALMGKRYERIVDFLKLHYCITRRTDSAYWRDNADPATIPESLRDRLAVWAHRPPGRFDFVADHETFLPASYQYVLYGMGFKTDLEPARALHRRMDEARHEFRGLRTVAPQAVSSLPTHRELVEEVYRNGFRPPQAAQAVGGRR

SEQ ID NO: 85529 - protein, 487 aa, Porphyrobacter neustonensis
  misc_feature (1)..(487): tr|A0A192D7F5|A0A192D7F5_9SPHN Tryptophan halogenase OS =Porphyrobacter neustonensis OX=1112 GN=A9D12_00165 PE= 4 SV=1
MAAAALGRLRNGRPVEITLIESESIGTVGVGEATIPPFVGFNQLLGINEAEMLSEVGGTFKLGIQFENWGKLGDSYIHPFGAYGYNMGGISFHHVWHRLAVAGDKRPIQVFNLETMAAYFGKFARTEDFKGADAPPVNYAYHLDAGRYAAFLRKLAESRGVVRQEGKVVDVALDGESGFVTAVTLDGGKQIAGDLFIDCSGFRGLLIEQALQTGYDDWSNYLPCNRAVALPCQREDGSPPPPFTRATAHGAGWQWQVPLQHRNGNGHVYCSAYMEDQEALDILLGNIAGKPQAEPNWLRFVTGRRKKFWNKNVVALGLAAGFMEPLESTSIHLINTGIDKLISLLSLDGITKVQEDTFNRLTGREYARIRDFLILHYNATSRTDTEFWNHVRTMPVPDTLTEKVELFRANGQIFREEDELFTETSWAAVMMGQGIRMGSHNAMADALDPATTAREINDMEQSIRYLVQRMPGHGDYLARYCPAPMAA

SEQ ID NO: 85530 - protein, 508 aa, Nitrospirillum amazonense
  misc_feature (1)..(508): tr|A0A560HHS8|A0A560HHS8_9PROT Tryptophan halogenase OS =Nitrospirillum amazonense OX=28077 GN=FBZ90_101330 PE= 4 SV=1
MTVPSQGPLRRILIVGGGTAGWMAACALNQAVRAGGTRVELVESDAIGTVGVGEATVPPIRQFNQDIGLDEATFIKATQGTFKLGIEFQDWRATGTRFFHGFGDYIVNAGPFSTLNHWLVARDLVGEAAGDFDAYHMAAVMARAGRFAAPDNDPRSPYYYFNYAFHFDAGLYARLLRTKAEAEGVTRHEGRIVATDLHPETGHIRSVRLDDGRDLSADLFIDCSGFIALLADKALGERFIDYGHWLPVDRAWAVPCASVGPPSPYTRATALEAGWQWRIPLQHRTGNGYVFSTAHVTEDAARARLLANLDGQALDEPRLLRFRTGRRERFWARNCVAIGLSSGFVEPLESTSISLIQGGITRLISLLPDLSFNPGLAAEYNRVQALEFDRIRDFIILHYALTQRDDTAFWRERRGMALPDTLAYRIETFRETGHVVLLNEETFVAPSWQALFIGLGLIPKRRDPLMAAQRREEIIETLRLRRTSLASAAQRLPTHAAFLARLGMTESP

SEQ ID NO: 85531 - protein, 530 aa, Rhodanobacter sp.
  misc_feature (1)..(530): tr|A0A1V3PVY8|A0A1V3PVY8_9GAMM Tryptophan halogenase OS =Rhodanobacter sp. B05 OX=1945859 GN=B0E47_11040 PE=4 S V=1
MPRLQKILVVGGGTAGWLTACYLAKTLNAGDARSVQVELVESPSIGALGVGEGTFPSIRGTLAAIGLDERRFFVGASATFKQGVHFVDWVRPPGEAGHHHYFHPFNHPSQRAGSPELLPYWLLGAAPAGMPFAEAVTMQQRIVDAGRAPKRMTDGNYLGPMNYAYHFDAARFASVLAEHGQGLGIKRLLATVEHTELDERGAIARVVTRELGALSADLYIDCTGLRGALIGGAMQSPLRSLRDVLFCDRAVAVQVPDEKPDAPIRPYTMSTAQEAGWIWDIGLQRRRGTGYVYSSQHTDSARAEEVIRGYLGPAAETLEARHIKFDPGYRPEPWRHNCVAVGLSGGVVEPLESTGIALVELGAYLISHLLPGDSSDMARTAKLYNGMMSARYERILDFIKMHYCLTRRRDSKFWIDNVDPASIPDTLRDRLALWRHRPPHRLDFVTDLEMFMPASWQYVLYGMEFETDLEPMRSAHPQMEAARREFATIQQVAGHALHDLPDHRALVEQLCREQVQRDPGEATEPARMSV

SEQ ID NO: 85532 - protein, 488 aa, Sphingomonas sp.
  misc_feature (1)..(488): tr|A0A0Q4JE96|A0A0Q4JE96_9SPHN Tryptophan halogenase OS =Sphingomonas sp. Leaf28 OX=1735695 GN=ASE79_16615 PE=4 SV=1
MAAAALSRLVAGGVSVTLVESEEIGTVGVGEATIPSLLDYNRMLGIDEDAFVRATGATFKLGIEFRDWRRLGEAYLHPFGTHGRDIDGVSFHQLWLRQAASGTPDPGPIGDYCLSSVAARRGRFTRPSANPQSVLSTLSYAFHFDAALYARFLRDMAEQDGVVRVEGRVVAVDRDAETGFIEAVRLEGDRRIEGELFVDCSGFRSLLLGETLDVPFTSWKQWLPCDRAWAVPSARQGPLTPYTRATADTAGWRWRIPLQHRVGNGYVYSSAHIDDDDAKQALLAGLDGAAQGEPRQLRFEAGRRERLWDRNCVAIGLAGGFLEPLESTSIHLIQSGITRLMSLFPDRGLGSAERDEYNRVMLREYEQVRDFIILHYHATERSDSPFWDHCRTMTVPESLLAKLGLWSGRARVFRDQGELFTPDSWIAVLLGQGVCPDSFDPLTAGLPPSETARFMAHIRDMIDKTAAAMPMHEDFIAQHCAASSRRSA

SEQ ID NO: 85533 - protein, 510 aa, Alteromonas sp.
  misc_feature (1)..(510): tr|A0A2K8XVK0|A0A2K8XVK0_9ALTE Tryptophan halogenase OS =Alteromonas sp. MB-3u-76 OX=2058133 GN=CW735_01235 PE= 4 SV=1
MNNSTNTSSKQRIVIVGGGTAGWLTAAIVAAKHKIAKGQCGLDITLVESSDIPTVGVGEGTWPTMRNTLKDIGLSEKEVFRKCSAAFKQGGKFVNWVNGDGDFYYHPFTVPLGYGRVEMAPYIDNISEFANSTNFQQHVCEQNMAPRTLNEEEYSSAQSNYAYHLDAGAFADMLKTFCKEELGVTHKVATVEQVETSSKQCIESITLNDNSILEADLFVDCSGFRSMLLGEALSEPVVSANDTLFNNSALALHVPYNGDFEIKPYTQATAQEAGWIWDIGLSSRRGVGHVYSTDFTTDERAEELLRRYVGDDKGELTPRVIRFDSGYKKQIWKGNCIGVGLSAGFVEPLEATALMLIEISARYIAEQMPTPASAMPIISQRFNKQMQYRWQRIIDFLKLHYIFNQRSEPYWVANRDAASIPDSLKEDLEIWKYRGPQIADFSAAIELFPAASYQYVLYGMGFSPDFSLQSHFYTQRDLANKVIQQNQLITQQKLSSLPNHRNYIEQWLAS

SEQ ID NO: 85534 - protein, 491 aa, Cellvibrio sp.
  misc_feature (1)..(491): tr|I3IDK4|I3IDK4_9GAMM Tryptophan halogenase OS=Cellvib rio sp. BR OX=1134474 GN=O59_000160 PE=4 SV=1
MTAIKNLVIVGGGTAGWMAAAAITKLYGKIVNVTLVESEEIGTIGVGEATIPTMVFFHQLLGINEAEFLSATQGTFKLGIRFENWRAQGKHYLHAFGVTGNDCWAAGFQHFWRRGLELGIAGEFGDYCFERQAAEQLRFAHMPNNGLNYAFHLDASRYAKFLRQFSEAQGATRIEGTIKQVTTEPQTGFIQSVTLNSGKIIEGDFFFDCSGMRGLLIEQALHTGYEDWSHWLPCDRAIAVQTESVREPVPYTRSIAHSAGWQWQIPLRQRVGNGLVYCSKYLADEDAKKLLLENVEGKLLTEPRLIQFRTGRRLQQWSKNCLAVGLSGGFLEPLESTSIHLIQQNIVRFMRMFPAQGIVQSDIDEFNKQAKFDLEHIRDFIILHYCVTERTDSPFWNHCRTMSLPDSLAHRIKLFKETGRMFREGNELFDDSWLQVMIGQGLMPSSHNPLVDTMTRDELTVFLLKIKDTISKKLNGLPLHAEYLKKYPLPD

SEQ ID NO: 85535 - protein, 506 aa, Porphyrobacter neustonensis
  misc_feature (1)..(506): tr|A0A192D1J5|A0A192D1J5_9SPHN Tryptophan halogenase OS =Porphyrobacter neustonensis OX=1112 GN=A9D12_01475 PE= 4 SV=1
MTAAPAPLKSIVIVGGGSAGWMTAAALAKAVGETCAITLIESEAIGTVGVGEATIPPIRNFNQRLGIDEATFVRETQGSFKLGIEFVDWGRLGHSYFHPFGQYGAEFDSVPFYHHWMRAHLAGEMHGPIDDFSMCWAMAKAGKFAHPSPDRRLIQSTFDYAYHFDAGLYAAFLRRYAEQRGVRRVEGKVVDVSLRGEDGFIEAVTLDDGARIAGEFFIDCSGFRGLLIEEALHAGYDNWQHWLPCDRAVAVPSERGAFTPFTRSTARVAGWQWRIPLQHRTGNGYVHCSQFVSEDEATETLLANLEGKPLADPRTLRFVTGKRRAFWQKNCVAIGLSAGFMEPLESTSLHLIQYGILRLLALLPDTAMSPLLAREYNAQTAREYELIRDFLILHYKASERDDSQLWRYCAAMPIPDSLQYKIDHFRAHGTLVAEPQELFANPSWIAVYLGQGIVPARAPALAQMRGSVPVAERLGQIRKAMDDAVAVMPSHGDFIARHCAAPPLSA

SEQ ID NO: 85536 - protein, 521 aa, Nitrospirillum amazonense
  misc_feature (1)..(521): tr|A0A560FMV6|A0A560FMV6_9PROT Glycine/D-amino acid oxi dase-like deaminating enzyme OS=Nitrospirillum amazonen se OX=28077 GN=FBZ88_11546 PE=4 SV=1
MTVERTILIVGGGTAGWLAAAYLAKYLGVREGGPIGITLLEAPDIGIVGVGEGTFPTIRGTLRFLGLNEAQFMRDTSATFKQGIRFARWVDGGEDDSFFHPFEAPFPTDGAGLVPYWLLQDGDRRPPFAQAMTFQQQVTDARRAPKRGPEGDFEAPLNYAYHFDAAKAAQALAARARELGVRHLRGTVTDVALAADGAIAHLVTREYGAIAADFYVDCSGLRAELIGRALGVPQKSVKSILFTDRALSCKVPYEAADTPLESCTVATAHAAGWTWEIGLEGARGVGCVYSSDHMSDDEAEEVLRAYVAPHLGSGVELAPRKTAFDAGYRETPWVRNCVAIGLAGGFLEPLESTSVVLIEVAVGMLAELFPHDGRWDAPAARFNELMTRRFENIVNFLKLHYCLSKREEPFWRDNRDPASIPPALRDLLAQWRTRPPSRFDFALDLEAFAFFNYQYILYGMGFETDLSAARAAFPQAEAAQKTFARIRAYGDHATKDLPAHRALIRRMNQISAPDGRVASRR

SEQ ID NO: 85537 - protein, 510 aa, Sphingomonas adhaesiva
  misc_feature (1)..(510): tr|A0A2A4IAD7|A0A2A4IAD7_9SPHN Tryptophan 7-halogenase OS=Sphingomonas adhaesiva OX=28212 GN=COA07_00750 PE=4 SV=1
MNDGLARAVRKVTIVGGGTAGWMAAALLSRLFAGGGFDIRLIESDEIGTIGVGEATIPAIRTFLELAGLDQVEMIRATQATFKLGIEFVDWRAKGTSYIHGFGTIGQDLLWLHTHQFWLKYAARGQAKPFDFYALNCLAARRNRFCMPDARNPGSPLAGLDYAYHFDASLFARHLRAQSEARGVTRIEGRIVDIVCRGEDGHVDHVVLADGRTVDGDLFIDCSGMRSLLLGQALGVGYEDWRHWLPCDRALAVPCASVAPLTPYTRSTARDAGWQWRIPLQHRIGNGHVYASDHISDDDAAATLLAHLDAAPLADPRPVRFAPGRRLRAWEKNVVAIGLSSGFLEPLESTSIHLIQTALLRIVALFPGEGVKPADVAEYNRQTAFEMADIRDFIIAHYKVTEREDTPFWAYVKHMAIPDSLAERLELFRTSARFFLHSRAELFREESWVQVLIGQGLAMRHDPMVDLIPDADALAYLRDIEAVIDDVAARMPDHAAFVARNCSAAATPAR

SEQ ID NO: 85538 - protein, 508 aa, Nitrospirillum amazonense
  misc_feature (1)..(508): tr|A0A560K2A2|A0A560K2A2_9PROT Tryptophan halogenase OS =Nitrospirillum amazonense OX=28077 GN=FBZ87_103295 PE= 4 SV=1
MAEAMRSGRKIVIVGGGTAGWMAAAVLARVLKGKYGAIELVESAEIGTVGVGEATIPPIQFLNHLLGIDEVDFVRKTQATFKLGIEFVDWTRLNHRYFHPFGPHGHTIDAVSFHHYWLRQQSQGDTSDIGDYSPSTVAARMGKFQPPAPDARPGGPVIAYAYHFDAGLYAQYLRGIAERNGVKRTEGKIVQVTQREPDGFIDSLVLDNGTRVEGDLFVDCSGFRGLLIGETLRAPYEDWSHWLPCDRAVAVPCEGVAAITPYTRSTARAAGWQWRIPLQHRIGNGHVYSSRFISDDEATATLLANLDGKPLADPRLLRFTTGRRKNSWTKNCISLGLASGFMEPLESTSIHLVQSGLFRMVSLLPRDGFEQATVDEYNRLTNIEYEQIRDFLILHYHAVERDDSPLWNYCRTMEIPDSLRHKIDLFRARGRIARFDEQLFAEPSWVAVFLGQGIQPHSYDPVADVMPEAEVTARLARIREAIRRMADALPTHAEFINRHCRADRPVAA

SEQ ID NO: 85539 - protein, 515 aa, Nitrospirillum amazonense
  misc_feature (1)..(515): tr|A0A560JDG6|A0A560JDG6_9PROT Tryptophan halogenase OS =Nitrospirillum amazonense OX=28077 GN=FBZ87_10983 PE=4 SV=1
MTFAPLRDIVIVGGGTAGWMTAALFSHILGPGGHRIHLVESEEIGTVGVGEATIPPIAIFNRALGLDENDFLRQTQGTIKLAIEFVDWLRPGHRYLHSFGAFSRSLGLGHFQDFWLRAHRLGLTDDWEPYILNSVAARRGRFIRPDPRRQSPLEPLAHAFHIDAGLYARYLRRFAEQRGVRRTEGKIVRTVLRAHDGFVDAVEMADGTRVAGDLFIDCSGFRGLLIEQALNTGFEDWTHWLPCDRAWAVPSAHDGSAAALTPYTRSTARPAGWQWRIPLQHRTGNGYVYSSRHVSDDEAAATLMANLDGEALAEPRPLRFTAGRRRRFWNRNVVAVGLAGGFMEPLESTSIHLVQSAISRLITLLPNHSSPDGGFDPAVADEFNRASAIEYERIRDFIILHYAATERDGSPFWRECRDRPVPEELARRMRVFRAMGRVARDHDELFSEVSWLHVFLGQGVWPRDYHPLADQLSEEDLRCFLDDIKAAVAREVDAMPSHADFIARHCKADSLTRTA

SEQ ID NO: 85540 - protein, 492 aa, Sphingomonas adhaesiva
  misc_feature (1)..(492): tr|A0A2A4I9U8|A0A2A4I9U8_9SPHN Tryptophan 7-halogenase OS=Sphingomonas adhaesiva OX=28212 GN=COA07_04980 PE=4 SV=1
MRVVIVGGGTAGWMTAAALARLVPAAQAEIVLIESEEIGIVGVGEATLPHIRAFNTRIGIDEADFMRATGATFKLGIEFRDWARIGDSYIHPFGVFGRDTDGVGFHHYLARAGQIGRLQDFSLPVVAARAARFAPPADDPESLLSTYGYAYQFDATRYAPYLRARAEADGAQRIEGRVVAVEHDAGDGRVTAVRLADGRAVAGDLFVDCSGFRALLIGDTLGEPFEDWSRWLPCDRAVAVPCASEGPLLPYTSAVAMPAGWRWRIPLQHRVGNGYVYSSAHLDDDAARDALLAAIEGPALAEPRILRFRAGRRPRGWVDNVVAIGLAGGFLEPLESTSIYLIQIAITALVELFPDGTIDPADRDEFNRVLAIEYDRIRDFLILHYHATERDDSTFWTQMRTMAVPDTLARKMALFRARGRVETYREGVFLEPSWIAVYLGQRVVPTGYDQRADAPDETQLARAIERLHAATAAAARAMPDHRDYIASIGAAA

SEQ ID NO: 85541 - protein, 525 aa, Mitsuaria sp.
  misc_feature (1)..(525): tr|A0A1A9HKY5|A0A1A9HKY5_9BURK Tryptophan halogenase OS =Mitsuaria sp. 7 OX=1658665 GN=ABE85_11130 PE=4 SV=1
MGDGAGGASRAGAEEIPGIEEIVIVGGGTAGWMTAAALSKVLRGRKRIVLVESEEIGTVGVGEATIPMIQRFNQVLEIDEDEFLRETQATFKLGIEFVGWGAPGERYIHGFGRIGQDLLTAPFDQYWQRLHAIGQAADLGEYSIARVAALRNKFMRPRTDMPQSPLSEIAYAFHFDASLYARYLRRYAEARGVVRLEGKVAEVRQHEGGGARDGHVRSLVLSDGRRVDGELFIDCSGFRGLLIEQTLKVGYEDWTHWLPCDRAVAVPSAATTPRTPYTRATARRAGWQWRIPLQHRTGNGHVFCSRHISEDEATAELMANLDGEALAEPRALRFTTGMRQRAWDRNVVAIGLSSGFLEPLESTSIHMIQSGISRLLSFFPDRGFAQVDIDEFNRQGRFEYERVRDFIVLHYHLNRREEPLWRACREMDVPATLKAKMALYRSRGRIVRENNELFAEVAWLQVMHGQGLRADGHHPLVDLLGEHEVKDYLDSVRAVIAQCVDVMPTHDEFLARCASGNLPRSGDRT

SEQ ID NO: 85542 - protein, 518 aa, Nitrospirillum amazonense
  misc_feature (1)..(518): tr|A0A560FFC1|A0A560FFC1_9PROT Tryptophan halogenase OS =Nitrospirillum amazonense OX=28077 GN=FBZ89_10716 PE=4 SV=1
MAAPHASSQTSNDTATNAPLRRIVIVGGGTAGWMAAASLAKFLRNLKCDIQLVESEQIGTVGVGEATIPPIMNFIRVLGIDEDDLIRQTNATFKLGIRFQDWTRLGHSYFHPFGHTGFEMEGIGFPAYWMRQRLAGAAAPLEEYSLQAQAAAHNRFMRPVKAPGSPLEGITYALHFDAALFARYLRSYSEARGVTRVEGKVVKVDLRPEDGFIDALRLEDGRRVEGDFFIDCSGFRGLLIEEALQAGYENWQSYLPCDSAVAVPSERTGAPPSYTLATARDAGWQWRIPLQHREGNGVVYARDFLDDDAARETLLANLVGKPLADPRILRFVTGRRRETWKRNCLSLGLASGFLEPLESTSIHMVHRGLALFIQMLPDRRCEPADIARYNKMVAFEYERIRDFLVLHYATNERRDTDFWRHCAAIDWPDSLKAKIELFQSHGRIQREDTELFPEQSWLYVFTGQGLRPRRYDPLTDLLDPEKMRGALANIHDVIGRVVQTMPYHQAFIDRHCAAHPSR

SEQ ID NO: 85543 - protein, 408 aa, Methylovulum psychrotolerans
  misc_feature (1)..(408): tr|A0A2S5CH03|A0A2S5CH03_9GAMM Tryptophan halogenase OS =Methylovulum psychrotolerans OX=1704499 GN=AADEFJLK_04 171 PE=4 SV=1
MDQKKVIIIGAGPSGSIAAALLQKKGHQAIILEREVFPRFSIGESLLPQCMAFIEEAGMLQAVIEAGFQLKTGADFLCGDKRSEFYFADKFSPGFETTFQVQRDRFDALLATEAQAQGTVIQWQHQVLGADFSGAKPVLTVCDEQKATYQTEADFVLDASGFGRVLPRLLNLESPTNFPVRQALFTHIEDRISGADYDRKQISIVIHPKMADVWYWLIPFSNGRCSLGIVGEPRLFDGFADNQQAFHALVAEEPNLSALLANAVYDTPINGIKGYSANVSALHGKGYALLGNAGEFLDPVFSSGVTIAMKSASLAADVLDRQFNGQAIDWQRDYAQPLQKGVDTFRTFVTSWYEGGLQDVIFYNQQQPNIKAMICSILAGYAWDERNPYVKNSQNRLNTLVELCRITA

SEQ ID NO: 85544 - protein, 514 aa, Nitrospirillum amazonense
  misc_feature (1)..(514): tr|A0A560GPT3|A0A560GPT3_9PROT Tryptophan halogenase OS =Nitrospirillum amazonense OX=28077 GN=FBZ90_11936 PE=4 SV=1
MTFAPLRDIVIVGGGTAGWMAAALFSHILGPGGRSGGHRVHLVESQEIGTVGVGEATIPPIGVFNRALGLDENDFLRQTQGTIKLGIEFVDWLRPGHRYLHSFGAFGHALGLGHFQDFWLRAHRLGMTDDWEPYILNSVAARRGRFTPPDPRRQSPLEPLAYAFHIDAGLYAQYLRRFAEQRGVRRTEGRIVRTILRAHDGFVDAVEMADGTRVKGDLFIDCSGFRGLLIEQALNTGFEDWSHWLPCDRAWAVPSAHDGTASALTPYTRSTARVAGWQWRIPLQHRTGNGYVYSSRHVSDDEAAATLLANLEGEALADPRPLRFTAGRRRRFWNRNVVAVGLAAGFMEPLESTSIHLVQSALSRLITLLPNHTLDPAVVEEFNRASAIEYERIRDFIILHYAATDRGESPFWRECRDRPVPEELARRMRVFRALGRVARDHDELFSEVSWLHVFLGQGVWPRDHHPLADQLSEEDLRRFLDDIKAAVAREVDAMPTHADFIARHCQPDSLTRTA

SEQ ID NO: 85545 - protein, 509 aa, Nitrospirillum amazonense
  misc_feature (1)..(509): tr|A0A560GR65|A0A560GR65_9PROT Tryptophan halogenase OS =Nitrospirillum amazonense OX=28077 GN=FBZ90_11773 PE=4 SV=1
MSQNGPLGHIAIIGGGTAGWMAAAALARVLGRHGPAITLVESEEIGTVGVGEATIPPIQAFNAMLGINEDDFLRATQGTFKLGIEFIDWLRPGHLYFHPFGDHGVDFGPVPFDGLWHKLRSRGLAGPLEAYSICAAAAAAGRFARPTQGDNTPLSRISYAFHFDAALYAQLLRTHAEAAGVTRREGRVTAVDLRPDGFIEAVTLSCGSRVTADFFIDCSGFRGLLIADALGAGFQDWGHWLPNDRAVAVPCAPGGSFTPYTRSTARAAGWQWRIPLRNRIGNGYVYASAHLSDEGAMATLMANLDGAALAEPRLLRFRTGRRDAFWVKNCVALGLAAGFLEPLESTSIHLIQAGIARLLEMFPTRAFEPADIRRYNRLMAAEFDSVRDFVILHFHATERADTPYWAHVRTMEVPETLAERLRIYRATGRVFREADDLFTKTSWLAVMQGQGLTAEGYDPLADGMPETEAQARLERIAAVTAASVQRLPSHGEFIRTRVDAGFQPWGESL

SEQ ID NO: 85546 - protein, 501 aa, Nitrospirillum amazonense
  misc_feature (1)..(501): tr|A0A560F1F1|A0A560F1F1_9PROT Tryptophan halogenase OS =Nitrospirillum amazonense OX=28077 GN=FBZ89_11410 PE=4 SV=1
MSDRRIRKVVILGGGTAGWMTAAALAKVNTPPQFEVTLIESDEIGIIGVGEATIPTIHWFNRLIDLDEAQFLRETKATFKLGIEFVGWNGGDSRYFHPFGRYGGPADAQMFFHRWIRANLGGFPHGHQDYSLATLAARANRFGPPAPDPNSLFSTLGYAYHFDAGLYAAHLRRLSEARGVKRIEGKVERIEQDPETGFVTRLTTHRGEVVEGDLFIDCSGLRALLIEGVMNSGFEDWSHWLPCDRALAIPCERVADPTPYTRATAHAFGWQWRIPLQHRTGNGIVYSSRFVGDDEAAATLMANLDGKALADPRLIRFQTGRRRRSWVKNVVAIGLSSGFLEPLESTSIHLIQSGIAKLLSLFPTRDCPEETAGQFNQVYGADVESVRDFLVLHYSRTQGRDEPLWRHCQAMAVPEGLSLKERHFTRTGRIVLSTDELFREASWFAVLMGQGLRATDYNPLLDTMPANENLAYLLRLRDQMAKAAATLPSHEEYLRRVMGPA

SEQ ID NO: 85547 - protein, 506 aa, Luteibacter sp.
  misc_feature (1)..(506): tr|A0A1K1RA67|A0A1K1RA67_9GAMM Tryptophan halogenase OS =Luteibacter sp. UNCMF366Tsu5.1 OX=1502758 GN=SAMN02800 691_2953 PE=4 SV=1
MSYGITPIVIVGGGTAGWMAAAALARVLGKRATVRLVESEDIGTVGVGEATVPHIKAFNNLLGINEADFVMRTQGTFKLGIQFNDWTRPGDSYVHGFGTMGHDLGLTPFHQFWIKGRLAGLAADLHDYSVNTVAATRGKFLPAPTDVPASNPLSGMAYAYHFDASLYARYLREYSEARGVQRTEGKVRNVELHPESGHVAAIVMEDGERIEGALFVDCSGFRGLLIEGALQSGYEDWSQWLPCDRALAVPCAKVAEPTPYTRSTARPAGWQWRIPLQHRTGNGYVYCSRYISDDEAAATLLANLDGPALGDPRPLRFVTGMRKKAWNKNVVALGLASGFMEPLESTSIHMIQAGISKLLQLFPADGVMDPLLIDRYNAQTRFESERIRDFLVLHYHATERADSPFWDYCRTMAIPASLQENIDLFRQSGRFFRNGDEMFGVVSWVQVMIGQGILPAGYDPLADQLPDEELPKFLASIRDVVSRNVDLLPTHQQFIDRECRAPTVAV

SEQ ID NO: 85548 - protein, 557 aa, Nitrospirillum amazonense
  misc_feature (1)..(557): tr|A0A560IKU0|A0A560IKU0_9PROT Tryptophan halogenase OS =Nitrospirillum amazonense OX=28077 GN=FBZ92_10785 PE=4 SV=1
MADIEAPTDGARAKGAPVKNVLIVGGGTAGWLAAAYLARTLSIGQPGGARITLVESADIGILGVGEGTFPNIQRTLRRIGIDESVFMRESEATFKQGIRFDHWQHAPGPSATGAGQRDHYFHPFQSAIGPQDLDLIPYWLLGAAGDGVPLDTALTMQKRVADAALAPKRSGDADYAAPLNYAYHFDAVKFARLLRVVATDLGVRHVIDTVDAVPLDETGAVAGVVTRENGTLTADLYIDCTGFRAQLIGQALKSPYQSCRKWLFCDRAVALQVPYDQPDAPIPSYTISTAHEAGWTWDIGLETRRGIGHVYSSDHTDDARAEQVLRDYIGPAAADKTARTFRFEAGYRPEPWVRNCVAIGLSSGFFEPLESTGIVLIEVASVLLTSLFPWAGDMATAARQFNRIMRQRYERALDFLKLHYCLTRRTDTAFWRDNADAATVPDTLHDLLDRWRHRPPEGLDFDLNLDTFSEASWQFVLYGMGYRTDLSAQAGAFRHMDEARQQFAAIRAGTEQALAALPRHRDLITQIYRHGLRPRTPLAGAPSGRATLSSGMAGLSR

SEQ ID NO: 85549 - protein, 552 aa, Nitrospirillum amazonense
  misc_feature (1)..(552): tr|A0A560FBT9|A0A560FBT9_9PROT Tryptophan halogenase OS =Nitrospirillum amazonense OX=28077 GN=FBZ89_108140 PE= 4 SV=1
MTAAEGARRRILIVGGGTAGWLTAAYLAKTLGANLSGGTEITLIESSDIGIIGVGEGTFPTIRSTLAAIGIDEARFLRESTATFKQGVHFVDWAETPAPGASPTQALGAVAGHTHYFHPFNFPHIGNGPGGNGPELLPYWLLGGAGDLPFAEAVTLQKAVADASRGPKRPVDPPYAAPLNYAYHFDANRLAVLLRTVATELGVRHRVGTVTDVALDGSGAVARVETREHGSLSADLYIDCSGFRAEIIGRALKVPFKSYQDVLFNDRAVALQVPYDRPDAPIPSYTVATAHEAGWTWDIGLNDRRGTGYVYSSRHTDDTRAEQVLRRYLGPAAEGRDVRLLKFDSGCRTAQWVGNCVAVGLSGGFFEPLESTGIMLIEVAAHMIAQYFPWGETGLDSAGTAASMAATARTYNALMGKRYERIVDFLKLHYCITRRTDSAYWRDNADPATIPESLRDRLAVWAHRPPGRFDFVADHETFLPASYQYVLYGMGFKTDLEPARALHRRMDEARHEFRGLRTVAPQAVSSLPTHRELVEEVYSTGFRPPQAAPGRR

SEQ ID NO: 85550 - protein, 505 aa, Nitrospirillum amazonense
  misc_feature (1)..(505): tr|A0A560IKL6|A0A560IKL6_9PROT Tryptophan halogenase OS =Nitrospirillum amazonense OX=28077 GN=FBZ92_108133 PE= 4 SV=1
MSDRRIRKVVILGGGTAGWMTAAALAKVNTPPQFEVTLIESDEIGIIGVGEATIPTIHWFNRLVDLDEAQFLRETRATFKLGIEFVGWNGARNGEVSRYFHPFGRYGGPADTQMFFHRWIRATLGGFPHGHQDYSLATLAAMANKFGPPAPDPNSLFSTLGYAYHFDAGLYAAHLRRRSEARGVKRIEGKVERIEQDPETGFVTRLTTHRGQVVEGDLFIDCSGLRALLIEGVMNSGFEDWSHWLPCDRALAVPCERVADPVPYTRATAHAFGWQWRIPLQHRTGNGIVYSSRFASDDEAASTLMTNLDGKALADPRLIRFQTGRRRQPWVKNVVAIGLSSGFLEPLESTSIHLIQSGIAKLLSLFPTRDCPEETAGQFNQVYGADVESVRDFLVLHYSRTQGRNEPLWRHCQAMAVPEGLSLKERHFTRTGRIVLSTDELFREASWFAVLMGQGLWATDYNPLLDTMPADENLAYLLRLREQMAKAAATLPSHEEYLRRVMGPA

SEQ ID NO: 85551 - protein, 516 aa, Streptomyces gilvosporeus
  misc_feature (1)..(516): tr|A0A1V0TMW0|A0A1V0TMW0_9ACTN Tryptophan halogenase OS =Streptomyces gilvosporeus OX=553510 GN=B1H19_08825 PE= 4 SV=1
MIKSVVIVGGGTAGWMSAAYLKAAFGDRIDVTLVESDRVSTIGVGEATFSTVRHFFDYLGLDEREWLPECAGSYKLGIRFENWRKPGHHFYHPFERLRTAEGFTLADWWLLEGDRSEPFDRSCFITPALCEAQRSPRMLDGSLFAGDLDGSLGRSTLEDQRDQFPYAYHFDASLLAKFLTKYGTDRGVRHVVDDVVDVARDQRGWIGHVTTREHGEISGDLFIDCTGFRGLLINQTLEEPFESFQDVLPNNRAVALRVPQPDQATKGMRPYTTATAMDAGWIWTIPLFGRNGNGYVYSDEFCTPEEAERTLREFAAPGQDDLEANHIRMRIGRNRRSWVNNCVAIGLSSAFVEPLESTGIFFIQHGIEQLVKNFPDQHWDPQLMKDYNDRVANVLDGVKEFLVLHYRAAQRDDTAYWKEAKVRPIPDALAARLETASSHLLDEHTIYPAYHGFEQYSWITMLLGLGHEPTRPRPTLAHLDPAAARAELAALKADTEHLVNSLPSCYEYLASINKAG

SEQ ID NO: 85552 - protein, 550 aa, Nitrospirillum amazonense
  misc_feature (1)..(550): tr|A0A560HEQ0|A0A560HEQ0_9PROT Tryptophan halogenase OS =Nitrospirillum amazonense OX=28077 GN=FBZ90_104248 PE= 4 SV=1
MTTQSMGSKDAGSPPVRDVLIVGGGTAGWLAAAYLARTLAISQPGGARISLVESPDIGILGVGEGTFPSIQRTLRRIGIDESVFMRESEATFKQGIRFDHWVRPPDTPGRSHYFHPFESAITPEGMDLLPYWLLGCADDGIGIDTAVTVQKGVADASLAPKRPGEADYAGALNYAYHFDAVKFARLLRTVAIDLGVRHVVDTVDAVPLAEDGTIAGVLTHRNGRLTADLYIDCTGFSAQLIGQALKSPYQSCRQWLFCDRAVALQVPYDRPDAPIPSYTISTAQEAGWTWDIGLESRRGTGHVYSSDHTDDTRAEQVLRDYIGPAAADKAARTFRFEAGFRPQPWVGNCVAIGLSGGFFEPLESTGIVMIEVAAVLLSSLFPWAGDMVTAARQFNRIMRQRYERAADFLKLHYCLTRRTDTAFWRDNADAATTPDTLRDLLDRWRHRPPEGLDFDLNLDTFSEASWRFVLYGMEYGTDLAAQAGAFRHKDEARRHFAAIRAGTAQALAALPRHRDLIQQIYRHGLRPRPSFGTAQAGQSALSAGMAGLSR

SEQ ID NO: 85553 - protein, 516 aa, Nitrospirillum amazonense
  misc_feature (1)..(516): tr|A0A560IY87|A0A560IY87_9PROT Tryptophan halogenase OS =Nitrospirillum amazonense OX=28077 GN=FBZ92_102156 PE= 4 SV=1
MAAPHTSPQTSDDNATNAPLRRIVIVGGGTAGWMAAASLAKFLRNLKCDIVLVESEQIGTVGVGEATIPPIMNFIRVLGIDEDDLIRQTNATFKLGIRFQDWTRLGHSYFHPFGHTGFEMEGIGFPAYWMRQRLAGAAAPLEEYSLQAQAAAHNRFMRPVKAPGSPLEGITYALHFDAALFARYLRTYSEARGVTRVEGKVVKVDLRPEDGFIDALRLEDGRRVEGDFFIDCSGFRGLLIEEALQAGYENWQSYLPCDSAVAVPSERAGAPPSYTLATARDAGWQWRIPLQHREGNGVVYARDFLGDDAARETLLANLAGKPLADPRILRFVTGRRRETWKRNCLSLGLASGFLEPLESTSIHMVHRGLALFIQMLPDRRCEPADIARYNRMVAFEYERIRDFLVLHYATNERRDTDFWRHCAGIDWPDSLKAKIELFQSHGRIQREDTELFPEQSWLYVFTGQGLTPRRYDPLTDLLDPEKMRGALANIHDVIGRVVQTMPHHQAFIDRYCAAQS

SEQ ID NO: 85554 - protein, 495 aa, Alteromonadaceae bacterium
  misc_feature (1)..(495): tr|A0A3R7VN10|A0A3R7VN10_9ALTE Tryptophan 7-halogenase OS=Alteromonadaceae bacterium TMED101 OX=1986649 GN=CBC 61_007590 PE=4 SV=1
  misc_feature (452)..(452): Xaa can be any naturally occurring amino acid
MDQNVNKVVIAGGGTAGWMAAAALSKLVARPLEIILVESESIGTIGVGEATIPSILSINRMLQIPEPDFIKLTSGTFKLGIQFENWRTVGDSYIHSFGDTGQGSWAAGFHHFWLKGRSLGIEYDYGDYCAELLAAQQERFAITSKNRLNYAYHLDAAKYAAYLRNLAETAGVIRVEGRITRIDKTSDGFISSLQINDGEQAVEGDLFIDCSGFQAILADNALGVDYDDWSSWLPANRAWAVQSEITEHPKPYTRAIAHEAGWRWKIPLQHRTGNGLVYSSEFMDDQAAHNLLIQSVAGTLTTEPRQIKFTTGQRKRYWEKNCVTLGLSSGFIEPLESTSIHMIQNGIMWLLLLFPDPLIEKTAVTQYNKQVRSEAEYIRDFIVLHYTANERYGEPFWDHCRNMELPETLSHRIEMFRSTGRVFQAQDDIFTENSWVQVLLGQGIVPRTYHNXVETMDPSELASFLTSIREQAAGTVQGLPMHGEYIKRLISHASA

SEQ ID NO: 85555 - protein, 506 aa, Roseimaritima ulvae
  misc_feature (1)..(506): tr|A0A5B9QUW6|A0A5B9QUW6_9PLAN Tryptophan halogenase OS =Roseimaritima ulvae OX=980254 GN=UC8_31640 PE=4 SV=1
MREHHAVDVAVVGAGCGGSLIALLLNRIGLSVVLLDRGSHPRFAIGESSTPTADLVLRDLAQRYELPALLPLSQYGTWKANYPQLTCGLKRGFSYFHQCPGQPFRPLSDHSNELLVAASSDDRHADTHWLRSDVDAFLVRQVQAAGIPYIDQTEFIAEQCQPTWKLSGSRENIPLSITAKFLIDATGEAAFLPHILGLTNKTSRMRTNSRALFAHFEGVTPWQEMLVAQNADLDAYPFRSDIAAVHHLLQEGWMWQLRFDNGVTSVGFALEGGCQAGPAKLSPTAEWNALLERYPTLADQFADARVVAPERGLTRTGRLQRRWEPSAGENWALLPHTAGFVDPLYSPGLAQTMCGVERLVGLLEQHWGRESLPERLAGYQRTVAAELDLIDRLVHGSYRCRHHFDLFVPYSMLYFAAATTYEQRRLEHGFDPGKAAPAFLCADEADFQAIVGELQQRLEHALASPDRRPASDRFFAEVAEAIAPYNHVGLCDRTVHNMYHHTAVNP

SEQ ID NO: 85556 - protein, 501 aa, Nitrospirillum amazonense
  misc_feature (1)..(501): tr|A0A560FH62|A0A560FH62_9PROT Tryptophan halogenase OS =Nitrospirillum amazonense OX=28077 GN=FBZ88_12038 PE=4 SV=1
MSDRRIRKVVILGGGTAGWMTAAALAKVNTPPQFEVTLIESDEIGIIGVGEATIPTIHWFNRLVELDEAQFLRETKATFKLGIEFAGWNGGNSRYFHPFGRYGGPADAQMFFHRWIRATLGGFPHGHQDYSLATLAAMANKFGPPAPDPNSLFSTLGYAYHFDAGLYAAHLRRRSEVLGVKRIEGKVERIEQDPETGFVTRLTTHRGEVVEGDLFIDCSGLRALLIEGVMNSGFEDWSHWLPCDRALAVPCERVPDPVPYTRATAHAFGWQWRIPLQHRTGNGIVYSSRFAGDDEAASTLMANLDGKALADPRLIRFQTGRRRRSWVKNVVAIGLSSGFLEPLESTSIHLIQSGIAKLLSLFPTRDCPEETAGQFNQVYGADVESVRDFLVLHYSRTQGRDEPLWRHCQAMAVPEGLSLKERHFTRTGRIVLSTDELFREASWFAVMMGQGLRATDYNPLLDTMPADENLAYLLRLREQMAKAAATLPSHEEYLRRVMGPA

SEQ ID NO: 85557 - protein, 518 aa, Cellvibrio sp.
  misc_feature (1)..(518): tr|I3IDD0|I3IDD0_9GAMM Putative tryptophan halogenase O S=Cellvibrio sp. BR OX=1134474 GN=O59_000086 PE=4 SV=1
MNNKIASVVIVGGGTAGWLTAGRIAAQHRTQTGSTISVTLVESPTIPIIGVGEGTWPTMRSTLMKLGISETDFIRECDASFKQGAKFARWVTGTPDDFYYHPLMLPQGFGKTNMAAHWQALRNEQQLQESFSAATCFQEAICELGLAPKMITTPEFNSVANYAYHLNAGKFSTFLQKHCTEKLGVLHVLADVVSINSADNGDIRSVTTAQAGEISGDLFVDCTGFQSLLLGQHLQVPFVDCSDVLFIDNALAVQIPYDSDDAPIASHTISTAQDAGWIWDIGLIHRRGVGHVYSSRHTSEDQATAQLAAYIGPAFNNSSLRKIPLPCGHRDIFWKNNCVAVGLSAGFLEPLEASALVLVELSASMIAEQLPACRAVMDITAKRFNETFRYRWDRIIDFLKLHYILSKRTDNTFWIDNRDPATIPASLQELMQLWRYQPPGDHDFTSNNEVFPAASYQYVLYGMGFETCYDYSEHLLRDNQFAQEQFMKNKKTIAQVTRSLPSNRELLQKIHLHGLQTL

SEQ ID NO: 85558 - protein, 506 aa, Duganella sacchari
  misc_feature (1)..(506): tr|A0A1M7R5S2|A0A1M7R5S2_9BURK Tryptophan halogenase OS =Duganella sacchari OX=551987 GN=SAMN05192549_11170 PE= 4 SV=1
MNTLNRINHITVVGGGSAGWMAATALATYLGKGATIRLIESEEIGIVGVGEASVPHIKLFNGQWLGIDEAEFVKRTQGTVKLGIQFNDWGRIGDSYIHGFGAIGRSMGPLPFHQFWLKQFLAGRAPDIGHYTPQTVMAPQGRFAPGDRNAPPHSPLADIAYAYHFDATLYARYLRELAEQRGVQRIEGKIVSVQQRADDGHIESVTLESGQVVEGELFIDCSGFRGLLIEQTLKTGYVDWTHWLPCDRAMAVPSASVEPITPYTRATARAAGWQWRIPLQHRIGNGYVYSSRHISDDEAAATLLANLDGEALAEPRPLRFTTGMRKKFWNKNVVALGLASGFLEPLESTSIYLAQSGITRLLSLFPKRDFNPLLAARYNRESAFEYERVRDFLILHYNATERNDTPFWDDCRTMSIPDSLREAVELFRADGRYFRNGEDFFALPSWVQVMLGQRIMPQSYHPIVDEMPEDKLIEQVDGMRAMLAHAVASMPTHQEWINRYWKASAP

SEQ ID NO: 85559 - protein, 363 aa, Methylovulum psychrotolerans
  misc_feature (1)..(363): tr|A0A1Z4C435|A0A1Z4C435_9GAMM Tryptophan halogenase OS =Methylovulum psychrotolerans OX=1704499 GN=CEK71_20635 PE=4 SV=1
MTQPTPFDVFIVGAGPAGCAVALSLAQTVPGLRVAIADPGRSTPFRIGESVPPLIKPFLDQLGVGAAFLQDNHCPSFRTVSAWGSPELVSNEFFLNVHNTGWRLDRARFDQTLLNAACQQGAQRLPAQLRTLSHHAPYWHIGCGDAGDYRATYLIDASGRTALPSRLAGLKPINHDRLVASAVFFGQTDPNLPNADAVLTEACPDGWWYTAALPEGRRVVALMTDADLARRLNAKQLAAWQQQLAQTRHVLPLIGNARPLAPPQLWPANSRYLHGPTRPNLLAVGDALSCFDPLSSQGIIKALRSGLFAAYALTDHIRRQDSSGFSRYQALMQREFAAYQTTLSDYHRQEQRWPDAPFWQRRL

SEQ ID NO: 85560 - protein, 505 aa, Erythrobacter sp.
  misc_feature (1)..(505): tr|A5PB21|A5PB21_9SPHN Tryptophan halogenase, putative OS=Erythrobacter sp. SD-21 OX=161528 GN=ED21_23601 PE=4 SV=1
MRMAIEHIVIVGGGTAGWMAAAALSRIRDGRDLKITLVESEQIGTVGVGEATIPPFVEFQNALDIDEREMMAAVQGTFKLGIQFANWGQVGESYIHPFGDYGYELGGVHFHQVWHAMRERGDKRPLQVFNLETMAAHFGKFMRSQDYGRDDLPPMNYAYHIDATAYARFLRAYAEKRGVVRREGLVKNVALHPETGFVTGITLDDGEEIEGDFFVDCSGFRGLLIEQALETGYEEWTRFLPCDRAVALPCNRDDGSPPPPFTKATAHKAGWQWQVPLQTRNGNGHVYCSEFMEADEAHDILVQNLAGKPTADPNHLRFVTGRRKKFWNKNVVALGLASGFMEPLESTSIHLINTGVNKLIATLSLDGVTEAQASTYNRLTDKEYERIRDFLVLHYKVTRRDDSEFWNYVRTMDVPDTLSEKIEIFKANGQVFREEDELFTTTSWAAVMLGQGITMDGTSPMAAGVIDGVAKEVDEMERSIKWLVQQMPGHDQYLQRYCPTGVKAA

SEQ ID NO: 85561 - protein, 550 aa, Nitrospirillum amazonense
  misc_feature (1)..(550): tr|A0A560KHJ5|A0A560KHJ5_9PROT Tryptophan halogenase OS =Nitrospirillum amazonense OX=28077 GN=FBZ87_101451 PE= 4 SV=1
MTAADGARRRILIVGGGTAGWLTAAYLAKTLGANLSGGTEITLIESSDIGIIGVGEGTFPTIRSTLAAIGIDEARFLRESSATFKQGVHFVDWAETPAPDASPTQALGAVPGHTHYFHPFNFPHQGNGPELLPYWLLGEAGDLPFAEAVTLQKAVADAARGPKRPIDPPYAAPLNYAYHFDANRLAVLLRTVAIELGVRHRVGTVTDVVLDGSGAVARVDTREHGSLSADLYIDCSGFRAEIIGRALKVPFKSYQDVLFNDRAVALQVPYDRPDAPIPSYTVATAHEAGWTWDIGLNDRRGTGYVYSSRHTDDTRAEEVLRRYLGLVAEGRDVRLLKFDSGCRAAQWVGNCVAVGLSGGFFEPLESTGIMLIEVAAHMIAQYFPWGETGLDSAQTAASMAATARTYNALMGKRYERIVDFLKLHYCITRRTDSAYWRDNADPATIPESLRDRLAAWAHRPPGRFDFVADHETFLPASYQYVLYGMGFKTDLEPAHALHRRMDEARHEFRGLRTVTPQAVSSLPTHRDLVEEVYRNGFRPPQAAPAVGGRR

SEQ ID NO: 85562 - protein, 505 aa, Cellvibrio sp.
  misc_feature (1)..(505): tr|I3I4A2|I3I4A2_9GAMM Tryptophan halogenase, putative OS=Cellvibrio sp. BR OX=1134474 GN=O59_001168 PE=4 SV=1
MDKLLRIVILGGGTAGWMAANLFAKRWPREQVQITLMESPEIPIIGVGEGSTPSLKRFFKQLDLPEQEWMPACHATYKTNIRFVGWSPASGMQEYSHPFYSQPDVFNERAFFTNCRTRRLGLDVVTDPEKFFINGELARQGKVPTASANFPFQMEYGYHFDSQLLGRYLAGVATARGVIHHQAKLAEVLRNDRGEITALQTDGGDLLAGDFFIDCTGFASLLMQKALAVPFHSYQQQLFNDSAVVMPTPAFENPPVETRSTALSAGWCWQIPLTHRTGNGYVYSSQFISRDQAEAEFRAHIGMSESAQECRHLTMRVGQLAQHWSHNCVGLGLSQGFIEPLEATALHLVQLTIEALMDALDENNFTSNGRDNFNRTVANHFDGVRDYIIAHYKLNTRGVNNSLGSDYWRANRDNKQLPESLLQILDVWYRCGDLAAELAQRKIKPAFNTASWHCLLAGYGAFPPLAANQPGQGKGDLYRECEVKKFVEGCALNFPLQTDMIKMAR

SEQ ID NO: 85563 - protein, 521 aa, Xanthomonas cynarae; identical to SEQ ID NO: 84798
  misc_feature (1)..(521): tr|A0A2S7BC78|A0A2S7BC78_9XANT Tryptophan 7-halogenase OS=Xanthomonas cynarae OX=109214 GN=XcyCFBP4188_13555 P E=4 SV=1

SEQ ID NO: 85564 - protein, 485 aa, Cellvibrio sp.
  misc_feature (1)..(485): tr|I3IAI0|I3IAI0_9GAMM Tryptophan halogenase OS=Cellvib rio sp. BR OX=1134474 GN=O59_001739 PE=4 SV=1
MNDGIKKIVIVGRDLDAWITAFFLKSVLDKSRDSYEVTLVELGTLLTEHDIFAVLPSYKMLHKTLGANEDKLRQTAKARPFFGQRFTGWNPELPEFFHAYDRLGINFNGVDFFQYWMKAVSNGLKLPLEDFSLGVAAAKHGRFVASTGQADFSHLAYGYHLSAIEYVNAIARAAMEVGVKRENGNIITINRNNDVIHSLSLDDGMVLKADFFIDASGADALLINSLTDNNFESWEHWFLCDRIITASSAPLSPAPAFSQVTAFSSGWCGLYPLNNRTAIQTLYSSRHTDFSGVVAEMKMRVGVDISQGVERPIKCGMLSRPWIGNCLAVGTAAASMEPLDALQEHSLVISMVMLKQLFPNSNEYQNERDVYNKKMHSFIENLRDFQIVHYALNSRDELFWTACKNLKLPHILKEKIDIFKCCGYASVREDETFQEENWISVFNGHGLAPEFYSPLVDNMSDDEMIQNFQKILRMIKERINSSPLV

SEQ ID NO: 85565 - protein, 504 aa, Cellvibrio sp.
  misc_feature (1)..(504): tr|I3I4A1|I3I4A1_9GAMM Putative tryptophan halogenase O S=Cellvibrio sp. BR OX=1134474 GN=O59_001167 PE=4 SV=1
MNNIIKKIVIAGGGTAGWMTAALLKKVLQQRVEIQLVESEEIGIIGVGEATIPPIQTFNSVLGLHEPEFLRETKATIKMAIRFDNWKQQGDSYYHTFGAPGTTIGFSAFQHYWLRAQKQGWNTPIWDYDLNYLCCEAGVFGKFDGKDPLYQVPYAYHFDSALYGRYLRKISEQAGVVRTEGKIREVRLNADSGFVEALLMENGSEIQGDLFIDCSGMRGLLTQGALQTGYEDWSHWLPCDHALAVPSERFEKTLPYTRSIAHKAGWQWRIPLTHRNGNGLVYSSHHLSDDEATTILLSNLDSTALAEPKPIKFKTGRTLQQWNKNVIAVGLSSGFLEPLESTSIHLIQSAIVRLLKHFPNAGISQTQVDEYNRDSKHEYETVRDFIILHYHLNERDDSEFWRYLRNMPIPERLAHKIALFQETGAIMNDPGDIFLDSSWLQVMMGQGIMPRDYHPTADIPGAEQLQSMLARIASAKRQPLTQLPSHDEFLHQYAGVTRAGINRG

SEQ ID NO: 85566 - protein, 524 aa, Erythrobacter zhengii
  misc_feature (1)..(524): tr|A0A418NT99|A0A418NT99_9SPHN Tryptophan 7-halogenase OS=Erythrobacter zhengii OX=2307003 GN=D2V07_08490 PE=4 SV=1
MSQSNGIVTPGRIADVVIVGGGTAGWMAAAALSRFFDDGKRTITLVESDQIGTVGVGEATIPPIRNFNAMLDISENEFLRETRGTFKLGIEFVDWGRIGDRYFHPFGDYGHDFHGIQFHQLFLRQLALGSADIGDIADYSMSSVAAALGRFGRPSAQAKTPISEISYAFHFDAGLYAAFLRKLAERQGTVRKEGQIVRAHRNGESGDVSAIELADGTCIEGDLFIDCSGFRGLLIEEELETGYDDWSHWLPVDRAIAVPTSNIASPDPFTRSTARPAGWQWRIPLQHRVGNGHVFCSQYMDEDEARDILLANLEGQPLAEPRTIRFKTGMRRKAWSHNVVSLGLSSGFIEPLESTSIHMIQNGIARLFALFPDKPISSLERDEYNRGMRDVYEDVRDFIILHYKATQRGDTDFWRYVRDMAVPDSLTRKMELWRLHGRVFRENAELFAQPSWIAVMLGQNIAPESHDPIADTLDERKVAEAMKQMRETYRSTAQQLPSQEDFLRRAGAWHLEQPAAQFAFGGQS

SEQ ID NO: 85567 - protein, 485 aa, Pseudoalteromonas amylolytica
  misc_feature (1)..(485): tr|A0A1S1MXM0|A0A1S1MXM0_9GAMM Tryptophan halogenase OS =Pseudoalteromonas amylolytica OX=1859457 GN=BET10_0955 5 PE=4 SV=1
MAAASLSRFAKGKDLSVTLIESPDINTVGVGEATIPNFVDFNRNLGIADADLIKATQATFKLGIEFEDWYKKGSRFFHPFAAYGAPLENIEFHQYINKLKAQGVAPEIEDYCFACLLAKKGAFAQPNGQSNNSATHYSYAYHMDAVLYAQFLTQFCKEKGVKHILATVSKVTLNVESGMIESLKLSDGQTINGDLFIDCSGFKGILIEGAMGIGLEADDHWLPCDSAVAVQTELQGQPTPYTRAIAKEAGWQWCIPLQHRMGNGYIYSSKFMSDAQAEESLLNSVKGRTITQVKHFKFPKGRRKVIWHKNCFALGLAAGFLEPLESLGISLIQTALAKLLTFFPDKSFNQADIDEVNRLHNSELDRIIDFLLVHYKLTQRDDTAFWRYCQQMPIPESLAHKLAVYKSQGHVVQYADESFQQASWLAMFFGFNLQPERFDARIKSLDNRLIEKNLAQLNDQLQSAVSQCLSHQAFIDKHCKAVSDV

SEQ ID NO: 85568 - protein, 510 aa, Burkholderiales bacterium
  misc_feature (1)..(510): tr|A0A257FL90|A0A257FL90_9BURK Tryptophan halogenase OS =Burkholderiales bacterium PBB2 OX=2015564 GN=CFE41_159 50 PE=4 SV=1
MRVKKIAIIGGGTAGWLAANHLAVELRAEQDISITVIESAEIGIIGVGEGTVPHIRKSLLKFGISEAELLAECDATFKVGIKFSDWLAPGQNQAANSYYHPFSSPYPGGLDVTTMYLQNAADMEFSSLTEVAALADAMKAPKKVSSAPFEAPINYAYHFNALKFGQLLARNATERLGVHRKQATVVDAVLNSSGDVDYLLTKEGEQLQFDVYVDCTGFNSLLLGGLYKIPFVDKSSQILTDTALTVQVPTEPQCEIPPYTLAKAHKAGWLWDIPLTNRRGVGFVYASSLMPEAQALEGLAAHLGQSPDQMSPRKIGMRIGYREKFWHQNVVALGLAQGFVEPLEATSIFVTDLAAELFARNFSPEKGAMSAAAAYCNQVVSYTWERVMDFVQLHYCISDRRDSEFWRLNTEAAQLSEVLAQRLAMWRVNPPKKSDFFSRFDLFDVENFLFVLYGMKYPTKARAMTANEVQAYVRELNQVKGLEKALSGELIGHREWLTGFLAAYREMQRK

SEQ ID NO: 85569 - protein, 513 aa, Burkholderiales bacterium
  misc_feature (1)..(513): tr|A0A257FKU5|A0A257FKU5_9BURK Tryptophan halogenase OS =Burkholderiales bacterium PBB2 OX=2015564 GN=CFE41_170 10 PE=4 SV=1
MSLPPVTSLPLLRRIVIAGGGTAGWMSAAALSTLLPPGYEIHLVESEEIGTIGVGEATIPNIKNFNAALGLDEDDFIRATQGSFKMGIEFVNWGRLGERYIHGFGSFGQDFGSVGFHHQWLRLRREGLASALDDYSINTSAPRQAKFMRARPEMAGSPLADIAYAYQFDAGLYAAYLRRHAEQRGARRSEGRIVEVLRAAEDGRIRALRLDSGEQIEGDFFLDCTGMRALLMGQALGVGFEDWSHWLPCDRAWAVPCESAGPLLPMTRATAHSAGWQWRIPLQHRTGNGHVFASRFMDEGEARDLLMRHLDGKPLAEARSIRFQPGRRHQAWHQNCLAVGLSGGFLEPLESTSIHLIQTALARLMSFFPHGGLDAADIAEYNRQTQFEYERIRDFIILHYKATARDDSPFWNHCRQMAVPETLQRKIDLFCSNGRIVREADELFAELSWLQVMNGQGLQPRGYHPLAEQTPQAEAVELLDHIRQVIARCVQVMPTQAAYIAEHCQAVRPGSGT

SEQ ID NO: 85570 - protein, 505 aa, Sphingomonas sp.
  misc_feature (1)..(505): tr|A0A4V2T1K7|A0A4V2T1K7_9SPHN Tryptophan halogenase OS =Sphingomonas sp. PP-CE-1A-559 OX=2135657 GN=C8J42_1015 30 PE=4 SV=1
MTLGSPVRRIVIVGGGTAGWMAAAALARLIPTGASVTLIESDTIGTVGVGEATIPPIRAFNAMLGIDEAAFLAATAGSFKLGIEFVDWGAIGERYLHPFGGFGFDIEGVRFHQHWRRRRAAGVVENIDAYSLCAVAARAGRFAPPSPDPASILSQMAHAYHFDAGLYARFLRGRAERDGVTRIEGEIGDVALDGHTGHVRHVTLAGDRRIEGDLFLDCSGFRGLLIEQALGAGYEDWTRWLPCDRAVAMPTANTGTAITPYTRSTAREAGWQWRIPLQHRTGNGYVYSSAHCSDDEAATTLLDGVDGPPLADPRILRFTAGRRRKQWIGNVVALGLASGFTEPLESTSIHMVQTGISKLLALFPDQGFSPVEIDTYNRLAETQFDQVRDFLALHYHATRRTDSPFWREAGARAIPDSLAEKIALWRRRGRLFRWEDDLFAEASWVAVLLGQGIVPEGWDRLADTVDARDVDPRFDRLRAMFADAAARMPRHEDYLARTSPTRVRA

SEQ ID NO: 85571 - protein, 519 aa, Burkholderiales bacterium
  misc_feature (1)..(519): tr|A0A257FSH7|A0A257FSH7_9BURK Tryptophan halogenase OS =Burkholderiales bacterium PBB2 OX=2015564 GN=CFE41_035 90 PE=4 SV=1
MSESSSLDHNSSSLRSQPHGPIRRVVVVGGGSAGWMAAATLATYLGRQASVRLIESEDIGIVGVGEASVPHIRMFNGQMLGIDEAEFVRRTQGTVKLGIEFRDWARMGDRYTHGFGVIGRSRGPLPFHQFWLKLFLAGRAGPIGDYSLQTVMAPQGKFIPGDPSAAPDSPLADIAYAYHFDASLYARFLREISERRGVQRIEGKIVRALQRPDDGFIEAVQLESGERVEGDLFIDCSGFRGLLIEETLKTGYTDWSHWLPCDRALAVPCEGVSPITPYTRATAHAAGWQWRIPLQHRIGNGYVFSSQHLSEDQAAATLMANLDGKPLADPRLLRFTTGMRKQVWNKNVIALGLASGFLEPLESTSIYLVQSGLSRLLSLFPGREFNPQLAERFNRETAFEYERVRDFLILHYHATERDDTDFWNDCRTMSVPDSLREAMDLFRADGRYFRHGEDFFALPSWVQVMLGQRILPRRYHPIVDDMPEDRLHAFVEGTRHILSDAVAAMPTHQQWIERYWRAA

SEQ ID NO: 85572 - protein, 511 aa, Pseudoalteromonas amylolytica
  misc_feature (1)..(511): tr|A0A1S1MWX6|A0A1S1MWX6_9GAMM Uncharacterized protein OS=Pseudoalteromonas amylolytica OX=1859457 GN=BET10_11 995 PE=4 SV=1
MSHNNKQTKRILIVGGGSAGWLTAGLLASQCRGWQVTLVESKNIATIGVGEGTWPTMRTTLQKIGIDEDVFMHQCEASFKQGSEFINWTRSEGHSYYHPFSLPVGYSEQIDIVTPWLGIKDRVDFAHATSAQSYWCDRALAPKTASDPQYQGRANYGYHLNADKFAQLLKQHCTTKLGVTLILDDVTKVNGEVDAHINSVSTQEHGELLADLFIDCTGSRALLLGEHYKVQWQSKKHILKNDRAVALQVSHNTPSCDVASCTKSTAQSYGWIWDIALQSRRGIGYTFASEYCDFVQASTQLRDYIRSQGLSVAQDAQVKEIKFNPGHREKFWHKNCVAIGMSAGFIEPLEASALVMIELSAQYLCDNFPQSEHMMDVVATRFNAKFNYHWSRIIDFLKLHYVLSERDDTAYWQSMKRDDIPESLESLLTLWRYRPPKHGDLDHIDEVFSPASYQYVLYGMGFTTQADSFGISEQINSLFKHVTQIAQQGIDTQPSNRILLDNIAKYGIAKI

SEQ ID NO: 85573 - protein, 507 aa, Burkholderiales bacterium
  misc_feature (1)..(507): tr|A0A257FMA4|A0A257FMA4_9BURK Tryptophan halogenase OS =Burkholderiales bacterium PBB2 OX=2015564 GN=CFE41_118 80 PE=4 SV=1
MSVQTLYSDGARPVRRVVIAGGGTAGWMVAALMGKLMGKLLDIRLVESEEIGTVGVGEATIPALHTYHELLGLNEAEFMAATQATFKLGIKFEGWKAPGEDYIHSFGLTGKDHWSAGFQHFWLKGRERGLAAPYGDYCLELRAAEEQRFAHLPNNGMNYAYHLDATRYARFLRGLAEAHGVRRIEGKIAAVLREQPGAGDLTALQMEDGSRIEGDLFVDCTGFRALLLGQTLGVGYEDWSHWLPCDRAVAVQTASVREAPPYTRSIAHPFGWQWRIPLQHRVGNGLVYSSRELSDADAPEMLRRHVEGELITEPRLLRFEPGQRHEVWHRNCVAMGLASGFIEPLESTSIHLVQRAAIRLMRLFPAGGIREVDVREFNQQTTQDLQHIRDFIILHYHVTERDDSALWRHVRTMAVPETLRHRIELFRETARVFRPLDELFAENSWIQVMMGQGISPQHHHPVADLMGDAELSHFLNNIRSQVSRQLAGLPPHQAYVERLCAPYRAAA

SEQ ID NO: 85574 - protein, 498 aa, Sphingomonas sp.
  misc_feature (1)..(498): tr|A0A0Q6L184|A0A0Q6L184_9SPHN Tryptophan halogenase OS =Sphingomonas sp. Leaf339 OX=1736343 GN=ASG67_16450 PE= 4 SV=1
MAAAINKVVIVGGGTAGWMAAALIARVIGEQVSVELVESDDIGIIGVGEATIPPIQHVNAVLGIDEAEFLRETKATIKLAIRFDNWGAIGESYYHTFGSAGRNLAFCSFHHFWTRARRAGMAVDYWDFDLNYLCAREGKFAKMQGDDPTWSLPYAYHFDSLLYGKYLRRYSERLGVVRTEGLIEHADRDPETGDVTSLTLRDGRQVAGDLFIDCSGSRGLLIQRHLNVGYEDWGHWLPCDRAMAVPSARFAQTAPYTRSIAHEAGWQWRIPLQHRNGNGLVYSSRHCSDDRAASILLGNLDGEALDELRIIPFRTGRARRQWDHNVVAVGLASGFLEPLESTSIYLIQSAIVRLLHLFPRDGIDDRVVAEYNRQSQIEYETVRDFIILHYHATRRDDSAFWRDLRAMPVPDRLAAKIDLFRRSGILTQDPLDIFMEPSWVQVLMGQGIVPADHHPLADGPDNDELAAQLRQLAAMKREPVPTMPLHDTFLKAFGGQAG

SEQ ID NO: 85575 - protein, 499 aa, Sphingomonas sp.
  misc_feature (1)..(499): tr|A0A4R2SE09|A0A4R2SE09_9SPHN Tryptophan halogenase OS =Sphingomonas sp. PP-CE-1A-559 OX=2135657 GN=C8J42_1141 7 PE=4 SV=1
MSEFSEAQRTRVVVAGGGTAGWIAAAAIVRQLGPLVDVTLIESDEIGTVGVGESTIPTARSFHAFLGIDEAAFMRATQATFKLGIAFENWRQVGDRYFHPFGSVGRSVAIADFQHFWLEARARGFGGAYGDYSLEQQAAGAGLFGHDEQHSLAYAYHLDATAYARFLRTLAEPWGVRRVEGRIERVERDGKGGDIAALVLASGERIAGDLFIDCTGFRALLTEGALGTGFEDWSEWLSTDRALAVQTETVAPPVPYTRAIAHDAGWRWQIPLQKRTGNGLVYSSAHMSDDEAHATLIGALDGRPLFEPRPLRFRSGMRRQAWNRNCIALGLAAGFIEPLESTSIHLIMNAVIRLIQLFPFRGDDHVALAARFNAQSRHEWEHVRDFIILHYHVTQRDDSPFWRDCAHMTIPDSLAGRIALFTKTAGAWQGQDDLFRIDSWVSVMLGQGVEPRAHHRIARIIKEQELQTSFADLSRGITSTMRALPRHCDFLAQYCLADG

SEQ ID NO: 85576 - protein, 531 aa, Hephaestia caeni
  misc_feature (1)..(531): tr|A0A397NPM7|A0A397NPM7_9SPHN Tryptophan halogenase OS =Hephaestia caeni OX=645617 GN=DFR49_4000 PE=4 SV=1
MSGRAIRNIVIVGGGTAGWMAAATIGRALADQDVSVTVIESAAIGTVGVGEATIPPLLHLNQLLGIDENDFIRRTSATFKLGLDFVGWGKAGDRYFHPFGRYGADIGALPFHQYWLRARAADPAAAGALTDYSLPSKAALAGKFCRPSPDPKNTLSNIAYAYQFDAARYAVMLREIAEAAGTVRHEGRIVEVLMRENGFVRGVRLERGEVIEADFFIDCSGFRGLLIEGALETGYESWTHWLPCDRAIALPCEAAGDPTPYTRCSAHRAGWQWRIPLQHRIGNGHVYASAHMGDDEAEAILRANLDGAPLGEANRLRFTTGRRRLFWNRNVLALGLASGFIEPLESTSIHLVQSGLAKLLTLFPDRDFHQPDIDFYNRQTTVEHERLRDFIIMHYHANQRVGEPFWDACRAMPIPDTLAEKLAMWRRHGRVFRVDDELFGEPSWVAVLEGQGFPPERYDPLADALPPEKLARLPAIRAAIARGVAAMPEHGAYLAGAGTIGTAPPRAVPPDTLAGLVTTHTGSIGPAVVRR

SEQ ID NO: 85577 - protein, 510 aa, Sphingomonas sp.
  misc_feature (1)..(510): tr|A0A4R2SUQ9|A0A4R2SUQ9_9SPHN Tryptophan halogenase OS =Sphingomonas sp. PP-CE-1A-559 OX=2135657 GN=C8J42_1028 PE=4 SV=1
MTSDGAARVTKVVIVGGGTAGWMTAAALSRLVPSGVSVTLVESEEIGTVGVGEATIPPLLDFNRMLGIDEDAFVRATGATFKLGIEFRDWARLGDAYLHPFGTHGRDIGGVQFHQLWLRQAALGNPDPGPIGDYCLSAVAARRGRFTRPSANPESVLSTLFYAFHFDAALYGKFLRDMAEQDGVVRVEGRVVAVERDAGTGFIEAVRLEGDRRIDGELFIDCSGFRSLLLGGALDVPFTSWKHWLPCDRAWAVPSQRQGGLTPYTRATADTAGWRWRIPLQHRVGNGYVYSSAHIDDDDARRALLAGLEGEALGEPRQLRFEAGRRDRLWERNCVAIGLSGGFLEPLESTSIHLIQSGITRLMSLFPDLGFGVTEIDEYNRVMLREYEQVRDFIILHYHATERSDSPFWDQCRTMAIPASLSAKLALWSGKARVFREQGELFTPDGWIAVLLGQGIRPASFDPLASALPADESARFLAHVRDVIDKTAAAMPTHEAFIAQNCAARTHQAA

SEQ ID NO: 85578 - protein, 502 aa, Burkholderiales bacterium
  misc_feature (1)..(502): tr|A0A257FG66|A0A257FG66_9BURK Tryptophan halogenase (F ragment) OS=Burkholderiales bacterium PBB2 OX=2015564 G N=CFE41_23260 PE=4 SV=1
MITPAAPAPTSSTSVTSAAPYQSQPVRRVVIAGGGTAGWMVAAGLSKSLGSLYDIRLIESEEIGTIGVGEATIPTLHFFHEILGIDEQEFMAATNATFKLGISFENWRNVNEDYFHSFGTTGKPHWTAGFQHFWLEGRKRGLASDYGDYCLELRAAMDNRFAKLPNWGLNYAYHLDATAYAGYLRRYSEALGVVRIEGKIVKVHTDASSGPSQGGITGITLNDGSLIEGDLFIDCTGMRSLLLGETLGVAYEDWSQWLPCDSAVAAQTASVGEAVPYTRSIAHPFGWQWRIPLQHRVGNGLIYSSKYLSDDEAKATLLANVQGAVLRPPRVIKFTPGQRKQVWKNNCVAIGLSSGFLEPLESTSIHLIQRGLTRLIQMFPADGVRQSDIDEYNQQTDSAIQTIRDFIILHYHVTNRGDSQFWRDCRDMAVPALLAHRIQLFKDTARVCLDSDELFKDNSWIQVMMGQGITPAAHHPVTRQMDNRDLSEFLGEIRKDAARTFI

SEQ ID NO: 85579 - protein, 495 aa, Sphingomonas sp.
  misc_feature (1)..(495): tr|A0A4R2TH39|A0A4R2TH39_9SPHN Tryptophan halogenase OS =Sphingomonas sp. PP-CE-1A-559 OX=2135657 GN=C8J42_1015 29 PE=4 SV=1
MTDALRSVTIVGGGTAGWMAAVAFGRLLGPAGTRVTLIESDDIPTVGVGEATIPPIRTFHAMLGIDEDAFLRATGGSYKLGIRFEGWTRPGESYVHPFGQIGTDIAGVSFAAQWLRARHAGLAAPLGAYSLEARAAETGRFSRPIANGDSPLSRIGYAYHFDAGRYAAFLRTQAEAYGVVRHEGLVERVERGPAGIAAVHLADGSRIAGDMFLDCSGFRALLIEGGMEAGWTDWAEWLPCDRAVAVPSVADAAPLPLTRAIAERAGWRWRIPLQHRTGNGHVFSSRHISEDEATATLLAGVEGETLADPRVIRFATGHRNYFWSGNCIALGLAAGFMEPLESTSIHLVQSGLQHLLRMLPTGARPAPAVVERYNRIMTAEFSRIRDFLVAHYHLNARAEPFWRDRAAAAIPEGLAEKLALFCAGGRIFREADELFNETSWLAVLTGQNAPVSGYDPICDGIPIETAANRLAQIERVVATSLTHMPSHAHALARLA

SEQ ID NO: 85580 - protein, 494 aa, Sphingomonas sp.
  misc_feature (1)..(494): tr|A0A429VDP7|A0A429VDP7_9SPHN Tryptophan 7-halogenase OS=Sphingomonas sp. HMF7854 OX=2315330 GN=HMF7854_04700 PE=4 SV=1
MVGGGTAGWMTAAALSRLLPHQCEITLVESEAIGIVGVGEATLPHIRGFNERLGIPEAEFMAATRATIKLGIEFNDWGRIGDSYVHPFGTFGNARGAVDFHHYWTRLRQAGLPVDDLQEYSLGVRLARANRFDFPSQDGESLRSTYGYAYQFDAMQFAPYLRGIAERAGVKRIEGRIVAVERSPESGDVTAVQLDNGRNVGGELFVDCSGFGSLLLGRTLSESFEDWSQWLPCDSAVAVPCRTETALSPFTSATAMGAGWRWRIPLQHRTGNGYVYSSAHLDDDSARAALLAVVEGEPMAEPRVLRFRAGRRARSWSHNVVGVGLASGFLEPLESTSIYLIQQAITFLVELFPAGAASPSDRDEFNRLIDLEYDRIRDFLILHYHATTRSDSSFWDYVRTMAIPDSLAEKIELFRRRGRVVKYREGVFLDASWVAVYLGQGIMPEGHDRRADLPDEAALVAAMTALRQQIAAEVAATTEHRRFLDHYCPMRRAA

SEQ ID NO: 85581 - protein, 510 aa, Sphingomonas naasensis
  misc_feature (1)..(510): tr|A0A4S1WSF5|A0A4S1WSF5_9SPHN Tryptophan 7-halogenase OS=Sphingomonas naasensis OX=1344951 GN=E5A74_04130 PE= 4 SV=1
MPEKRGILVVGGGTAGWLTAAYLARFFEGRIAITLLESPEIGIIGVGEGAFPTIRSTLKFLGIDESHFIRAASATFKQGIRFNDWLHAPGPGGRRHHYLHPFEAPFYTEGASLVPYWLLQDPATRPPFAEAVTIQNRVAEAQRAPKRPGEGDYAGPLNYAYHFDARRLAELLEARAVDLGVRHLRGLLTDVELDADGSIAAIRTAGHGRLEADLYIDCSGFRAELIGKALGARFQSVRHQLFTDRALACKIPYDRPDAPIESFTVATAHAAGWTWDIGLEGARGIGCVYSSAHMADDEAAAVLRDYVGHDRYSARIIPFEPGYRAAQWVGNCVSVGLSGGFLEPLESTGVVLIEAAVGMIAELFPHNGPAEAPAARFNALMAARYANIINFLKLHYCLSRRPEPFWRDNADPASIPAALQELLAQWRWRPPSRFDFTLDLESFAFFNYQYILYGMEFGTDLAPGRGDFPNVAAAEKLFARIRGFSERATEDLPAHRALIREINAGRSLGA

SEQ ID NO: 85582 - protein, 499 aa, Duganella sp.
  misc_feature (1)..(499): tr|A0A4Y9SQL2|A0A4Y9SQL2_9BURK Tryptophan 7-halogenase OS=Duganella sp. DN04 OX=2561932 GN=E4L98_05090 PE=4 SV =1
MENIKQVVIVGGGTAGWMTASALARVLEGKIQITLIESDDIGSVGVGESTIPMIKLFNAVLGIDEDEFMRATHATFKLGIEFRDWGRVGDNYMHGFGIFGQDLATLPFYQYWLRLHLAGKAPDLENYSINRMAAKAGKFMRADRSHGNSPLGDIVHAFHLDAGLYARYLRQYAEARGVSRIEGKVVDALTRASDGHVDAVRMENGDLVSGDLFIDCSGFRALLIEQALHTGFEDWSHWLPCDRAWAVPCELSGELQPYTRATARPAGWQWRIGLQHRTGNGHVYAARFMSDDEAAAILMANLDGRPLAEPRLLRFTAGKRKQVWNKNVVAVGLSSGFLEPLESTSIHLIQSTIARLITFFPDRGFSEADIAEFNRQCDFEVERIRDFLILHYHATERDDTPFWNHVRTMDIPDTLRAKMDLWRSRGRIVRNDNELFAEVGWLQVLHGQRVPAAGHHPLADLMEEREVADYLGDIASVINACVEQMPTHAAYIEARCASR

SEQ ID NO: 85583 - protein, 509 aa, Hephaestia caeni
  misc_feature (1)..(509): tr|A0A397NIQ8|A0A397NIQ8_9SPHN Tryptophan halogenase OS =Hephaestia caeni OX=645617 GN=DFR49_4170 PE=4 SV=1
MSGDAAKDGAPGPIRRICIVGGGTAGWIAAAVLAHQYQGMIEVDLVESDDIGTVGVGESTIPPFLQLLAGLGVSESEFVMATQASFKLGIGFEDWGGPGHRYFHPFGTIGQMANARDFYQIWLRAAAGGEAPPLLAFAPAHAMAEAGKFMLPFKAPDTPIAGASYALHVDAKRVARFLRGFAEERGVTRHEGIVTEVATRPDGFVDRVILNDGRSIAVDFFIDCSGFRALLIGKTLGVGYTDWSHWLLCDRAVAVQTENVGPPPPYTLAVAQPAGWRWRIPLQHRTGNGHVYSSAHMSEDEATALLLDQVVGETVTNPLPLRFTSGVRERGWDKNVLSLGLASGFIEPLESTAIHLVYRGMEYFLRFLPGTDCAPELADEYNRRVTADYEEIRDFVILHYCLTGRRDTAFWRACVDMELPPSLAQRIALFRINGTIPEHVDPLFRSVSWQALMDGLGVRPRAYHPAIDRVAAGEVNRELGAMADALAGFVATLPAHEAFLARHCPAPAP

SEQ ID NO: 85584 - protein, 466 aa, Sphingomonas sp.
  misc_feature (1)..(466): tr|A0A4R2SZW9|A0A4R2SZW9_9SPHN Tryptophan halogenase OS =Sphingomonas sp. PP-CE-1A-559 OX=2135657 GN=C8J42_1015 31 PE=4 SV=1
MSQTVAILGANLCGWMTAAALARRLPRDAYHVVVIDDGTTGDGLGDFAPVIAVPPALGGFHADLGIEPTALVRATGGGHALGVAFGGWRKDGTAAFLSYGETGMPLQGIAFHQLAGRLRKDGAHVRLADYALSAVAAQAGRFALEAPIAHALHLPVERYTAVLRAAAMNFGASCANAPLADPRIDANGIVEMLKLADGTDIAPLLVLDCSGSSARIASRTAPAFDDWSAWLPCDRTHTQTLSAAGAPPPYTQIDVQGSGWTATWPLGGADVRLTCTAGGEGTPFRAGRRVEAWHGNCIALGAAAGLIEPLHPTALTVLLRSLAQLIQLWPAECRAPVEATAFNRFTANAMTGARNFVIAQKAAARGSNAIGDERSEPVLPDAVEAKRTLFAARGRLPMFDDEPFEEEDWAAMFDAMGLVPRRYDARADALPLATIQQHFADHRARIIAQVRALPPYAHAMAELAAA

SEQ ID NO: 85585 - protein, 518 aa, Photorhabdus temperata
  misc_feature (1)..(518): tr|A0A4R7P280|A0A4R7P280_PHOTE Tryptophan halogenase OS =Photorhabdus temperata OX=574560 GN=EDD23_4825 PE=4 SV =1
MIKSVLIVGGGTAGWMTAAYLSKAFVQNVDITVLESKKVKKIGVGEATFSTVRHYFDYLGLDESEWLAKCAGSYKLGIRFENWDGQDNHFYHPFERWETVKGFPISEWWLRKSTTNQGFDYATFLTPHLCEAKRSPRRLDGSLFAQSSDKSLGQSTLAEQRAQFPYAYHFDADEVANFLKRYAMNRGVSHIEDDVTHVEIDESGNIGYLETKIRGKLKADLYIDCTGFKGLLINQALNEPFISFSDVLKNNRAVALRVPREDTRDIEPYTTARTMSNGWRWTIPLYKRNGYGYVYCDEYQSPEEAEAELRRSIPYENADCAANHIRMRIGRSNRSWVKNCVAIGLSSAFVEPLESTGIFFIQHGIEQLVRFFPRSGSNEPLIEEYNTRVNRVVDGVKEFLLLHFSLAQRNDTLYWKEWKNIELPKELLKKIMLAKDHLLDKDTIYPFYHGFEEYSWNTMILGLGSGPLTSKPALSLMIPDKADEILLQHYVKARKIISGLPTCYEYLQYLHSSEGKNG

SEQ ID NO: 85586 - protein, 505 aa, Xanthomonas hortorum
  misc_feature (1)..(505): tr|A0A2S7E3W0|A0A2S7E3W0_9XANT Tryptophan halogenase OS =Xanthomonas hortorum pv. hederae OX=453603 GN=XhhCFBP4 925_07615 PE=4 SV=1
MTQAPIRKVVIVGGGTAGWIAACALSHQFRELLEITLVESEQIGTVGVGESTVPPIRTFHRFLQIDEQEFLRAVAGTFKLSISFEHWRRQGERYIHPFGITGQSTLVCAFHHLWLESQRRGMPGTFGDYCLETVASRVDRFALLREPAVNYAYHLDAALYANFLRARSEAFGVKRIEGKVQQVTLQPDSGDVATLVLEDGQVLDGDLFIDCSGFRGLLIEQALHTGYEDWSHWLPCDRAVAVQTEAAGPPVPYTRAIAHQAGWRWHIPLQHRVGNGLVFSSRHLSDDEAHAKLLRDAAAPALKDPWLVPFRTGRRRKAWNKNVVSLGLASGFIEPLESTSIHLTIAAVVRLISLFPADGIAPSQVQLFNDISRAEMEHVRDFIILHYHATQRDEPLWRQCREMELPESLALRLRAWRERAHAWQGADELFRVDSWTHVLMGQGIIPAQHHPLARAVSDRDLHRLLDGIAQPIQRAVEQMPSQQAFIDAYCKAGASAWGLRSPLVA

SEQ ID NO: 85587 - protein, 506 aa, Novosphingobium sp.
  misc_feature (1)..(506): tr|A0A257GBR6|A0A257GBR6_9SPHN Tryptophan halogenase OS =Novosphingobium sp. PASSN1 OX=2015561 GN=CFE35_10395 P E=4 SV=1
MSNPVQHIVIVGGGTAGWLSACLLAARLPGKRITLVEAPDIPTIGVGEGTWPTMRETLAAIGIPEAEFLAECDAAFKQGSRFDGWRDGSAEDSYLHPFTAPPPAEMQALAAAWQENGSQGPFAAAITAQHGVCAANLAPRQRTMPGYAGALNYGYHLDAGKFAALLMRHATTRLGVTHIAARVTGIEAAANGDIAALMLEGRDPLSGDLFLDCSGQAALLIKGHCGAGWVDRSDISFNDRALAVQVPVRPGSPIAAQTIGTAHEAGWLWDIGLPTRRGIGCVYASRFLSDERAEEILRGYIAAKVPGADVASLTPRKLAFATGHRDRFWIGNCLAVGLSAGFIEPLEASAIVLIELSLKALADNFPQSRASMAIHAARFNELFRYRWDRIVEFLKLHYVPSQRTEPYWLAQRAPETIPPRLAECLALWREQAPSAWDFPRVDEMFPAASQQYVLHGMGVPVPTGSSAPAPHARLAEVTAKARALTAALPTARDYLDRLSAPTRIPA

SEQ ID NO: 85588 - protein, 513 aa, Massilia sp.
  misc_feature (1)..(513): tr|A0A0Q7F9W1|A0A0Q7F9W1_9BURK Tryptophan halogenase OS =Massilia sp. Root418 OX=1736532 GN=ASC94_13695 PE=4 SV =1
MSMDQQGNLAIRKIVIVGGGTAGWMTAAPLALRLGKACEIVLVESPEIGTVGVGEATLPTIAYYNRALGLDPADFARKTKATFKLGIEFKDWGHLGNRFFHGFGDFGPAIENRSPYIYWLRLAREFKDMPSYENWSVATAMARANRFMEPYGDQPAVTNAFSYAYHFDAGLYAAYLRDYAVQRGVTRIEGMITAVEQHPETGFITGVRLRDGSLVEGDLFIDCSGFRGLLIEGVYQAGYDDWSAMLPCNSAQAVPCERVEPLTPYTRSTAQSAGWTWRIPLQHRTGNGHVYCNGFTSDEEASRVLLAGLDGRALDTPRQLRFTTGRRRKSWIKNCVAIGLSSGFLEPLESTSINIIENSVGWLLQHFPDRSFQPALADEFNRLVSRRYEFVRDFIVMHYKITRRDDSEFWRYCAAMPVPDTLQHQIELFRETGRVAIYDPEGFLVSSHISIMAGLGITPKAYDPLIGLMDLQALRTHFDRVRDTIARAVQAMPEHGAYVRQLSGVPAAPPLAA

SEQ ID NO: 85589 - protein, 500 aa, Xanthomonas hortorum
  misc_feature (1)..(500): tr|A0A248Y7S1|A0A248Y7S1_9XANT Tryptophan halogenase OS =Xanthomonas hortorum OX=56454 GN=XJ27_05710 PE=4 SV=1
MTQAPIRKVVIAGGGTAGWIAACALSHQFRELLEITLVESEQIGTVGVGESTVPPIRTFHRFLQIDEQEFLRAVAGTFKLSISFEHWRRQGERYIHPFGITGQSTLVCAFHHLWLESQRRGMPGTFGDYCLETVASRVDRFALLREPAVNYAYHLDAALYAKFLRARSEAFGVKRIEGKIQQVTLQPDSGDVATLVLEDGQVLDGDLFIDCSGFRGLLIEQALHTGYEDWSHWLPCDRAVAVQTEAVGPPVPYTRAIAHEAGWRWHIPLQHRVGNGLVFSSRHLSDDEAHAKLLRDAAAPALKDPWLVPFRTGRRRKAWNKNVVSLGLASGFIEPLESTSIHLTIAAVVRLITLFPADGIAPSQVQLFNDISRAEMEHVRDFIILHYHATQRDEPLWRQCREMELPESLALRLRAWRERAHAWQGADELFRVDSWTHVLMGQGLIPAQHHSLARAVSDRDLHRLLDGIAQPIQRAVEQMPSQQAFIDAYCKAGASAWGAA

SEQ ID NO: 85590 - protein, 516 aa, Sphingomonas sp.
  misc_feature (1)..(516): tr|A0A0Q4J8P0|A0A0Q4J8P0_9SPHN Tryptophan halogenase OS =Sphingomonas sp. Leaf28 OX=1735695 GN=ASE79_16610 PE=4 SV=1
MTKRILIVGGGTAGWLTAGYLAKRLGADLPAGVAITLVESRDIGILGVGEGTFPTIRRTLATIGIDEADLIRRCGATFKQGAKFVHWRHAPGQGPTDHYSHPFQVADSSDGLDLLPYWLLGHGGTENWDEVSNPQKKAADRHRAPKLASNPDYVGPLNYAFHFDAVALAGLLREQAVKNGVRHLTDTVNEVLLDADGAIGGVRTERNGMLDADLYIDCTGFRAELIGKAMRIPFRSCRDVLFCNRAIAAQLPYARPDEPIASYTISTAQEAGWIWDIGLDRRRGIGHVYSSDHSDDEAAERVLRGYLGAAGEKADVRHFKFEAGYREVNWYKNCVAVGLSSGFFEPLEATGIAFAEVSAGMIANLFPWGGDYETSARQFNANMLRRYERALDFIKLHYCISERRDTAFWRDNVADASVPNSLLEMLDRWRFRPPNELDIDGQIDIFTEASWQYVLYGMGWKTDLSAKAGVLRYGDDARRAFAEVQRQARYAIANLPSNRDLVAYAQSHSFGGRAAA

SEQ ID NO: 85591 - protein, 521 aa, Xanthomonas hortorum
  misc_feature (1)..(521): tr|A0A248YBW8|A0A248YBW8_9XANT Tryptophan halogenase OS =Xanthomonas hortorum OX=56454 GN=XJ27_14105 PE=4 SV=1
MSDTHASDPRQRPVRRVVIAGGGTAGWMAAAALSKVLGKQLQITVVESDEIGTVGVGEATIPSLVTFHRLLEIDEAAFMAATQATIKLGIGFEHWRDVDRHYIHSFGHTGTDHWSAGFQHFWLKGRQRGVARDFGDYCLELRAAQEGRFAHLPNGGMNYAYHLDAGLYARFLRRFSEGFGVQRIEGRIGHVETDAHSGYLTALTLENGTRVEGDLFLDCTGFAGLLIGKTLGVGADDWSHWLFADSALAVQTESVGAPVPYTRSRADQAGWMWRIPLQHRVGNGIVYSSRYMDQDSAAQVLQRNLIGRALTEPRALRFTPNQRHRVWEKNCVALGLASGFLEPLESTNIHLIQRGIIRLMQTFPQVINDSDIAEYNRQAAEEITHIRDFVILHYHVTDRRDTPFWRDCAAMEIPDTLRHRVELFRQSGRVFHQANELFAENSWVQVMLGQGITPKQHHPVADLMGDAELNHFLENIHTRVDAALVRLPAHADFLRRYCPAPPLPEPATRLPATPVLATPAA

SEQ ID NO: 85592 - protein, 501 aa, Pseudoxanthomonas sp.
  misc_feature (1)..(501): tr|A0A2S6B1I8|A0A2S6B1I8_9GAMM Tryptophan 7-halogenase OS=Pseudoxanthomonas sp. KAs_5_3 OX=2067658 GN=C0063_16 010 PE=4 SV=1
MHNQDPIATPRTIKRVVIAGGGTAGWMAAAALSKTLGKTLDITLVESEEIGTVGVGEATIPTLVVFHRLLDIKEQDFMAAVQGTVKLGISFEHWKELGHRYIHSFGISGKDHWSAGFQHFWLRGHAEGIASDYSDYCIELQAALQDRFSHLPRYHVNYAYHMDAALYARFLRGFSERHGCKRIEGKIVDVATDADGCISSIKLERGDVIEGDLFIDCTGFRALLIGKALGVGYTDWSQWLFNDSALATQTTAVRDAVPYTRAIAGTAGWQWRIPLQHRVGNGIVYSSRHISDDEAREQFLSSVEGEVIKQPWPIRFKPGQRQQCWAKNCVALGLAGSFIEPLESTTIHLIQRGIVRLLQTFPQAITQPAIDEYNARLDEELQHVRDFVVMHYHVSDRRDTPYWREIAEMEIPATLRHRIELFRETGTVFHVPGELFGENSWIQVMMGQGIVPKRYHPTADVMSPPDLQRFLDDIRRNVLDTARQMPAHMDYLRSYCPAPKP

SEQ ID NO: 85593 - protein, 538 aa, Pseudomonas sp.
  misc_feature (1)..(538): tr|A0A554PBY6|A0A554PBY6_9PSED Tryptophan 7-halogenase OS=Pseudomonas sp. ATCC 13985 OX=2578105 GN=FCE86_02883 5 PE=4 SV=1
MNKPIKNIVIVGGGTAGWMAASYLIRALQQQANITLIESAAIPRIGVGEATIPSLQKVFFDFLGIPEREWMPQVNGAFKAAIKFVNWRKSPDHSRDDHFYHLFGNVPNCDGVPLTHYWLRKREQGFRQPMEYACYPQPGALDGKLAPCLADGTRQMSHAWHFDAHLVADFLKRWAVERGVNRVVDEVVEVRLNDRGYISTLLTKEGRTLEGDLFIDCSGMRGLLINQALKEPFIDMSDYLLCDSAVASAVPNDDAREGVEPYTSAIAMNSGWTWKIPMLGRFGSGYVFSSKFTSRDQATADFLNLWGLSDNQPLNQIKFRVGRNKRAWVNNCVSIGLSSCFLEPLESTGIYFIYAALYQLVKHFPDTSFDPRLSDAFNAEIVHMFDDCRDFVQAHYFTASREDTPFWLANRHELRLSDAIKEKVQRYKAGLPLTTTSFDDSTYYETFDYEFKNFWLNGNYYCIFAGLGMLPDRSLPLLQHRPESIEKAEAMFASIQREAERLRTSLPTNYDYLRSLRDGDAGLSRSQPGPTLAAREIL

SEQ ID NO: 85594 - protein, 522 aa, Alteromonas sp.
  misc_feature (1)..(522): tr|A0A495UQI4|A0A495UQI4_9ALTE Tryptophan halogenase OS =Alteromonas sp. TK-46(2) OX=1276890 GN=CLW98_2815 PE=4 SV=1
MATATPITHIVVVGGGSAGWLTAGRIAAQHQCATRKDIKVTLVESPNVPIIGVGEGTWPTMRSTLIALGISETTFIKECDATFKQGAKFAKWTTGEEHDFYYHPLMLPQGFSQTNLGPYWQMVAPELNESFSHAACVQEAICEAGCAPKSIRHAEFAGTANYAYHLDAGKFTAFLTKHCTEKLGVHHVLADVNRVESNDNGDIKALHTEQGVTVEGDLFVDCTGFKSMLLGEHYKVPFIPCDDVLFIDRALAVHVPYDTPQSPIASHTISTAQDAGWIWDIGLQSRRGVGHVYSSRHQSKDEAYARLDAYVRQTSSLNGIEGINVKDITIQSGHRQRFWQNNCVAVGLAAGFLEPLEASALVLVELSASMIAEQLPANRAVMDIMAKRFNDTFSYRWQRIIDFLKLHYMLSKREDSAFWRDNRDSHTIPDSLKELLALWQYHPPSDKDFTSNNEVFPAASYQYVLYGMGFTSDLATHQQWVNADFAKQQLQQNRKARTMAVEKLPKHRELINKIHQFGLQAV

SEQ ID NO: 85595 - protein, 506 aa, Limnohabitans sp.
  misc_feature (1)..(506): tr|A0A315APR2|A0A315APR2_9BURK Tryptophan halogenase OS =Limnohabitans sp. WS1 OX=1100726 GN=B9Z48_17705 PE=4 S V=1
MQQANLIRSIVIVGGGTAGWMTAAALATILKGRYPIQLIESDEIGIVGVGEATIPMIQRFNKVLGIDEAEFMRETMGSFKLGIEFVNWGRQGERYMHGFGKIGQDLWTTRFDQYWRKMRQLGKAAPLENYSITRMAALANKFMPTPDGVQNSPFNDIAYAYHFDASLYAKYLRKLAEQRGVVRTEGKINQVSQRPIDEHVDAVVLENGKRIEGDLFIDCSGFRGLLIEQTLHTGFEDWTHWLPCDRALAVPCASAFTFTPYTRSTAHQAGWQWRIPLQHRTGNGHVYCSQYISDDEAASVLLAHLDGKALADPRPIRFTTGMRQKAWNKNVVAIGLSSGFLEPLESTSIHLIQNTISQLVEFFPNQSFNPTQIAEFNRQNRFQMERLRDFIILHYHVNQRDDSAFWQACAHMAIPDTLQHKIDLYKTTGRVLRVDNELFAEDGWLQVMEGQNLPTESYHPLVDLQSENSIHEYLESVREVIAKCVSVMPDHADFIAQHCAAPKMNM

SEQ ID NO: 85596 - protein, 517 aa, Cellvibrio sp.
  misc_feature (1)..(517): tr|I3I6N4|I3I6N4_9GAMM Tryptophan halogenase OS=Cellvib rio sp. BR OX=1134474 GN=O59_003599 PE=4 SV=1
MSKSVLIVGGGTAGWICAAYMARMLAADTPGGVTITLVESDEIGILGVGEGTFPIIRKTMSRIGLDESTLIREADATFKQGIRFNNWKKNPADDPHDTYFHPFQVASQHTDMDLLPYWLLGVAGDVPWAEACTVQERVVDAKLAPKLITHPNYNAPLNYAYHFDAGKLAQVVCRQAMAMGVKRLIDTIDDVKVDENGIASVQGRVHGELKADLYIDCTGFRARLIGEALGSEFTSYKDQLFCNRAVAMQVPYDRPDAPIPSCTYTSAQDAGWIWDIGLHNRRGVGYVYASDYCSDDEALATLKRYIGPAANNLQHRKLAFEAGFRKTQWHKNCIGVGLSVGFIEPLEATGISFAEVAALMLCNLFPWSGDYERSAQQFNQAMTKRFEHVIDFIKLHYYLSERTDTAFWRDNRAPASASDYLKGKLEQWRHRPPSFLDIDASHDIFDENSWQYILYGMGFKTDISARAGALRFYDDAKREFESIRQQSNKAMTAVPSHRDLINEVVARGFRNASGGQR

SEQ ID NO: 85597 - protein, 500 aa, Pseudoalteromonas luteoviolacea
  misc_feature (1)..(500): tr|A0A167N8F9|A0A167N8F9_9GAMM Tryptophan halogenase OS =Pseudoalteromonas luteoviolacea S4060-1 OX=1365257 GN= N478_02640 PE=4 SV=1
MSSRKIVILGGGTAGWMAANLIAKSWCDKDIHVGVVESPDIGIIGVGEGSTPQFKAFMDFIEVPESQWMPKCNATYKNGIRFVNWSTRPGFEQYFHPFPAQPDDYSAPAFFHNSFVRRKGIDLEGHPDPFFLSTYLAEHAKAPIAAESFPFEINYGYHFDSGKLGQLLAEKASEFGVEHIQARVTDVRKNTDGTIAALVSEEGQEFCGDIFIDCSGFSGLLMQQHMQVGFESFENNLFNDSAVVLATEQGNVIASETTSVARKFGWSWHIPLTNRIGNGYVYSSKYCDKDQAETELRAALGMLDSEIEARHLSMKVGQVKEHWHKNCVAIGLSQGFIEPLEATALHIVQETVQSFIECYQDGEFTCKEQGKHNQMMAQRYQAIRDYIVAHYRVNSRTDTNYWRDNANNNQISKSLFDVLNAWVQGKNLSDELDRQNIDKYYPSVSWHCLLAGYGIYPEQHQLVAGNQNANVHDVSKIREYIRRCGLNFSDHKAQLARFSS

SEQ ID NO: 85598 - protein, 495 aa, Rubritalea squalenifaciens
  misc_feature (1)..(495): tr|A0A1M6AX62|A0A1M6AX62_9BACT Tryptophan halogenase OS =Rubritalea squalenifaciens DSM 18772 OX=1123071 GN=SAM N02745181_0062 PE=4 SV=1
MLKKVIVLGAGSAGLLAALTLKRRLKHLQVTVVYSEKIGIIGVGEGTTPYVPLHIHGYLGMDREEFQREVKPVWKLGIEFEWGKRGVFHYSFSNQQTDFQWQGLKKPNGYYAFDRFDGADLPGALMKRRIATPMGDDGKPDIPPPGVGIAWHLENHRFVQWLHKACMREGVKFIEGKVEDVELQENGEVKRLLLDGGRRVAGEMFIDASGFRAELMNKLGAHFDSFTDALFCDKAVVGGWEREDETILPCTRSEQMPHGWSWRIDHPDRINRGYVYSSSFVSDHDAEQAFREANPKIKDTRLVHFRSGRYRDSWIKNVVGIGNASGFVEPLEASAIMVICIQSRALTDCLYDCDGMTNDSLRKSYNKLIGGAWDDIRDFLALHYKYNTALDTPFWQECREKVNLGKGQDVADFYQQNGPSLIAKEVLMNAGDPYGMEGYLTLLVGMQVPHKNTYTPTAEEWKLWENYRNHFSNLAENGVGMKGLLEYMKKPGWAG

SEQ ID NO: 85599 - protein, 516 aa, Streptomyces sp.
  misc_feature (1)..(516): tr|A0A553ZQF8|A0A553ZQF8_9ACTN Tryptophan 7-halogenase OS=Streptomyces sp. MZ03-48 OX=2593677 GN=FNZ23_03200 P E=4 SV=1
MINSVVIVGGGTAGWMSASYLKAAFGDRINVTLVESDRVSSIGVGEATFSTVRHFFDYLGLDEREWMPECAGSYKLGIRFENWRKSGQHFYHPFERLGASDGFSLADWWLLKGDRSQPFDRSCFITPALCEAQRSPRMLDGSLFASGLDGSLGRSTLEEQRAQFPYAYHFDAGLLAQYLTKYGTDRGVRHIVDDVVDVGRDERGWLSHVTTREHGELAGDLFIDCTGFRGLLINQTMEEPFESFQDVLPNNRAVALRVPQPDQATTGMRPYTTATAMEAGWIWTIPLFGRNGNGYVYSDEFCTPEEAERTLREFAAPGQDGLEANHIRMRIGRNRRSWVKNCVAIGLSSAFVEPLESTGIFFIQHGIEQLVKHFPDERWDQTLAKSYNDRVAHVLDGVKEFLVLHYRAAQRDDTPYWKEAKVRPIPDALAARLEIGASHLLDEETIYPYYHGFEQYSWITMMLGLGHEPTRPRPTLAHIDPAGARAEWAKLRADAERQVATLPSCYEYLASINSAR

SEQ ID NO: 85600 - protein, 497 aa, Wenxinia saemankumensis
  misc_feature (1)..(497): tr|A0A1M6FGC3|A0A1M6FGC3_9RHOB Tryptophan halogenase OS =Wenxinia saemankumensis OX=1447782 GN=SAMN05444417_230 4 PE=4 SV=1
MRLVIVGGGTAGWLAALLLKEGRDVTVIESSRLGTIGVGEGTTALFRQTLKHLGLDERDFLRQTGATIKYGIRHQDWRRVGHSYDGPIDDPRAVTDPALDHYAVAAGKPVAEAHLFSHLMSKGRAPVARAGGREVPAGPFHHAYHFDQAKAGAWLRRQAAGVCVVDDIVCGLDRDGETGDIRAVLLEGGDRVEGDVFLDCTGFRRALIGPLGARWIDYAASLPANRAMPFWLDLKEGEEIAPLTLARALGAGWMWRIPTQDRYGCGYVYSDAHTGPDAAKAEVEAALGHAIEPRNDIRIDAGRLDTPWRHNCIAIGLSSSFLEPLEATSIHGTLVQLLWLRDWLGAANVDPAARDRYNSAAARQVDEYRDFIRLHYVTERRDTPFWRDVAASHPAAVTDRLAAWGGRLPEARDFTPLPLGLPHVEEVLHRPVLDGLGLLSRDVAKRQMATDPARRARLRQSHDRITREYRRAAAECLPHRAWLASLTPTPAQRETTT

SEQ ID NO: 85601 - protein, 505 aa, Pseudoalteromonas luteoviolacea
  misc_feature (1)..(505): tr|A0A167JPM5|A0A167JPM5_9GAMM Uncharacterized protein OS=Pseudoalteromonas luteoviolacea S4060-1 OX=1365257 G N=N478_05170 PE=4 SV=1
MSEQSIKSITIVGGGSSGWMTAAYLNELYNSKSHKIDITLIESKDIGILGVGEATVHSIRYFFAAMGINEQELMRETQATYKSGIMFRNWMKPTESGDTHEYFHPFEQQQLGSNIDIATAWLLSDRNKQERYDEGVCLSSHTIKHALSPKLPNSTGYKAPTPYGYHLDATQMARFLKTKCTAAGVKHVEATVTDISVVNGNIDTVHTEKGDFSADVFIDCTGFKGLLINKVSSNNWESFEEALPCNKAVAIQRKLPANKTPNPYTVATALSNGWVWQIDLANRQGTGYVYDGNRLTKKEAEEELKSFLGDESEFIKTTHIDMQIGRRKEFWVGNCICVGLSGGFIEPLESTGLHLINLGARLLSTHLTGTQVPLSVKDSYNRLMRHAYDDLKQFIVLHYCLTDRDDSEFWVQARKSVEHCPELIEKLALWRNKPCEFADIGSAGTSCFTDENYRYILYGMGHAPKLNIEYDYSEHEAVFDELQNRIKRLIGSVMTHEDALKRINS

SEQ ID NO: 85602 - protein, 505 aa, Rubritalea squalenifaciens
  misc_feature (1)..(505): tr|A0A1M6B4L0|A0A1M6B4L0_9BACT Tryptophan halogenase OS =Rubritalea squalenifaciens DSM 18772 OX=1123071 GN=SAM N02745181_0117 PE=4 SV=1
MKRVKKVLVLGGGSAGLLAALAIRKRCPSVQVRVVASSKKGVIGVGEGTVPYVVDFVHRYLGMDEAEVYRALDPVYKLGVRFDWGKRECYDYPFTESLHVQAIPGLKKVSGYYIGERCEGFDLPSALMDKGNALPTRGHKKADVPPPGNSVAWHLENHRFVAWLETACKQQGIDMVDDEVEEVVFEDSGDVKGLKISNGAVLKADLFIDSSGFAGEIIGKAMEVPFKSYADALFCDRALVGGWDREEGEKILPYTVSQTMDSGWCWRIDHPERINRGYVFSSDHISLEDAEKEMLEKNPKIKQVREVKFSSGRREKVWVNNVIAIGNAAGFVEPLEATAIMCACLQARWLADGLMDSMSEPTPTMRDLYNERVASVWDEIRDFLAMHYRFNDKLETPFWKRCQEEISLGPIEKLVAFFQENGPSSLGRALVPEQSPFGVQGYYAHLVGMRVPHARPYKAGKAEQDVWSAYLSQVDQVASKGMSMEEVREQLMDAGYWKQLRSLSR

SEQ ID NO: 85603 - protein, 503 aa, Alphaproteobacteria bacterium
  misc_feature (1)..(503): tr|A0A257JQK1|A0A257JQK1_9PROT Tryptophan halogenase OS =Alphaproteobacteria bacterium PA3 OX=2015571 GN=CFE32_ 06200 PE=4 SV=1
METNGLLPKSIVIVGGGTAGWMTAAALARFVGHKVKITLIESSDIGTVGVGEATIPPIRNFNAILGLDEAEFVRETKGTYKLGIEFCDWVKPGHSYFHPFGVYGPSLHQPNFFHQWLRARAGGKVPELSDFSLCSLAARAGRFAPQGRDPASIQATLTSAFHFDAGLYAAYLRKFAEARNVRRIDQKVQSVRQSGETGNIEAVVLESGEAVHGDFFVDCTGFRGLLIEQTLKTGYEDWSAFLPADRALAVPTAKAGPAVPFTRSTARLGGWQWRIPLQHRTGNGYVYSSQLLSDEAAHETLMANLDAPALADPKPLRFVTGRRTKLWNKNVIAIGLASGFLEPLESTSIHLIQTGITKLLDFFPSQNNHAADAATYNRLGQEEYESIRDFLILHYAANQRVGEPLWDYCRNMALPDSLKERMALFQHGGRVPPRAFDLFTETSWVAVFMGQGIEPEGYNPLVEVHDEAAGRQFLADTHRALGDVASQLPAHESFLRQAGMMPS

SEQ ID NO: 85604 - protein, 505 aa, Aquimonas voraii
  misc_feature (1)..(505): tr|A0A1G6RPU4|A0A1G6RPU4_9GAMM Tryptophan halogenase OS =Aquimonas voraii OX=265719 GN=SAMN04488509_10134 PE=4 SV=1
MQDQRIREVVIVGGGTAGWMAAAALAKVLGPRYSLRLVESDDIGTVGVGEATIPMIKLFNAALDLDEADFIRRTQGSFKLGIEFVNWGQLGDSYIHGFGKIGQDLGIVPFYHYWLKLHQQGRAGHLDDYSINTAAARANKFMPARSDRPNSPLADIAYAYHFDAGLYARYLREYAEARGVRRTEGKVASVQQHPESGFIESVTMESGECIPGQLFVDCSGFRGILIQQALKTGYIDWSHWLPCNRAVAVPCETRHAITPYTRSTARTAGWQWRIPLQHRVGNGHVFSSDFISEDEATSMLMANLEGKPLAEPRVLKFVTGKRRKFWNKNVVAVGLASGFMEPLESTSIHLIQSAIARLTAFFPHAGFDQTDIDEFNTHSHWEFDKIRDFLILHYHATERSDTPFWNYVRTMDIPSELRTKMDLFRSNGRVFRDGHELFAEPSWVQVMHGQRMQPRGYHALVDAQEDAAVQKHVETVRDVIAACVQAMPTHEQFIDRHCAARPKAA

SEQ ID NO: 85605 - protein, 501 aa, Cellvibrio sp.
  misc_feature (1)..(501): tr|A0A3D4PYC1|A0A3D4PYC1_9GAMM Tryptophan halogenase OS =Cellvibrio sp. OX=1965322 GN=DIW64_04740 PE=4 SV=1
MQAPYKIVIVGGGTAGWMTAAALSTLYANNNFQITLIESKEIGSIGVGEATLPHMKDFNARLGISEVDMMKKTKATFKLGIKFVDWGKLGSNYYHPFGVYGTNQNTASFYGLYSKISQEKKIADLSDYSYAIALCRQNKFELFSNDANCISSTYKYGYHFDASLYAEYLREFCKNKSVSEIDGKIDYVERNKDTGNISSVRLESGLTIAGDFFIDCSGLRSLLLSKTLGVEFEDWSKWLVCDRAIALPSEKLPDLPPYTTSTAKEGGWQWKIPLQHRTGNGYVYSSAFLSDQKAVDSLVESVGGQSSETPRLIKFKSGRYKKSWVNNCLAIGLSSGFLEPLESTSIYLIQAAIINFTKLFSVSPSHGAESNEFNRLMDVEYDRIRDFLILHYHLNDRKDSELWNYCREMRVPEELTEKINIFKKRGHVEWYQFGLFTVPSWVSIFNGQGVKNVGYDPFVAGLPLSEIEKVLKETKYKIDARAENTPLHKTFLNSYLKTLQV

SEQ ID NO: 85606 - protein, 501 aa, Alphaproteobacteria bacterium
  misc_feature (1)..(501): tr|A0A257JQE8|A0A257JQE8_9PROT Tryptophan halogenase OS =Alphaproteobacteria bacterium PA3 OX=2015571 GN=CFE32_ 08745 PE=4 SV=1
MAIETIVIVGGGTAGWMAAAALSRLRAGKPVNVIVIESEQIGTVGVGEATIPPFLDFNRLLEIDEAEMLSAVQGSFKLGIQFVNWGKIGDSYIHPFGNYGYQVDGISFHHIWHKYKEAGDKRPIQIFNIETMAAHFGRFARTEDYQRDDLPPINYAYHLDAGRYAKYLRGYAEKRGAVRIEGKVNDVALDGETGFVTSVTMDNGVVIEGDLFVDCSGFRGLLIEQTLKTGYDDWSNFLPCNRAVALPCKRDDGSPPPPYTRATAHRAGWQWQVPLQHRNGNGHVYCSEFMSDDEALDILVNNIAGKPQAEPNFLRFVTGRRKKFWNKNVVALGLAAGFMEPLESTSIHLINTGINKLIALLSLDGVTQAQEDAFNRLTGKEYARIRDFLILHYNATTRDDSPFWNYCRNMAVPESLTEKTDLFRLNGQIFREDDELFTETSWAAVMMGQGINMQGHNAMADALMEPKTGDELRGIEQSIQFVVQHMPTHSDYLKRYCPAPM

SEQ ID NO: 85607 - protein, 159 aa, Cellvibrio sp.
  misc_feature (1)..(159): tr|A0A3D4Q7R1|A0A3D4Q7R1_9GAMM Tryptophan halogenase (F ragment) OS=Cellvibrio sp. OX=1965322 GN=DIW64_21755 PE =4 SV=1
ELSASMIAEQLPACREVMDIVAKRFNATFRYRWERIIDFLKLHYILSKRNDNSFWNDNRDPATIPHSLQELMQLWRYHPPGDHDFTSNNEVFPAASYQYVLYGMGFETDYRYSQHLLQDVAVAQEQFTKNQKNIEQVMRTLPSNRELLTKIHLHGLQTI

SEQ ID NO: 85608 - protein, 505 aa, Thalassotalea euphylliae
  misc_feature (1)..(505): tr|A0A3E0U144|A0A3E0U144_9GAMM Tryptophan 7-halogenase OS=Thalassotalea euphylliae OX=1655234 GN=DXX94_08045 P E=4 SV=1
MSHPVKNIVIVGGGTAGWLSAAVIASYHQGASDEQFRITLVESSDLPTIGVGEGTWPTMKNTLRQIGLNEREVFARCHAAFKQGGKFVNWVHGNGDFYYHPFTVPLGYGKLDLAPYVESVENFAVESNFQHHICEAGLAPRGHTDLDYQGPCNYAYHLDAGELANMLKEHCTQKLGVHHLVDTLCDTLIADDGSIEAIVLENTGQLAADLFVDCTGARSLLLGQALGVGYKSLSDVLFNDSALAMQVPYESADTPVASHTIATAQDAGWIWDIGLTHRRGVGHVYSSRFTSDEQAEANLRRYLGKAADGLAARKISFKPGHREKFWHKNCVAVGMAAGFVEPLEATAIMLIELSSRFIGENLPADKALMPVVAKRFNQQMDYRWQRIADFLKLHYMLTQRPEPYWQAHCDETTFPQSLKDDLAIWRYRGPATSDFDSAIELFPAASYQYVLYGMEFKPDFSSQAYLYNQRQQAEQLIKRNQQLTQQMLQNLPAHRDYIEQWLATG

SEQ ID NO: 85609 - protein, 496 aa, Sphingomonas sp.
  misc_feature (1)..(496): tr|A0A430EH81|A0A430EH81_9SPHN Tryptophan 7-halogenase OS=Sphingomonas sp. ABOLE OX=1985878 GN=CA234_14590 PE= 4 SV=1
MDGQKFRVVIAGGGTAGWVAAAALVRHLGPNLDITLVESDAIGTVGVGESTIPTAWTFHKLLGINEQVFLRETNATFKLGIAFENWLRDGDRYFHPFGSVGRALPLCDFQHFWLEAQRRGFGGALGDYSLETQAALSEKFATGDPMPLAYAYHLDATAYAAFLRSLAEPAGVRRVEGRIVEVEQAADGDITALVLEGGLRVEGDLFIDCTGFRALLIEETLKTGFDDWSHWLPTNRAFAVQSETTEAPVPYTRAIAHGAGWRWRIPLQHRMGNGFVYASDYLSDEEAKAQLLAAVPGRALFDPRLIRFTTGMRKKAWNRNCVALGLSSGFIEPLESTSIHLVMIAVTRLLQNFPFRRDMGALSARFNAQSRAESEHIRDFIILHYKLNDRPEPFWRDHAARAVPDSLAARIALFEEGASSYQEGTDLFRVDSWNAVMLGQGVRPRDHHPMPAQIPSEDLERALGDLRAGIAAQLAKLPGHAEFIARYAAAKVPAAA

SEQ ID NO: 85610 - protein, 501 aa, Thalassotalea euphylliae
  misc_feature (1)..(501): tr|A0A3E0TTV0|A0A3E0TTV0_9GAMM Tryptophan 7-halogenase OS=Thalassotalea euphylliae OX=1655234 GN=DXX93_16360 P E=4 SV=1
MDKPFHIVILGGGTAGWMAANLFAKRWGNKVKLTLVESPDVGIIGVGEGSTPSLKRFFDILGIEESQWMPRCQATYKLNIRFNDWSPASGIQSYSHPFPAQVDTFTKRAFMVNAQTRRMGLATHTQPEDFLLNGVLAGQGKGPKVGAHFPFTQEYGYHFNSALLGEFLAEFAEQQGVSYRQVHIAQVNRAENGDISTLVTDNGEPLSADFFVDCTGFAGLLMDKTLGVAFTPYKENLFNDSAVVLQTPYSPEQASRIPVETESTALSAGWCWKIPLTERFGNGYVYSQDFINKEQAEQEFRQHLGVLDDSAQVRHLTMKVGRLNEHWSHNCLALGLSQGFIEPLEATALHLVQVSIELFIQQLEAGQFSAKHRAKYNELVSERFERVRDYIVAHYKLNTRNDSDYWRANRDNMALSDSLKEILHVWYSRGDLAKEIARQDISSHFDEISWHCLLAGYGAFPPLHPNQPGKGDLYQEKGIKEFLAGCALNFSAHHNNLADLV

SEQ ID NO: 85611 - protein, 518 aa, Cellvibrio sp.
  misc_feature (1)..(518): tr|A0A3D4Q328|A0A3D4Q328_9GAMM Tryptophan halogenase OS =Cellvibrio sp. OX=1965322 GN=DIW64_14630 PE=4 SV=1
MSRKVLIVGGGSAGWITAAYLARQLSADLPGGIDLTLIESPDIDPIGVGEGTFPSIVNTLSRIGLDESVLFREADATYKQGVSFVNWIRGSDNYYHLFQPANKPNGLDLLPYWLLGEAGDVPWSSVASVQSRIVEACKAPKQFAPEGSTRSLAYAYHFDAAAFAGVLRRHATTMGVKHISDTVVDVQVSEDGAIHCVHTEKNGPMDADLYIDCTGFAARLIGKALGMPFTSCRHQLFTDRAVVIQQPYADLQKPIPSCTYATACKAGWIWDIGLRSRRGVGYVYSSSHTSDEDAIKQLKTYFGLVGASLEPRQIKFEAGYRKVQWHKNCVAIGLSAGFMEPLEATGLGLVESAAQTLAALFPWAGPLEMAAHQFNKKMARRYDNLVDFIKLHYCLSQRRDSEFWIDNCDPRSIPDSLQERLESWRYRTPDVIDIDYGHDTFIEGNWRQVLYGMGFRTDLSARRGAYRYHEAARKAFNDIARQADYAMSILPSHRDLIEDTVRRGSDPAKRNAVIAENN

SEQ ID NO: 85612 - protein, 440 aa, Streptomyces pactum
  misc_feature (1)..(440): tr|A0A1S6J3K0|A0A1S6J3K0_9ACTN Tryptophan halogenase OS =Streptomyces pactum OX=68249 GN=B1H29_04755 PE=4 SV=1
MSSTLYGIPQHFDVIVIGGGPAGATTAGLLAQRGRSVLVLDRERFPRYHVGESLIPAFMRPMQELGLPERMDARGFERKYGGSLVWGNKQVPWNFSFIKGGAHAYAYHTRRADLDSLILDRARELGAYIIEDATVKEPLQNSDGRVTGIRFAVRGEDDIKEATAGLVIDASGQARVLSRRFTDLRWHDELRNVAIWTYFDNCDRLPGDEYTNILIEGLDEGWFWAIPIDKGTISVGYVTRSSTVGESDKSLQEHFEAEVGKSTKLKKMLAPGRRSAGYRTARDWSYHSDRFHGDGWVLVGDAAAFVDPLFSTGVALATLAGSVLSQIVDKIIEYPEIEEKALDRYATAYSGFFDEIREFVERFYDRTKYKEFYYSLAQEMIDPEKEKEPSADFVTLISGLSGRHPMFNISLDDLIPGGLEDSATGSPAPAASAESTEAAS

SEQ ID NO: 85613 - protein, 504 aa, Herbaspirillum sp.
  misc_feature (1)..(504): tr|A0A542LN56|A0A542LN56_9BURK Tryptophan halogenase OS =Herbaspirillum sp. SJZ107 OX=2572881 GN=FBX97_5210 PE= 4 SV=1
MQDRVKNITIVGGGSAGWMAAAALATYLGKNASIRLVESEEIGIVGVGEASVPHIKLFNGQWLGIDEADFVRRTQGTIKLGIEFKDWSRIGDSYIHGFGAIGRSLGPLPFHQFWLKLHGQGRAAPIGAYSAQTVMAPLGKFAPADRNAAPNSPLADIAYAYHFDATLYARFLRELAEGRGVKRIEGKIVKVSQRASDGFIESVTLENGQTVDGELFIDCSGFRGLLIEDTLKTGYIDWTEWLPCDRAMAVPSERLQTITPYTRSTARAAGWQWRIPLQHRTGNGYVYSSRHTSDDEAAATLLANLDGKALAEPRKLAFTTGMRRKFWNKNVVALGLASGFLEPLESTSIYLAQSGITRLLSLFPTRDFNPLLIERYNRESVFEYERIRDFLVLHYHATERGDTPFWDHCRTMAIPDTLRETIDLFRADGRYFRNGEDFFALPSWVQVMLGQGIVPQGYHPIVDEMPEDKLVEHVEGVRRMLAHAAATMPTHEEWIDRYWKAPAP

SEQ ID NO: 85614 - protein, 513 aa, Sphingomonas sp.
  misc_feature (1)..(513): tr|A0A430EPM3|A0A430EPM3_9SPHN Tryptophan 7-halogenase OS=Sphingomonas sp. ABOLE OX=1985878 GN=CA234_02085 PE= 4 SV=1
MKRVQNIVIVGGGTAGWLTAGVIAARHQSRMPGGFTVTLVESPNIPIIGVGEGTWPTLRTTLAKIGVSETEFFRECDAAFKQGALFARWTTGAEDDAYYHPLMLPQGFHQLSLVPHWIANANGRSFCDTVTPQGRICDAGLAPKTIATPEYDGQANYAYHLDAGKFAPFLTRHCTTRLGVRHVLADVRAVERAENGDIVAIDTEQAGRIEGDLFVDCTGFRSLLLGETMGVRFKDCGDILFCDAALAAQIPYPEENAPIATHTLSTAQGAGWIWDIGLPTRRGTGYVYSTAHTSDDQAEATLRAYLGPAGADMAVRRIPIRSGHREIFWKNNVVAVGLAAGFLEPLEASAIVLIELSAKLIAEQMPAVREVMDVVAKRFNATTLYRWGRIIDFLKLHYVLTKRTDTEFWRDNLLPETIPERLQELLTLWRYQPPWFHDEFDRVEEVFPPASYQYVLYGMGFRSEVEPEALSGDQRLAERAMRENAAQTERLCAGLPRHRDLIRKIHEHGLQPV

SEQ ID NO: 85615 - protein, 511 aa, Pseudoalteromonas sp.
  misc_feature (1)..(511): tr|A0A4P6SYW0|A0A4P6SYW0_9GAMM Tryptophan halogenase OS =Pseudoalteromonas sp. DL-6 OX=1390185 GN=B1F84_09035 P E=4 SV=1
MNIKKVAILGGGTAGWLAANHIGKELLKRKGVSVTLIESPDIPPIGVGEGTVPDIRNTLKTFGIREDEFIRQCDATFKQSIKFVNWMDKKKHGEGNFFHHLFDVPNPYDTKHLTQHWLNDKQKSKSHAQYLSSQHAICEAGLAPKSITNAQYEGELAYAYHFNAGKFAQLLSCNAKDKFSVSHVHTNVTQVKLANDGTIAALVTDSEGELEFDFYIDCSGFESLLIDKALKVPFVDVSDTLLINSALVVQVPTKEDDDIPPYTLATAHQAGWIWDIALTNRRGVGFVYSNNHMTDEQAHEKLDRYLGASKQGLSYRKIPMRVGYREKFWHKNCVALGLAQGFLEPLEATSILLTDFSAKFLTLRFPSSTEQLEQLETRFNHAMGYAWERTIDFIKLHYCISDRTDSAFWVANKSDDTISESLKEKLSLWEEFIPVRDDFFSQFEVFYLENFLFVLYGMHFNTKAPPCTSAEHEHCLVRLQQRAEIDQYLINKLPNHRALLDKIKQYGLQSI

SEQ ID NO: 85616 - protein, 502 aa, Herbaspirillum sp.
  misc_feature (1)..(502): tr|A0A542MED5|A0A542MED5_9BURK Tryptophan halogenase OS =Herbaspirillum sp. SJZ107 OX=2572881 GN=FBX97_1641 PE= 4 SV=1
METKTMDTQGTGTPVRRIVIAGGGTAGWMAAAALSRTLGKRLDIKLVESDEIGTVGVGEATIPSLVHFHRLLDIDEREFMAATQATFKLGISFESWRARGEDYIHSFGMTGTDHWTAGFQHFWLKGRARGLAHDYGDYCLELLAGKEHRFAHLPNQGLNYAYHLDATRYARYLRRFSEHFGVERIEAKIESVEARDGSISALLLDSGKRIEGDLFIDCTGFRSLLLGQTLGVEYEDWSQWLFNDSAIAVQTESSGPAIPMTRSIGHDWGWQWRIPLQHRTGNGIVYASRYVDDDTARAALLGNIEGKVLTEPRVIRFKPGQRKQVWAGNCVALGLASGFLEPIESTSIHLIQRAVIRLLQIFPTHGIVNADVDEFNAQAHEDIRTIRDFIILHYKVTNRRDTPYWTDAATMQVPDSLQHRIDLFRDTGRVFRLQNELFAENSWVQVMLGQGLSPASYHQSADLMGDEELAGFLDGIRANVRRTASQLPQHADYVKQYCGSKP

SEQ ID NO: 85617 - protein, 508 aa, Sphingomonas sp.
  misc_feature (1)..(508): tr|A0A430EH46|A0A430EH46_9SPHN Tryptophan 7-halogenase OS=Sphingomonas sp. ABOLE OX=1985878 GN=CA234_14645 PE= 4 SV=1
MNPMRRILILGGGTAGWLTAAYLARYLDIAQQRRFAITLLESPALGIVGVGEGGFPTIRETLQFLGIDERSFVRRASATFKQGIRFDDWLHAPRPDGSRHQFLHPFEAPFHTEGAGLVPYWLLQPEARRAPFAEAMTIQNRVAAHGRAPKRAEEAGFGGPLTYAYHFDAVRLAQLLRDRAIELGVTHLEGEVFSAHADAEGAIDRIETREHGSLTADLYIDCSGFEAALIGKALGAPFTSVRHQLFTDRALACKLPDADPEAPIATTTVAAAHEGGWTWDIGLQHARGIGCVYSSAHLSDDRAAELLDAHLGGAAHEARLIRFEPGYRRTPWVKNCVAVGLSGGFLEPLEATGVVLIEAAAAMIAELFPHAGPVDAPAARFNALMTARYERIVDFLKLHYCLSRRDEPFWRDNRDPATIPDTLQALLDQWRHRPPSRFDFLLDVESFAFFNYQYILYGMDFRTDLSGARDGFPHGEAAARQFARIRGFGEQAVADLPAHRELIRQLAG

SEQ ID NO: 85618 - protein, 521 aa, Rhodopirellula sp.
  misc_feature (1)..(521): tr|A0A2D7E871|A0A2D7E871_9PLAN Uncharacterized protein OS=Rhodopirellula sp. OX=2024855 GN=CMM07_14705 PE=4 SV =1
MMRDLSLETPERVVIVGGGSAGQMAAALLGRQLIPLGIEVVQVQPADGTGIGVGEATIPSLHRLLDNLAADEQDMMRACQATFKLGIQFSNWHHKDEDYWHPFGVCGAQIDGRELFPYWLAERFRRGVTRPYQTYSLQWAAALAGKSPHSFGGDSPISAHRSYAFHLDALAFSEWLRQRAADTGVQSIIGSVIAAVCRDDGSGIDHLVLDDGKRLTGDLFLDCTGFEQSPFSDFGENRFIDWSNCLLCDRAVAVALPARRALRPFTRSTALPSGWAWTIPLVHRTGLGYVYDSSSLTADEAVRDLLELAESDGYDTSQVTDANQPLNLKVGRLANPWRGNVISVGLAAGFIEPLESTALHLTQLAIELFLELFPLRTDNTQQCSEIYNERLGKITDEIKDFVQLHYHLSARDDSEFWRAARNAPISNELQSRLATYETCGWHGDMLGEAFPPESYYFLLSGNDRYPRQPSAVSLSCDPERIGQVLQEILDQNSKVMRELPLHEELLDWVHGAPKSTTGRLF

SEQ ID NO: 85619 - protein, 515 aa, Sphingomonas sp.
  misc_feature (1)..(515): tr|A0A430ECF0|A0A430ECF0_9SPHN Tryptophan 7-halogenase OS=Sphingomonas sp. ABOLE OX=1985878 GN=CA234_22590 PE= 4 SV=1
MAQHILIAGGGSAGWMAAALFARLRPAPETRITLIESEAIGTIGVGEATVPILRDFNRLLGLDEPDFVAATQGSFKLGIEFVGWGEAGNRHFHGFADFGPPIEGVAPHHHWHRVREAGRIADPIDAWSMPACAAAEDRFAPPEALRGEAGEYRYAYHFDAGLYARLLRSYAEARRVVRVEGRILGVERDPGTGDLATLRLDGDRAIAADLFIDCTGFASRLLGEALGTPFVDWSRWLPADRALAQGCTRAGRFTPFTRATAHTVGWQWRIPLQHRTGNGLVYSSAHLSDDEAAARLAANLDGDAIGDPRPLRFTTGRRERFWAHNVVAIGLAAGFMEPLESTSLQLVQTGLGRLAELMPSQGPTDPAIVAEYNRQTIGEYARIRDFLIAHYCSSRRPEPFWRDMAAMALPDSLAHKLALWDAMGRVPLQDLESHAEASWVAVLLGQGRMPRGHDPAADRPPLQAVEKMFAARRAALLAALPRLPAHDHFVARTCRADAAREPRIQCRYPKGETIS

SEQ ID NO: 85620 - protein, 519 aa, Unknown
  misc_feature (1)..(519): tr|A0A0N0JDU5|A0A0N0JDU5_9PROT Tryptophan halogenase OS =beta proteobacterium AAP65 OX=1523424 GN=IP80_06665 PE =4 SV=1
MNAASPHPAAPAPGPALLQQVVILGGGTSGWMTAAMLAKVLQGKVAITLIESDEVGTVGVGEATIPPIRLFNKILEIDEDEFVRETMGSFKLGIEFVNWGRQGERYLHGFGDFGQQLWTVDFHQYWLKMWLAGKAPDLERYSITRMASRANRFRRPAADMPNSPLGQITYAFHFDASLYARYLGRYAQARGVRRIEGKVEHVQLHAHNGHVQSLQLKDGTRVEGDLFIDCSGFRGLLIEQTLGTGFEDWSHWLPCDRAAAVPSAALPEITPYTRSTAHGAGWQWRIPLQHRTGNGHVYCSQRVSDDEAIATLLAHLDTPALAEPRLLRFKAGMRRLQWNRNVVAVGLAGGFLEPLESTSIHLVQAAIGKLLTLFPTRGFAQPDIDEFNAQMAFEYTRIRDFIILHYHLNQRTDTPFWTACREMAVPASLKHRMALWKSSGRLFREGSELFTEVSWLQVLHGQNLRPDSYNPLVDLYPEEDIGRFLQGISGVIDKCVEVMPGHAEFIRQHCAAPASGLRP

SEQ ID NO: 85621 - protein, 511 aa, Catenovulum agarivorans
  misc_feature (1)..(511): tr|W7QA12|W7QA12_9ALTE Tryptophan halogenase OS=Catenov ulum agarivorans DS-2 OX=1328313 GN=DS2_15649 PE=4 SV=1
MQQTAPKAIQHIAIVGGGSAGWMTAATLAKVLPKEFCKVTLIESPQIKTVSVGEASIPQIQLFNRILEIDENEFLQRTKATFKLGIEFHNFAREGDCYFHPFGSYGTNMDALPFHHFWLKQSQTGNTLDIENYSLAALAARQNKFQRPTNSGNSPLSSINYAFHFDAKLYADFLQDYAVKRGVQHIEANVTNVSLKADNGFIDSLFLNDGQKITADLYIDCSGFKGLLIEQVLKTGFEDWSHYLPCDSAVALACKNTLGLTPYTQAIAHQSGWRWRIPLQHRVGNGLVYASEFMQHQQASKLLQEEIEGQALADINSLKWTTGMRNKSWNKNCIAIGLSAGFLEPMESTGLHLIQSAIAKLMTLFPTKEFAQCDIDSYNAQTRKEFVNIRDFLILHYKATEREDSEFWRYCKNMQVPDSLHEKLTMYQETGRIFRQDNELFNETSWLAVMHGQGIKANRYHPLVDRLEPSEISRRLQHIEDVIKRSVATMPDHSHFINQCFSNNFCDIQSG

SEQ ID NO: 85622 - protein, 500 aa, Streptomyces canus
  misc_feature (1)..(500): tr|A0A101S7S8|A0A101S7S8_9ACTN Tryptophan halogenase OS =Streptomyces canus OX=58343 GN=AQJ46_21215 PE=4 SV=1
MDPEYDLIVVGGGPAGSTAAAAVAMRGHRVLLLERETFPRYQIGESLLPATVHGLCGILGVAEEVAEAGFTLKRGGTLRWGRDPKPWQFSFSMTPRLPEPTATAFQVERSRFDEILLRNAARVGAEVREGSTVRRVVADDERVRGVEYTDGDGNARTEYGRYVIDASGNTSRVHSGVGGRRVYSDFFRNLAVFGYFAGGRRLPEPNRGNIFCAAFDAGWLWYIPLRDDLTSVGAVISPEHTAAVQRDPRAAWQDMIRACPEVAELLDGVPAATEPPYDQVRVRKDWSYWKTFFWTPGMALVGDAACFVDPVLSSGVHLATYGALLAARAVNSALDGSVPEERGFAEFEARYRREYGVFYEFLIAFYDMERNDESYFWSAKKVTKVDSTEVAAFAELAGGLVSGDSAVLGPDRLGDHWSAAAAELDGAVGRLATADDRVNPLLSTRVVGETFRTGNELQEQALYGGPLDGTGPAGPGHLVASADGLGWDTVRGTAAQPGDE

SEQ ID NO: 85623 - protein, 500 aa, Streptomyces corchorusii
  misc_feature (1)..(500): tr|A0A101PZ56|A0A101PZ56_STRCK Tryptophan halogenase OS =Streptomyces corchorusii OX=1903 GN=AQJ11_29635 PE=4 S V=1
MTASYLRAAFADRVDITVVESRRIGTIGVGEATFSTVRHFFDYLGLSEADWMPECNGTYKLAVRLENWRAPGTYFYHPFERMRVVDGVPLTDWWQKVGGTGSFDRDCFLIPWLCDAKASPRYLDHRLFEQDFDEDPDRPLYRTTLAEQNTQFPYAYHFDASLLADFLCRYAVGRGVHRIIDDVVDVRLDERGWIDRLVTREHGDLTADLYVDCSGFRSRLLGDALGEPFVSFQDSLPNDRAVALRVPVDTAVRGIRPCTTATAQDAGWIWTIPLYDRIGTGYVYAADYCEPEEAERVLRDFVGPAAADLEANHIRMRIGRSHRAWVNNCVGIGLSAGFVEPLQSTGIFLIQHAIEQLVRYFPGTDRDPVLRDTYNLSTARAIEGVREFLILHYRGAARADNDYWRDAKKRPVPEDMAVRMEQWQSKLPDNDTTYPYYHAFEPYSYVCMALGLGGIPLRHPPALDLLDTRAARAELTRVREQARKLVDTLPSQVEYLSGLR

SEQ ID NO: 85624 - protein, 501 aa, Sphingomonas glacialis
  misc_feature (1)..(501): tr|A0A502FIU4|A0A502FIU4_9SPHN Tryptophan 7-halogenase OS=Sphingomonas glacialis OX=658225 GN=EAH76_18850 PE=4 SV=1
MRDGPVRSVAIVGGGTAGWMAAAALARNFAADRVAVTVIESPEIGTVGVGEATIPPILQFNALLGIDEDELVRRTQATYKLGIEFRDWGAIGERYFHPFGRYGADLGGVAFHHHWLRTREGAWSEYSLPAVAASEGKFARPSDDPRNVLSNISYALQFDAALYADFLRELAIGQGVQHVQGRVVDVRLDGETGFVEDLKLADGRVCRADLYIDCSGFRGMLIEQALETGYVDWSHWLPMDRAIAVPTPAIEAPTPYTRATAGSAGWRWRIPLQHRTGNGHVYASGFIGEDEATAQLLAALDAPALAEPRHLRFTTGRRRLSWNRNVVALGLASGFIEPLESTSIHLIQRGIATLMSLFPSNGFAAPEIDLYNSLMRSEIEAVRDFVILHYKLTRRDDSPFWRHTRAMAVPDSLAQRLAIFDNLGRLILDPSELFREPSWLAVLLGQGAMPRGHDPLADGLPEDAVRAQLQRMRAVIRQGAAVLPSHADFLSGVRAASPARS

SEQ ID NO: 85625 - protein, 501 aa, Catenovulum agarivorans
  misc_feature (1)..(501): tr|W7Q651|W7Q651_9ALTE Tryptophan halogenase OS=Catenov ulum agarivorans DS-2 OX=1328313 GN=DS2_18338 PE=4 SV=1
MQNNQIESYVILGGGTAGWISAAVLAQALKNSKVNITLIESPNVATVGVGEATIPSIVDLLEYLRIPQKDFILKTNATFKLGIKFVDWLEKGQHYWHQFGYIGNNIDGLPFYQHWARHISQGGQFGLTDFSPAVALAKQNKFFIPDPKRPNNLSGSTYALHFDAGLVAEYLKEYCLKKHNLEVVYDHLVDTELDIQGQIKTLHLQSGKHISADFFIDCSGQRALLINKALRVGYQNWQHYLPANKAIAVQTDISNPLPPYTEATAHEHGWRWRIPLQNRTGNGYVYCDDFCSDNHAEALLIDHATKHNCVINQSKLISFTTGKRDKMWFKNCLAVGLSSGFLEPLESTSIYLIMRAMLNFVQSLPDKMPHPATIKEFNRRMDIEYQCIRDFIVLHYCRTQRTDSAFWRMWQTLAIPDSLQQKLALFEAQGRLMHNPQDLFAQDSWYAVLEGMGVRAKSLDPRVYQSNFTMVEKAFADSANALVQVASKTLDHAEYIQRLKL

SEQ ID NO: 85626 - protein, 506 aa, Sphingomonas glacialis
  misc_feature (1)..(506): tr|A0A502G4H9|A0A502G4H9_9SPHN Tryptophan 7-halogenase OS=Sphingomonas glacialis OX=658225 GN=EAH76_02700 PE=4 SV=1
MDTAISTVVIVGGGTAGWLAACRIAAAARPTAQPITVTLVESPDVATIGVGEGTWPTMRATLERIGIGEAEFLLACDASFKHGSRFRGWATGAHDDVYFHPFTPPAEPDARALVAAWQAEAAGASFADAVTPQPQVAAQSLAPRQRAMPDYAGALNYGYHLDAGKLAALLMRHATERLGVRHVRDHVIDVDRAENGDVIAVRTRDNGAITGDLFLDCTGHAALLVGDVPFVDRSDVLFNDRALAVQIPVAADSPIAAQTDATAHEAGWIWDIGLPTRRGVGCVYSSAHMSDDAALETLTAYLGTAQPIAPRRLTFRSGHRAQFWTGNCLAIGLSAGFLEPLEASAIVTIELSLDALLDDWPTRATMPLTAARFNTLFRYRWDRIVEFLKLHYVLSRRDGRYWQDHRDPASIPPRLAELLALWANRPPTRADFPMIDELFPAASYQYILYGMGAHVPGPGPFDAHKPVPLAPIAQRTRSMVATLPPIRAYLGACRAAYQPIAMEHIS

SEQ ID NO: 85627 - protein, 521 aa, Acinetobacter sp.; identical to SEQ ID NO: 83693
  misc_feature (1)..(521): tr|N9NWI7|N9NWI7_9GAMM Uncharacterized protein OS=Acine tobacter sp. CIP 102136 OX=1144665 GN=F893_00166 PE=4 S V=1

SEQ ID NO: 85628 - protein, 516 aa, Sphingomonas glacialis
  misc_feature (1)..(516): tr|A0A502FJT5|A0A502FJT5_9SPHN Tryptophan 7-halogenase OS=Sphingomonas glacialis OX=658225 GN=EAH76_18670 PE=4 SV=1
MRKRVLIVGGGTAGWLTAGYLAKRLGADLPDGVAITLVESRDIGVLGVGEGTFPTIRRTLATIGIDEAELVRRCGATFKQGAKFVHWRHAPGQGATDHYSHPFQVADASDGLDLLPYWLLGHGGAENWDEVSNPQKKAADRQRAPKLPTNPDYVGPLNYAFHFDAIALAGLLREQAIKNGVRHLTDTVNEVLLAEDGAIAGVRTEQNGVLDADLYVDCTGFRAELIGKAMKVPFRSCRDVLFCNRAIAAQLPYARPSDPIASYTISTAQESGWIWDIGLDRRRGIGHVYSSDHTDDEAAERVLRGYLGAAGADADVRHFKFEAGYREVNWVKNCVAVGLSSGFFEPLEATGIAFAEVSAGMIANLFPWGGDYETSARQFNANLLRRYERALDFIKLHYCISERRDTAFWRDNVADASVPDSLLEMLDRWRFRPPNELDIDGQIDIFTEASWQYVLYGMGWKTDLSAKAGALRYHEDARRAFAEVRRQAEYAIANLPSNRDLVEYAQTRRFGGRAAA

SEQ ID NO: 85629 - protein, 529 aa, Dyella jiangningensis
  misc_feature (1)..(529): tr|A0A328P2C6|A0A328P2C6_9GAMM Tryptophan halogenase OS =Dyella jiangningensis OX=1379159 GN=CA260_11570 PE=4 S V=1
MARLKKILVVGGGTAGWLAACYLAKAVNAVDPASVQVHLVESSNIGLLGVGEATFPSIRGTLSAIGLDERRFLVGATATYKQGIHYRHWVRPPGSPGHSHFFHPFSQPSQRPGGPELLPYWLLGAAPDGMSFADAVTMQSALVERNRAPKRPTDPDYQGPMNHAFHFDAACFAKVLAEHGQDALGVKRHVATVDRVELDEHGAIDRVITHELGELTADLYVDCTGLRGSLIGSAMQSPFRSRRDVLFADRAVAMQVPYERPDTPIPSYTISTAQEAGWIWDIGLQKRRGVGYVYSSRHTDDARAEEVFRRYLGPAADDLKAMHIKFETGYRPEHWRRNCVAVGLAGGFVEPLESTGIALIELATYLLTHLLPGDTGDMERAARHFNEMMVARYDRIIDFIKMHYCLSQRRDSKFWTDNADPASIPQTLQDKLALWRHRPPHRLDFVSDLEMFLVSSWQYVLYGMEFKTDLEPMRSAYPHLEEARQEFAMIRQVADHAAHDLPNHRSLVEQFCREYHERPGAVLSNEAVA

SEQ ID NO: 85630 - protein, 539 aa, Sphingomonas glacialis
  misc_feature (1)..(539): tr|A0A502FYN1|A0A502FYN1_9SPHN Tryptophan 7-halogenase OS=Sphingomonas glacialis OX=658225 GN=EAH76_05425 PE=4 SV=1
MAGGRRAARHDRARYQRDRGNHPARLCRVGAAPVNHSARDFARDGAIVILGGGTAGWIAACLIAQRWPQGRVTLVESPEIGIVGVGEGSTPQLKYFFDRLGIAEAEWMPACDATYKLGIGFEGWSDRQGFERYFHPFPTALDSHTAGSFFYNTRARRTGRDVAAHPDQFLLPARLAAAGCAPQSDESFPFEVSYGYHFDAYKVGAFLGRHAVAKLGVTHLQHRVEGIERRADGGIAALLCDGGERIAGDVFIDSSGFRSLLFEGTLGVPFVSYGDTLFNDSAVVMPTSRDAAEPLASQTRATALSAGWVWDIPLTSRTGNGYVYSSAYLGSDQAEAELRAHLAIGNEGTARHLSMRVGRVAESWSHNALAVGLAQGFLEPLEATALHIVIATVEAFLDAVDQDGFTEKARAPFNARIAARYDGVRDYIVAHYRLNQHHADPHGYWAAARAVEPSDTLKRVMSAWFTGADLAATIDQLDIARYYNAISWHCLLAGYGTFPEDARLVPPGPDIDRIDMAGIDDFLRRCALNFRPHTDHLPR

SEQ ID NO: 85631 - protein, 532 aa, Actinomadura sp.
  misc_feature (1)..(532): tr|A0A372JF38|A0A372JF38_9ACTN Tryptophan 7-halogenase OS=Actinomadura sp. NEAU-G17 OX=2293572 GN=DZF91_26650 PE=4 SV=1
MGDERIRRIVVLGGGTAGWMAGSYLAKALGTAVDITVLEAPAIPRIGVGEATIPNLHKVFFDFLGIPEDEWMRECNASFKMGVRFINWRTPGTGEATARTLPDGRPDRFDHLFGILPDHENLPLSHYWTYRRLRGETDEPFDHACYAQPPVLDRKLAPRFRDGRRWASYAWHFDASLVADFLRRFATGKQGVTHVEDRFTHADLDHRGMITAIHTESGRRLEADLFVDCSGFRSLLINQVMREPFLDMSDHLLNDSAVATSIPHDDEKNGVEPYTSAIAMSSGWTWRIPMLGRFGTGYVYSSRFQDQDRATEEFCRMWGLDPGTQQLNQIRFRVGRNRRAWVRNCVGIGLSSCFLEPLESTGIYFIYASLYQLVKHFPDKRFEPVLLNRFNHEIEKMFDDTRDFIQAHFGFAPRDDTPFWRACKELELAPEFQEKVAMYKAGLGVELPITDESNYYGNFEAEFRNFWSNANYYCVFTGLDFLPDHPLPAMALRPETVDSSQAIFAEVKRRQAELVETLPSTYEYLRMLHHGG

SEQ ID NO: 85632 - protein, 503 aa, Sphingobium sp.
  misc_feature (1)..(503): tr|A0A4P7QTU2|A0A4P7QTU2_9SPHN Tryptophan 7-halogenase OS=Sphingobium sp. PAMC28499 OX=2565554 GN=E5554_04680 PE=4 SV=1
MHADFPTSDRVVKRVVVAGGGTAGWVTATALVRHLGPLIDIILIESDAIGTIGVGESTVPTFRGFHQLMKIREDRFMAEAQATVKLGIEFKNWGQIGDRYIHPFGTIGLQWSWMADFHHFWLYARAQGFGGELGEYCLEWVAGEANRMSLSSSVAPSYAYHIDAARYARFLRSLAEPAGVKRVEGKIRNVELAPESGHIAALVLESGTRIEGDLFIDCTGFRSLLLGEALGVGFEDWGQWIRTDRAVAVQSTSDGPAQPYTSAIAHEAGWRWRIPLQHRDGNGFVFTSDFMSDDEAHARLLAEIEGEPIVDPWLVRFKTGTRTRAWHKNCVGLGLAGGFIEPLESTSIHLMMAAVTRLIEDFPFHGFDDALLDHFNRKSRLEFENIRDFIILHYHVTQRDDSPFWDHCRTMEIPDSLKERLALWQENGRAYQLGHELFRVDSWSSVLLGQGMHPRGYHHVAAMMPEPQLREELARMRKDIAGVVAEMPSHREFLRRYCPAELV

SEQ ID NO: 85633 - protein, 504 aa, Catenovulum agarivorans
  misc_feature (1)..(504): tr|W7QHY8|W7QHY8_9ALTE Response regulator receiver doma in-containing protein OS=Catenovulum agarivorans DS-2 O X=1328313 GN=DS2_03245 PE=4 SV=1
MKNICILGGGTAGWMTACLMAKHWNNRQPDSQTEKVQITLIESDKVPSIGVGEGSTPQLKKLFDTLDISEQEWMPACHATYKNGIRFVDWSTRAGFKQYFHPFPAQVDDHTVPGFFHNSFLIRKGIDLDAHPDHFFLTTHLANQNKAPISAENFPFEVNYGYHFDAAKVARILKTKAQQLGVSVAVATIEHVEQDIAGNIKLLIGQDGQTFSADYFVDCSGFQSLLLQQSLAVPFQSFSDNLFNDKAVVLSVPRKSQQPLMSQTISTALKHGWMWQIPLQHRTGFGYVYSSQYTNAEQAEQELRNRLVAQSADISARHINMRVGQVTKHWHKNCVAIGLSQGFIEPLEATALHIVQEGIEGFIDALHKGGFSNQLQADYNQQMTARFNAIRDYIVAHYKLNTRKDTLYWRNNAANQNLSDSLQHIIKTWFSGQNLSDELARQKIDEYYPSVSWHCLLAGYGHFPDKQQLIEGNDFAKQYSIEQINKFIHACCLNYPSQVDCLGC

SEQ ID NO: 85634 - protein, 406 aa, Bacillus wiedmannii
  misc_feature (1)..(406): tr|A0A2A8MT89|A0A2A8MT89_9BACI Tryptophan halogenase OS =Bacillus wiedmannii OX=1890302 GN=CN526_28040 PE=4 SV= 1
MMEMYDVIVIGGGPAGSTVATLLARQNHKVLLLEKEKFPRYHIGESMVTGVIPILKELGVFEQIDSYGFQKKYGTTFLWGEQKEAWSVKFGEVSKIAGEEVPEYAYQVQRAEFDEILLRHSEKNGAKVLEEHFVKEFIFEEERCVGIKYQDSSGENFEARARYTVDASGQSTMLGRKMDVINYDNELKNIAVWSYFTKCDRYEGDLEGNILVENTSDGWIWYIPFSNGMTSIGWVSPNETFKQESNLSLEKRYAEVLENSKEIKNMMKDAKQVDKFYTAKDWSYINNSFYGPGCVMVGDAAGFVDPLFSTGVFLAMNGASSAAKCLHQALVKPEQEEEFFSNYESEYKQVLKVITLFVHHFYDSNRQLNSYFTKAQTLVDPQEMLTIRQDFIYLITGLAGRRALAK

SEQ ID NO: 85635 - protein, 521 aa, Catenovulum agarivorans
  misc_feature (1)..(521): tr|W7QF96|W7QF96_9ALTE Tryptophan halogenase OS=Catenov ulum agarivorans DS-2 OX=1328313 GN=DS2_07058 PE=4 SV=1
MNQLVKHIVILGGGSAGWLTAGVLAAEHMPSDTNGIKITLVESPDIKTVGVGEGTWPSMRTTLQKMGVSETDFIRCCDAAFKQGSKFAAWHTADVEDAYYHPFSLPTEFTQHNLAMAWQQYRERVRFDHAVSFQSHICDRNLAPKQIATPEYAYVANYGYHLDAAKFAAFLTQHCTEKLGVKHIQANVLDVKSHTNGDIASLVTDAAGEISGELFIDCSGSRARLLGEHLGIENISLQHYLFNNTALAVHVPYHSEDENFASHTLSTAQRAGWIWDIALPSRRGCGYVFSDEHTSLDDAEQTIRNYVAQSSSLDFAKHVDLKQIKFNPGHKRKFWQNNCVAVGMAAGFIEPLEASALVLVELSAQMISEQLPQNRQVMDIVAERFNDKFSARWQQIIDFLKVHYVLSKRDDSAYWLDNRDESTIPQSLQDNLNLWRYQAPWHFDAIHTESLFSSASYQYVLYGMGFETVSRTHKTQTQTKLMQQAERLFAETIQKSNQVISQLPSNRQLNLKVQQYGFQKI

SEQ ID NO: 85636 - protein, 500 aa, Streptomyces canus
  misc_feature (1)..(500): tr|A0A101PPV3|A0A101PPV3_9ACTN Tryptophan halogenase OS =Streptomyces canus OX=58343 GN=AQI96_01400 PE=4 SV=1
MDPEYDLIVVGGGPAGSTAAAAVAMRGHRVLLLERETFPRYQIGESLLPATVHGLCGILGVAEEVAAAGFTLKRGGTLRWGRDPKPWQFSFSMTPRLPEPTATAFQVERSRFDEILLRNAARVGAEVREGSTVRRVVADDERVRGVEYTDGDGNARTEYGRYVIDASGNTSRVHSGVGGRRVYSDFFRNLAVFGYFAGGRRLPEPNRGNIFCAAFDAGWLWYIPLRDDLTSVGAVISPEHTAAVQRDPRSAWQDMIRACPEVAELLDGVPAATEPPYDRVRVRKDWSYWKTFFWTPGMALVGDAACFVDPVLSSGVHLATYGALLAARAVNSALDGSVPEERGFAEFEARYRREYGVFYDFLIAFYDMERNDASYFWSAKKVTKVDSTEVAAFAELAGGLVSGDSAVLGPDRLGDHWSAAAAELDGAVRRLATADGRVNPLLSTRVVGETFRTGNDLQEQALYGGPLDDTGPAGRGHLVASADGLGWDTARGTAAQPGDE

SEQ ID NO: 85637 - protein, 521 aa, Mesorhizobium oceanicum
  misc_feature (1)..(521): tr|A0A1L3SMB1|A0A1L3SMB1_9RHIZ Uncharacterized protein OS=Mesorhizobium oceanicum OX=1670800 GN=BSQ44_03455 PE =4 SV=1
MNKSRTHYVVVGGGTAGWLAAHMLKRQADNAGLAVDVTVVESSRIPTIGVGEGTTGVFRQLLDLLEIDEAEFIRSTGATIKFGIRHKDWLRKGHHYDGPIDDPNALAARPDFRPDEQFCALDVYAVAKNIRLADIHLFGELMRRGRSPYGLIDGEFVSASPFLYAYHFDQAKVGAFLRDKAKGIAQVDAEVLGARKNPETGDIEALLLDEDREVAGDFFIDCTGFRRKLIRGEMGAQWISYQSTLPVNRAMPFWLEHEEGAEISPFTLAWAQEAGWLWSIPTQDRIGCGYVYSDHFRTPEEAHAEIERALGRKIEPRADLRFDSGRLDRNWIGNCLALGLSSSFLEPLEATSIHGTVVQLFLFTRRFMARATSADERVRGMFNGVAERQLNDFRDFINIHYAGEREEPFWKHVHQNCLNEVTRERLQRWSREMPKRADFMPLPDNLPHLAEQLYYPVLDGLGHLCRKAANAEMAAKPALRAHARKAIEEQGREYKKAATKCLGHRRYLDLLAQGKPAGALQ

SEQ ID NO: 85638 - protein, 501 aa, Xanthomonadales bacterium
  misc_feature (1)..(501): tr|A0A2M7D197|A0A2M7D197_9GAMM Tryptophan halogenase OS =Xanthomonadales bacterium CG02_land_8_20_14_3_00_62_12 OX=1974108 GN=COS34_02565 PE=4 SV=1
MPDRSIRRIVIVGGGTAGWMTAAALANALQGHVQIDLIESDEIGIVGVGEATIPPIKIFNRSLGIDEHAMLAASQGSYKLGIEFVNWSRIGQRYFHPFGQFGADFDVVPLHHYWLRERARGSTIPLQEYALAWVAAEAGKFDRPINDRQRVQSTYDYAYHFDASLYAKLLRAYAEARGVRRSEGKVVDVGVRAEDGFLSGVTLADGRVLEADLFIDCSGFRGLLIEGALKTGYEDWSHWLPCDRAVAVPCAHGAALSPYTRSTAHAAGWQWRIPLQHRMGNGLVYCSQFSSDDAAANVLLDHLEGAPLAEPRFLRFTTGRRKQFWHRNCVAIGLASGFLEPLESTSIHLIQSAISRLLALFPDRDFDPIVAREYNRITELEYARVRDFIILHYHANQRDDAPLWRYTRNMPIPEPLQTKIDHFRRHGRLVAEVLELFQNPSWLAIFIGQEVWPERYDPLVDMRSDIDAARLLSGLHRVIAESVQVMPTHQQYIERHCRARA

SEQ ID NO: 85639 - protein, 507 aa, Catenovulum agarivorans
  misc_feature (1)..(507): tr|W7QJC1|W7QJC1_9ALTE NAD(FAD)-dependent dehydrogenase OS=Catenovulum agarivorans DS-2 OX=1328313 GN=DS2_1833 3 PE=4 SV=1
MLLLTFDYGPGVVMQLKNQKILIVGGGTSGWMAASLLAKKWPNCQIKLIESQNIGTVGVGEGSTPYIKQFFNALEIEESDWMPFCNATYKNGIEFINWSTQPGYNRYFHAFLSDLDEQHTPLFEQATLNRRQGQAVKAHPDGYFFLQTLAQQHRQPTLEVQSNNNAAPHNIYAYHFDSGKLAEYLKQYCLNLGVEHQFVDIETVELAGNGEIAAVIAKDKCRFEADLYLDCTGFSSLLIEKTLKERFISFDENLYNDRAVTVASKAQMHYQPQTTSTALTNGWAWQIPLTSRTGNGYVYSSKYISDEQATQELIEFVGRDNLIGEPRVIPMKVGRVERAWVKNCVAIGLSQGFIEPLEATGLHFIQTSIESFILLYELGEGSAEYRQVYNREIEHVFERVRDYIVSHYLTNSRNDTEYWRVCRDKINISDTLDGLMRQWCSGKDFKAALKKAELDHIYPSASWHMLLAGMGFLPPIDGAHRLSDSEKRTLAQIAEVHQQHINVYGKT

SEQ ID NO: 85640 - protein, 497 aa, Pseudoalteromonas sp.
  misc_feature (1)..(497): tr|A0A4V0ZVL0|A0A4V0ZVL0_9GAMM Tryptophan halogenase OS =Pseudoalteromonas sp. DL-6 OX=1390185 GN=B1F84_06655 P E=4 SV=1
MKPIKHVVIAGGGTAGWITAALLNKVLGKVINITLIESSSIGTIGVGEATIPPIIRLNNALGINEQDFINATNASIKLGIEFENWKTPGHSYMHAFGSFGKDFPFCDFYNFWVKGHINGSEDSLWDFSLNYQAAKQHKFTLLNTIPNTQLPGLSYAFHFDATLYAEYLKNLALSRGVKHIDAKIEHVEQCPDTGNITNLTLDDNSQIQGDLFIDCTGQRALLIEQTLNTGFVDWSYYLPCDRAVAVQSTGSNELKPYTRSIAHDAGWQWQIPLQNRTGNGLVYCSRYLSDESATALLLNNLPGEPTTSPRLIKFKTGRRLKQWHKNVVAVGLSSGFLEPLESTSIHLIQSAVTRLIKLFPHNGVSDALVTEFNKQSISEIEHIRDFIILHYKLTEREDTPFWRQCKQMEIPQSLAHKMDLFKHTGKVVRENDELFAEVAWQQVFIGQGLIPDDYNSIVDSLSSEQLTDLFVTLKTLINSTVDKLPTHKEFLAKLKTN

SEQ ID NO: 85641 - protein, 280 aa, Pseudoalteromonas sp.
  misc_feature (1)..(280): tr|G7G3I5|G7G3I5_9GAMM Tryptophan halogenase OS=Pseudoa lteromonas sp. BSi20495 OX=386429 GN=P20495_2468 PE=4 S V=1
MNDDIKSIVIVGGGTAGWLSAGIIAAYLQKHHSKKINITLLESSDIPTVGVGEGTWPTMRRTLKDMGIRETEFIQQCNVSFKQGAKFAKWVTGENDDYYYHPLELPTGMFENNLATSWLNINNAQPPFAQYVSAQQSICESGLAPKQITTPEFSAIANYAYHLDAGLFATFLKNHCIDNLNVKHIVGTVVGVNNCTNGDIKSVSLNNKIEIAGDLFIDCSGFKSLLLGENLGVGFKSCKDVLFADSALAIHMPYTCHTKMTNQYARILYLQHKHRAGFGI

SEQ ID NO: 85642 - protein, 504 aa, Sphingomonas sp.
  misc_feature (1)..(504): tr|A0A430EFK8|A0A430EFK8_9SPHN Tryptophan 7-halogenase OS=Sphingomonas sp. ABOLE OX=1985878 GN=CA234_17265 PE= 4 SV=1
MTGQPSLRVVIVGGGTSGWMTAAAIARLLPARCSLHLIESEAIGVIGVGEATLPHIRGFIEKLGIREADFMAWTRGTFKLGIEFRDWGKIGDSYVHPFGTFGRGTGEVDFHHYWTRLRLAGVDVPPLERFSYGCMLARANRFDLPAADPSQLASTYGYAYQFDALLFAPYLRSIAEGLGAVRTEGKVVEVLRDGASGNITAVRLDNGECIEGDLFVDCSGFRSLLLGEALAEPFEDWNHWLPADRAVAMPCRTATSVTPYTSAIAMPAGWRWRIPLQHRTGNGYVYASAFTSDAAATQALTGAVEGAALADPRVLRFRAGRRRRSWVKNCVAIGLASGFLEPLESTSIYLVQQAITALIELFPEAADAPIERDEFNRLIDLEYDRIRDFLILHYHATTRTDTDFWNYVRTMTVPDSLAEKIELFRRAGRVVKYREGVFLDASWIAVYVGQGILPEGYDPRADAADAAALLQGMRALEAEIAATVARVPEHLRYIDRYCAMAAAA

SEQ ID NO: 85643 - protein, 497 aa, Sphingomonas glacialis
  misc_feature (1)..(497): tr|A0A502FUA5|A0A502FUA5_9SPHN Tryptophan 7-halogenase OS=Sphingomonas glacialis OX=658225 GN=EAH76_14085 PE=4 SV=1
MTAAPSPDQVIKRVVVAGGGTAGWIAAAALAKHLGPLLEIVLVESDEIGTVGVGEATIPTIRTFHRLLELDEREFLRATQATFKLGIAFENWAQDGDRYIHSFGRVGQSIWMGDFQHMWLRGRAAGIADELGAYCFELAAAEAGKFATADDAKINYAYHFDAGLYARYLRAFSEARGVTRIEGKISSVVQNAETGFIEAIELDDGRRVEGDLFVDCTGFRGLLIEQTLRAGYEDWSHWLPTNRALAVQTKAVAPARPYTRAIAHEAGWQWQIPLQHRVGNGLVYCSDHLSDDAAREKLLAQVDGETITEPRLIRYVTGRRKRVWDKNCVALGLASGFVEPLESTSIHLIMIGITRLIQSFPFAGMKESVVRRYNDLAETELERVRDFIILHYHLNERPEPFWQRCATMEIPDTLAQRIALFRESALTPQTADDLFQADSWLQVMLGQRLEPTDYHHMGHVLSDAHLARAFADLKGNIAGAVGRMPTHQAFLDGYCAR

SEQ ID NO: 85644 - protein, 514 aa, Paucibacter aquatile
  misc_feature (1)..(514): tr|A0A2N8L198|A0A2N8L198_9BURK Tryptophan 7-halogenase OS=Paucibacter aquatile OX=2070761 GN=C1O66_19420 PE=4 SV=1
MKTKKIAIIGGGTAGWLAANHLGRGLQGDPEIEITLIESDEVPVIGVGEGTVPFIKTSMQKFGISEADLLLSCETTFKHGIKFQNWMAAPQGAAEHFYYHPFSSPFPGGMDVTPHWLRQGQARPFADVSSSARLAEARRSPKHIESDAYAGAVDYAYHVNAHKFAALLSRNARQRFGVKHLIATIVGADRGESGDVLALRSKSGERLAFDFYVDCSGFASLLTHTSLKVPFVDKSHQILTDTALVQQVPLAPDAEIPPYTLARAHEAGWIWDIPVTERRGTGFVYASQYMTQDQATLAFARHLGIHPDQFSPRKIAMKIGYRERVWAHNCVALGLAQGFVEPLEATSILLTDFAAGLLARNFPRQREDAPPLREHVNQAVRYAWERIIDFVQLHYHLSDRDDTDFWRDNRYNDHLSDVLRLRLDKWRAMPPQQTDFFSRFDLFSVENYLYVLHGMRYPCRGFELADEEHAEARRQLARVDGLTRQLMADLPGHRAWLQGLRAAVEGQSRTGESG

SEQ ID NO: 85645 - protein, 503 aa, Sphingomonas koreensis
  misc_feature (1)..(503): tr|A0A430G3Z9|A0A430G3Z9_9SPHN Tryptophan 7-halogenase OS=Sphingomonas koreensis OX=93064 GN=DAH66_09315 PE=4 SV=1
MTEEQGEDAIRTIAIVGGGTAGWMAASYLARTLAHTNIAITLIDSSEIGTVGVGEATVPAIRDFLAVVGLADADVLAATEGTIKYGIHFADWAEPGHRFYHPFGLYGVSARGVPFHQYWLKLRAAGHDLSLEDYCLCTQLAEQGRFLPPPEQPGSELGVFDFALHFDASMFATLLRDLSLSLGVTHIDARIDGVEQAPEDGQVRAVRLADGRSVAADLWIDCSGFRGLLIGEAMGVPFVDWRNWLPCDRAIALGCEPSGAYRPVTTSTARAAGWQWHIPLRHRIGNGYVYCSDYISDDEAEAVLRANIEGPALGEARRIRFTPGHRASFWKGNVVAIGLAGGFLEPLESTSITLIQSGLERLVRLFPDRRFDPALAALFDRQSQLEFERIRDFLLVHYCLNRREGEPLWDRMRTMELPGHLQGKIDAWRAQGELVRYEWETFQDPSWLSMYAGFGIEPRRYNVRADQFDGAELLATFGRMRTAIDDTVKLGVPAAEFAAALRR

SEQ ID NO: 85646 - protein, 507 aa, Sphingomonas sp.
  misc_feature (1)..(507): tr|A0A1Q4EAY7|A0A1Q4EAY7_9SPHN Tryptophan halogenase OS =Sphingomonas sp. 67-41 OX=1895850 GN=BGP17_07190 PE=4 SV=1
MGKRRILIVGGGTAGWLAAAYLARFLDLADQAQIEITLLESPELGIIGVGEGTFPTIRSTLKFLGIDETQFIRATSATFKQGIRFNDWLHAPLPDGTRHHYLHPFEAPFYTEGTSLVPYWLLQDAATRPPFAEAVTIQNRVAESRRAPKKQGEGEFSGPLNYAYHFDAARLARILRERAEELGVRHVAGLLTDVELGEDGAIARIVTREQGALEADLYIDCSGFRAELIGKALGARFKSVRDILFTDRALACKIPYAEPDAPIESFTIAAAHPAGWTWDIGLEGARGIGTVYSSTHMSDDEAAQVLRAYIGHDDYKARIIPFEPGYREAQWVKNCVAVGLSGGFLEPLESTGVVLIEAAVGMIAELFPHNGPVDAPARRFNALIVGRYERIIAFLKLHYCLSRRDEPFWRDNADPASIPEELQELLRQWRHRPPGRFDFLLDLESFAFFNYQYILYGMDYRTDLSGGRGDFPNVEAAEKLFARIRTFSERATEDLPTHRALIRAING

SEQ ID NO: 85647 - protein, 509 aa, Marinimicrobia bacterium
  misc_feature (1)..(509): tr|A0A2E0HZH0|A0A2E0HZH0_9BACT Uncharacterized protein OS=Candidatus Marinimicrobia bacterium OX=2026760 GN=CM G17_07035 PE=4 SV=1
  misc_feature (56)..(57): Xaa can be any naturally occurring amino acid
  misc_feature (65)..(66): Xaa can be any naturally occurring amino acid
  misc_feature (71)..(71): Xaa can be any naturally occurring amino acid
  misc_feature (100)..(100): Xaa can be any naturally occurring amino acid
  misc_feature (105)..(105): Xaa can be any naturally occurring amino acid
  misc_feature (107)..(107): Xaa can be any naturally occurring amino acid
  misc_feature (111)..(111): Xaa can be any naturally occurring amino acid
  misc_feature (188)..(188): Xaa can be any naturally occurring amino acid
  misc_feature (371)..(371): Xaa can be any naturally occurring amino acid
  misc_feature (379)..(379): Xaa can be any naturally occurring amino acid
  misc_feature (411)..(411): Xaa can be any naturally occurring amino acid
  misc_feature (413)..(413): Xaa can be any naturally occurring amino acid
MKIAKKITIVGGGTSAWMTAALLVNNIGKECEITLIDKKDGNPVGVGEATILSFKXXMDDCGFDXXDYFKXIDCTFKGGILFENWKGEGKDIWHPFGFPXLDSLXIXEGSXTTIHEIWTNYQREYTNKKTDCEIHYNLAVRDNKMDPDNLRIYALHIDAGLLVKYIQKKIKDRITFIQGEVSSKATTXDGYIESLSLTDGSCHKADLFVDCTGFNGLLKDQDRVDLTDRLFCDTAIAGHVPYNDRPNELKPYTACDAVEHGWIWKIPVDQRYGTGLVFNRSITPVEDAVDFFVEYWDKRLVKNHLKVLDWTPFYIRNFWEKNVVNVGLSAGFIEPLESTGIGLIAAGAWELLNRIKTRTYDDNDINLYNAXMTCFFENXVDFVNMHYSRSKNEGKFWQWVHKVYKPSETLXWXADDYAYAIKDIESEGKEMFSGANWFCWMNQLDYPVCSKDLDMPPHISRDILEKFYEQEEQKFKYLPTADVCNDNFRNIQPPVTYEKVNPWNENPFH

SEQ ID NO: 85648 - protein, 482 aa, Sphingomonas sp.
  misc_feature (1)..(482): tr|A0A1Q4E6U2|A0A1Q4E6U2_9SPHN Tryptophan halogenase OS =Sphingomonas sp. 67-41 OX=1895850 GN=BGP17_07905 PE=4 SV=1
MAAAAFARFLGPGFRITLVESEEIGTIGVGEATIPQIRLFNAGLGIDEDAFMAATQASFKLGIEFVGWTKGGRYMHAFGDVGRANGLLAFQHSWLRGLAEGVARPLAAYSLNNVAALANRMQRGPARTAKLLPEMPYAFHFDAGLYARFLRGLAESGGVTRVEGRIVAVARDGESGDVSALELEGEREVAGDLFLDCTGFRALLIGEALGTGFEGWSDLLPCDRAIAVPSARARDFTPYTRATAHAAGWQWRIPLQHRTGNGLVYASAHLSDDEAAARLLAGLDEPALADPRPLRFAAGKRRGFWKHNVIALGLASGFLEPLESTSIHMIQSAIERILSLLPGRQTSPAQREEYDRQTHLEYDRIRDFLVLHYWANDRDEPFWAERRAAALPACLRHKVALWRASGRIVRGEADLFSEVAWLQVLAGQGIAAAAHHPLADAPPREHIAEYLGLIELLNAREAGQMSDHAAYVAQHCAGAAAA

SEQ ID NO: 85649 - protein, 513 aa, Sphingomonas sp.
  misc_feature (1)..(513): tr|A0A1Q4EBW3|A0A1Q4EBW3_9SPHN Tryptophan halogenase OS =Sphingomonas sp. 67-41 OX=1895850 GN=BGP17_03180 PE=4 SV=1
MNNPDALRKVCIVGGGTAGWIAAAVMAHHMKGRLFEIELVESDDIGTIGVGESTIPPFMELIAKLDIDEQDFVRQVQASFKLGIEFKDWFRKDESYFHPFGDVGQRVELSDFYQCWRKATLAGHDFPLQDFAPATVMAHAGRFMLPFKARNTPIAGASYALHVDAKRVAQFLRGHAEARGVKRTEGIVTDVALDARGFVSTLTLKDGRTIDADFFIDCSGFRALLIEKALGSGYTDWSNYLFCDRAIAAQTENVGPPRPYTLAEAQDAGWRWRIPLQHRTGNGHVYSSEFMSDEEATRILLEKVEGEVVAGPMVVPFRTGVREKIWHRNVLAIGLSSGFIEPLESTAIHLIYRGMDFFFRFLPDRHCDPALADEYNRRMVADYTEIRDFIVLHYCTTARDDTPFWRKCRDMDWPDSLKERVELFRSNGTLREGLDELFRSVSWFSVLEGMGIRPRTYHPLVDRIDEAMLYAGLDKAREQLAGFVRQLPTQQQFIDAHCRAEKVDLTRPVMAGV

SEQ ID NO: 85650 - protein, 519 aa, Sphingomonas sp.
  misc_feature (1)..(519): tr|A0A1Q4EBU8|A0A1Q4EBU8_9SPHN Tryptophan halogenase OS =Sphingomonas sp. 67-41 OX=1895850 GN=BGP17_03075 PE=4 SV=1
MSTDNRIRNIVVVGGGSAGWMAAVVLATYLGRGASVRLIESEEVGIVGVGEASVPHMKTFNTEMLGIKEADFVVETQATFKLGIQFNDWGRLGDSYVHGFGKIGQGIGPLPFHQFWLKQYLAGRAAEIGAYSLQTVAAPLNRFMPSPANAPEGSPLADIAYAYHFDASLYARFLRNLSERRGVQRTEGKIVEVIQRAGDGFVEAVVMESGERIEGELFVDCSGFRGLLIEQALETGYADWTHWLPCDRAMAVPCENVGPLTPYTRATALGAGWQWRIPLQHRCGNGYVYSSQHVSDDEAAATLLANLDGKPLADPRPLRFTTGMRRKFWHKNVVAAGLAAGFLEPLESTSIYLAQSTIQRLIGLFPNKDFDPLLAERFNRESAFEWERVRDFIILHYHATERADTPFWDHCRTMSVPAPLQETMALFRSDGRYFRNGEDFFALPSWVQVMLGQRIVPHGYHPIVDEMPEHQLAEYLERTRATLANCVGAMPLHQAFIDEHCKAPPELAQAGAAPHMVKA

SEQ ID NO: 85651 - protein, 507 aa, Sphingomonas sp.
  misc_feature (1)..(507): tr|A0A1Q4EC92|A0A1Q4EC92_9SPHN Tryptophan halogenase OS =Sphingomonas sp. 67-41 OX=1895850 GN=BGP17_03175 PE=4 SV=1
MASGAIERVVIVGGGTAGWMAAAALGAYLAGAGTRITLIESSEIGTIGVGEATIPTIRRFYAALGMTDAEVMRACEATAKLGIRFVDWKPGTSFVHPFGRFGQDLRGIDFHQYWQKARQAGRAAPLEEYSLGAMLAREGHASVPLPNPPSQLSVFDWALHFDAARFAAHMRAYAERAGVARIDARITDVTLHGETGFIEAVTLDSGERVAGDLFVDCSGFRGLLIGEALGTPYRDWSHWLLCDGAFAVQSERVGEPPSCTTVTARTAGWQWRIPLRSREGNGLVFASDFQGDDEARAELLANIPGAPTMEPRRLRFTPGRREVAWARNCVSLGLASGFLEPLESTSIALIETGIERLKQLFPDKGFDPAVIAEYNAQSAEEMERVRDFILLHYHLSTRDGPFWQACREMTLPDSLAAKLELWRARGAFLRYRWEMFSPASWLAIYGGFEHLPERLDPGVAAVGTDELAQGLEQMRAAIARTVADTPTHSEFLATVDGAAAEPMRTSA

SEQ ID NO: 85652 - protein, 504 aa, Amphiplicatus metriothermophilus
  misc_feature (1)..(504): tr|A0A239PV98|A0A239PV98_9PROT Tryptophan halogenase OS =Amphiplicatus metriothermophilus OX=1519374 GN=SAMN062 97382_2131 PE=4 SV=1
MHGKRIERIAIIGGGTAGWMAAALFARLLGPLGTRIRLVESEEIGTVGVGEATVPTIRLFNQLLGFDERDFLARTHGSFKLGIEFRDWGGPGCAYFHGFGDFGADIEGIAPHHHWLKLRMEGDGTSHEAYSFPAVAARKGRFAPPPKDPVSSAPYYQHAYHFDAALYARYLREYAEARGATRVEGRVVDVARRAADGFVEAVVLADGRRVEADFFVDCTGFRALLIGEALGVGFEDWRGWLPCDRAVAIPCARRGPLTPYTIAAAKEAGWRWRIPLRHRIGNGYVYCSAHVSDDEAAAALLADLEGPALAEPRLLRFAAGRRKAFWAKNCVAIGLAAGFLEPLESTSIQLIQNGLTRLIEYFPDADYDPAMIAEYNRVTANEYARVRDFLILHYCAAGRRDAPLWRDCAATPLPDTLRHKVDVFVSTGRVPMLTEESYAEASWVAIFLGSGVAPRRYDPLVDRIDSAVLAQGMRRRREEIRRVAEAMPTHEAFLERACPAPAMA

SEQ ID NO: 85653 - protein, 497 aa, Pseudoalteromonas sp.
  misc_feature (1)..(497): tr|A0A0W1L4S7|A0A0W1L4S7_9GAMM Tryptophan halogenase OS =Pseudoalteromonas sp. 10-33 OX=1761890 GN=ATS76_04525 PE=4 SV=1
MKPIKNVVIAGGGTAGWIAAALLNKVLGKVINITLIESSSIGTIGVGEATIPPIIQLNNALGINEQDFINATNASIKLGIEFENWKTPSHSYMHAFGSFGKDFPFCDFYNFWVKGQISGSEDSLWDFSLNYQAAKKHKFAPLKSIPNTQLPGLSYAFHFDATLYAEYLKKLALSRGVKHIDAKIDHVTQCPNTGQINSLTLDNNSQIEGDLFIDCTGQRALLIEQTLNTGFVDWSHYLPCDSAVAVQSTGRDELKPYTRSIAHNAGWQWQIPLQNRTGNGLVYCSRYLSDESATALLLNNLPSEPTTSPRLIKFKTGRRLKQWHKNVVAVGLSSGFLEPLESTSIHLIQSAVIRLIKLFPHNGVSDALVTEFNKQSVTEIEHIRDFIILHYKLTEREDTPFWRQCKQMDIPQSLAHKMDLFRQTGKVVRESDELFAEVAWQQVCIGQGLIPEDYNNIVDSLSSEQLNDLFSTLKTLINSTVDQLPTHKEFLANIKRV

SEQ ID NO: 85654 - protein, 513 aa, Paucibacter aquatile
  misc_feature (1)..(513): tr|A0A2N8KT21|A0A2N8KT21_9BURK Tryptophan halogenase OS =Paucibacter aquatile OX=2070761 GN=C1O66_23340 PE=4 SV =1
MSLPPVTSLPLLRRIVIAGGGTAGWMSAAALSTLLPPGYEIHLVESEEIGTIGVGEATIPNIKNFNAALGLDENDFIRATQASFKMGIEFVNWGRLGERYIHGFGSFGQDFGSVGFHHQWLRLRREGLASALDDYSINTSAPRQAKFMRARPEMAGSPLADIAYAYQFDAGLYAAYLRRHAEQRGARRSEGRIVEVLRAAEDGRIRALRLDSGEQIEGDFFLDCTGMRALLMGQTLGVGLEDWSHWLPCDRAWAVPCESAGPLLPMTRATAHSAGWQWRIPLQHRTGNGHVFASRFMDEGEARDLLMRHLDGKPLAEARSIRFQPGRRHQAWHQNCLAVGLSGGFLEPLESTSIHLIQTALARLMSFFPHGGLDAADIAEYNRQTQFEYERIRDFIILHYKATARDDSPFWNHCRQMAVPETLQRKIDLFCSNGRIVREADELFAELSWLQVMNGQGLQPRGYHPLAEQTPKAEAVDLLAHIRQVIARCVQVMPTQAAYLAEHCQALRPGSGT

SEQ ID NO: 85655 - protein, 531 aa, Lentzea violacea
  misc_feature (1)..(531): tr|A0A1G9JHL7|A0A1G9JHL7_9PSEU Tryptophan halogenase OS =Lentzea violacea OX=128104 GN=SAMN04488074_110256 PE=4 SV=1
MTGNQIRNIVVLGGGTAGWMSASYLGKALGPAVNITVLEAPAIPKIGVGEATIPNLHKVFFDFLGLSEEEWMRECNASFKMGIRFINWRTPGAGEATARPHGEGRKDHFDHLFGLLPEHGNLPLSHYWVNKKLAGETDEPFDYACYRQPPVFDRNLSPRYLDGTRWASYAWHFDANLVADFLRRFATEKQGAVHIQDTFTEAEVDHGGYITAIRTETGRRLEADLFVDCSGFRSLLINQVMKEPFLDMSDHLLNDRAVATAVPHDDEANGVEPYTSAIAMSSGWTWKIPMLGRFGTGYVYSSRFASQDEATEEFCRMWGLDPETQKLNHVKFRVGRNRRAWVKNVVGIGLSSCFLEPLESTGIYFVYAALYQLVKHFPDKNFEPILLDQFNREIETMFDDTRDFIQGHFSFAPRDDTPFWRACKELELASDFREKVAMYKAGLAVNMPVTDEGNYYGNFEAEFRNFWSNANYYCVFSGLDFLPEHPLPALGFRQETVESAEAVFARVKKEQEELVRTLPSTYEYLRQLHGR

SEQ ID NO: 85656 - protein, 503 aa, Massilia oculi
  misc_feature (1)..(503): tr|A0A2S2DLH1|A0A2S2DLH1_9BURK Tryptophan halogenase OS =Massilia oculi OX=945844 GN=DIR46_18415 PE=4 SV=1
MENQAIRDIVIVGGGTAGWMTAAALSSMLNGRYNIRLVESDEIGIVGVGEATIPMIQRFNRVVGIDENEFMRETMGSFKLGIEFVNWGKLGERYMHGFGRMGQDLATVPFEQYWHKMRGLGLAAPLEEYSITRMAAKAGKFMPARTDVPNSPLADIAYAYHFDASLYAKYLRKLSEARGVTRIEGKIARATLREPDGFVDAVELESGQRIEGELFIDCSGFRGLLIEGALETGYEDWTGWLPADRALAVPCESAPAITPFTRATAHKSGWQWRIPLQHRTGNGHVYCSRFISDDEAAATLLANLDGRALAEPRLIKFQTGMRKQAWNRNVVALGLSGGFLEPLESTSIHLIQSGIARLVELFPDRRFSDVDRIEFNRQSRFEYERVRDFIILHYHLNQRTDSAYWTECANMAIPETLRQKMDLYKSRGKVVRVDNELFSEVGWLQVFEGQNMPIDGYHPLADTQSEADIADYMASVRDVIRKCVDVMPSHDDYIAKHCAARKS

SEQ ID NO: 85657 - protein, 498 aa, Sphingomonas koreensis
  misc_feature (1)..(498): tr|A0A430G4P4|A0A430G4P4_9SPHN Tryptophan 7-halogenase OS=Sphingomonas koreensis OX=93064 GN=DAH66_08445 PE=4 SV=1
MTEKRPTRVVIAGGGTSGWMAAAAISRTMGRTVDLTLVESEQIGTIGVGESTIPPLVNFNRILGIGEAEFMAAAQATFKLGILFDNWKHDGHSYFHSFGLSGKDHWSAGFQHFWLYARSRGFPEPYDDYCLELAAAMQGKFAHLPQDRMNYAYHVDATLYGRYLRKLAEESGTKRVEGKIQRVELNGETGDIAALHLDGERRIEGDVFVDCTGFRGLLIEGALHAGFEDWGHWLPNDSAIAVQARHLGPPQPYTQAIAHDAGWQWRIPLQHRMGAGIVYSSGYLSRDEARHRLISTVGEPLIEPFDIKFRGGVRRKQWYRNCVAIGLSGGFVEPLEATTVHLIQRAVLRFVRLMPNGRVSERDAAEFNEQQRQDIEQIRDFVILHYKATDRRDSAFWRHVAAMPVPDSLSQKIELFRETGRTFRRNEELFAENSWVQVMMGQGIDPQSWHPIAEKLSDEELMRLMATLREDVTRTVATLPEHHAYVAQYCGAADPLAA

SEQ ID NO: 85658 - protein, 511 aa, Sphingomonas koreensis
  misc_feature (1)..(511): tr|A0A430G6E1|A0A430G6E1_9SPHN Tryptophan 7-halogenase OS=Sphingomonas koreensis OX=93064 GN=DAH66_06615 PE=4 SV=1
MEAGQTGTGNPPIRRIVIVGGGTAGWMTAALLSKLLFRGYDITLVESDEIGIIGVGEATIPGIKDYNHLAGIDLTEMIRATQATFKLGIEFVNWREPGFRYIHGFGKIGTDLMWLHPHQLWLKLAAMGQAKHFDLYSLNTLAARQNKFCFPDPRNPGSPMGHLDYAYHFDASLYARFLRGRSEAQGVTRTEGRIVEVRQRPEDGFVESVVLADGQTVSGDLFVDCSGMRSLLLGQTLGVGYEDWSHWLPCDRALAVPCESVSPLTPYTRSTAHGAGWQWRIPLQHRIGNGHVYSSAHVSDDEAADVLLANLDGKALADPRPVRFAPGKRHKAWEKNVVAIGLSSGFLEPLESTSIHLIQTGILKLVALFPGQGFNAADIAEYNRQHNFEFDDVRDFIIAHYKVTNREDTPFWAHVRHMEVPDSLAERLELFRASARFFVHGKAELFREESWVQVLLGQGMAMTYDPVVDMIPDEDVIAFMRDIEEVNADVAAAMPTHEAFIDRYCKAAAQV

SEQ ID NO: 85659 - protein, 521 aa, Sphingomonas sp.
  misc_feature (1)..(521): tr|A0A1Q4E8H5|A0A1Q4E8H5_9SPHN Tryptophan halogenase OS =Sphingomonas sp. 67-41 OX=1895850 GN=BGP17_04645 PE=4 SV=1
MQPRSNPSPAPLRVVIVGGGTAGWMCAAGLARLLPPTDYALTLIESDEIGTVGVGEATLPHIREFNAMLGLDEAEFMRATQGSFKLGIEFVGWDKPGGRYVHPFGSFGERWGGIDFQHHWLRARAAGQDVGDWFDHSFAVAMCREGVFDLPDEDLRSIRSTFSYAYHFDAGLYAEYLRRWATPRGVRRIEGKIVDIARNAESGLVESVALQSGAAIAGDLFIDCSGFRSLLLGQSMGVAWHDWSAWLPCDRAMAVPCAGAAGITPFTRSTAQAGGWTWRIPLQHRTGNGYVFSSSFCSEEQARETILGAIDGAPLADPRLLRFQAGRRARGWEGNVVAIGLSSGFLEPLESTSIFLIQAAVTDLANLMPLPGGGPPDPRLAAEFNRLFAIHYDRTRDFLVLHYTANARHGEPLWDHVRNMALPDSLAHKIALFRSSGRAPDYKLGLFSRDSWLAVLMGQGILPEAHDRLADRAPLDEVADRLAELRERIATNAAALPAHAEFIASYCSAARGTADDRAVTA

SEQ ID NO: 85660 - protein, 545 aa, Nostoc sp.
  misc_feature (1)..(545): tr|A0A252DUJ0|A0A252DUJ0_9NOSO Tryptophan halogenase OS =Nostoc sp. T09 OX=1932621 GN=BV372_20665 PE=4 SV=1
MSQYVQNVVIVGGGSAGWMTAAYLSKALDRNVQITLVESSNITKVGVGEATFSTIKVFFDFLGLQEYEWMPKCNATYKMAIKFVNWNAKGQHFYHPFQRYEVIDGFDISEWWLKMKKDQEAFDYACFLIPWLCDNQRSPRYFDGKVFDNKVQNEFSQENITKKNILDNLKIQYPYAYHFDANLLARFMKDYAIQRGVKQIVDDVVDVKLMGDGSIDSLNTKEHGILSGDLFIDCTGFRGLLINKALGEPFISYSESLLCDHAIAMQIPTDLKKDGINPYTTATALSSGWVWNIPLYGRNGTGYVYSSAFISAEEAEQEFRQHLGVAANNCKASHIKMRIGRNRNSWVKNCVAIGLSSGFVEPLESTGIFFIQHGIEELVNHFPTKSFNKELICSYNKAVADCIDGVREFLTLHYYASDRADTEFWKATKNDIKVPEELREKLRLWKNRLPSNKSINPKYHGFESYSYSVMLLGLNYLPESSLPVLEHIRNHNAQAAFVEIKERADYLSSTLPSQYEYLTHVIKSQEQSEYLSVVSDRTQQIPVPI

SEQ ID NO: 85661 - protein, 475 aa, Sphingomonas koreensis
  misc_feature (1)..(475): tr|A0A430G4F2|A0A430G4F2_9SPHN Tryptophan 7-halogenase OS=Sphingomonas koreensis OX=93064 GN=DAH66_09185 PE=4 SV=1
MTAAALGRALAGQSHSITLVESEAIGTVGVGEATVPPILDFNRYLRIDPDEFLRETNGSIKLGIEFEDWGGAGHRYFHPFGFFGVEMSGIHFHHFWLRHVAEVGPRDHSEYHLEAMALREGRFARMTRAGPVHHAVHFDASLYARFLRGRAEASGVVRVEGKVVHVRLDPENGYIDALALDDGRSIEGDLFIDCSGFRGLLIEGALETGYESWNHWLPCDSAVAVPAANAGDPLPFTRSTAREAGWQWRIPLQHRDGNGYVYSSAHLPHAEAARLLSERLPGPAQADPNFLRFTAGHRRKIWNRNCVAMGLAGGFLEPLESTSIHLIQTTIIRLLALLPRDGIDPNVVARFNRESLHEYRTIRDFVIAHYALAGRDDTPFWRDVAATGVPDTLAERIEAFRATGNILFEPGDLFGPTNWYWVMTGQGVWPRSWHPIADGLSSAELTARLAVLRGRVAEQLAELPPHVEFLRRLSA

SEQ ID NO: 85662 - protein, 501 aa, Sphingomonas sp.
  misc_feature (1)..(501): tr|A0A1Q4E6N4|A0A1Q4E6N4_9SPHN Tryptophan halogenase OS =Sphingomonas sp. 67-41 OX=1895850 GN=BGP17_07960 PE=4 SV=1
MAREPRRVRSVVVLGGGTAGWMTAAALSRQFGRTMRITLLESEEIGTVGVGEATIPTIHWFNELIGLDEAAFLRETKASFKLGIEFVDWVRPGHRYFHPFGEYGVRFPGVAFHHRWMKARAEGVDLPLSAFSLATELAGQGRFAMPTGDARSILSTLGYAYHFDASLYAKHLRGLAEAAGVIRVEGRLQDVERAAESGLVTALTTQRGERIEGELFIDCSGFRALLIDGAMGGAFEDWSHWLPCDRAVAVPCARTEHTTPFTRSTARPAGWQWRIPLQHRIGNGHVFSSRFMGEDEATAMLLANLDGEALAEPRTLRFTAGTRRRAWIGNVVAIGLSSGFLEPLESTSIHLIQSGIAKLLTLFPDRDMDPMLAERYNALLGADMDNIKDFLILHYHANPGRSDPFWVERREMALPETLVAREEQYRRSGRLMLGPEELFRDASWLAVLNGQEIVAEDYNPLADVFDSAANSTQVRQVAEVIKRAAPTLPLHDAALAAAMGG

SEQ ID NO: 85663 - protein, 512 aa, Massilia oculi
  misc_feature (1)..(512): tr|A0A2S2DNQ4|A0A2S2DNQ4_9BURK Tryptophan halogenase OS =Massilia oculi OX=945844 GN=DIR46_23025 PE=4 SV=1
MNAHDGDTHDRVGRITIVGGGSAGWMAAAALATYVGRDATIRLVESEAIGIVGVGEASVPHLRLFNGQWLGIDEAEFVRRTQATAKLGIQFKDWGRIGDSYLHGFGAPGRSLGPLPFHQLWLKERLAGRAGPIGDYSAQGLMAPLGKFAPGERNATPDSPLADIAYAYHFDATLYARFLRELAESRGVQRIEGTISHVNQRAADGFVESVTLEDGQVVDGELFIDCSGFRGLLIGEALGTGYVDWSHWLPCDRALAVPSERVDPVTPYTRATAQAAGWQWRIPLQHRTGNGYVYSSRHVISDDEAHATLLANLDGKALAEPRRLAFTTGMRKQFWSRNVVALGLASGFLEPLESTSIYLVQSGITRLLGLFPRRDVSPLLAERYNRDTAAEYERIRDFLILHYHATTRDDTPFWNACRTMAIPDSLREAIELFRADGRYLRHGEDFFALPNWVQVMLGQGIVPRSYHPMVDQVPGQRVAEHVDGVRAMLAQAVATMPTHQEWIDRYWKAPVA

SEQ ID NO: 85664 - protein, 534 aa, Streptomyces lavendulae
  misc_feature (1)..(534): tr|A0A2K8PCX4|A0A2K8PCX4_STRLA Flavin-dependent tryptop han halogenase RebH OS=Streptomyces lavendulae subsp. l avendulae OX=58340 GN=rebH PE=4 SV=1
MTGTDNRIQKVVILGGGTAGWMTAAYLGKALQNTVEITVLEAPTIPRIGVGEATVPNLQRVLFDYLGINEDEWMRECNASFKMAVRFVNWRTGGQGEAEARELEEGGPDHFYHPFGLLPDYDQTPLSHYWYKRKFEGETNEPFDYACFREPPVMDAKLAPRWMDGRPATRYAWHFDAALVAKFLRRFATEKQGVLHVEDEMTRVEQDERGFVTALHTKSGRVLDADLFIDCSGFRGLLINEAMAEPFIDMSDHLLCDSAVATAVPHDDEANGVEPYTSAIAMSSGWAWKIPMLGRFGSGYVYSSKFASQDEATKEFSELWGLDQENTKFNHIRFRVGRNRRAWVKNVVSIGLSSCFLEPLESTGIYFITAAIYQLAKHFPNKDFNESLIGAFNNEIELMFDDTRDFIQAHFYYAPRNDTPFWRANKELTLPDNIQKKIAAYRAGLPINSPVTDESTYYGNFEAEFRNFWTNGSYYCIFAGLGLVPDEPLPALAYKPESVAGAQPLFQTVKRQQQDLLDTLPSTYDYLRQLHGAS

SEQ ID NO: 85665 - protein, 503 aa, Sphingomonas aerolata
  misc_feature (1)..(503): tr|A0A2T4YNR4|A0A2T4YNR4_9SPHN Tryptophan halogenase OS =Sphingomonas aerolata OX=185951 GN=C8J24_3271 PE=4 SV= 1
MTQAPLGSIVIVGGGSAGWMTAAALSSLVQTKDVSITVIESDAIGTVGVGEATIPDMLVFNQMLGISEAEFMRATEATFKLGIEFVDWGHKGDRYIHPFGQHGVDMEGIDFHQYWLRLNREGGTAPIEDYSLSAVAAGAGRFALPDPNPRSVFSHLRYAYHFDATLYARYLRRYAEKRGVKRIEGVVKEVHLTAQDDGIAAVTMDSGAHVKGDFFFDCTGFRALLTGQTLDIDFVDWSAWLPCDSALAVPSAHVGPPPPYTRSTARPAGWQWRIPTQRRVGNGHIYSRSFMDDDEAERVLRKGVEGALLAEPRSIRFKAGHRRQFWRGNCIAIGLAAGFLEPLESTSLYLIQEGISRFISLFPNGDIPDILRVEYNRYMQKKFEQVRDFIVLHYVATNRDDTPFWHYCRTMTVPDSLRHKMELFRETGRIFRYDDELFARPSWVAVMLGQGIMPERSDPIVAALPARDVANSLQSMASAMKDAASRMPTHASFIASYCAATEG

SEQ ID NO: 85666 - protein, 538 aa, Burkholderia puraquae
  misc_feature (1)..(538): tr|A0A1X1P685|A0A1X1P685_9BURK Tryptophan halogenase OS =Burkholderia puraquae OX=1904757 GN=B7G54_35515 PE=4 S V=1
MSNPIRNIVIVGGGTAGWMSASYLVRALQQQANITLIESEAIPRIGVGEATIPNLQKVFFDFLGIPEREWMPQVNGAFKAAIKFVNWRKSPDRSRDDYFYHLFGSVPNCDGVPLTHYWLRKREQGFQEPMAYACYPQPAALDGKLAPCLPDGTRQMPHAWHFDAHLVADFLKRWAVERGVNRVVDEVVQVHLDERGYISSLSTKEGRTLEADLFIDCSGMRGLLINQALKEPFIDMSDYLLCDSAVASAVPHDDAREGIEPYTSAIAMNSGWTWKIPMLGRFGSGYVFSSKFTSRDQATADFLDLWGLSDKQPLNQIKFRVGRNGRAWVNNCVAIGLSSCFLEPLESTGIYFIYAALYQLVKHFPDTSFDPRLSDAFNAEIVYMFDDCRDFVQAHYFTTSREDTPFWRANRHDLRLSDAIKDKVERYKAGLPLTTTSFDDSTYYETFDYEFKNFWLNGNYYCVFAGLGMLPERSLPLLQHRPESIDKAEAMFARIRREAERLRTSLPTNYDYLRSLREGDAGLSRSQPGQTLAVPEIL

SEQ ID NO: 85667 - protein, 415 aa, Pseudomonas fluorescens
  misc_feature (1)..(415): tr|A0A379I6J2|A0A379I6J2_PSEFL Tryptophan halogenase OS =Pseudomonas fluorescens OX=294 GN=kmo PE=4 SV=1
MPTVEMERRQVVVIGAGPSGAIAAALLKRNGHDVLIIEREHFPRFSIGESLLSHCIDFIEEAGMLEAVNAAGFQLKTGAAFAWGERYSAFDFGDTFSDGKPTTFQVQRADFDKLLADQAALQGVEIRYGQTLVGVDFAAGHRYLHVRRENGREYHIKAGFVLDASGYGRVLPRLLNLEAPSNFPVRQAVFTHVEDRIEHPGFDRSKILITTHPTQRDIWFWTIPFSNGRCSVGVVAAKEHFAGCDGDLDACLRGFIEQTPSLSNVLANAVWDTPARAIGGYSANVTTLHGPGFALLGNAAEFLDPVFSSGVTIAMRSASMAAGLLHRQLKGESVDWQTEFAEPLKRGVDTFRCYVEGWYAGTFQDVIYHPGSSPQIRRMISSILAGYAWDERNPFVSEPKRRLRMLSQICAGDNV

SEQ ID NO: 85668 - protein, 498 aa, Sphingomonas sp.
  misc_feature (1)..(498): tr|A0A1Q4DUQ9|A0A1Q4DUQ9_9SPHN Tryptophan halogenase OS =Sphingomonas sp. 67-41 OX=1895850 GN=BGP17_01850 PE=4 SV=1
MQQIKRILIVGGGTAGWMTAALLGKLFQGLYEITLIESEEIGTVGVGEATIPAIKKYNELLELDENDFVRRTQGSFKLGIEFVDWAHRGDAYFHSFGVIGQDLGWLRCHQYWLKMRAMGRAADFSAYSINSAAARANKFMRADPKMAESPIGHIAHAFQFDAGLYARYLRGYAEAHGVTRREGKVADVTLRGDDGFVESVTMADGETIAADLFIDCSGFRGLIIEQAMKTGYENWTHWLPCDRAIAVPCARTEPFTPYTRATARTAGWQWRIPLQHRTGNGHVYSSAHISDEEAEAQLLANLDGAQLADTNKLRFTTGKRRQIWNRNCVAVGLASGFLEPLESTSIHLIQSTIIRLVRLLPDRGFDPATIAEFNRQTDFEYARIRDFIILHYKATSRDDTAFWRQCRDMEVPDTLQRKIDLFAANGRIFREDDELFTEESWIQVFLGQGVIPRGYDPLVDIKPEAQVEEYLGNIQRVIARCVGLMPDHAEFVAKTCAA

SEQ ID NO: 85669 - protein, 506 aa, Pelomonas sp.
  misc_feature (1)..(506): tr|A0A0Q6TBA0|A0A0Q6TBA0_9BURK Tryptophan halogenase OS =Pelomonas sp. Root1217 OX=1736430 GN=ASC95_18340 PE=4 SV=1
MRNGNLRKIVIVGGGTAGWITAAPLARMLCGQAEAGQHCQVTLIESSEIGTVGVGEATLPTIRFYNQMLGIGEDDFVRKTQASFKLGIEFRHWGRLGNRFFHGFGDFGPAIHNRPLWAYWLRMRAQEPTLPSYEEWSTATMMAAGMRFTTPQPGEQSPANAFNYAYHFDASLYGAYLREYALGHGAQRIEGTIVRVETSPENGFVDALHLSDGRRIEGDLFIDCSGFRALLIDGAMNSPYEDWSHWLPCDRALAVPCKRMDPMTPYTTSTAQSAGWQWRIPLQHRTGNGLVYCSSYLDDDAAANVLLGSLDGEPLDQPRQQRFTTGRRKQAWVKNVVAIGLSSGFLEPLESTSIQLIMDGVSRLTALLPDRSFQPALAAEFNRQMAYRYESVRDFIILHYKLGERDDSEFWRYCSNMSIPDDLAHQITLFRQTGRVAILEPEGFEEPSWASILLGLSVVPQRLDPYLDLVDPNLVRRHLMGVHDSISRTVRSMPTHASFLAEMGRR

SEQ ID NO: 85670 - protein, 412 aa, Xanthomonas citri
  misc_feature (1)..(412): tr|H8FHE5|H8FHE5_XANCI Tryptophan halogenase family pro tein OS=Xanthomonas citri pv. mangiferaeindicae LMG 941 OX=1156940 GN=xanB1 PE=4 SV=1
MTLLEKAQHPRFHIGESLLPMNMPILERLGVLEDVRAIGVLKRGADFPNDSGGYNTFRFSHALDAKADFAFQVPRAQFDHVLFQRARAVGVDAREQVCVEQVAFDGEHPVLQARTADGGVQQFRPRYLLDASGRDTFLGNRLKLKRANATHQSAALFSHFRGVARRPGEDAGNISIYRHAHGWMWLIPLPEDIMSVGAVCYPDYMKTRQGDSEGFLMRTLALNAELSARMLGAERVAPVHATGNYAYECTRMAGPRWLMLGDAYTFVDPMFSSGVFLAMHGAERGAAMVDAALRAPQSEAKLQRALQRELTRGVDEFKWFIYRFTSPTMRALFAQPQNTWQVEQAVVAMLAGDVFDAPKVRIRLRAFRALYALTTLSMMPRAWQSWRHRRRQAKLGFDGDTLQRDTQQRDAP

SEQ ID NO: 85671 - protein, 515 aa, Streptomyces sp.
  misc_feature (1)..(515): tr|A0A3G2J7K0|A0A3G2J7K0_9ACTN Tryptophan 7-halogenase OS=Streptomyces sp. Z022 OX=1442032 GN=D9753_04005 PE=4 SV=1
MTQSVVILGGGTAGWMTASYLRAAFADSVDVTVVESGRIGTIGVGEATFSTVRHFFDSLGLSEADWMPECNGTYKLAVRLENWRAPGTYFYHPFERMRVVDGVPLTDWWQKVGETDHFDRDCFLIPWLCDAKASPRYLDHRLFEQDFDEDPDRPLYRTTLAEQNTQFPYAYHFDASLLAGFLSRYAVERGVRRVIDDVVDVRLDEQGWIEHLVTREHGDLTADLYVDCSGFRSRLLGDALEEPFISFQDSLPNDRAVALRVPVDTAVQGIRPCTTATAQEAGWIWTIPLFDRIGTGYVYAADYCGPEEAERVLRDFVGPAAADLEANHIRMRIGRSNRAWVNNCVGIGLSAGFVEPLQSTGIFLIQHAIEQLVRYFPGTNRDPVLRDTYNLSTARAIEGVREFLILHYRGAARVDNDYWRDAKKRRLPDDMAIRLEQWQSKLPDNDTTYPYYHAFEPYSYVCMALGLGGIPLRHPPALDLVDTRAARHELTRVRQQARKLVETLPSQVEYLSRLR

SEQ ID NO: 85672 - protein, 484 aa, Sphingomonas sp.
  misc_feature (1)..(484): tr|A0A1Q4E611|A0A1Q4E611_9SPHN Tryptophan halogenase OS =Sphingomonas sp. 67-41 OX=1895850 GN=BGP17_12915 PE=4 SV=1
MLAARILVVGGGTAGWMTAAALAHKLAGTPARIMLVESAEIGTVGVGEATIPHIRHFNATLGIDEADFLAATRGTYKLGIEFVDWGRKGDSYIHPFAEFGAPIGGVPFHQQWCAARGEAGPFEAYSLPIQAARRGRFRRPDGDPYNYAYQFDAGLYAKFLRGYSEARGVVRREGKVIDVARDGESGFVRSVTLEGGEVLEADLFVDCSGFRGLLIEQALHAGYEEWTHWLPCDRAIALPCANVGPIAPLTRATAQDAGWTWRIPLQHRTGNGHVYASGFTSDEEALRTLLGAIAAPPMADPNRLRFVAGKRRRQWVGNVVAIGLSSGFLEPLESTSIHLIQLAIGRLLDLFPTRDWDPLDAAEFNRLMALEYERVRDFLILHYHCTERDDSEFWRHCRTMRLPDSLAYKLALFRERGVVVQYREGTFLEPSWLAVYLGQHVTPRRCDPRAGGAGAAAAMAAMRAGIAATAEAMPAHEAALGMPA

SEQ ID NO: 85673 - protein, 489 aa, Sphingomonas aerolata
  misc_feature (1)..(489): tr|A0A2T4YNR7|A0A2T4YNR7_9SPHN Tryptophan halogenase OS =Sphingomonas aerolata OX=185951 GN=C8J24_3273 PE=4 SV= 1
MAAAALAAKLAGLPIAITLVESDEIGTVGVGEATLPHIRAFNLALGIDEAEMMRATEATYKLGIEFCDWGRRGDRYIHPFGDFGPTTNDVPFYQYWLKLRQSGDRSRIDEYSYPVIAAEQGRFRRPSGDLDAVESTFGYAYQFDAGLYAKFLRSFAEKRGVSRTEGRVVRVVQDGETGFVRDVVLTNGTTISADLFIDCSGFRGLLIETALQSGYDDWSAWLPCNRAIAVPTQSNGALRPFTRATARTAGWQWRIPLQHRVGNGHVYCSSFISDDEAHDQLVAGLDAPMQAEPRRLSFTTGRRREFWKKNVVAIGLAGGFLEPLESTSINLIQDGITELLAVFPDKGFGARDIAEYNRRIGLHYERIRDFLLLHYVATQRDDSEMWRHFRNLRLPDSLSERIDAWRTRGHLIQYEFGLFLSPSWVAVFLGQNLVPDRHDPRVESMSIDALTARASDVRAKVDAAVRRTPEHTAFIRESGGAARLAVAGA

SEQ ID NO: 85674 - protein, 510 aa, Xanthomonadales bacterium
  misc_feature (1)..(510): tr|A0A259R0F0|A0A259R0F0_9GAMM Tryptophan halogenase OS =Xanthomonadales bacterium 14-68-21 OX=1970612 GN=B7X39 _10990 PE=4 SV=1
METTDRRIRSVVIVGGGTAGWMTAAALAQALQGSCRIELVESEQIGTIGVGEATIPPIKLFNQTLGIDENAFLAATQGTFKLGIEFVGWGRAGHRYFHPFGQIGAEFDKVPLHHYWLRERMRGDTSSLQDHSLAWIAARDGKFTQPSTDRRQVLSTLDYAYQFDASLYAAFLRQYAETRGVRRTEGRVVGTDLRPDDGFIERIRLEGGATIEGDLFVDCSGFRGLLIEEALHTGYEDWRHWLPCDRAVAVACEHGDAFVPYTRSTAHEAGWRWRIPLQHRVGNGHVYCSAFTDDDTATQVLLAHLEGKPLGTPRPLRFTTGRRRRFWHRNCVAVGLSAGFLEPLESTSIHLIQTAITRLLALFPDRDFDPVTTAEFNRLTGLEYERVRDFLILHYHANTRDEPLWRHVATMDIPEPLAYKLAHFRGHGRLVAESLELFQNPNWLAVMIGQEVWPERYDPLADMRTRVDAASRLASLRQVIAEVAAAMPSHREYIDRHCRAPAAEAAAVMN

SEQ ID NO: 85675 - protein, 503 aa, Pelomonas sp.
  misc_feature (1)..(503): tr|A0A0Q6TK60|A0A0Q6TK60_9BURK Tryptophan halogenase OS =Pelomonas sp. Root1217 OX=1736430 GN=ASC95_17085 PE=4 SV=1
MQESQRLISNVVIVGGGTAGWMAAAALAKLLKNKINITVVESEEIGTVGVGEATIPMIQRFNQVLEIDENEFMRETQATFKLAIEFVNWGKVGERYMHGFGRIGQALGTVPFEHYWRKLHMAGQAGDLADYSITRAAAAQGRFLRPVADAGNSPLAEIAYAFHFDASLYARYLRKYAEARGVTRIEGRIVDARLSGLSGRVESVLLADGRAVAGDLFIDCSGFRGLLIEQVLHTGYEDWSQWLPCDRAIAVPCESSTQLLPYTRATAHAAGWQWRIPLQHRIGNGHVFCSRFMEEAEAERILLANLDGKPLAQPRTLKFTTGMRRQAWNRNVVSMGLASGFMEPLESTSIHLVQTALARLIDFFPSAGFDQADIDEYNRLSRFEYERIRDFLILHYHVNQRDDSAFWRYCREMSVPDTLAAKIELYRRNGRIVREGAELFAEVGWLQVMHGQNLKAQGYHPLADLIDEAETDAYLKSVRDVIANCVEVMPSHEEFIAKNCRAA

SEQ ID NO: 85676 - protein, 498 aa, Sphingomonas aerolata
  misc_feature (1)..(498): tr|A0A2T4YNR6|A0A2T4YNR6_9SPHN Tryptophan halogenase OS =Sphingomonas aerolata OX=185951 GN=C8J24_3272 PE=4 SV= 1
MIGAPGTPVAFTPGNDIRHIVVCGGGLAAWMTVATLARHLPDTVRVTLAEIDSDHRCADLFYGTVSGPGSYAFNLAAGVTEPALVLGSSAAFSWGSKYVHWAEGGRSWIQCFNLALPVIDGVLMHQYLVQQGMTRLDPFLLGAVAGSRGTFAHPPRSPGAAGQQPLARAEYGYHFDPASHARCFAAAVPPGRIHHLKGALTRVAVGDGAITGIALDGADMVTADLYLDCSGPSAELLSRLDPAWLGGRALQISADDVAEARLGPPVRSVSFHDKGWAAQTPLRGSTRSLTVSDATASCNARGGLSASATLGRRQRAWAGNCVGIGHAAGIVEPLTPAPMMLLERDIERLMTLIPVSTASMTVEEREYNRRHGEDHHHAMRFTRALLETSALPDSDFWRAARDTPDAELEHKLAMFAERGLLVSYDLEPFHPEDWLIMHFGIGRRPRRHDRLADRADAKRVRRYLDDAAQQVANAAAALPSNHVYMTQLERYLRQDPRK

SEQ ID NO: 85677 - protein, 501 aa, Sphingomonas koreensis
  misc_feature (1)..(501): tr|A0A2M8WBR4|A0A2M8WBR4_9SPHN Tryptophan halogenase OS =Sphingomonas koreensis OX=93064 GN=BDW16_1641 PE=4 SV= 1
MGRPFELVIVGGGTAGWMCAAACAAKLVPTGVRVRLVESEEIGTVGVGEATLPQMKDFNDFLGLDEVEFMKATQASFKLGIEFVNWGHEGHRYIHPFGTYGRPVGEADFFSYWIRARRSGIASRLDDYCFPIVAAWQNRFMLPNGDPNDVRNAFAYAYHLDAFLYARYLRGWAEARGIERVEGRIVDVERDGGSGAIAAVTLASGEPVAGDFFIDCSGFRSLLLGSMLGVELEDWSHWLPCDSAQAVPCARSQDFTPYTRSTRRKAGWQWRIPLQHRTGNGYVYSSAHVSDDEAAATLLANLDGEALAEPRVLRFKAGKRRLAWSRNCIGMGLAGGFLEPLESTSIYLVQMAIMHMLTLLPSTEGIDPALPAEFNRVMDVEYDRIRDFLILHYIANEADAPLWAHVTAVDLPDTLQDKIDRFRHRGHVQAYRDGLFGPPSWQAVFVGQGIEPLAADRLADVLPAEALAQRLEMLASTIARGAGSAPSHADFIARYCPAPAP

SEQ ID NO: 85678 - protein, 538 aa, Streptomyces turgidiscabies
  misc_feature (1)..(538): tr|L7FG73|L7FG73_9ACTN Tryptophan halogenase OS=Strepto myces turgidiscabies Car8 OX=698760 GN=STRTUCAR8_08133 PE=4 SV=1
MTETGTTDTDSRIRKVVILGGGTAGWMTAAYLGKALQGTVDIQVLEAPAIPRIGVGEATVPNLHRVLFDYLGISEEEWMRECNASFKMAVRFVNWRTPGRGEPEARTLDSGRPDHFYHPFGILPDHDNTPLSHYWYKNRHEGRTDEPFDYACFREPPVMDAKKSPKWLDGTDSTRYAWHFDAALVADFLRRFATDKQGVEHIQDEMVRVEQDGRGYVTALHTKSGRVLDADLFVDCSGFRGLLINKALGEPFVDMSDHLMCDSAVATAVPHDDEANGIEPYTSAIAMSSGWAWKIPMLGRFGSGYVYSSRFTSQDEATAEFCELWGLDPAETKFNHVRFRVGRNRRAWVNNVVSIGLSSCFLEPLESTGIYFITAAIYQLAKHFPDRTFNPALVNSFNQEIEVMFDDTRDFIQAHFYYAPRNDSPFWQAQKELKLPENIQRKIEAYKAGLPVNSPIADESTYYGNFEAEFRNFWTNGSYYCIFAGLGLEPDTPLPALAHKPESVAGAQPLFDRVRQEQQRLLDTLPSAYDYLRGLHGK

SEQ ID NO: 85679 - protein, 503 aa, Catenovulum agarivorans
  misc_feature (1)..(503): tr|W7QQQ0|W7QQQ0_9ALTE Tryptophan halogenase OS=Catenov ulum agarivorans DS-2 OX=1328313 GN=DS2_08912 PE=4 SV=1
MKPIKNIVILGGGTAGWLTAAVIAAHHKLNTHSNIQLTLVESSDIPTVGVGEGTWPTMKNTLQAIGINEHEFLKTCQATFKQGGKFVGWETGNDFYHHPFTVPLGYERIDAAPYLDDVRQFADLTNYQQAVCEAGLGPKAPTDAEYTAKLNYAYHLDAGAFADMLKKHCREKLGVNHIVNTVESVTQNIQGGIQSMLLTDGQVIDADLFIDCSGAPALLIGKALGVKKHSTKDILLNDSALAIQLPYANETSPIASMTIATAQTVGWVWDIGLQKRRGVGYVYASDYIEEQNAYDVLTQYAEKTHSKADIASLNIKKIGFDPGYRKQIWQHNCVAVGMAAGFVEPLEATAIMLVEQSAKYIAENLPVDEATMQVVSKRFNEKMQYRWQRIIDFLKLHYLLTKRPEAYWQAQANFATCPQSLKDDLLIWQSRGPQAADFDSSIELFPAASYQYVLYGMGFKPNYQQHAHLYKMAEQADAILTRNQSVKESLLNSLPTNREYFLN

SEQ ID NO: 85680 - protein, 508 aa, Enhygromyxa salina
  misc_feature (1)..(508): tr|A0A0C1Z5J5|A0A0C1Z5J5_9DELT Putative tryptophan halo genase OS=Enhygromyxa salina OX=215803 GN=DB30_00941 PE =4 SV=1
MIVGGGTAGWLSAAYLNRALGSSVRITVVESASVSRVGVGEATVPTMVSTLAFLGIDERVFMRRCNATFKAAIKYVNWAHGGRGDRADEFYHPFYDRPELLARPFGDMHFPFVGEGFSSADVWAAQGSDRDPRFDRVSSAIPAVSDALAFSPERLPGSQTLQYAYHMDAMLFADMLAEVAQQRGVERRVDHVRGVELDERGFVRSLATESGAALTADLFIDCSGFRGLLINGALQEPFSSDAKYLACDAAVALPAASVPARDGILPYTTATALSAGWSWRVPLFQRFGCGYVYSSDHASPSEAEQELRDLLGPAAGQDAAHLRMRVGRCRRSWVNNCVAIGLSSCFLEPLESTAIFMVEYQLAQLVNLFPSRRFAPARIHRYNETLNDMYDHLRDFIVMHYCTTSRGDTAFWRRIRDDMPIPDSLATILDEYRVGVLPQDRLRFRLFRSRSYTAILSGMGVYPDYGPPILGHAPPAAGDALLADIAKRTAALLASLPAHYDYVRGLHE

SEQ ID NO: 85681 - protein, 493 aa, Catenovulum agarivorans
  misc_feature (1)..(493): tr|W7QF20|W7QF20_9ALTE Tryptophan halogenase OS=Catenov ulum agarivorans DS-2 OX=1328313 GN=DS2_03260 PE=4 SV=1
MNKVTKVVIAGGGTAGWMAAAALTKLISNLEVTLIESEEIGTVGVGEATIPTLVFYHRLLKINEAEFMKAVNATFKLGISFENWRDVNEDYIHAFGVTGRDCWAAGFQHFWKKGREKGFASDFGDYCIEQVAAKRNRFAQLPKNGINYAYHMDASLYAKFLRGIAEQHGIKRIEGKIGKVNVCSENGFIQSLEMENGQVIEGDLFLDCTGQRGLLIEQTLHAGFEDWSHWLPCDSAIAIQTTAVEKPRAYTRSIAHPFGWQWRIPLQNRVGNGIVYSSKYVSDEEAKQTLLNNIEGEALTEPRVIKFRTGTRRKHWHKNCVAVGLSSGFLEPLESTSIHLIQQAIVRLLRIFPYDGVKQCDIDEFNQQTKVDVEAIRDFIIMHYKVTNRDDADFWHYCRNMQVPETLAHRLELFEQTGKVFRKNNELFDDSWQQVMIGQGLIPQHYHPIVDNMPDEELKRFLKSIKDGIDNTVNQLPEHWQFIQQFCPSPLAN

SEQ ID NO: 85682 - protein, 507 aa, Shewanella amazonensis
  misc_feature (1)..(507): tr|A1S440|A1S440_SHEAM Tryptophan halogenase OS=Shewane lla amazonensis (strain ATCC BAA-1098 / SB2B) OX=326297 GN=Sama_0939 PE=4 SV=1
MKITKIAILGGGTAGWLAANHLGAELCADKEVEITLIESPEIPTIGVGEGTVPYIMKGLKRFGISESELLANCDTTFKQGIKFVNWLDPERHGDNHYYHPFDSPYPGGMDISHYWLTQKDKRPFDDVGIQARICEKNLAPKRISAPEYQGELAYAYHFNAVKFAALLAKNARERFGVKYLSATVAGATLNDDGAIASLNTKEVGSLAFDFYVDCSGFHSVLLDKVLKVPFVDKGKELLTDSVIVQQVPLKSGEALSPYTKATAHKAGWIWDIPLTTRRGTGFVYCSQYMSDEEAVSTFAQYLGMDVSEISPRKIPMKIGYREKFWAKNCATLGLAQGFVEPLEATSILVTDFSAELLAKNFPRETSDIEVLSPYYNDVITYVWERVIDFIKLHYCLSDREDTGFWAANRDSDTWSETLKSRLAKFALRPPQQSDFLSRFDLFDDKNFLYVLYGMGFSSRIKALDPREIEQSRQLLESNDKLADRAEELLMEHGKWLAGLKAAMARAS

SEQ ID NO: 85683 - protein, 567 aa, Streptomyces kanasensis
  misc_feature (1)..(567): tr|A0A117IWK2|A0A117IWK2_9ACTN Tryptophan halogenase OS =Streptomyces kanasensis OX=936756 GN=ATE80_09960 PE=4 SV=1
MRQGGLSVAVFEKEEFPREHIGESFAHPLIPVLEESGALEKVLASDCWVKKFGGIFQWRGEDPHVAFFDHDNTVRDGAHRWAVHANRSEFDAILLDHARDCGAEVFEGVSVSDCSPPADGTGQEVTLKDGRTVRAGYFVDASGRRNSVVTKKKREWLSGYRNIAIWQHYLGGKPTQSLEGDWNIFREHDMSPIGCFAFRDGWCWYIPVPKIIDGERVVTHSIGIVTDPGILKQPGTDFTDAEVFLRTIKEVPKLKELIGDIRPVGDKMLTATNYSMINDRFADFDGRWILLGDASYFVDPLFSSGVAFATNQARAAAALIRHSSGSQMSEEELRGLWEDYDTEWHGMASSFALSIDQWYHAIGKDNPESVYWNSRGTEGPAGPSHEKTFQALLNTAFTPDLLQVLAQGEGLAGLDVDGPFMTAFAKANKLELTADTKVSLKEGVAVLQGPALDIPGFKAAIPPNPDLVPAEEQQAIRAYWEDPVRNGHLVESPLDRPLDCHRFHIPGDPEAPQVRGLDERDGAADLWARLRGGPVLWSELVQDLHEGQERLLKRLLHAGMLELGNHA

SEQ ID NO: 85684 - protein, 614 aa, Hapalosiphonaceae cyanobacterium
  misc_feature (1)..(614): tr|A0A328I4T6|A0A328I4T6_9CYAN Tryptophan halogenase OS =Hapalosiphonaceae cyanobacterium JJU2 OX=2109628 GN=C6 Y22_24175 PE=4 SV=1
MYAAQSLKYDVVILGTSLAGLSQARHLMLNIPNIKVALVDLPAQELDNEPAINDSTIEIADLFFCKELGLHDYLIENHILRSTLSFHWPKRPDQTTTLDDYYHIWCNRQLSIASYQINRTKFEQDLLLMNEAMGATVYKGSVVDVELTEGDAVNTVKIQVADQQIALKADHVIDGAGRQFIIGRKTDNLLLGPQNLCGLNNGTAWLRVKNVNRTIFDDGYNPNETSTSRYYSTNHYFGYGHWSWMTPTDIPSRELSVGIVHYNEVLPAQGIDTQEKFVAFMQANHNLVYQLIESGEIIDFHYSPRIAYKSKKLFSEDNWYVIGNSASFFGGFYCIETTLLAFAVESVTEIIRAKIAGEADVDKKRSAYNEFNLYYHNLINHVYFDHAKQLGHASIMSWRIYLDWMWWFSIHVPTYAGKWHLNPEFTDMYLKLSYKNIGGFWIDLFKEFQQLVNQGTNIGLMDLYRADQLLGGYHTPKYFDNFLENTKFEPLRCNVFAGVKVNFFNAAIWYALFQWKSFGLAGCLNPRHLYHFFRLLSVSGQWAFLELIYRFQLKKGLSDNSSIEKMRQEFKNYQYRPELQPWISEESTQEKQLSQGELNSSLDQAKICATSAKI

SEQ ID NO: 85685 - protein, 496 aa, Catenovulum agarivorans
  misc_feature (1)..(496): tr|W7QAX8|W7QAX8_9ALTE Tryptophan halogenase OS=Catenov ulum agarivorans DS-2 OX=1328313 GN=DS2_14119 PE=4 SV=1
MTNQVKKVVVLGGGTSGWMSAALIKKVLGDVVDVELVESESIGIVGVGEATIPPIQHVNETLGIDEAEFIRETKATIKLAIKFENWRVKGESYYHTFSAPGRSLPFCHFHHLWTRANQLGIDDNLWAHDINFHAAEAGRFAKLQTQDPLFDLKYAYHFDSGLYGQYLRKISERLGVKRTEGLVDQVNLNVQTGDVESLKLKNGHLVTGDLFIDCSGFRGVLINQKLGTGFEDWSHWLPCDRAVAMPSERHQHTTPYTRSIAHEAGWQWRIPLQHRNGNGLVYSSRYYSDEQAAELLASNLDTPALDDSRVIKFRTGRTRKQWNRNVIAVGLASGFLEPLESTSIYLVQSAVVRLIKFFPHMGIEDAQRDEYNRQSKLEYDLIRDFIILHYHVTDRVDSQFWRDMQNMEVPKRLVDKIAQFKKSGAITHEELDLFWEPSWLQVMLGQGIKPTDYHPLANQFSTEKLAEMMANMKKAKQAPSLQMPTHDEFLKMFAGV

SEQ ID NO: 85686 - protein, 492 aa, Sphingomonas glacialis
  misc_feature (1)..(492): tr|A0A502G3I6|A0A502G3I6_9SPHN Tryptophan 7-halogenase OS=Sphingomonas glacialis OX=658225 GN=EAH76_02685 PE=4 SV=1
MIASPRRIVVAGGGTAGWMAAAAIARTMGRTAEVTLIESNAIGTIGVGESTIPPLVTYNRLLGIGEADFMRATQATFKLGILFDGWKDGSDRYFHSFGTTGQDHWSAGFQHFWMNGRERGHDAAYDAYCLELVAAMEGKFAHLPDERMNYAYQLDSSLYAQFLRRMAEGDGARRIEGKIARVALDGESGDVAALHLESGGVVEGDLFLDCTGFRALLIEQALHAGFDDWSHWLPCDSAIAVQTENVRPPVPYTRAMAHDAGWQWRIPLQHRTGNGIVYCSRYLDRDTALERLLGNVEGTVLTEPNNIRFVTGARRRQWHRNVVAIGLSGGFMEPLESTSIHLIQRAILRLIRMMPGGEISPRDVAEFNDQQFADMEQIRDFLILHYKATNRRDSPFWRQCAAMEVPESLAQKIALFRETGRVFRRNEELFAENSWVQVMLGQGIEPAAYHPIADKLRDEELAKFLATLRDNVARTVAGLPAHADYVAQYCGG

SEQ ID NO: 85687 - protein, 507 aa, Sphingomonas glacialis
  misc_feature (1)..(507): tr|A0A502FZ10|A0A502FZ10_9SPHN Tryptophan 7-halogenase OS=Sphingomonas glacialis OX=658225 GN=EAH76_05410 PE=4 SV=1
MANLSEPTGPIRIVIVGGGTAGWMAAATFARFLETGFEIDLVESDEIGTVGVGEATIPQIRLFNDALGLDEDAFLRATQGTYKLGIEFVDWLRPGHRYMHAFGAVGRDVGLLPFHQYWLRAKALGSAKDLAAYSLNNQAALADRMQRGPARTARVLPDMPSAFHFDAGLYARHLRRYSETRGINRIEGKVVRVDQDETGDISTLVLEDGTTLAADLFIDCTGFRGLLIEQTLKTGYDDWTHWLPADRAIAVPSARSTAFTPYTRSTAKAAGWQWRIPLQHRTGNGLVYSSQHLSDDEATATLLAGLDGAPLADPRPIQFRTGKRRKMWNRNVVAIGLSGGFMEPLESTSIHLIQSAIARLLKLLPGRAIPQADRDEFNRQSDFEYERIRDFIILHYHANDRTEPFWRMCREAALPETLAVKIDLWRGNGHITREHEELFTEVGWLQVFAGQGVMPAGHHPLADAIPAADLAEFLDTIDQLNAREVAQMPSHADFIARHCAAPTPVTA

SEQ ID NO: 85688 - protein, 503 aa, Sphingomonas sp.
  misc_feature (1)..(503): tr|A0A4R2TD68|A0A4R2TD68_9SPHN Tryptophan halogenase OS =Sphingomonas sp. PP-F2F-A104-K0414 OX=2135661 GN=C8J46 _104516 PE=4 SV=1
MTNTPVRRVVIAGGGTAGWMAAAAIARTMGSTIELTLVESDAIGTVGVGESTIPPMITFNRLLGINEAEFMRETQATFKLGILFDDWKDRGESYFHSFGITGKDHWSAGFQHFWLHGLTKGHDQPYDDYCLELRAALQGKFAHLPDDRMNYAYQLDSTRYAKYLRGMAEADGTRRLEGRIAQVDLNGESGDIAALVLESGVRIEGDLFLDCTGFRALLIEGALHAGFDDWTHYLPCDSAIAIQTESVRPALPYTRAMAHDAGWQWRIPLQHRTGNGLVYCSRYLDRDAALDRLLGNIEGKTITEPNMIRFVTGARRQQWHRNCIAIGLSGGFMEPLESTSIHLIQRAVLRLLRLFPSGAVSPRDVAEFNDQQHTDMLQIRDFLILHYKATNRRDSAFWRQCAAMPIPASLEQKIELFRETGRVFRKNEELFAENSWVQVMLGQGIVPRSYHPIATKLRDEELARLLGGLRDGTNATVAGLPEHAAYVARYCGNAPTPSPVLTA

SEQ ID NO: 85689 - protein, 506 aa, Amphiplicatus metriothermophilus
  misc_feature (1)..(506): tr|A0A239PWA8|A0A239PWA8_9PROT Tryptophan halogenase OS =Amphiplicatus metriothermophilus OX=1519374 GN=SAMN062 97382_2266 PE=4 SV=1
MNNTRIRKIVIVGGGTAGWMTAAACAKILRNNYCEIELVESEQIGSVGVGEATIPQIGTYNRTLGIEENEFVRETRATFKLGIEFVDWGAPGERYIHPFGTYGLDMEGVSFHAFFLKAHPDWTARTLEQYSLQAQAARHGKFMRPVNAGNSPLSKIAYAFHFDAGLYAQYLRRYAQARGVARREGKIVDAVQNSQTGYIEAVILEDGCTVEGDLFIDCSGFRGLLIDQKLGAGYIDWSHWLPCDAAVAVPCESAGPPTPFTRSTAREAGWQWRIPLQHRIGNGLVFSRGYIDDDKAAGILLANLDGKPLADPRFLNFTPGRRKLFWIKNCVAIGLAAGFIEPLESTSIHLIQSGVAKLLQMFPDRRFNQADIDRYNRVTAFEFERIRDFIILHYKATQRRRQPFWDYVREMNIPDYLQDKIRLFKSYGRIFRENEELFNDTSWFAVMTGQNIRPNGYDPVADVLSIEETRARLDHIRATIATCAGHMPPHEEFIARHCAFDGFPYR

SEQ ID NO: 85690 - protein, 499 aa, Pseudoalteromonas citrea
  misc_feature (1)..(499): tr|U1KQ66|U1KQ66_9GAMM Tryptophan halogenase OS=Pseudoa lteromonas citrea DSM 8771 OX=1117314 GN=PCIT_08233 PE= 4 SV=1
MAEQRIKNLTIVGGGTAGWLTASLFAKVMGKQLNITLVESDDIATIGVGEATIPPILPFNGALGIDEKAFIKATSATIKLGIQFEGWSKDVPSYMHAFGAIGKDFPFCEFYHHWLAAKSQGDQSNFWDFSLNYQAAKQHKFAKLHTIPNTQLKGLSYAYHFDAQQYAAFLSQHAQTLGVKRVAGTVNSVRVNEKSGFIEQLDLADGQQVSGDLFIDCTGMHGLLIEKTLNCGFEDWSHWLPCDRAIAIQSKPLSDDIAPFTRSIAHTAGWQWEIPLQHRVGNGLVYSSKHMSDEEAQASLLGGISGDTLGEPKRLRFRTGRRLTPWCKNVVAIGLSSGFLEPLESTSIHLIQTAAVRLLKLFPQHDIKQASRDMFNFETQQELEQVRDFVILHYKLNDCADSEFWRLCHAMPIPDSLKRKIALFKETGVIHSEVTDLFSSVAWQQVMLGQGVTPQQQHPLVDSLSAAQREELLSNLKTLIDSTAAALPKHVAFLASHSK

SEQ ID NO: 85691 - protein, 507 aa, Rubrivivax sp.
  misc_feature (1)..(507): tr|A0A437JP56|A0A437JP56_9BURK Tryptophan 7-halogenase OS=Rubrivivax sp. ICH-3 OX=2499835 GN=ENE75_22490 PE=4 SV=1
MIGQLAGDTDTRSPVRRIVIAGGGTAGWMTAAALSKTLGRRLDIRLVESDEIGTVGVGEATIPSLQVFHRLIGVDERDFMAATQATFKLGIRFEGWHDVGKAYFHGFGLTGKDHWTAGFQHFWLKGRQRQLAADYGAYCLEAQAARLGRFAHLPDDGLRYAYHLDATRYAAFLRRFSEALGVQRIEGRIVEVRRCEGTGDIRSLRLDGGAEVEGDLFIDCTGFRALLIGDALGVGYEDWSHWLFNDSAVAVQTAAVDAALPYTRSIAHGAGWQWRIPLQHRVGNGLVYSRRFIDDDQARQTLQAQLRGETLTTPRVIRFQPGQRHEAWRANCVAIGLAGGFLEPLESTSIYLIQRAIIRLLQMFPADGIQAPDATEFNRQMRADFEHVRDFIVLHFKVTERRDTPYWRACADMSVPPSLQHRIDLFRQTARIFRGDGELFSENSWAQVMLGQGLVPAQHHPVTELMGDAELGRFLGSLQSAAEQAAQQLPPHDDYVRRYCGAPAASA

SEQ ID NO: 85692 - protein, 504 aa, Novosphingobium sediminis
  misc_feature (1)..(504): tr|A0A512AN66|A0A512AN66_9SPHN Tryptophan halogenase OS =Novosphingobium sediminis OX=707214 GN=NSE01_29530 PE= 4 SV=1
MNQSDRRIRSVLVVGGGSAGWMTAAMLATMLRQDCRITLVESDEIGIVGVGEATIPPIRLFNETLGISEADFIRETRGTFKLGIEFVDWGQVGSRYFHPFGPHGRNFDMVPLHQYWLRTRSEPGAFPLEDLSMAWHIARSGRMARPVPDQRSLLSTFDYAYHFDASLYAAFLRRHAEARGVTRVEGKIGDVSLNGETGFVESVTLEDGRKLEADLFIDCSGLRALLIEGALKTGFEDWSHWLPCDRAVAMPCAQAGQPTPYTRSTAREAGWQWRIPLQHRIGNGYVYSSQFMADDKAAELLASRLDGEALGDPRFVRFRTGRRKQHWNRNVIAVGLSSGFLEPLESTSIHLIQANISKLIGLFPDRDFDPATIDEFNRIAHAETDRIRDFIILHYKLTQRQDHELWRYVSAMDVPETLALKLEHFRRHGRLIAREMDLFAPASWLAVHIGQHNYPEGLDPLIEFRGIDARDYLAKLRAAMAAEAARLPSHESFIAGLTGAAAAA

SEQ ID NO: 85693 - protein, 513 aa, Sphingomonas glacialis
  misc_feature (1)..(513): tr|A0A502FQ95|A0A502FQ95_9SPHN Tryptophan 7-halogenase OS=Sphingomonas glacialis OX=658225 GN=EAH76_16355 PE=4 SV=1
MQSIQNIVIVGGGTAGWLTAGIIAARHQGRMPAGFTVTLVESPNTPIIGVGEGTWPTLRATLSKIGVSESDFFRECNASFKQGARFARWTTGEPDEGYYHPLMLPQGFARVNLAEHWLAGGDGQSFCDTVSPQGRLCDDGLAPKTIATPEFEAVANYAYHLDAGKFAGFLQRHCCEKLGVHHVLADVQHATQAENGDILSVVTEQAGEIPGDLFVDCTGFAALLIGKTLGVPFKSCSDTLFCDTALAVQIPYADPEDPIASHTISTAQSSGWIWDIGLPTRRGVGHVFSSSHISDDAAEQELRAYLGPAGRDLPVRKLAIRAGHRETFWKNNCVAVGLAAGFLEPLEASAIVLIELSAKLIAEQMPVCREVMDILAARFNATTHYRWGRIIDFLKLHYVLTKRTDSDFWRDNVRAESIPDRLRDLLTLWKYQPPWFHDEFDRVEEVFPAASYQYVLYGMGFQTEVARDAIAGDTRLAEQARREAASQTERLRAGLPRHRDLIRKIVERGLPAI

SEQ ID NO: 85694 - protein, 507 aa, Sphingomonas sp.
  misc_feature (1)..(507): tr|A0A4R2T7M7|A0A4R2T7M7_9SPHN Tryptophan halogenase OS =Sphingomonas sp. PP-F2F-A104-K0414 OX=2135661 GN=C8J46 _105328 PE=4 SV=1
MSSNPSPDRSETARGMTVVIVGGGTAGWMAAVAFGRLLVPAGGRVTLVESDTIATVGVGEATIPPIRTFHAMLGIDEDAFLAATGGSYKLGIRFEGWSHPTESYVHPFGQIGTEIAGLSFAAQWLRARQAGEAEDLGQYSLEARAAETGRFSKPIANGDSPLSRIGYAYHFDAARYADFLRKQAETHGVVRCEGMVVRVEQGPAGIAAVHLADGTRIAGDLFIDCSGFRALLIEGALAAGWEDWSSWLPCDRAVAVPSSADAAPLPLTRAIAQPAGWRWRIPLRHRTGNGHVFSSRYMSEDEATACLLDRIEGEALADPRVIRFATGHRRRFWSGNCVALGLAAGFMEPLESTSIHLVQSGLQHLLRMLPGTGVASSVVIERYNRVMTAEFVRIRDFLVAHYHLNARPEHFWRDRAAAPIPEGLAEKLAMFRDGGRIFREPDELFNETSWLALLIGQNAVVDGHDPLCAALPIARAAHRIAQIEQVVTASLAHMPPHADALARLERG

SEQ ID NO: 85695 - protein, 507 aa, Rubrivivax sp.
  misc_feature (1)..(507): tr|A0A3S2TP12|A0A3S2TP12_9BURK Tryptophan 7-halogenase OS=Rubrivivax sp. ICH-3 OX=2499835 GN=ENE75_20355 PE=4 SV=1
MDSDRRLRRIVVVGGGSAGWMSAAALTRAVGAACEIMLIESEQIGTVGVGEATIPPIRLFNQLIGLDEAEFLRRTQGSIKLGIEFVGWGRQGHRYFHPFGPHGLGFDMVPLHQWWLAAQAAGVPGLPPLHEWSMAWALAQRQRVTRPVADPRNVLSSFDYAYHFDAGLYARYLREVCEARGVQRLEGRIVHVALRAGDGFVEHVRLDDGREVAGDLFLDCSGFRGLLIEEALHTGYEDWRHWLPCDRAMAVPCASSADFTPYTRSTAQEAGWQWRIPLQHRTGNGYVYCSEHLDDTRAAELLLSRLDGAALADPRPLRFVTGRRRQFWQRNVVAIGLASGFMEPLESTSLHLVQSALSRLLALFPDRDMDPWTVAEYNRLGIEEFERIRDFLILHYKLTERDDTPLWRHCAAMPVPDSLQYRIDQFRARGRLVSPGPELFGPASWLAVQVGQFNRPERVDGLLPLRGVDGMAMLRRQHEAMHGTAQAQPGHRAFLQRIGAAAAPGPV

SEQ ID NO: 85696 - protein, 508 aa, Novosphingobium sediminis
  misc_feature (1)..(508): tr|A0A512AFS1|A0A512AFS1_9SPHN Tryptophan halogenase OS =Novosphingobium sediminis OX=707214 GN=NSE01_03880 PE= 4 SV=1
MSNAVQHIVIVGGGTAGWLSACLLAARLPGKRITLVEAPDIPTIGVGEGTWPTMRETLATIGIPEAEFLEQCDAAFKQGSRFDGWRDGSAEDSYLHPFSAPPAAEMRELAAAWQAGGKQGPFAAAITPQHAICAANLAPRQRAMPDYAGALNYGYHLDAGKFAALLMRHGVGRLGVTRIAAHVIGVSRAANGDIAALMLRDGEALEGDLFLDCSGQAAILIAGECGAGWIDRSDVSFNDRALAVQVPVEPGSPIAAQTIGTAHEAGWLWDIGLPTRRGIGCVYASRFLSDERAEEVLRGYVAAKVPGADPASLTPRKLAFKTGHRDRFWIGNCLAVGLSAGFIEPLEASAIVLIELSLKALAENFPASRASMDIHAGRFNELFRYRWDRVVEFLKLHYVPSQRTESYWLAQRSPETIPQRLAECLVLWREQPPSAWDFPRIDEMFPAASQQYVLHGMGIPVPLHGAVPSPARLAEITVKSRALAAALPTTRDYLDRLAAQSPAARIPA

SEQ ID NO: 85697 - protein, 568 aa, Pseudoalteromonas citrea
  misc_feature (1)..(568): tr|U1JIT5|U1JIT5_9GAMM Tryptophan halogenase OS=Pseudoa lteromonas citrea DSM 8771 OX=1117314 GN=PCIT_19459 PE= 4 SV=1
MYDKARNAATPILVKLRLKSAVESMVENMGHNTTAKTSGDSASDDSTSENSASKNSASNSTVTRIVIIGGGSAGWLTAGVIAAHHGEQVHVTLIESANIKTIGVGEGTWPTMRDTLQKIGITETDFMRSCDASFKQGSQFINWGSSQMPDNYYHPFSLPAGYIQGHSAHVPRSSDLSFAHMLCPQATWCDAKLAPKLGSDKEFTGQGNYGYHLDADKFAKLLKKHCTEQLHVAHIVDEVIGVIGQCTDNIEGVSTTTHANVMGDLFIDCSGGAALLIDKHYKVPWLSQQQVLKNDSAVAVQVPHKSSECDINSCTLSTAQTEGWIWDIALPTRRGIGYTFASEFTSEHIAKAALLNYIKKQGLSKPDAEAIRTIKFNPGYRQTLWYKNCVAVGMSAGFLEPLEASALVMIELSAAYITENLPQNSIHMETVSARFNREFSHHWQSAVAFLKLHYVLSNRADSEYWQIMRSQGIPQNLSELLALWRYQVPKHQDLTHSNDIFSVASYQYILYGMGFDTAITQSVLPTHSEALFKDIQLSVNRFAEHGKQTLPTNRALLLNIKNHGIPKI

SEQ ID NO: 85698 - protein, 193 aa, Gammaproteobacteria bacterium
  misc_feature (1)..(193): tr|A0A1J5ML15|A0A1J5ML15_9GAMM Tryptophan halogenase (F ragment) OS=Gammaproteobacteria bacterium MedPE OX=1860 093 GN=BM565_11000 PE=4 SV=1
MPYDKYGIFYGVYMDKTIKNIVIIGGGSAGWLTAGILAKEHNERVNITLIESPHVATIGVGEGTWPSMRNTLERIGIKESDFLTQCDASFKQGSQFIDWVDKSKHDKYYHPFMTPDGYGHIDLHAVWHSADSRRTFADTINHQSAICQHGLAPKQASTPQYAAVTNYGYHLDATKFSNMLQAHCVTYLKVNHI

SEQ ID NO: 85699 - protein, 506 aa, Rubrivivax sp.
  misc_feature (1)..(506): tr|A0A437JVZ8|A0A437JVZ8_9BURK Tryptophan 7-halogenase OS=Rubrivivax sp. ICH-3 OX=2499835 GN=ENE75_11910 PE=4 SV=1
MNPNTQAPLQRVVIAGGGTAGWMTAAALSKVLRGRIAVTLVESEEIGTVGVGEATIPMIQLFNRVLEIDEDEFIRETRGSFKLGIEFVNWGRLGARYMHAFGRFGQDLWTVPFYQYWLKQHLAGDAPPLGDFAITHRAAYRNRFMRPPGDVQNSPLNDIAYAYHFDAGLYAAYLRRQAEARGVVREEGRIAEVAVDPGRGHVTALTLTDGRRIEGDLFIDCTGFRALLIEQTLKAGWEDWTHWLPCDRAIAVPCSSASPFTPYTRSTAHRAGWQWRIPLQHRTGNGHVFCSAHVSEDEATAVLLANLDGEALAEPRTLRFATGMRRHCWQGNVVAIGLSSGFLEPLESTSIHLIQTAIARLIDFFPAQRFSAVDIDEYNRLSRFEYERIRDFIILHYHLNERTDSPFWTACREMAVPETLQAKLMLFRTHGRILRENNELFSEVAWLQVMLGQGLVPEGYHPLVDSLDGAEVARYLQEVHALIGRCAEAMPDHAQFIGQHCRAPAN

SEQ ID NO: 85700 - protein, 408 aa, Dokdonella koreensis
  misc_feature (1)..(408): tr|A0A160DXD6|A0A160DXD6_9GAMM Tryptophan halogenase OS =Dokdonella koreensis DS-123 OX=1300342 GN=I596_3389 PE =4 SV=1
MQTETTQILIVGAGPAGSVAAGMLRKQGRQVLVLEKEQFPRFSIGESLLPQSMQYIEEAGFLRDVVEAGFQYKNGAAFVRGARSTAFDFRDKFSPGWGTTYQVQRADFDHVLAKAAEKAGAEVRYRHQVVAVHVDGDQPTVEVVGPDGAMYQVRARFLLDASGFGRILPRLLNLETPSDFPVRGAYFTHVEDHIPSGTFDRNKILVSVHPEHVDVWFWTIPFSNGRCSQGVVARTDFLERYAGSETDRLRAIIAETPTLAGLLKDAVWDTPARKLVGYAANVKSLWGKGYALLGNAGEFLDPVFSSGVTIAFKSASLASAAIAREFDGERVDWQRDYADPLKSGVDAFRAFVESWYAGGFQDVIFHPNQSAEVRRMISAILAGYAWDRSNPYVAEPRRLKTLEQLCAA

SEQ ID NO: 85701 - protein, 503 aa, Novosphingobium sediminis
  misc_feature (1)..(503): tr|A0A512AFA0|A0A512AFA0_9SPHN Tryptophan halogenase OS =Novosphingobium sediminis OX=707214 GN=NSE01_02170 PE= 4 SV=1
MAAARRFVILGGGTAGWMAAALIAHRCRELAVSVTLVESPEIGIIGVGEGSTPQLKVFFDELGIAEREWMPACHATYKTGIRFAGWSDAPGFESYFHPFQSALDGHTAPAFYFHTRARRTGRDVVAHPDRFFLAARLAEARLGPVPGENFPFDLGYGYHFDATLVGQFLAAHATEKLGVHHVPRRVSGTRRDAAGGIAALVLEGGEEIAGDFFIDASGFRASLIGEALGEPFESFAGNLFNNAAVALPGARDAGATSCETVSTALSSGWAWRIPLTDRTGNGYVYSTDFLSPDVAETELRRHLGLLDADIPARHLSMRVGQVRRSWVGNCLAIGLAQGFIEPLEATALHIVHATLSGWLEALLADGFGPSHRDQFNAAIHARYEGIRDYIVCHYRMNRRDGEYWRANAANDHLSDNLKSLMTCWFRGGELDEEVARLGIDRYYAPLSWHCLFAGYGQFPDAARLRPPEADLPLADMAKIDRFIAGCALNFPAHDDLLARLEEA

SEQ ID NO: 85702 - protein, 519 aa, Amphiplicatus metriothermophilus
  misc_feature (1)..(519): tr|A0A239PR14|A0A239PR14_9PROT Tryptophan halogenase OS =Amphiplicatus metriothermophilus OX=1519374 GN=SAMN062 97382_1402 PE=4 SV=1
MTDEVVKSVMIVGGGAAGWLTAAVIAAEHCAHSEEGLEVTVVESPNIPIIGVGEGTWPSIRDTLRRIGIRETEFIRRCNASFKQGTRFDGWRDGSSGDSYFHPFDPPPGPDEVDMLALWRAAPAGAPFAQAIGCQAALCLAGKAPKQKTTPEYAAVVNYAYHLDAPAFANLLREHCVRRLGVRVVPDDVVGVETDEAGFVRTLNTRRHGALQSDLYIDCTGSRALLIGDALGVKAKDVSHILFNDRALALHVPYMDENAPIASQTTGTAMGAGWIWDIALQSRRGVGYVYASGCESEEDARAELASYLRRVSPPSGANAEDARLIRFSSAYRETPWVRNVVAVGMAQGFVEPLEASAIVMVELSARMISDTLPARRTMMQRAAERFNARFAYRWERIVDFLKLHYALSRRAEDYWRAHAERETWPARLAGLLEQWRFDPPSREDFTDALEIFPAASYAFVLYGMGFETARRPLRRRKDDPRRVARHLSEIAARGEKFLGGLPSNRELIDHALTNGLMRV

SEQ ID NO: 85703 - protein, 496 aa, Amphiplicatus metriothermophilus
  misc_feature (1)..(496): tr|A0A239PWU9|A0A239PWU9_9PROT Tryptophan halogenase OS =Amphiplicatus metriothermophilus OX=1519374 GN=SAMN062 97382_2215 PE=4 SV=1
MEGQAVKRVVIAGGGTAGWVAAAGLVSQLGPLLDIALVESEDIGTVGVGEATIPTFRGYHGLLGVDEREFMRATQATFKLGIAFENWARRGDRYIHSFGRIGKSTWMGDFHHYWLQAKAEGYGGAIGEYCFEHQAAEANRFFASEKSPINYAYHLDAGLYARFLRAFSEPKGVRRIEGKIVGVDQDGESGFIRALIMESGERIEGDLFIDCTGFRGLLIEQTLKAGYEDWRRWLATDSALAVQTASTGDIPPYTRAIARQAGWQWRIPLRHRVGNGLVYCSEHLADEDAHAELLGHLEGALLTEPKLIRYRTGRRRKVWEKNCIALGLAGGFVEPLESTSIHLIMIGVTRLIQLFPFGGVNDALAKRYNDQARNELEKIRDFIILHYKLTERDDAPFWRRCREMAIPDSLAQRIALFRENAFAWQDPDELFRVDSWVQVMLGQRLEPRGRHHMGRLLEGERLRRALDSLRRNIADAVAKLPSHQAFLESYCAPAGD

SEQ ID NO: 85704 - protein, 508 aa, Xanthomonadales bacterium
  misc_feature (1)..(508): tr|A0A259R157|A0A259R157_9GAMM Tryptophan halogenase OS =Xanthomonadales bacterium 14-68-21 OX=1970612 GN=B7X39 _09990 PE=4 SV=1
MSDSRIRNIVIVGGGTAGWMAAAAFAKVLGPDIAIRLVESEQIGTVGVGEATVPHLKLFNNLLGIDEIEFVRRVQGTFKLGIQFNDWGQLGESYIHGFGELGTLLGLLPFHQYWIRAAQLGLAGDLGDYSLNTLAAPRGRFMAAASDAPANSPLANIAYAYHFDSGLYAKLLREYAEARGVRRTEGRIAQVRQRPEDGFVESVVLESGETVAGELFIDCSGFRGLLIEQTLHAGYDDWTHWLPCDRALAVGCETVGPPTPYTRSTARPAGWQWRIPLQHRTGNGYVYASAHVSDDEAAATLLAHLDGRPLGDPRPLRFTTGLRRKVWDRNVVALGLASGFMEPLESTSIFLIQSGISRLLNLFPRQGFSPVLTERYNAQTRFECERIRDFLILHYHATQRTDTPFWDQCRTMDIPASLKDNIALFRDSGRFFREGEEMFALVSWVQVMIGQGIVPTGYHPLVDQLSPRELQAFMQHVQRVIADCVQAMPPHEGFIARYCTSPGTPMPA

SEQ ID NO: 85705 - protein, 507 aa, Duganella sp.
  misc_feature (1)..(507): tr|A0A3E1RLX4|A0A3E1RLX4_9BURK Tryptophan 7-halogenase OS=Duganella sp. BJB475 OX=2233914 GN=D0T23_23640 PE=4 SV=1
MVRRIVIVGGGSAGWLTAGLIAADHQGSSLHVTLIESPDIAPIGVGEGTWPSMRDTLRRIGVSEADFFRECDASFKQGSRFNCWVNGSDHDYYFHPFVLPQGYGEVNLPEQWQAQHPNIPFADLVSYQPHLCVNGRAPKQVVTPEFSSVANYGYHLDAGKFGAFLRKHCLEKLGVHYVPDNVVGIANHDNGDIAALQTQTHGALEGDLFIDCTGMQSLLLGKHYEVPFLSQKHVLYNDSALAVQIPYPDDNYPIASQTSSTAQSAGWIWDIGLPTRRGIGHVYSSAHIGDEQAEAELRRYIAATGGPQDIPQPRKLSFNPGYRERFWHRNCVAIGLSAGFIEPLEASALALVEMSAAMVSDELPATRAAMDIVAQRFNDAFSYRWERVIDFLKLHYVLSQRRDSDYWRDNTAAIPDRLNDLLTLWRHRAPSRNDFNRIEEVFPSASYQYVLYGMGFRSEFMNPQPRQAALADGYFREAAALTHKMLGALPDNRELINHIKRHGLQKI

SEQ ID NO: 85706 - protein, 530 aa, Sphingomonas aerolata
  misc_feature (1)..(530): tr|A0A2T4YP31|A0A2T4YP31_9SPHN Tryptophan halogenase OS =Sphingomonas aerolata OX=185951 GN=C8J24_3372 PE=4 SV= 1
MTGRTPGPASARGPLRSIVIVGGGTAGWMAATLLARRLERQPVKITVIDSSAIGTVGVGEATVPGIRDFFREIGVTEQEVMAATQGTVKLGIEFVDWKREGERFFHPFGLYGMRSRGVAFHHYWRKMNVAGHASPLADFCLATALAERNLFMPPTDRPVHDLLFFDWAVHFDAGLFARFLAQKAIAWGVEHIDATITDVRVDGRTGFISGVDTSCGKAIDGDLFVDCSGFRSLLLGGALGVPYEDWTNLLPCDRAVAMPCTRSGPLTPYTRSTALEAGWQWRIPLQHRVGNGYVYSSRHISDDEAVATLKRRLEGEGLGEPNMIRFRTGRRTAFWQGNCVALGLAAGFMEPLESTSITLIQTGIEKLLALLPDRGFDPALAEEYNRTTGLEYERIRDFLLLHYFANVRRGEPMWDRCRDTALPEALAHKLRLFKARGHLVRYEWESFQDPSWLSMYAGFGIDAAAHDPGADHFSIPALESAFARMKESIAQAVALAQPHDAFLGLSARHPARAQAAEPGGAPDRLMMPAR

SEQ ID NO: 85707 - protein, 523 aa, Duganella sp.
  misc_feature (1)..(523): tr|A0A3E1RNW5|A0A3E1RNW5_9BURK Tryptophan 7-halogenase OS=Duganella sp. BJB475 OX=2233914 GN=D0T23_20565 PE=4 SV=1
MKTMPAPVKNVLIVGGGTAGWLTAAFLARTLGAGADEDSVRITLVESKEIGIIGVGEGTFPSIRGTLAAIGIDEARFIRECHATFKQGIKFTDWVRPPGAPGNDHYFHPFSLPSQRPGGPELLPYWLQGAAAPGTGFAAAATMQKRVADAAHGPKRFNDADFMGPLNYAYHFDAGKFATLLSTHAQSLGVHHVQATVDRVELDEHGAIGAVHTREAGVLTADLYIDCTGFRAALIGDALGTPFRNINDTLFVDRALAMQVPYETADTPIPSYTIATAHEAGWTWDIGLHQRRGIGYVYSSRHTEDTRAEEVLRQYIGPASDGLNPRQLKLNVGYREQHWVKNCVAVGLSGGFLEPLESSGIGLIETAAYLVSYLFPHNGDLAPVAKVYNEMMKARYERIVDFVKLHYCLTQRRDNAFWTDNTDPASIPESLRDKLSMWSRRAPHRMDFVVDLEMYPPSSWQYVLYGMEYPTAQYANARTLPRFDEARKEFQMIEQMSHRALADLPTHRALIDHFLQRGERKIA

SEQ ID NO: 85708 - protein, 489 aa, Pelomonas sp.
  misc_feature (1)..(489): tr|A0A0Q6SZN9|A0A0Q6SZN9_9BURK Uncharacterized protein OS=Pelomonas sp. Root1217 OX=1736430 GN=ASC95_25235 PE= 4 SV=1
MTSPKHIAIVGGGTAGWMTANLLRHRWATLNVEVTLIESADIATIGVGEGSTPFLRHFFRTLGIEERDWMPACDATFKSSIRFPGWSSVAGYESYVHPFFCEADRQLGNQFFTNACLRRRGQAADANPQDFFLAAELARQRRAPVGTDYAYHFDAGKLGAFLRSHAVGLGVRHVVDTVARVEQHENGDIAALHLRSGARIDADLFVDCSGFKGLLITETLGEPFHTYRDNLFNDRAIAIPTPLVDGEDIPCETVSTALRHGWAWQIPLTTRYGNGYVYSSDFVSDDEAERELREHLGAAAEGASARRLRMRVGCVKRHWRQNCVAIGLSQGFIEPLEATALMLIQLSVEQFIAALESGDFERHHQDTFNHRVSEMFEGVRDYVVAHYQLNTRRDTDYWRTNRANRNISARLASLLDIWDRGGDFEVELERHGAGLMYLRPSWYCLFAGMGRFPAELRATPQAVTAAVARQSLARMVREFRSHRRYLAGE

SEQ ID NO: 85709 - protein, 121 aa, Rubellimicrobium mesophilum
  misc_feature (1)..(121): tr|A0A017HVB6|A0A017HVB6_9RHOB Tryptophan halogenase OS =Rubellimicrobium mesophilum DSM 19309 OX=442562 GN=Rum eso_00400 PE=4 SV=1
MRLHYVSERRDTAYWRDVTASHPPVVTERLEKWSRKFPSREDFEPFPLGLAHVQEQLYVPVLNGLGLLSQDLARAEMARDPKLRQRARETHASLVAEYSRAAEKCLPHRAWLESLHKETVA

SEQ ID NO: 85710 - protein, 514 aa, Pelomonas sp.
  misc_feature (1)..(514): tr|A0A0Q6T3J7|A0A0Q6T3J7_9BURK Tryptophan halogenase OS =Pelomonas sp. Root1217 OX=1736430 GN=ASC95_24805 PE=4 SV=1
MNTSTKPPRRVVIAGGGTAGWMMAALMSKLLGKQLDIKLVESEEIGTVGVGEATIPALHTYHNLLGINEAEFMAATNATFKLGINFEGWKDIGQDYFHSFGTTGNDHWSAGFQHFWLKGRAEGIAKTYTDYNPETVAAFANRFAHVPRNGLNYAYHLDAGRYAKYLRAMSETCGVQRIEGKIAAVLMDSPEGRDGDITALQMQDGTRIDGDLFIDCTGFRSLLLGEALGVGYEDWSHWLPCDSAVAVQTASVREAWPYTRSICHRFGWQWRIPLQNRVGNGLVYSSKELSDADAPEVLKNHVEGELLTTPRVIKFTPGQRHKVWHRNCIAVGLASGFIEPLESTSIHLIQRTAIRLMQLFPTQGVNPADVDEFNAQCERELTHIRDFIVLHYHVTNRSDSALWNHVRTMEVPATLRHRIELFRESARAFRPSDELFAENSWIQVMMGQGITPQSYHPVADLMGPEELSRFLGDIHLKVSRTVAGLPQHQAYVEQLCAPYRNATTAQLAATPLRA

SEQ ID NO: 85711 - protein, 536 aa, Pelomonas sp.
  misc_feature (1)..(536): tr|A0A0Q6TBZ1|A0A0Q6TBZ1_9BURK Tryptophan halogenase OS =Pelomonas sp. Root1217 OX=1736430 GN=ASC95_25355 PE=4 SV=1
MNDQAIRRIVIVGGGSAGWMAAAPLSQVFGTLPGGPANPVGCEIVLIESPEIGTVGVGEATLPSIRYYNDALELDNAEFMRRTQASFKLGIEFKDWGHVGNRFFHGFGGFGPPIVNRSSVAHWLRLDRAGAMPSYEEWSTAAVMAQRNRFVPPEGGPPSAANSYSYAFHFDAGLYAAFLREYAMARGVKREEGTIVDVSLRPGDGFVTAVTLADGRRIEGDLFVDCSGFRALLIEGVMKAGYHDWTHWLPCDSAQAVPCSHASPHAAAAQLLPAEGDGQARGGPSPSRVPPLTPYTTSTARSAGWQWRIPLQHRTGNGHVYCSSYISDEAAGRVLMSNLDGAPQGEPRQLRFKTGMRKRIWEKNVVAVGLSSGFLEPLESTSLSLVIHGISSLVELFPDRKCEPHLVDEYNRRMTRQYESIRDFIILHYKQTQRDDSEFWRYCAAMPIPDTLAHQIETFRRNGRVVILDRDSFGEDSWYSLYLGLGLKPEGLDPLLKQVNEVTLREHFQRLHTAVARTVDGMPDHAAYLDRLVSAS

SEQ ID NO: 85712 - protein, 516 aa, Sphingomonas aerolata
  misc_feature (1)..(516): tr|A0A2T4YTC3|A0A2T4YTC3_9SPHN Tryptophan halogenase OS =Sphingomonas aerolata OX=185951 GN=C8J24_0432 PE=4 SV= 1
MRKRILIVGGGTAGWLTAGYLAKRLGADLAGGVSITLVESKDIGILGVGEGTFPTIRRTLATIGIDEAELIRRCGATFKQGAKFVHWRHAPGQGRTDHYSHPFQVADASDGLDLLPYWLLGHGGAENWDEVSNPQKKAADAMRAPKLATNPDYVGPLNYAFHFDAVALAGLLREHAVRNGVRHLTDTVSEVLLAEDGAIGGVRTERNGMLDADLYIDCTGFRAELIGKAMKVPFRSCRDVLFCNRAIAAQLPYAKPGDPIASYTISTAQESGWIWDIGLDRRRGIGHVYSSDHSDDETAERVLRGYLGAGGDKAEVRHFKFDAGYREVNWVKNCVAVGLSSGFFEPLEATGIAFAEVSAGMIANLFPWGGDYETSARQFNANMLRRYERALDFIKLHYCISERRDTAFWRDNVADTSIPDSLLELLDRWRFRPPNELDIDGQVDIFTDASWQYVLYGMGWKTDISAKAGALRYADDARRAFAEVRRQADYAIRNLPSNRDLVAYAQHHHFGARAAA

SEQ ID NO: 85713 - protein, 529 aa, Sphingomonas aerolata
  misc_feature (1)..(529): tr|A0A2T4YMJ5|A0A2T4YMJ5_9SPHN Tryptophan halogenase OS =Sphingomonas aerolata OX=185951 GN=C8J24_2844 PE=4 SV= 1
MTVSDMQTDGLDMDRAITSIVIVGGGTAGWLAACLIAARADRDAERPLQVTLIESPDVATIGVGEGTWPTMRRTLERIGISETEFLLACDAAFKQGSRFDGWRTGAPDDRYLHPFTTPADAAPRDLASAWSDSGLAFAEALCAQHAVCSQDLAPRQRAMPDYAGTLNYAYHLDAGKFAALLARHATERLGVRHLRDHVVGVDGAADGDITAVRTRASGRIEGDLFLDCTGHAALLIGEHYGVGTIDRGRELFNDRALAVQLPVAADSAIASQTNATAHAAGWIWDIGLPARRGIGCVYSSAHLDDDAAADTLTRYLRATAPDAPLPDFRPLRFQSRHRNRFWHRNCLAIGLSAGFLEPLEASAIVLVELSVDALLDNFPATRRTMDLHAARFNTLFRYRWDRIVEFLKLHYVLSQRDEPYWRDHRDPGSIPPRLAELLQLWADQPPSHADFPMVDEIFPAASYQYVLYGMGFPAPRRTPVRTGTRGAADMLVQQVDRHGRMLAAALPTNRAYLDALRHAMTSATMETRA

SEQ ID NO: 85714 - protein, 508 aa, Duganella sp.
  misc_feature (1)..(508): tr|A0A3E1RN21|A0A3E1RN21_9BURK Tryptophan 7-halogenase OS=Duganella sp. BJB475 OX=2233914 GN=D0T23_23655 PE=4 SV=1
MNPGTRDPNHRRPVHRVVIVGGGTAGWMAAAGIAKVLGKRLDIKLIESDEIGTVGVGEATIPTLMNFHNLLEINEQEFMAETQATFKLGISFEGWRNVKEDYIHSFGITGTDHWTAGFQHFWHKGVERGLAGDYGDYCLELKASLENRFAHLPDNGMNYAYHLDASRYAKYLRRLSEPRGVLRIEGKIVRYTKHEDNGDVRSVVLESGQEIEGDLFIDCTGFRGLLIGDAMQEPMEDWSQWLFCDRAIAVQTESVGDAVPLTRSMAHQAGWQWRIPLQHRVGNGIVYSSRHLDDDAAMQQLMSNIEGKALVTPRVIQFKPCQRKHTWKGNVVAVGLASGFLEPIESTSIHLIQRAVVRLMQTFPTDGISQADIDEYNKQCNDEIEHIRDFIILHYHVNNRTDSQFWIAAREMSIPASLQHRINLFRETGRVFRVPNELFAENSWIQVMLGQGIMPRSHHQTADLMGDAELKHFLGGIKSRVDRIVVQLPTHQAYVERYCGRAESAKAA

SEQ ID NO: 85715 - protein, 494 aa, Pelomonas sp.
  misc_feature (1)..(494): tr|A0A0Q6T2I0|A0A0Q6T2I0_9BURK Uncharacterized protein OS=Pelomonas sp. Root1217 OX=1736430 GN=ASC95_18315 PE= 4 SV=1
MSAMSQKFDRIVVVGGGSAGWMTAAALVTGLKGRAIVEVVESEEIGIVGVGEATFPSIRDYNQLIGIDERDFLRATNGAYKLGARFRDWLEPGKDYFHTFGEFGNLTGAQTLWAQHRRMGQTEPLGLQCLPTVMAMNGRFGLQEDGREEFKYAYHFDAIQYGALLRKLAMQRGARHTQGRIVEVLRRPDGGVAALQLDDGRRIEGDLFVDCSGFRSLLLGGALSEPFVDFSHWLPVDRAWACPCERTGEELTPYTQATALEGGWAWRIPLQNRTGHGHVFSSRFIDEDRAREQLLARLDGKPLVEPRLLRFTTGHHERFWVHNVVAIGLSAGFLEPLESTSIFLIQDGIFRLMSSLTAGRPLDASDPARFNELVMRRFTRVRDFIILHYHLTRRRDSELWRYVAAMELPETLTFRMDLWRRFGVLHEYDEDPFYAPSWLAIYAGMDYWPERHDPVCEEIPGERAGRALRSRQQAIAASVERMPLHHLTLQKMLG

SEQ ID NO: 85716 - protein, 518 aa, Pelomonas sp.
  misc_feature (1)..(518): tr|A0A0Q6TJI2|A0A0Q6TJI2_9BURK Uncharacterized protein OS=Pelomonas sp. Root1217 OX=1736430 GN=ASC95_10720 PE= 4 SV=1
MSDIQSIVIVGGGTAGWLAACFLQRALGAVRQTPLPITLIESPHIAGIGVGEATLPTLRGMMQALGLPEAALFGAADATLNNGVRFHGWRSGGSAADDSYDHPFDAPPPFGGFATTAHWLNLMQRGLTQQPMAQACTVQTTLFDGHQSPKLMDSPDYQAPVSYGYHLDAAKLAMLLQQTALRRGVRHVQGEVAQVQRGAAGIEAVELADGRRFSASFFVDCSGADSLLLQQALGVPWVSYADWLPCDRSVTLPVAYTQADQPLRSHTAITAQDSGWSWEIDLQSRRGTGHVYASRFCSDDAALQRLQQLNAGHRPLAAPHFTSLRIGHAARIWEGNCLALGAAGGFVEPLESTNLYLVEWALQMFVDHVAPSGNSMACRDRLNRLAGDFHEELRDFIVAHYALSQRRDTAFWRACTDEAALPPRLVELLALWDAKVPTATDLDRRLSPFGPSNWSYLLAGLHRLPSQGIGLAAHISAEVSQQALAHVRDIRRAASEQSPTMQDYLRSQRGAAPQATAH

SEQ ID NO: 85717 - protein, 503 aa, Xanthomonadales bacterium
  misc_feature (1)..(503): tr|A0A259QX53|A0A259QX53_9GAMM Tryptophan halogenase OS =Xanthomonadales bacterium 14-68-21 OX=1970612 GN=B7X39 _12515 PE=4 SV=1
MQANPIQRVVIVGGGTAGWMTAALLARAIGPQLSITLVESDEIGTVGVGEATIPQIRHVNAFLGIDEDELMRAVKGTFKLAIQFNDWGRIGDSYLHAFGDIGLPLGLVPFQHYWLRDRHERGGAAPDLWSYSINAQACAQMRFGRVERIGSSPMTGTRYAYHLDAGLYGQYLRRRCDPRQVRRVEGRIVDVRLRADDGFIESVQLASGEIVEGDLFVDCSGFRGLLIEGALKAGYDDWTHWLPCDRAVAVPSARVAPMRPFTQSTARAAGWQWRIPLQHRNGNGHVFCSRFISDDEATATLLANLDGEALAEPRMLRFTTGARRRFWIRNCVALGLASGFMEPLESTSIHMIQSGISRLISLFPDKHCDSALSAEYNRQTRFEYERIRDFLVLHYRATERDDTAFWRHCRSIVMPEGLAERTELFRRSGQVFRHGEELFTEVGWLQVMLGQGIVPQAYHPAADALPPAELEGFLGNMRTLIQRAVATFPEHGQFVATHCRATD

SEQ ID NO: 85718 - protein, 496 aa, Paraglaciecola polaris
  misc_feature (1)..(496): tr|K7A931|K7A931_9ALTE FADH2 O2-dependent halogenase I OS=Paraglaciecola polaris LMG 21857 OX=1129793 GN=prnA PE=4 SV=1
MKNLIKKVVIVGGGTAGWMSAALLQKVVGPSITIELVESEEIGSVGVGEATIPPIRHVNQVLGIDEAEFLRETKATIKLGIQFENWRVQNEHYFHSFGAAGKSFAFCQFHHFWKRGQQLGIDTSLWEYDLNYLCAREGKFAQIKSKDAILELPYAYHFDASLYAVYLRKYCEKLGVKRTEGKVEQISLNKDSGFVESLILQDGGTITGDLFIDCSGFKGLLIQEKLGTGYDDWSHWLPCDRALAVPSERFDKTLPYTRSIAHSAGWQWRIPLQHRNGNGLVYSSSHSTDEQAHATLLSNLDSKALGEPKMLRFKTGRRRKQWDRNVVAIGLSSGFLEPLESTSIHLIQSAIVRLIHLFPHKGIDDSAVKEYNMQSKLEFEQIRDFLILHYHVNERTDSDFWRDMRTMDIPDSLAHKIQLFAQNGKLFREQNDLFLESSWLQVMLGQGIIPKDYHPIANNLPEHKLREMLTNIKNIKHEPLSSLPSHDEFLQQFCKV

SEQ ID NO: 85719 - protein, 507 aa, Pelomonas sp.
  misc_feature (1)..(507): tr|A0A0Q6TKG8|A0A0Q6TKG8_9BURK Tryptophan halogenase OS =Pelomonas sp. Root1217 OX=1736430 GN=ASC95_29595 PE=4 SV=1
MSDPSIRKIVIVGGGTAGWMAAAPLAQRFAQAGQGACEIVLIESPDIGTIGVGEATLPPIRAYNQTLGLDGAEFVKRTQGSFKLGIEFRDWGHVGNRFFHGFGDFGPAIDTRAPWQHWLSLQRQVDGLPSYEDWSTPTVMARRNRFTPPEGGAPSAANAYSFAYHFDAGLYAACLREYAMARGAQRIEGLIVNVELRPDDGFVAAVKLEDGRRIDGDLFIDCSGFRALLIGGAMQSPFEDWSALLPCNSAQAVPSERVEPLTPYTMSTAKAAGWQWRIPLQHRTGNGHVYCSHFISDDEAASTLLAGLDSKALDAPRQLRFTTGRRKQGWVKNVVAIGLASGFLEPLESTSIQLIMDGVGRLIQFFPDQQFKPHLAAEFNRRMALQYESIRDFIVLHYKLTDRRDAELWRYCAAMPIPDTLAHQIELFRSAGRVAILDPDGFAEPSWVSLFFGLGLRPESYDPFVDHIDAQALLQHFVRLRQAITQTVSGMPEHGDYVARHVKAPSA

SEQ ID NO: 85720 - protein, 520 aa, Novosphingobium sp.
  misc_feature (1)..(520): tr|A0A3N9RX80|A0A3N9RX80_9SPHN Tryptophan 7-halogenase OS=Novosphingobium sp. LASN5T OX=2491021 GN=EH199_08715 PE=4 SV=1
MVRAVRDVVIVGGGTAGWLTAAIIAAKHRPRIGHDFSVTLVESPNVPIIGVGEGTWPTLRSTLKSVGISETDFFRQCDAAFKQGALFAKWTTGADDDAYYHPLVLPQRFGQLNLAPHWLAGTLVENEDADETFCDAVCPQGRICDENLAPKTMADAEFEGQANYAYHLDAGKFAPFMQRHCTEKLGVRHVLADMRQVLQDESGDIRAIVTEQAGEIAGDLFVDCTGMRSLLLGETMGVGFKDCNDVLFCDTALAVQVPYPDPDAPIATHTISTAQSAGWIWDIGLPTRRGVGHVYSSRHISREQAEAELRAYIGPAADGLAVRKIDIRSGHRELFWKGNCVAVGLAAGFLEPLEASAIVLIELSAKMIAEQMPPAREVMDIVARRYNEKTLYRWGRIIDFLKLHYVLSQRRDTAFWRDNMDPATIPERLRELLALWRWQPPYLHEEFDRVDEVFPSASYQYVLYGMGFRSEVSARALEPEVRDARRARGQNADITTRMLTALPRHRDLINRIVEYGLQPV

SEQ ID NO: 85721 - protein, 500 aa, Sphingomonas aerolata
  misc_feature (1)..(500): tr|A0A2T4YTT5|A0A2T4YTT5_9SPHN Tryptophan halogenase OS =Sphingomonas aerolata OX=185951 GN=C8J24_0607 PE=4 SV= 1
MTGTLGSVVIVGGGTAGWMAAVAFGRLLGPAGTRVTLVESDDIATIGVGEATIPPIRTFHAMLGIDEDAFLRATGGSYKLGIRFEGWTRPGESYVHPFGQIGTDIAGVPFAAQWLRARQAGAADALGAYSLEARAAQAGRFSRPIANGDSPLSRIGYAYHFDAGRYAVFLRAQAEAHGVIRREGRVDRVERGPAGIAAVHLADGSRVEGDLFLDCTGFRALLIEGALQAGWTDWSQWLPCDRAVAVPSAADAAPLALTRAIAEPAGWRWRIPLQHRTGNGHVFSSRHCSEDEATATLLAGLHGEALADPRVIRFATGHRTRFWSGNCIALGLAAGFMEPLESTSIHLVQSGLQHLLRMLPAGGPPAQAIVDRYNRTMTGEFVRIRDFLVAHYHLNARTEPFWRERAAAPIPDGLAEKLALFRAGGRIFRETDELFNEVSWLAVLTGQDAPVTGHDPICDALPIAIAAKRLAQIERVVSTSLTHMPPHATALAQLATNRML

SEQ ID NO: 85722 - protein, 520 aa, Pelomonas sp.
  misc_feature (1)..(520): tr|A0A0Q6T3T4|A0A0Q6T3T4_9BURK Tryptophan halogenase OS =Pelomonas sp. Root1217 OX=1736430 GN=ASC95_21955 PE=4 SV=1
MSSEVTTAVRRIVVLGGGSAGWLTAATLAAELGGDGPDALQITLIESPDVPSIGVGEGTWPTMRATLHRIGLSEVDLIRECDAAFKQGSRFDGWLHGGDGDRYYHPFTLPHGWGDVELAGAWLQGGREQPFAESVGGQPPVCDAHLAPKQTTTPDFGGVMNYGYHFDAVKLGHLLQRHATTKLGVRHVVDHFTTVRSHENGDIAALTTRGHGDIEGDLFIDCSGLASLLLGQHYGVGLRSEKGVLFNDRALAVQVPHADAQVPLASATVSTAHAEGWTWDIALPTRRGVGLVYSSSHTDDAAAERALLGHLQRKGLSLGDMAPRRLGFSPGYREQFWHRNCVAVGLSAGFIEPLEASALALVELSAAFIRDEMPAGRADMALVAKRFNEAFAYRWSRIIDFLKLHYVLSRRDDADYWREHRAPATQPDSLRELLQLWRHRAPSRNDFYRVEEVFPAASYQYVLYGMQFEPEARALRADRLAAAQACMKDVATITRRLLGGLPRHRDLIQHIREHGMPPAA

SEQ ID NO: 85723 - protein, 510 aa, Pelomonas sp.
  misc_feature (1)..(510): tr|A0A0Q6TG35|A0A0Q6TG35_9BURK Tryptophan halogenase OS =Pelomonas sp. Root1217 OX=1736430 GN=ASC95_09475 PE=4 SV=1
MTSKRRILIVGGGTAGWLTAAYLAKALKLAERSHLEVTVLESPDISSVGVGEGTFPTIRNTLQFLGIDEARFIRETSATLKQGIRFVDWARPPAAGQHQQFFHPFEAPFYTEDLNLVPYWLLQPEAGRPPFAEAMTLQVRVAEAHRAPKRAGEAAYAAPLNYAYHFDAIKLAKLLAERARELGVRHVQGTVTDVSLDATGCIAHLDTVQQERFEAELYIDCTGFRAELIGRAMGSPFKSVRHQLFVDRALACKVPLDAHATMESSTIATAHEAGWLWEIGLNGARGIGCVYSSDHLSDDRAADILRAYCGAGHEDLGMRSIPFTPGYREQQWVKNCVAVGLSAGFLEPLEATGLVLIEAAVGMIAEMLPHSGPIHAPARRFNELMTARFENIINFLKLHYCLSQRQEPFWRDNAAPASIPDRLAGLLEEWRLRPPGRFDFLLDTETFAFFNYQYILYGMGFATDLSAGRSDFPQVEEAGKLFAKIQRFADRAIADLPSHRALIQQINAGR

SEQ ID NO: 85724 - protein, 509 aa, Pelomonas sp.
  misc_feature (1)..(509): tr|A0A0Q6T1J2|A0A0Q6T1J2_9BURK Tryptophan halogenase OS =Pelomonas sp. Root1217 OX=1736430 GN=ASC95_25015 PE=4 SV=1
MRNRPLQRIVIVGGGSAGWITAAPLARMLCRPDQPDQHCEVTLVESADIGTVGVGEATLPTIQFYNQLLGIDEADFVRRTRATFKLGIEFQDWGRIGNRFFHGFGGFGPAIHNRPLWAYWLRLQALGDQLPSYEEWSTATVMARQMRFVPPTPGEPAPSNAFNYAFHFDASLYGAYLREYALKHGAQRTEGTITRVETRPEDGFVTALHLSDGRRVEGDLFIDCSGFRALLIDGAMKSPYEDWSHWLPCDRALAVPCESAGPMTPYTRSTARTAGWQWRIPLQHRTGNGLVYCSGYLSDDEAQRTLLDNLDGKALDEPRQQRFVTGRRKQGWVKNVVAVGLSSGFLEPLESTSLHLIMDAVSRLTAMLPDQSFQPALADEFNRQMAYRYESVRDFIILHYKLGERRDSEFWRYCADMPIPDDLAHQIALFRKTGRVAVIEPEGFAEPSWASILLGLGVYPERYDPYIDLVDPQLIRRHLHSVHSSISRTVASMPSHADFLNRISAPPKA

SEQ ID NO: 85725 - protein, 498 aa, Pelomonas sp.
  misc_feature (1)..(498): tr|A0A0Q6TZN7|A0A0Q6TZN7_9BURK Uncharacterized protein OS=Pelomonas sp. Root1217 OX=1736430 GN=ASC95_28030 PE= 4 SV=1
MSQSFNRIVIVGGGTAGWMTAAAIATGLKGRCTVEVVDSEEIGIIGVGEATFPSIRNYNRLVGIDEAEFLRATHGTYKLGIEFRDWRVQGERYFHTFGDFGETQGPHALWGQYRRLADPAFGELGEQCLPTVMAMQGRFVPPDDEGRAPYKYAYHFDATLYAGFLRRLAFGRGARRTDGRIVGVTRRADGGVHSLRLADGREIEGDLFIDCSGFGSLLLGKTLEEPFVDFSRWLPVDSAWACACERTGTALTPYTRATALEGGWAWRIPLQSRTGHGHVFSSRHIDADRAREQLLRQLDGKPLAEPRLLRFTTGHRERFWVHNVVALGLSSGFLEPLESTSIFLIQSGLGHLMGLLTSGQPISDGVVADYNARAVREFNRIRDFIILHYCLTARRDSALWRDMATMELPETLAFKIDAWRRLGLLHLQGDEGFDEHSWLAIHAGMQHWPERTDPVLQELPPDEARQSLQQRRHAIAESVARLPSHEAFLGQVLARGGT

SEQ ID NO: 85726 - protein, 505 aa, Planctomycetes bacterium
  misc_feature (1)..(505): tr|A0A5C5Z161|A0A5C5Z161_9BACT Tryptophan halogenase OS =Planctomycetes bacterium CA13 OX=2527986 GN=CA13_25650 PE=4 SV=1
MSSQSKVFDVIILGAGFAGSLLGTLLSKRGMSIAVVDRDKHPRFTIGESSTPAADFLLQHIVTQFGIEELQPLVRFGSWRKTHPEILCGCKRGFSYFDHGRSGGFEATSNHRDELLVAASVSNEVADTQWYRADVDQFFADVARKYGVTMMEQTEIESIRRAAPNDWRVNIQSEQGTSQLAAPMIVDATGSGRCLAKRLGIQDISDRFMTKSSAIYSHWENLTPLTDWLAARGAALNDYPYRAEDSAVHHLFRDGWLWHLQFANGRTSVGFVFDESESDRDVSIAQQTDWQGVLRDHPVINEWMSDANICAFPGKVFRTPRLQRLASVAAGEDWVAMPFTTGFIDPMHSTGIAHSLSGVERIAQILLNETNESRGDSLRHYSDTVLQEFETIDRLVWGCYVGLRDFRLFNAWSMIYFAVVTTYERLFSQSADRPTGFLGADQTDIRDRVGGLTDELRSIQASDRIKDHSVIESFIETIRMTIQPINQVGLFDPPIQNMYHRTAAK

SEQ ID NO: 85727 - protein, 505 aa, Duganella sp.
  misc_feature (1)..(505): tr|A0A3E1RWJ3|A0A3E1RWJ3_9BURK Tryptophan 7-halogenase OS=Duganella sp. BJB475 OX=2233914 GN=D0T23_00040 PE=4 SV=1
MTNNRIKRVVVVGGGSAGWMAAAALATYLGKQASVRLIESEEIGIVGVGEASVPHIRMFNSQMLGIDETEFVKRTQGTVKLGIEFKDWSRIGDSYIHGFGVIGRSLGPLPFHQFWLKLFQSGRAAAIGDYSVQTVMAPQGKFVPGDGNAPPNSPLADIAYAYHFDASLYARFLRELSEQRGVQRIEGKIVGVNQRADDGYVESVTMENGEVVEGELFIDCSGFRGLLIEQTLKTGYVDWTHWLPCDRAMAVPSERVDSITPYTRATAREAGWQWRIPLQHRTGNGYVYSSRYLGDDEAAATLLANLDSKALGEPRPLRFTPGMRKKFWNKNVVALGLASGFLEPLESTSIYMVQSGISRLLALFPGRDFNPLLAERFNRESAFEYERVRDFLILHYHATERNDTPFWDYCRTMSVPDSLQEAMELFRSDGRYFRNGEDFFALPSWVQVMLGQRIMPQSYHPIVDDMPEEKLVQYVEGMRATLAQAVAAMPTHGEWINRYWKAATP

SEQ ID NO: 85728 - protein, 534 aa, Glycomyces sp.
  misc_feature (1)..(534): tr|A0A426V0U3|A0A426V0U3_9ACTN Tryptophan 7-halogenase OS=Glycomyces sp. YIM 121974 OX=2493553 GN=EIW28_08130 PE=4 SV=1
MDTSPTDHRIRNVVVLGGGTAGWMTASYVAKAFQGTVNVTVLEAPAVPRIGVGEATVPNLHKAFFSFLGIEEDEWMRECNASFKMAVKFVNWRTEGEGEPVSRTHRGRPDHFYHTFGILPAHDQLPLSHYWFADRAAGRTDEQFDYACYREPAAMDAKLAPRDRDGNRWTNYAWHFDAQLVADFLCRFSVKSLGVTHVQDRFTEAVRDERGFVTALKTESGRVLEGDLFVDCSGFRGLLINQTMREPFLDMSDYLLCDSAVAAAVPHDDEAEGIEPYTSAIAMKSGWTWKIPMLGRFGSGYVFSSRFTDRDTASEDFCRLWGLDPDNTALNQISFRVGRNRRAWVKNVVSVGLASCFLEPLESTGIYFIYAAIFQLVKHFPDKRFDPVLAKRFNAEIETMFDDSRDFIQAHFKFAPRNDTPFWRENKNLVLDAGMQEKVDMYRAGMPVNMPVADESTYYGNFEAEFRNYWTNGSFYCIFSGLDLVPDHVYPTQALRPDAAAGAREVFAGIAAERDRLLETLPTAYEYLRGLHGK

SEQ ID NO: 85729 - protein, 511 aa, Pelomonas sp.
  misc_feature (1)..(511): tr|A0A0Q6T9L8|A0A0Q6T9L8_9BURK Tryptophan halogenase OS =Pelomonas sp. Root1217 OX=1736430 GN=ASC95_24790 PE=4 SV=1
MNDRLREVLVLGGGSAGWLVAGLLAAEHAELKITLIESSDVPTIGVGEGTWPSMRDTLRRIGLSEPEFIRRCQVSFKQGSRFDGWARGAAGSEGDRYYHPFMLPVGYGDVDLASAWLALPGERRPFADVVSPSVQVCEAGRAPKQVQTPDFAAVANYAYHFDAGLFGQLLREHAVAKLGVHHVIDHVEAIVSHQNGDIAALQTREHGELKADLFIDCSGLASRLIGQHFGVALKSERDVLFNDAALPVQVPYATPDAPLAPVTIATAWAKGWIWDIALPARRGVGCVYSRAHASDDEAHAALQAYLDATGAPAERPTPRSIRFDPGYRERFWVRNCVAIGLSAGFIEPLEASALALVELSAQRLCDELPMTRASMDAVARRFNDDFSYRWARVIDFLKLHYALSTRDDSDYWRAHRAPATWPQRLRELLPQWQLRAPARHDFGRIDEVFPSASYQYVLYGMGFRPDTQPLSTTKLKAAQAAFDEAARQARRLVPGLPGHRSLIDHIRKAET

SEQ ID NO: 85730 - protein, 530 aa, Xanthomonas translucens
  misc_feature (1)..(530): tr|A0A1C3TQJ8|A0A1C3TQJ8_XANCT Uncharacterized protein OS=Xanthomonas translucens pv. translucens DSM 18974 OX =1261556 GN=BN444_02972 PE=4 SV=1
MGRAAATAARECRDAHASTLGRAAPPVATHVNAGEPLRHIAIVGGGTAGWMAAAALVRVLGAGATRITLVESEAIGTVGVGEATIPPIALFNALLGIDENAFLRATQGSFKLGIEFVDWLQPGQRYFHPFGAYGVDFGTVPFDGLWQRMHRAGRAAPLAAYSLNTLAAMRGRFLRPQQGDALLSRLGYAFHFDAALYARLLREYAEGRGVMRLEGKVEQVLRRSPDGDIASIVLACGTRIDADFFIDCSGFRGLLIEDAPGAGFVDWSHWLFNDRAVAVPSARASAFTPYTRSTAREAGWQWRIPLQHRTGNGYVYSSAHLSDDAAAATLLANLDKEALAEPRTLRFRTGRRAVFWSGNCLALGLAAGFLEPLESTSIHLIQAGIARFLEMLPDRAGNPAAIRRYNRLMAQEFDSIRDFIILHFHATARPGAYWERARTMPIPDSLAERLQIFAHSGRVLREADELFSKTSWLAVMQGQGLSARGFDPLAAAMPDAEAAARLQRVAAAAAMAVERMPAHADFIRAHCAAT

SEQ ID NO: 85731 - protein, 510 aa, Streptomyces rimosus
  misc_feature (1)..(510): tr|A0A0M9XKR3|A0A0M9XKR3_STRRM Tryptophan halogenase OS =Streptomyces rimosus subsp. pseudoverticillatus OX=146 4079 GN=ADK70_26550 PE=4 SV=1
MGERAVANSANAGNPANPETYDVVIVGGGPAGSTLGALVARQGHRVLILEKEFFPRYQIGESLLPSTVHGVCRLTGVADDLAAAGFTRKRGGTFRWGATPEPWTFSFSVSEHMAGPTSYAYQVERSKFDEILLRHAGRCGAEVREGCAAADVIADEERVRGVRYTDADGAEREAYGTFVIDASGNKSRLFQRVGGQRTYSEFFRSLALFGYFEGGKRLPEPNSGNILSVAFDSGWFWYIPLSPTLTSVGAVVRREMAEKIQGDQEEALRALIAECPLISEYLANARRVTTGQYGQLRVRKDYSYHQTTFSRPGMLLVGDAACFVDPVFSSGVHLATYSGLLAARSINSVLAGLVDEAVALREFEARYRREYSVFYEFLLSFYEMHHSEQSYFWRAKKVTHHKRSEMEAFVDLVGGVSSGETALTDADAMAERLRADSAEFAGAVDQLAHSEDGSMLPLFKSSVVSQVTREGSQVQMRALLGADAEPETPLLPGGLVSSPDGMFWLPASSG

SEQ ID NO: 85732 - protein, 505 aa, Sphingomonas sp.
  misc_feature (1)..(505): tr|A0A1Q4E5J9|A0A1Q4E5J9_9SPHN Tryptophan halogenase OS =Sphingomonas sp. 67-41 OX=1895850 GN=BGP17_12925 PE=4 SV=1
MTAPAPIRRIVIVGGGTAGWMAAAALARLIPAGVSVTLVESEEIGTVGVGEATIPPIRNFNALLGLDERDFLSRTQGTIKLGIAFVDWTREGHRYVHPFGEFGFDVEGVKFHQIWRKLHAEGRAREIDAYNVCALAMAAGRYQPPVADPGSILSRMAYAYQFDASLYAKYLRAHAERRGVVRVEGKVAQVPLRAGDGFIEAVVLEGDRRVEGELFLDCTGFRALLIEQALGAGWESWAHWLQCDRAVAVPSASPGPEITPFTRSTAHRAGWQWRIPLQHRVGNGHVYCSADISDDAACETLLANLDGAPLRDPFLLRFEAGRRKRAWHRNCVALGLSSGFLEPLESTSIHLIQSGIHRLMALLPDSGFSPVERDEYNRLTDAQMEQVRDFVILHYHANERRDGDLWRRVREMAIPETLRRKLDLFRGRGRFFRHEDELFAESSWIAVLLGQGVIPAGWDPLADGLDENKLATSFERIHEMFARAARAMPRHEEWLARNAPAGTTA

SEQ ID NO: 85733 - protein, 505 aa, Pelomonas sp.
  misc_feature (1)..(505): tr|A0A0Q6U085|A0A0Q6U085_9BURK Tryptophan halogenase OS =Pelomonas sp. Root1217 OX=1736430 GN=ASC95_27775 PE=4 SV=1
MRSRSLRRVVIVGGGSAGWITAAPLARMLCRPGEPDHCEVMLVESDEIGTVGVGEATLPTIRFYNQLLGIDEADFVRATQASFKLGIEFKDWGRLGARFFHGFGGFGPPIHNRPLWSYWLRLREREPGIESYEDWSTATVMARALRFTPPQPGEPSPANAFDYAYHFDAALYGRYLRDHAVRHGAQRIVGTIVSVKTSEQSGFAEALHLSDGRCVEGDLFIDCSGFRALLIDGAMKSPYEDWSHWLPCDRALAVPCERTDPMTPYTTSTARSAGWQWRIPLQHRTGNGLVYCSSHLSDDEAAQTLLANLDGKPLDDPRPQRFTTGRRRLAWTKNVVAIGLSAGFLEPLESTSIQFIMDSVGRLTALLPDRDFAPSLADEFNRQMAYRYESARDFIILHYKLGERRDSEFWRYCADMSIPDVLAHQIELFRDTGRVAIIDPEGFAEPSWASLMLGLGILPRRRDPYVDLVDLDSVKRHLSTVRSVIHRTTQAMPLHAEFLARIASR

SEQ ID NO: 85734 - protein, 510 aa, Pelomonas sp.
  misc_feature (1)..(510): tr|A0A0Q6U4Y9|A0A0Q6U4Y9_9BURK Tryptophan halogenase OS =Pelomonas sp. Root1217 OX=1736430 GN=ASC95_28850 PE=4 SV=1
MKHVCVVGGGSAGWMTALMLATTAYGPRLKVTVLESPQVGIIGVGEGSTPWLRRFFEILGIEESEWMPACNATYKSGITFDGWSTKPGFERYFHPFVSMLDNMTMHPFVDNVHARLDGADVHAHPDRFFLSAALARQARGPRAKDNFPFDVWYGYHFDATLLGQFLGRKAVQRGVTHLQRHVTQVQLNERGDIGGLQLDDGEILTADFFVDCSGFSSLMIGKALQTPFVGFGENLFNDAAVAMPTPLEGPIESQTVSTALRHGWAWKIPLTQRQGNGYVYSSAHCSADEAETELRRHLGLLDADTPARHLKMRVGRMAKVWNRNCVAIGLSQGFIEPLEATALLFVQVTASMLVEVLEKGDLGSSAQEQFNAAMHKRFDNTRDYIVAHYKTNSRTDTDYWRENAENMHLSDSLQGVLMTWMSRKPLVAALKTGRFGGGYPAVSWYALLAGMGIFPDVEDLQVPTAHQARHRLEAVDDFIARSATNFPDHRELLADIPPGVGDKALQIYTW

SEQ ID NO: 85735 - protein, 498 aa, Xanthomonadales bacterium
  misc_feature (1)..(498): tr|A0A259R511|A0A259R511_9GAMM Tryptophan halogenase OS =Xanthomonadales bacterium 14-68-21 OX=1970612 GN=B7X39 _01165 PE=4 SV=1
MQRNRVRRVVIAGGGTAGWMAAAALSRTLGKYVDITLVESDDIGTVGVGEATIPTLLTFHRLIDINEQEFMAASHATIKLGIQFENWRQVGHKYFHSFGTTGRDHWSAGFQHFWLKGRERGLAGEYGEYCLELSAAMQGRFSHLPNNGINYAYHIDSTRYAQFLRRFSERYGLRRVEGVISDVAMAENGDIQALVLNDGTRIEGDLFIDCTGFRALLIGKALGVEYEDWSHLLLADSAYAVQTESVRDAIPYTRSIAGDACWQWRIPLQHRGGNGIVFASRYMDDDTARKTLMDTIEGTPRTEPRLIRFKPGQRKRCWERNCVALGLASGFLEPLESTNIHLIQRGITRLLQAFPEVVNQVEIDEYNMRMREDLEHVRDFVVLHYHVTDRRDTEFWRECADMNVPPSLRHVIDLFAETGKVYNLANQLFAENSWIQVMMGQGITPRHRHPAPDLMGDPELKRFLDAISGSVSNTVSRLPRHMDYIRSYCAMARESAEA

SEQ ID NO: 85736 - protein, 505 aa, Xanthomonas phaseoli
  misc_feature (1)..(505): tr|A0A1V9GVN2|A0A1V9GVN2_9XANT Tryptophan halogenase OS =Xanthomonas phaseoli pv. dieffenbachiae OX=92828 GN=IM 53_020330 PE=4 SV=1
MTQAQIRKVVIAGGGTAGWIAACALSHQFRNLLDITLVESEQIGTVGVGESTVPPIRTFHRFLQIDEQEFLRAVAGTFKLSISFEHWRRQGERYIHPFGITGQSTLVCAFHHLWLESQRRGMPGNFGDYCLETVASRVDRFALHGEPAVNYAYHLDAALYAKFLRARSEACGVTRIEGRIQQVTVQPHSGDVASLVLEDGQVIEGDLFIDCSGFRGLLIEQTLHTGYEDWSHWLPCDRAVAVQTQALGPPVPYTRAIAHEAGWRWHIPLQHRVGNGLVFSSKHLSDDEAHAKLLRDVAAPAVKDPWMVPFRTGRRLKAWNKNVVSLGLASGFIEPLESTSIHLTISAVVRLLALFPAEGIAPSQVQLFNDVSRAEMEHVRDFVTLHYHATQRDEPLWQQCRQMELPESLALRLRAWRERAHAWQGADELFRVDSWTHVLMGQGIAPEQHHPLTRAFSDHDLRRLLDGIAQPIQHAVRQMPSQQDFIERYCKAGEQVWGMRSPVPA

SEQ ID NO: 85737 - protein, 505 aa, Sphingomonas aerolata
  misc_feature (1)..(505): tr|A0A2T4YU08|A0A2T4YU08_9SPHN Tryptophan halogenase OS =Sphingomonas aerolata OX=185951 GN=C8J24_0606 PE=4 SV= 1
MTIGAPVRRIVIVGGGTAGWMAAAALARLIPTGASITLIESDAIGTVGVGEATIPPIRGFNAMLGIDEAEFLAATAGSFKLGIEFVDWGALGERYLHPFGGFGFDIEGVRFHQYWRRRRAAGIVEDIEAYSLCAVAARAGRFIPPSPDPASVLSQMAHAYHFDAGLYARFLRGRAERDGVVRVEGDVVDVALDGETGHVRHVTLAGDRVIEGDLFLDCSGFRGLLIEQTLGAGYEDWTHWLPCDRAVAMPTANTGAAITPYTRSTARAAGWQWRIPLQHRTGNGYVYSSAHCSDDEAAATLHAGVDGTPLAEPRLLRFTAGRRRKQWIGNVVALGLASGFTEPLESTSIHMVQTGISKLLALFPDQGFSPVEIDTYNRLAATQFDQVRDFLILHYHATRREDSPFWRETRARAIPDSLSEKLALWRRRGRLFRWEDDLFAEASWVAVLLGQGIVPDGWDRLADAVDAREVDARFDRLHAMFADAASRMPRHEDYLARTCPTRVRA

SEQ ID NO: 85738 - protein, 482 aa, Sphingomonas sp.
  misc_feature (1)..(482): tr|A0A1Q4E8E3|A0A1Q4E8E3_9SPHN Tryptophan halogenase OS =Sphingomonas sp. 67-41 OX=1895850 GN=BGP17_04640 PE=4 SV=1
MSRPFTVIVAGRDAPLWLAAAALARGLAPSGVQVEAVELPSALASVDAHATFPALEALHNQLRIDETMLLRATGGNLTLGRNFTDLAGAWPAFLHAYGSAGTQIGGRDFFAHWVKARAHGLGVPLDDFSLTAAAARQGRLMLPDAENAIYGRCDYGYHLPAIPYARLLRAAAIGHGATAHAAEQLTVERAGDAIVALDLGAGRRLAADLFVDAGGVLGGAHLSWRAHFPVDRVLTAAGPPFANIPVYAEDRAGPTGWTALHPGRPATFVVHAWSSAHATDEEALRAAGAAAGLPLAGVRIAAVEPGRPARPWTGNCVTLGAVFDPVHGLDLLGLQVGLVQLLADFPATAHFAAERDEYNRAAGAALDRLRDFQSAHYALARYAGPFWDAARAGTVSPDLAHAVALFRARAELAPFEEENLPPDSWRALFLGHGVEPESWPPAIDRVPPEEAKAQFRRMLGFVREQVLRQPTQEAYLAGLADG

SEQ ID NO: 85739 - protein, 487 aa, Sphingomonas aerolata
  misc_feature (1)..(487): tr|A0A2T4YTS4|A0A2T4YTS4_9SPHN Tryptophan halogenase OS =Sphingomonas aerolata OX=185951 GN=C8J24_0604 PE=4 SV= 1
MTAATLGLTTGTPSAARLADITLVESEEIGTVGVGEATVPHIRFFNQRLGIDEADFVRRTKATFKLGIEFCDWGRIGDSYIHPFGDFGHDIDGLPFHQHWLHATRGKPDETPALAACSLPIVAARAGRFTPPLDDPRSVGSTYSYAYQFDAGLYAAYLRDYAETRGVTRVEGRVEHVERGPSGIAALRLADGQRIEGDLFVDCSGFRALLIEGALKAGHEDWAHWLPCDAAWAVPTANAGPLVPYTRATARDAGWQWRIPLQHRTGNGHVFSTRFTDPDRARAVLLDNLEGEVLAEPRMLRFRTGRRHRQWIDNCVAIGLSAGFLEPLESTSIHLIQLAIGKLIELFPNDAVLDPADAAEFNRAMALEYDRVRDFLVLHYCATERDDTPFWRHMRTMDLPPSLAGKIAAFRDRGIVEQYREGMFLPASWLAVYYGQRIMPERINPLVAALPVADARARVAAVADACRRTAEGMPTHADYLARIGAAA

SEQ ID NO: 85740 - protein, 502 aa, Sphingomonas aerolata
  misc_feature (1)..(502): tr|A0A2T4YNR8|A0A2T4YNR8_9SPHN Tryptophan halogenase OS =Sphingomonas aerolata OX=185951 GN=C8J24_3270 PE=4 SV= 1
MDELAIRRIVVVGGGTAGWMAAAALSRVLGRAVEIELIESEAIGTVGVGEATIPHLQYFNRLLGIDEDDFVRRTAATFKLGIEFVDWGRIGDRYFHPFGTYGQEMEGLHFHHFWLRQAQLGGALELDRFSIGADAARAQRFQRPDHSRAGSPLGTISYAFQFDASLYARYLRERAEASGVRRTEGRIVDVALDSGNGHVQAVTLEDSSRVAGDLFIDCSGFRGLLISKALGAGFEDWSHWLPCDRAVARACRRTTDPLPYTRATAKAAGWQWRIPLQSRTGNGYVYCSDHLSDDEALAGLNAALDGDPLSEPNFLKFKAGVRHKAWDRNVVALGLASGFLEPLESTSIHLIQSAIARLLTNFPDRRFNQHDIDYYNRRTRVEYEQVRDFIILHYAATTRDDSPLWRYCRSMALPTSLEERIAIFRENGRLYRHDNELFSETSWLAVMHGQGLVPRRYHPLADLLPEGELDKRMTHIANAMRLAVDRMPSHQQFLDQIGRTAA

SEQ ID NO: 85741 - protein, 505 aa, Xanthomonas citri
  misc_feature (1)..(505): tr|H8FK34|H8FK34_XANCI Tryptophan halogenase family pro tein OS=Xanthomonas citri pv. mangiferaeindicae LMG 941 OX=1156940 GN=XMIN_3713 PE=4 SV=1
MTQAQIRKVVIAGGGTAGWIAACALSHQFRNLLDITLIESEQIGTVGVGESTVPPIRTFHRFLQIDEQEFLRAVAGTFKLSISFEHWRRHGERYIHPFGITGQSTLVCAFHHLWLESQRRGMPGSFGDYCLETVASRVDRFALHGEPAVNYAYHLDAALYAKFLRARSEACGVKRVEGRIQQVTVQPHSGDVASLVLEDGQTIEGDLFIDCSGFRGLLIEQTLHTGYEDWSHWLPCDRAVAVQTEALGPPVPYTRAIAHEAGWRWHIPLQHRVGNGLVFSSKHLSDDQAHAKLLRDVAAPAVREPWMVPFRTGRRLKAWNKNVVSLGLASGFIEPLESTSIHLTISAVVRLLALFPAEGIAPSQVQLFNDVSRAEMEHVRDFVTLHYHATQRDEPLWQQCRQMELPESLALRLRAWRERAHAWQGADELFRVDSWNHVLMGQGIAPEQHHPLTRAFSDHDLRRLLDCIAQPIQHAVQQMPSQQDFIERYCKAGEQVWGMRSPVPA

SEQ ID NO: 85742 - protein, 500 aa, Sphingomonas aerolata
  misc_feature (1)..(500): tr|A0A2T4YMM1|A0A2T4YMM1_9SPHN Tryptophan halogenase OS =Sphingomonas aerolata OX=185951 GN=C8J24_2861 PE=4 SV= 1
MDTPPKTRVIIAGGGTAGWLAAALLTRQLGALVDVTLIESDEIGTVGVGEATIPTVQAFHALLGLDERAFMAATGATFKLGIAFEGWARPDDRYVHSFGDVGRSTWMGDFQHFWLEARANGLAGDFGDYCLELQAAEARRFTIGQQGPQLNYAYHFDAGRYARFLRERCETAGLTRIEGRIAGIDRSAETGHIDAVILANGSRVAGDLFLDCSGFRGLLIGDALGVGYEDWSHWLPANRALAVQTTSVEPARPYTRAIAHDAGWQWRIPLQHRVGNGIVYSSEYLSDDAAQDRLLASVQGRPLTDPRLLRFTTGRRLRAWEGNCIALSLAGGFVEPLESTSIHLVMTALTRLLRAFPFDGISHAVVTQFNAQTRRELEGVRDFVILHYHLNQRSEPFWKACAAMPIPDTLAERIALFADAAQAYQSPDDLFRVSSWTQVMLGQRLEPRDWHRLARMMPPERLGSSLAELKAGIAQQVDRLPAHQAFVDRYCAQAATGVAA

SEQ ID NO: 85743 - protein, 533 aa, Xanthomonas phaseoli
  misc_feature (1)..(533): tr|A0A1V9HCJ1|A0A1V9HCJ1_9XANT Tryptophan halogenase OS =Xanthomonas phaseoli pv. dieffenbachiae OX=92828 GN=IM 53_000375 PE=4 SV=1
MGMWPVERGQLAPFAYSSAVLAQECIGMIPAPLRNIVIVGGGTAGWMAAAAFARVLGPTFKVQLIESEQLGTVGVGEATVPHIKAFNNLLGIDEAEFVRQTQGSFKLGIEFVDWQRPGSTYMHGFGSQIGHPLGLLPFHQYWIKQHARGKAQPLGAYTLNTVAAARGKFMTSAGDVPANSPLANIAYAYHFDATQYAHFLRRYSQQRGVTRIEGLVEQVQLHPESGHVQSLQLASGQTVHGDLFIDCSGFGGLLIEQALHTGYHDFTHWLPCDRALAVPCEKVGPPTPYTRSTAHAAGWQWRIPLQHRTGNGYVYCSAHISDDEAAATLLANLDGKPLADPRPLRLTTGRRKQCWNRNVVALGLASGFLEPLESTSIHLIQSGISKLLELFPREGISPVLVQRYNDRLAFEFDRIRDFLLLHYHATERDDSAFWRHCRQMPITPELQATLDLFRDSGRFYRNAEEMFAEISWVQVLVGQGILPQGYHPLVDQVPDRDAEGFLASVAQTISHCVDVMPSHQHFIDRYCKAAAVP

SEQ ID NO: 85744 - protein, 477 aa, Zunongwangia profunda
  misc_feature (1)..(477): tr|A0A3D5IVE0|A0A3D5IVE0_9FLAO Uncharacterized protein OS=Zunongwangia profunda OX=398743 GN=DGQ38_01760 PE=4 SV=1
MKKILIVGGGTAGLVSALIIKARFSKLQVDLVKSENIPIVGVGEGTTEHWGEFMTFCNISLKELLQETDATFKYGIMFEGWTKKPYFHNVNTPLSQIQFGQYLGVYAYAIINNLDPKKYTNGHCFTQKVIPHELPHQFHFNTFKLNTFLRKKCLEAKIRILEDEIINVNTNKNHINYIESKNKKYKYDFYIDSTGYSKGTLITKLGSKWQSHGDYLPMNQAIAFPTPDTEEYNPYTLAKAMSAGWMWKIPTRGRCGNGYVFNNKYINAKQAQKECERSLGFKIKVAKDIKFDAGYIDKPWVGNCVAIGLCASFLEPLEASAIGTSLQQAFLLSHLLINHKQTDRDLYNQRVTGIVQNIRDFVVLHYMVKKKDSKFWKELKVKIPPTLQHNLNKWKQRLPIAEDFIGGYKLFGPHNFTILLKELGLVNKKLIKKEYGMLSEVYKDCAKENVTKHIQHTYYNKNVIGHKESINAIIKRT

SEQ ID NO: 85745 - protein, 490 aa, Pelomonas sp.
  misc_feature (1)..(490): tr|A0A0Q6TBZ0|A0A0Q6TBZ0_9BURK Uncharacterized protein OS=Pelomonas sp. Root1217 OX=1736430 GN=ASC95_18320 PE= 4 SV=1
MSQKFDRIVVVGGGSAGWMTATALATGLKGRAGVEVVESEDIGIIGVGEATFPSIRDYNRRVGIDEAEFLRATQGTYKLGIRFCDWLAQGHDYFHTFGHFGNLFGSQTLWPQHRRLEKGLPLGVQCLPTVMAMKGRFVLPQEQAHFKYAYHFDAIQYGAFLRKLAMQRGARHTQGRIVEVLRRPDGGVAALQLDDGRRIEGDLFVDCSGFRSLLLGGALGEPFVDFSHWLPVDRAWACPCERTGEELTPYTQATALEAGWAWRIPLQNRTGHGHVFSSRFIDEDRAREQLLARLDGKPLVEPRLLRFTTGHRERFWVHNVVAIGLSAGFLEPLESTSIYLIQDGIDRLMTALMAGRPLHEDELALVNDGSARRFSRIRDFIILHYCLTRRRDSELWRHVATMELPETLAYKLALWRECGVLHMQDEESFDATSWLAIHAGMDHWPERDDPVFAEVPAERAALVLSRRRAAIAASVERMPQHHRMLKQVLG

SEQ ID NO: 85746 - protein, 132 aa, Rubellimicrobium mesophilum
  misc_feature (1)..(132): tr|A0A017HUU0|A0A017HUU0_9RHOB Tryptophan halogenase OS =Rubellimicrobium mesophilum DSM 19309 OX=442562 GN=Rum eso_00402 PE=4 SV=1
MAGGWPERIVVVGGGTAGWLAAMMLSEVAGRKAPGTSVTVVESSKIPVIGVGEGSTAVFRQMLRRFGLDEEEFLRETGATIKFGIRHRDWRRLGHHYDGPIDDPHLVAPGCRWTATPSRRGSRCRRRTFSST

SEQ ID NO: 85747 - protein, 511 aa, Sphingomonas aerolata
  misc_feature (1)..(511): tr|A0A2T4YTA3|A0A2T4YTA3_9SPHN Tryptophan halogenase OS =Sphingomonas aerolata OX=185951 GN=C8J24_0431 PE=4 SV= 1
MTDPGPARITRIVIVGGGTAGWMTAAAMARLVESGVAVTLVESEEIGTVGVGEATIPSLLDYNRMLGIDEDDFVRATGATFKLGIEFRDWGRLGDAYFHPFGTHGRDVEGVAFHQLWLRQARLGRADMPGPIGDYCLSAVAARNGRFTRPSANPQSVLSTLSYAFHFDAALYARYLRDRAEAAGVVRIEGRVAAVDRHAGTGFIEAVRLADGRAINGDLFVDCSGFRSLLLGDAMDVGFTSWQHWLPCDRAWAVPSAPRDAPAPHTRATAEAAGWRWRIPLQHRVGNGHVYASDHVDDETALRVLLDGLDGPPLADPRQLRFVAGRRDRLWDRNCVAIGLAGGFLEPLESTSIHLIQSGIARLMSLFPDTGFSAVEIAEYNRQMLREYDQVRDFIILHYHATTRTDSAFWRHCQSMTLPPSLQAKLDLWAGRARIFREQGELFTPDSWIAVLLGQGIWPASVDPLTAGLPVAESAMFLDHVREMVAKTAEAMPRHADFIARHCAAPLRTAA

SEQ ID NO: 85748 - protein, 531 aa, Shewanella sp.
  misc_feature (1)..(531): tr|A0A3N4E932|A0A3N4E932_9GAMM Tryptophan 7-halogenase OS=Shewanella sp. R106 OX=2487741 GN=EGC77_03455 PE=4 S V=1
MQNAITEIVIVGGGTAGWITAGLLAAEHNVDNGVLAHSPKLNITLIESPDVATIGVGEGTWPSMRSTLSKIGIDENEFIRRCDASFKQGSRFIHWRRDPASHNAQVGNPAQSDSYLHPFSLPHGHQELDLCPFWLSHADQVSFAEAVSSQEVLTQLGLAPKSISSAQYHFQNNYGYHLNAGKFSQLLTEHCTQKLGISHIRDHVSHIVNHDNGDIAKLVTLENGEISGQLFIDCSGTKSLLLGEHLHVPFLCQKAVLFNDTALAVQVPYSGDGSPIASCTHSTAQQNGWIWDIGLPTRKGVGYVYSSSHTNDADAERTLFTYLGDAATIDKLQPRKLSFNPGYRAKCWQNNCIAIGMAAGFIEPLEASALALIEWTASTLAQQLPPNRQVMDTIAARVNDRYQLHWQQIIDFLKLHYVISQREVDGYWRDHRDNQSIPDSLQAKLELWRYQVPSQYDISYKEALFPAASFQYVLYGMGFQTQLPTHVKPSMQQLAQQLFNDNQQRTQALSKSLPSNRALLEKVAQYGFPKL

SEQ ID NO: 85749 - protein, 502 aa, Xanthomonadales bacterium
  misc_feature (1)..(502): tr|A0A1M3QRL6|A0A1M3QRL6_9GAMM Tryptophan halogenase OS =Xanthomonadales bacterium 66-474 OX=1895868 GN=BGP23_1 1925 PE=4 SV=1
MNASPIHDIVIVGGGTAGWMAAAALARVFPGKLSIRLIESEQIGTVGVGEATVPHLKAFNQLLQIDEAEFVRTVKGTFKLGIEFVDWARIGDRYFHGFGTIGHDHDLLPFHQYWIKAHQQGIAAELGEYSLHTRAGPNGKFMVSATDVPANSPLADIAYAYHFDAGLYAKYLRRYAEQRGVHRTEGKVARVEQRGEDGFVEAVVLESGERIAGELFLDCSGFRGLLIEQTLHAGYEDWSHWLPCNRAVAVACETSGPPTPFVRCTAREAGWTWRIPLQHRVGNGYVYSSSYLSDDEAAATLLKQLDAPALGDPRVLRFTAGQRRKTWDRNVVAIGLAAGFLEPLESTAIYLIQSGIARLVNLFPDTSFDPVVIERYNAQTAFEIERIRDFIILHFCATERDDTPFWNYCRNMDIPAPLADNIRLFRDSGRFYRNAEEMFALTSWVEVMIGQHILPRTYHPAVDQLSDAELKQLMDGVQRVIAACVEAMPSHQQFIARCCAAV

SEQ ID NO: 85750 - protein, 513 aa, Devosia sp.
  misc_feature (1)..(513): tr|A0A0Q6P4F6|A0A0Q6P4F6_9RHIZ Uncharacterized protein OS=Devosia sp. Root105 OX=1736423 GN=ASC68_08655 PE=4 S V=1
MAGQPHFVIVGGGTAGWIAAFIIQDSIKRLKLDAKLSVVESSKIPTVGVGEATTAAFHVFLTHFGIDIFEFFRKTEATYKLGIRHEDWRRKGFTYYGPIDDPHAVVRPPPGAPSDYLNVYAVSVNEPVQDMHLFGPLLKQKKAPWTKKADGSLIPLGPFLPAYHFDQSLVGKFLKEKSQGVEIVDNVLTGVERNGETGDVTALVFEDGQKLEGDFFIDATGFRKRLIVGEMQAPWISYQHELPVNRALPFWLPVEPGEEIANYTRAWAQEAGWMWQIPTQYRYGCGYVYSDEFRTPDEAHAEVERVLGRKIEVRGDIQFKIGRLEKAWINNVVAVGLSSSFLEPLESTSIHGTIVQMMMFAGQYLRDPAQMGQPLRDDYNRRVGRQVDDFRTFVNTHYMTERDDTPFWREVREHRIHPETKQRLERWKTEMPRREHFADYLFGLPHVETQLHYPVLDGLGLLDPSVAKAEMARDPKLRKFARETHAGLVKEYKQAASKALGHAEFLELVRGMG

SEQ ID NO: 85751 - protein, 412 aa, Neisseria flavescens
  misc_feature (1)..(412): tr|A0A154TLD0|A0A154TLD0_NEIFL Tryptophan halogenase OS =Neisseria flavescens OX=484 GN=TW89_1047 PE=4 SV=1
MSVEFDVAVIGAGPSGSVASALLNKQGFKVCVLEKQHFPRFVIGESLLPHCMEMLEEAGFADAVHAEPSFQFKDGAAFSWGSRYTDFNFTEKFSDGPGTIYQVRRGIFDKILIDEAAKQGVDVRFGHGVTAFDNSGDMARLSVATDTGENYELTAKFVLDASGYGRVLPRLLDLESPSELPPRQAHFTHIDDNITSPKFDRNKILINTHPEHRDVWIWLIPFGDNRCSIGVVGTPDKLVGESEAVLKKFVYECPMLAEILDKAVWENDFPFRSIQGYSANVKTLYGKHFALLGNAAEFLDPVFSSGVTIALHSAKLAADLLGKQLKGEAVDWQTEFADQLMIGVNAFRTYVNGWYDFRFQNAIYAPNRSPEISRMISSILAGYAWDTNNPFVEKSEQRLSTLAALVGDLKVE

SEQ ID NO: 85752 - protein, 537 aa, Pseudomonas protegens; identical to SEQ ID NO: 82294
  misc_feature (1)..(537): tr|A0A2C9EP12|A0A2C9EP12_PSEPH Uncharacterized protein OS=Pseudomonas protegens (strain DSM 19095 / LMG 27888 / CHA0) OX=1124983 GN=PFLCHA0_c36450 PE=4 SV=1

SEQ ID NO: 85753 - protein, 520 aa, Paraglaciecola polaris
  misc_feature (1)..(520): tr|K6ZXP5|K6ZXP5_9ALTE Tryptophan halogenase OS=Paragla ciecola polaris LMG 21857 OX=1129793 GN=GPLA_4118 PE=4 SV=1
MNNRSIKKIVIVGGGSAGWLTAGLIAAEHRCGSDQSQIQVTLIESPDVNIVGVGEGTWPSMRNSLQRMGISETEFIRYCGAAFKQGSKFVGWQNGAKNDFYYHPFVVPTGYGQANQYSSWQTYGKDHPFADAVSAQSQICQAGLGPKQNATPEYAGVLNYGYHLDAGKFSQMLQQHCTQQLGVTHIQDHVEGVLSNDNGHIASLQTRHSGELVGDLFIDCSGARSLLLGQHFNVPFIDKKSVLFNDSAMAVHVPYMTPDAAIASATVSTAQASGWVWDIGLQDRRGVGYTYSSAHATDEQAELTLKAYIAKSIGREQAAALTARKIVFNPGHRAHFWHKNCVAVGLSAGFLEPLEASALALVELSATAIAENLPVTPEHMDVISDNFNQRFLLHWENIVEFLKLHYVLSERSEPYWQQMRNPDSVSPRLKALLTQWRYQPPNRSDFVQNEIMFPSASYQYVLYGMGFNTLNDVSSREFDQPQSAMKYLQENQQLVRKLMGGLKSNRQLLEHAKHQGFPKI

SEQ ID NO: 85754 - protein, 530 aa, Saccharothrix sp.
  misc_feature (1)..(530): tr|A0A0M8YIY4|A0A0M8YIY4_9PSEU Tryptophan halogenase OS =Saccharothrix sp. NRRL B-16348 OX=1415542 GN=ADK67_132 60 PE=4 SV=1
MEDRRIKKVVVLGGGTAGWMAASYLGKALGPAVTITVLEAPAIPKIGVGEATVPNLHKTFFDFLGIAEEDWMRECNASFKMGIKFTNWRTPGVGESTGRPYQGTTDHYYHLFGLLPNHENQPLSHYWTHKKLAGQTDEPFDYACYREPPIMDQNLSPRFLDGTKWTNYAWHFDANLVADFLRRFATTKQGAIHIEDKMVEAVIDQRGHVSALKTEAGRTIEGDLFIDCSGFRGLLINQAMKEPFLDMSDHLLNDSAVAAQIPHDDAVDGVEPYTGAIAMSSGWTWKIPMLGRFGSGYVFSSRFQSRDDATLEFCNMWGLDPENTQLNQVKFRVGRNRRAWVKNVVSIGLASCFLEPLESTGIYFIYAALFQLAKHFPDKNFDSILQDRFNAEIETMFDDSRDFVQGHFSFAPRNDTAFWQACKELELADDFKEKVRMYKAGLAVNMPITDESTYYANFEAEFRNFWNNSNYYCIFAGLEYLPDHTLPALAARPEVLDSAEPVFAEIKRKQKELLSTLPSTYEYLKQLHGK

SEQ ID NO: 85755 - protein, 421 aa, Amycolatopsis sp.
  misc_feature (1)..(421): tr|A0A429D588|A0A429D588_9PSEU Tryptophan halogenase OS =Amycolatopsis sp. WAC 01416 OX=2203196 GN=DL990_19835 PE=4 SV=1
MSATLHGMPERFDVIVIGGGPAGATCAGLLAKEGRTVLVLERERFPRYHIGESLIPVGMRPLQELDLLERMEARGFERKYGGSLVWGNRDVPWNFSFMKAAEGTYAYHTRRADLDTLILDRARELGAYVVEETTVKDVLQSDTGRVTGVRFALRGSAGDYEASASLVVDASGQSRVIGRKFSDITWHNELRNVAVWTYYDNCDRLPGDEWTNILIEGTADGWFWGIPIDKGTMSVGYVTKSDLANADDQSLEQLFLSERDKTTRLKGLLANARQHAGYRTARDWSYTNETFYGDGWVLVGDAAAFVDPLFSTGVALATLAGSSLSKVVHQVLEHPAIEEKALDRYAGNYRAFFDEIRNFVERFYDRTKYKEYYYDLAQEVVDPEQLHAPSVDFVTLVSGLSGKHPLLNISLDDLIANVTEP

SEQ ID NO: 85756 - protein, 508 aa, Paraglaciecola polaris
  misc_feature (1)..(508): tr|K6YR09|K6YR09_9ALTE Uncharacterized protein OS=Parag laciecola polaris LMG 21857 OX=1129793 GN=GPLA_4285 PE= 4 SV=1
MSKAVKKIVIVGGGTAGWLTAAIVAAQHKTNRCDGLQIVLVESSDIPTVGVGEGTWPTMKNTLQQIGLKESEVFARCHATFKQGGKFVDWVQDTGDFYYHPFTVPLGYGRIDLAPYVDKIENYAVESNFQHHVCEAGLAPRSMAEAEYKGQCNYAYHLDAGEFAEVLKEHCKNNLNVTQVIGTVEKVNLTDDGAIASITLKSNEQIDADLFVDCTGFASLLLGQTLDVPFISADKVLFNDSALALHMPYEDVTSPIASHTIATGQSAGWIWDIGLTHRRGVGHVYSSQYLSDDEAEVNLRRYLGPRSDDIPVRKISFQSGHRAQVWKKNCVAVGMAAGFVEPLEATAIMLVEISARFIADNIPPDDSLMPIIEKRFNQQMAYRWSRIIDFLKLHYMLTKRPEPYWQAHTELASIPQSLQDDLALWKYRGPITADFDAAIELFPAASYQYVLYGMGFKPDFSRQPHLYNDQANAEKIMTRNQQLTQQLLQTLPPHREYIERWLHTQNMR

SEQ ID NO: 85757 - protein, 534 aa, Paraglaciecola polaris
  misc_feature (1)..(534): tr|K6ZEU1|K6ZEU1_9ALTE Tryptophan halogenase OS=Paragla ciecola polaris LMG 21857 OX=1129793 GN=GPLA_3711 PE=4 SV=1
MQQSNPIKHVVIVGGGTAGWLTAGLLAARLSSRINNSELTITLCESPDMPTVGVGEGSWPTLRSTLHTIGISETDFIRQCNVSFKQGSRFIHWENEHSSQYDHPFDVPEQASHGAQAQHWLHTNKQVPFSQAYCLQSALANQRLAPKLITTTEYSGFANYGYHLDAGLFAKLLREHCVNSLQVKHIPAKVKHVIQDQNGDISGLQLAEAEAERLPTTKPPTSNSRLTPLTGDLFIDCTGFSALLLGQTLGVKNTPVNDVLFANNAIATHVPYATDQDPIESFTLSTAQDSGWIWDIGLPNRRGVGYVYSDRYTDDESAKDTLLQYIQQRHQDTDSLSFKHIRFTPGYKQQFWKNNCVAIGLSAGFIEPLEASAIVLVEMSANMLAEQFPATRQSMGIVAERFNQTFSYRWQRIIDFLKLHYVLSKRPSAFWKDNRAERSIPASLKKLLLIWRHKVPDFADFPARDEVFQAASYQFVLYGAGFKSNLLCTPDPRMLESSEQLFSSIQSFTTQLTDKAISNRALINKIYRYGLQKI

SEQ ID NO: 85758 - protein, 412 aa, Neisseria flavescens
  misc_feature (1)..(412): tr|A0A154TRV2|A0A154TRV2_NEIFL Tryptophan halogenase OS =Neisseria flavescens OX=484 GN=TV01_0859 PE=4 SV=1
MSVEFDVAVIGAGPSGSVASALLNKQGFKVCVLEKQHFPRFVIGESLLPHCMEMLEEAGFADAVHAEPSFQFKDGAAFSWGSRYTDFNFTEKFSDGPGTIYQVRRGIFDKILIDEAAKQGIDVRFGHGVTAFDNSGDVARLSVATDTGENYELTAKFVLDASGYGRVLPRLLDLESPSELPPRQAHFTHIDDNITSPKFDRNKILINTHPEHRDVWIWLIPFGDNRCSIGVVGTPDKLAGESEAVLKKFVYECPMLAEILNKAVWENDFPFRSIQGYSANVKTLYGKHFALLGNAAEFLDPVFSSGVTIALHSAKLAADLLGKQLKGEAVDWQTEFADQLMIGVNAFRTYVNGWYDFRFQNAIYAPNRSPEISRMISSILAGYAWDTNNPFVEKSEQRLSTLAALVGDLKVE

SEQ ID NO: 85759 - protein, 495 aa, Acinetobacter sp.
  misc_feature (1)..(495): tr|N9PIX7|N9PIX7_9GAMM Uncharacterized protein OS=Acine tobacter sp. CIP 64.2 OX=1217694 GN=F895_00815 PE=4 SV= 1
MLNLRGLNRVAVVGGGTAGWFAALQLRQVFGPSVEVMVISAPEIPIVGVGEGGVLNLLTVLRDLEIDLKDFIDKTGATLKLGFRYERWRTGKEDDYYYHLFPLPTEDFAWNEFGFNPYLSGLFNHGIDVSRYMASYQFSEDRKPFQEVLQILLEGKNNFGASLHFDTFRVGQYLKKIALSRGIVHIENKIEDFELDPATGYVSAIQCIDQKISCDFVIDASGFSKLLIGKKYQSYWCSFADILPMNRALPFHLPHKNKIELVTRATALSSGWVWQIPLQERIGAGYVYHDQFITDQQAQQEVEQWLGYSINPVKPIAFEAGYFQEVWIKNVVAIGLASGFIEPLEATSIGQMLSQLALLISFIQENHGVISQQNIDFYNHQNAQYWQGIRDFIRMHYDTGRSDTPFWQYMLTVPQSESYQELKKCWLHRTPRDIDFVEHSMGGMSMFSAASWFAVGAGVGVIKPEATSAELYALSPEKKQKLAKYLQEIKQQLAL

SEQ ID NO: 85760 - protein, 518 aa, Colwellia sp.
  misc_feature (1)..(518): tr|A0A1Y5CV72|A0A1Y5CV72_9GAMM Tryptophan halogenase OS =Colwellia sp. 39_35_sub15_T18 OX=1856279 GN=A9Q74_1770 0 PE=4 SV=1
MNEQVKQVVVVGGGTAGWLTAANLAKKFNSVENGAIQVTLVESPDIPTIGVGEGTWPTMRKTLAKLGISEADFLSKCNASFKQATKFVNWQQAPKNGINSHYYHLFTSINDPLEFNLAPYWKLGMIGDNNSYADTVSMQAAICEQGLAPKLITNREFEGVQNYAYHLDAGLFTDLLREHATTKLGVKHISANVTDVNLDDDGYIKNIHCDSVGVVSGEFFVDCTGFKSLLIGKALGIPFKSISDTLLCDHALAIQVPYKNEQSAIASCTVSTAHEAGWTWDIGLSNRRGTGYVYSSAHTSHERAEQVLRNYIGPQADRLESRLIKMNVGYREKFWHKNCFAIGLSAAFVEPLEASAIFLIEASANMLSELFPRDRHAMLAVEKKVNKSFKFRWDKTIDFIKMHYFLSKRTEPFWQDNKLLNTVPDTLLASLDSWQHQLITAYDFDNVYEPFPLDSYQYVLYGMGFEQSLAFNENSYAMQSLAKQQYNKVQELTQQMQQQLPENRALLNKIAQYGFQKV

SEQ ID NO: 85761 - protein, 498 aa, Paraglaciecola polaris
  misc_feature (1)..(498): tr|K6YQU7|K6YQU7_9ALTE FADH2 O2-dependent halogenase I OS=Paraglaciecola polaris LMG 21857 OX=1129793 GN=prnA PE=4 SV=1
MNKKPIKRVVIAGGGTAGWMAAAALSKLLGKNLSVALIESDDIPTVGVGEATIPTLHIFHRLLGINEQEFMAATNATFKLGIQFENWKVQNQDYIHSFGFLGQGCWAAGFQHFWLKGQQKGMVTQIGDYIPEHLACRESRFAVLANQEQNHAYHLDAGLYAQYLRKIAEQHGCKRIEGKIETVTLDDNSGDICALTLASCEVIEGDLFIDCTGFRALLIEQALHTGFEDWSHWLPCDSAVAVQTTAKPNPVPYTRSIARDAGWQWRIPLQNRTGNGLVFCSKYMSDDQAKAALLANIEGELLNEPRVIKYKTGTRRKHWNKNCIAVGLSSGFIEPLESTGIHLFQRAIVRLMLMFPSNGIAQADVNEFNAQSRADVDDIKDFIILHYHQTQRTDTPFWRYCKNMPIPDTLRHRMDLFESTGKVFKKAEELFGETSWIQVMLGQGITPQQYHPIVDIMSDEELKQFLDNIKSNVKRKVANWPNVNDFIRHYCQTNIPTL

SEQ ID NO: 85762 - protein, 513 aa, Devosia sp.
  misc_feature (1)..(513): tr|A0A0Q4NPH5|A0A0Q4NPH5_9RHIZ Uncharacterized protein OS=Devosia sp. Leaf64 OX=1736229 GN=ASE94_12405 PE=4 SV =1
MAKPAHFVVVGGGTAGWIAAFIIQDEARRRGFDFRISVVESSKIPTVGVGEATTAAFRVLLKHFGIDEFEFFRKTDASFKLGIKHEDWRRKGYTYYGPIDDPHQVIQAPPGTPSDYLNVYAVAAGRGVQEMHMFQPLLEQKKAPYALKADGSLIPLGPFHHAYHFDQALVGKFFASKSKGVEKVDALVAGVERDGESGDISALVLDDNSRLEGDFFIDATGFRKQIIVKALDAPWKSYAHELPVNRALPFWIDVKEGEELPNYTRAWAQSSGWMWQIPTRTRFGCGYVYSDEFSTPEQAKEEVERVLGHEIEVRSDIRFQIGRLEKAWIGNCVAVGLSSSFLEPLESTSIHGTIVQMMLFAQRYMDQPSKISQKARDDYNARVGRQVDDFRTFVNTHYMTERDDTPFWREVRANRIHLETKERLARWQKQMPRHGDFPNYLGGLPHIETQLHYPVLNGLGLLDQNLARREMAADPKLRRFAQQTFDGLVREYRAAANQALGHREFLDIVQGMA

SEQ ID NO: 85763 - protein, 491 aa, Amycolatopsis sp.
  misc_feature (1)..(491): tr|A0A429CUB1|A0A429CUB1_9PSEU Tryptophan halogenase OS =Amycolatopsis sp. WAC 01416 OX=2203196 GN=DL990_27065 PE=4 SV=1
MSVEEFDVVVAGGGPGGSTVASLVAMQGHRVLLLEKEVFPRYQIGESLLPSTVHGICRMLGVTDELAAAGFPVKRGGTFRWGARPEPWTFSFSVSPRITGPTSFAYQVERARFDEILLNNARRKGVVVREECTVTGVLEEGERVTGLRYTDPDGEQREVSATFVIDASGNKSRLYSQVGGTRNYSEFFRSLALFGYFEGGKRLPAPYSGNILSVAFDSGWFWYIPLSDTLTSVGAVVRREDAEKIQGDQEKALKTLIAECPLISEYLSDARRVTSGKYGELRVRKDYSYHQTSFWRPGMILVGDAACFVDPVFSSGVHLATYSGLLAARSINSVLGGDTDEKTALTEFEARYRREYGVFYEFLTSFYQMNVNEDSYFWQAKKVTNNQHTEIESFVDLVGGVSSGEAALTPTDRIVERSAEFSAAVDQMAGGDEDSMVPLYKSQVVKQVMQEAGQEQMRAVLGEDAEPELPLFPGGLVTSPDGMSWLPYRPA

SEQ ID NO: 85764 - protein, 806 aa, Methylorubrum extorquens
  misc_feature (1)..(806): tr|A9W5E3|A9W5E3_METEP Tryptophan halogenase OS=Methylo rubrum extorquens (strain PA1) OX=419610 GN=Mext_2404 P E=4 SV=1
MRGDIRGADNSMFRSERSAPPRLVVAGGGPASWMAALYLKRVLRRAGWTVTLVGSAPAAGASAALATRPAFTRFLKGFGIDEAIFMRRCAATYRLASRYDDWFAEGQGHWHPFGACGPRIAGRDLFHYWMKLRGEGAEDEAGRYADYAPQALMAAEARGPRPLADRSSLIDSGDYGYHLDRKALVRFLRELALSEGVRGVTGRVREIERNLYGDVGALILDGGQTIEGDIFLDCTGAAAQLIGTALDEAWVAGSGPGDRVARLSLPRSPEVPPFTAYRGRAEGWTASLPLADRTEHLFVYDSRTTPPDAAAATLRRAFDGQADIVDAELRHGRRASPWQRNVVALGAAAGAVEPLLGFDLDLVLAGLETFLAYLPRQGEGGDVLRRAYAARLNRFHDDAAEAVAAHYVLGRRSEPFWAAARAVMIPDRLADRLDLYELAGHVALSEEAPFSEGDHYLLFSGADFLPRRPFAPVDVADGREIARLLASIRAQSAQIAGAMAPHVRLMDALHGQAPVAAPAVRIAAASAPAGPAALRRTPEGARLADLVAGLGQPFGYERSVKASPAGLQTDRFLMSLHRASLGLTPETTLDRLAAGLGLPERERAEAAGLIGGADILHLGYEDGPSGALYKLYVEWSSRTDAAWTGADEAGAEPMLVHRAYKWNPGGTHPPVVTLYHWPWVRGPEEIEARLTRMTGAWGPAGAPARDTAHAILLLAQERGRGAVHYLEAREEPGLRLSYDLNLYACGLTVADAEPLLGQAFVDLGVPRDAAAMVLRERLQETLGHVAGGVGRDGQPFVTVYSGVAGG

SEQ ID NO: 85765 - protein, 493 aa, Paraglaciecola polaris
  misc_feature (1)..(493): tr|K7A229|K7A229_9ALTE FADH2 O2-dependent halogenase I OS=Paraglaciecola polaris LMG 21857 OX=1129793 GN=prnA PE=4 SV=1
MNNEKVQNVVIAGGGTAGWMAAASLSKLLGKSLNITLVESDEIGTVGVGEATIPPIRTLHKLLNIDEQAFMRATNSTFKLGIEFNHWGQRDDSYIHSFGITGKECWAGEFHHFWLRGKEQGINAPFGDYCYELQASKQGKFAFSVNAPMNFAYHLDATLYAKFLRDFCADAVTRIEGKIQSVSKDPHNGFITALTLASGQQIEGDFFIDCTGFKGMLIEEALHTGYEDWSHWLPCDSAIAVQTQAIADPLPYTRSTAHDFGWQWRIPLQNRVGNGMVFCSRYVSDEQAEETLLANLDGAPINAPRVIKFKTGRRRKGWNKNCVALGLASGFVEPLESTSIHLIMTGIVRLMRLFPFDGVRQSAIDEYNEKLTSELHSIRDFIILHYKVTQRDDTPFWRHCHSMDVPESLSHKIRLFKDTGRVFLDDGDIFRVDSWTQVMLGQGLEPKQYHRIVNEMSDDELQRFLAGMRSAIEQRVNSLPSHQQFIRRYCLAS

SEQ ID NO: 85766 - protein, 544 aa, Fischerella sp.
  misc_feature (1)..(544): tr|A0A1Z4TV88|A0A1Z4TV88_9CYAN Tryptophan halogenase OS =Fischerella sp. NIES-4106 OX=2005456 GN=NIES4106_56620 PE=4 SV=1
MLQNVVKIVIVGGGTAGWMTASYLRKALDRNVDITLVESSNITRIGVGEATFSSIKSFFDFLGLQEHEWMPRCNATYKMAIKFVNWNAEGKTFFHPFERYDTIDGFSISEWWLKIKKSKEPFDYSCFRTPILCDHQKSPRYLNGKVYDDRVQYLFSHKYFNDNKLITLADSEGQYPYAYHFDTNLIATFLKNYAMQRGVKQIVDDVVDVKLREDGSINNIITQENGNVYGDLFIDCTGFRGLLINKTLGEPFISFSESLLCDSAIALRVPTNIKKNGINPYTTATALSAGWVWNIPLYGRIGTGYVYSSKFISQEDAEQELQKHLNLNFDDYDVSHIKMRIGRNRNSWVKNCVAIGLSSGFVEPLESTGIFFIQHGIEELVSNFEGKYLNEDLIKNYNKSIADCIDGVRDFLVLHYYASDRDDTDFWKATKYGIKVPDELCERMKIWKNRLPNKKNINPKFHGFETYSYSVMLLGLNYVPKNYLPILDSFETHNAIAQFNEIKEKANHLCATLPSHYEYLTHVIKSQENPDYLNEISLLDTHVF

SEQ ID NO: 85767 - protein, 503 aa, Asticcacaulis sp.
  misc_feature (1)..(503): tr|V4P317|V4P317_9CAUL Uncharacterized protein OS=Astic cacaulis sp. AC466 OX=1282362 GN=AEAC466_16735 PE=4 SV= 1
MNTADNKTSAHRRQVVIVGGGTAGWMSAALLAKITQGKLGDITLVESEEIGTIGVGEATIPAIKRFNRLLELHELDFVRQTQASFKLGIEFVNWGQVGTRYFHPFGAIGDPIGRAAFHHFLTRRRLAGEAESFEDYSLNAMAARQNRFTTPPRDDSPLSQLSYAYHFDASLYAAYLRRHAEANGVKRVEGKIRHVGQNAETGFIERLSLENGQTVEGDFFIDCSGLSGLLIEKTLHSGFDDWSALLPCNSAAFVPSEKVADVTPYTRSTAHTAGWQWRIPLQHRTGNGHVFCSDFITDDEAAQTLVRNLDGKALADPKFVRFKTGRRRLSWNRNVVAIGLSGGFLEPLESTSIHLIQSGLVKLLDYWPGERFAPLLAEQYNRAMANQYESIRDFIILHYKATQRDDSAFWRYCRDMPVPDSLSYRLDHFRSSARIVLTPGELFQPNSWLAVMLGQNINPLGYDPLADVVDTERVAAQFSRMRGTISRAVQSMPSHKAFLDALS

SEQ ID NO: 85768 - protein, 505 aa, Sphingomonas turrisvirgatae
  misc_feature (1)..(505): tr|A0A1E3LS42|A0A1E3LS42_9SPHN Tryptophan halogenase OS =Sphingomonas turrisvirgatae OX=1888892 GN=BFL28_04405 PE=4 SV=1
MAPDIKNILILGGGTAGWACAAVLAQRSAEHGVSLTVVDAADIPTIGVGEATIPTIYDLLNHVGMTDTEVVKAAQATFKYGIQFEGWSRRGETYMHGFGTTGTPRGEDDFFTAWLGGGAYFSSRTLDAFTPAVAAARKGRFARVAERPAGAAQHLYYPLCELSYALHFDAALLARELRANALRNGVVHRSSKIVAVETGERGIAALRTGDGELIEADFFIDCSGLTGVLSRAALGGMFEDWRAYLPCDRAIAVQTARSTAPNPYTRSVAHRAGWRWEIQLQSRTGNGCVYSSDHMSDDEATDLLMSEVAGEAINQPRRIDFRTGRLAEPWEANCVALGLAAGFLEPLESTSIHLISKYALLLEQMLFDNAGKPDDRGRFNAMWRAETEEIRDFLSAHYVVNQRDEPFWTERRDAKRPPSLDRKLQAFAQTGWFDLPDHALFGHDSWFQVLIGQGFALDYPQFAIPRAEAPGLLQFLQNVARAVDVETSAIPRSHQQVIHSLVEGG

SEQ ID NO: 85769 - protein, 508 aa, Asticcacaulis sp.
  misc_feature (1)..(508): tr|V4PF28|V4PF28_9CAUL Uncharacterized protein OS=Astic cacaulis sp. AC466 OX=1282362 GN=AEAC466_01005 PE=4 SV= 1
MSPTRSVVIVGGGTAGWLTAGLIAANHKGHLSVTLVESPNVKSIGVGEGTWPTIRNTLKKIGISEADFLKACDGTFKQASKFVNWTTGDDHYYHPFMLPKAYDQINLAPYWQAQPNGLSFADTVSYQPAACAQDLAPKTMTVPEYAAITNYAYHLDAGKFAPFLQKHCVENLGVRHVLADVTRIENDGDGYIARLQTDVGEAIAGDLFIDCTGFLSLLIGKHYGAAFTSCADQLFIDTALAIQVPYEREDAPIASVTKSTAQRAGWIWDIGLTHRRGLGHVFSSRFTTDDEALADLKAYIGPSGAHLTFDEVRKIPIRSGHRQTPWVKNCVAVGLSSGFVEPLEASSIVMAELSAQMIADQMPVNRAAMAVVAKRFNTTLNYRWARIIDFLKLHYVLSQREEPFWVANRDPSTMPESLKDLLSLWKYHFPWHDDLDHRDEIFPTASFQYVYYGMGGRTDPGAFPKTPDWPKAVGHFQEVARARQAVTGQLPTNRNLLSKISQYGLQKV

SEQ ID NO: 85770 - protein, 517 aa, Paraglaciecola polaris
  misc_feature (1)..(517): tr|K6ZSR3|K6ZSR3_9ALTE Tryptophan halogenase OS=Paragla ciecola polaris LMG 21857 OX=1129793 GN=GPLA_0952 PE=4 SV=1
MTHAIQSIVIVGGGTAGWITAGTLAAKLKNEHATGFTITLVESPDVKPIGVGEGTWPTMRRTLKAMGIGETDFIQQCNVSFKQGAKFAKWVTGEEDDFYYHPLVLPQDFDRTNLARHWAYAPSGQSFSQAVSPQETVCELGLAPKAITTAEYASIINYAYHLDAGLFSAFLQQHCTDKLGVRHILDNVSHINSALNGDITSVSTAQNGDIKGDLFIDCTGFKSLLLGEHFKVGFKSCKDVLFVDQALAIHVPYDDENAPVASHTISTGQSAGWVWDIGLQNRRGVGHVYSSAHTSEERAGEELLHYIRQTGGSVNSADIRKIPLNPGHREKFWQRNCVAIGLSAGFLEPLEASSLLLVEISASMIAEQFPAMRDAMDVIAKRFNRTFLYRWERIIDFLKLHYMLTQRNDSDFWIDNRDPVTIPQSLQDHLTLWRYQPPWHNDFEDAVEVFPAASYQYVLYGMGFYTQHSALGLSDAYQQKAVSLRHKNSQQCEQMRRNLPTNRALLNKIHQYGLQKV

SEQ ID NO: 85771 - protein, 498 aa, Asticcacaulis sp.
  misc_feature (1)..(498): tr|V4P9S5|V4P9S5_9CAUL Uncharacterized protein OS=Astic cacaulis sp. AC466 OX=1282362 GN=AEAC466_10920 PE=4 SV= 1
MFMNSVQQQEIVILGGGAAGWIAAALLARKTDRSQTRVTLVESEEIGIIGVGEATVPVLAHCNALLGIDEYDFIRNTQGTFKLGIEFCDWGVAGNRHFHAFSDYGHQVDGVSTHHYWLRLRQSGDAHPIDDYSFAYAVAKNNNFAPTDPQNPRYHHAYHFDAALYARYLRDVATGQGVQRIEGKMTHFDLESASGNITAIHLANGSRVPGDLFLDCTGFASELLGKALETPFVDWSRWLLCNSAMAVPSKRTGAPMPFTRSTAHAGGWRWTIPLQHRCGHGMVYNSDLWSDDAARDALTGNVDGELLAEPRVFRFTSGHRKQFWNRNCVGIGFASSFLEPLESTGLQLIVQGVLKLLQFFPQRIIDPVLRDEYNRISTREIERIRDFIIAHYYLSRRPEPLWAACRNIEVPDSLRHKLEVWNASGQIALGDLESYMEPSWLAILLGNGVVPARYAVAADLYPLEQIRKGMKLRREEIVRSAQAVTSHQDFIDQYCKAP

SEQ ID NO: 85772 - protein, 512 aa, Mycolicibacterium phlei
  misc_feature (1)..(512): tr|A0A3S4R730|A0A3S4R730_MYCPH Tryptophan halogenase OS =Mycolicibacterium phlei OX=1771 GN=NCTC8151_03490 PE=4 SV=1
MLQKVVIVGGGTAGWMTASYLKVAFGDRITVTVVESARIGAIGVGEATFSTIRHFFDYLGLEEHEWMPSCCATYKLGIRFQDWRKPGHHFYHPFERQRVVDGFGLTDWWLDNPRSDSFDRDCFLIGTLCDNDKSPRRLDGSLFMDTDGEHTAYRTTLSEQDTQFPYAYHFDASLLADFLRDFAVRRGVRHVVDDVVDVLQDDRGWISEVRTRAHGSIEGDLFIDCTGFSGLLLGRAMGEPFESYQGSLLNDRAVALRVPTDQNGGHLPPYTTATAQDAGWIWSIPLFDRIGTGYVYAEDYCSPEDAERALRDFVGPAAEGLEANHIRMRIGRSRRSWVGNCVAIGLASGFVEPLESTGIFFIQHGIEQLVKHFPDENWEERLRDSYNRVINRCMDGVREFLVLHYYLAARVDTQYWRDTKSVQLPTALAERIEHWRSKLPDAGSVYPHYHGFEPYSYVCMFVGLGGIPARPAAVVRYLDATRAQREFDLIAQQASRLRHSLPTHREYLAQMY

SEQ ID NO: 85773 - protein, 509 aa, Asticcacaulis sp.
  misc_feature (1)..(509): tr|V4NQU6|V4NQU6_9CAUL Tryptophan halogenase OS=Asticca caulis sp. AC466 OX=1282362 GN=AEAC466_10470 PE=4 SV=1
MQTSLIKTITIVGGGTAGWMTAALLSKLLLGRFQITLIESEDIGTIGVGEATIPAIKVFNQLLDLDEVEFLKATQGTFKLGIEFVNWRDKGHSYIHGFGKIGVDLMWLHTHQFWLKMFPKGGVKDFDHYGLNTLAARRNRFKMRRPDDSPPMSDMDYAYHFDASLYARHLRGLSERREVRRIEGRITQVVLRPDNGYIDSVVLENGQAVGGDLFIDCSGMRGLLIGEALGVGYEDWNHWLLNDRAYAVPCAHRGTGAGVSESLTPYTRSIAHASGWQWRIPLQHRIGNGHVYSSAYLSDDEAATTLLKNLDGQALADPRQVRFRPGKRQRAFEKNCVAIGLSGGFLEPLESTSIHLIQTGILRLLALFPGQSFDARDIAEYNAQTDFEYRDVRDFIIAHYKVTDREDTPYWAYLKHMDIPDSLAQRIELFRSSARFFKHSAAELFHEESWVQVLLGQGLDMRYDPMVDMIPEDQITAYLRDIEEVISEYADGMPIHADFIARYCKAPPL

SEQ ID NO: 85774 - protein, 502 aa, Asticcacaulis sp.
  misc_feature (1)..(502): tr|V4QQP5|V4QQP5_9CAUL Uncharacterized protein OS=Astic cacaulis sp. AC466 OX=1282362 GN=AEAC466_21175 PE=4 SV= 1
MAAEPIKTIVILGGGTAGWLSATFLNRILGDTVDITLIESDDIGTVGVGEATIPPLVNLLVFLGLDEREVMKAVQGTYKLGIEFIDWYEKGEAYSHAFGAPGNPLGVLPFHQYWLRQRMRGKGGSLWDYSLNHMAAKANRFTHMKTIPNTPNMEGMNYALHFDAGLLARYLRGHCEAQGVTRREGKVAGVNLRAKDGFIESLRLEGGETVGGDFFLDCSGFQGVLIEGALKAGYEDWTRWLPCDRALAVPCASAGPLKPYTQARAHTAGWQWRIPLQHRTGNGHVFSSAFMETDEAAKILLANLDGEPLAEPRLLKFTTGRRRKTWVKNCVALGLASGFMEPLESTSIHLVQTALQRLAHMFPDKGFNPIEIAEYNRKTQREYELIRDFLVLHYTATQRADSPFWNHCRTMDVPDSLNGKVDFFRQHGRVIVEEDDLFKEANWVQVLIGQGVMPESCSPLTLNVPEKKLDDYFQHIRQIYETTVMKTPSHAQYIAYHCQAET

SEQ ID NO: 85775 - protein, 533 aa, Shewanella sp.
  misc_feature (1)..(533): tr|A0A4Y6IAN6|A0A4Y6IAN6_9GAMM Tryptophan 7-halogenase OS=Shewanella sp. SNU WT4 OX=2590015 GN=FJQ87_06370 PE= 4 SV=1
MTITKIAIVGGGTAGWLAANHLGKALAARRDIELTLIESPQVPTIGVGEGTVPAIRQSLQSFGISETEFIRSCDVTFKQSIKFINWLDKSSHGEHYAYHHLFDRPSSPLDLTPLYLSQLAQSELLPTSYASTNALPTGSEPNAGGFNASSVHYAHLVSAQHQLCESGKAPKSITTPEWQGIAGYAYHLNALKFAQLLASNAKQRFNVNHIRAHIDKVVLGDDGLISGLVTEEHGLVNFDFYIDCSGTEAVLMKALKVPFISVADSLFVDTALAIQVPTAALQTIPPYTLATAHQAGWIWDIALTERRGVGLVYSSRYMNEDEATLKLHRYLGPSSCDMSFRKIAMKVGYLAESWRGNCVALGLAQGFLEPLEATSIMLTDFSAKLLAERLPQDCAQLPLLAGRFNQVMLHAWQRVIDFVKLHYFLSDRSDSQFWLDNRNPAHLSEELQQRLQLWQTSVPLKSDFFSKFEAFDLENYLYVLYGMKYQTQLSGAPSASLRQQAEDVQQLARKWLEYLPEHRDLLERIHKYGLQKN

SEQ ID NO: 85776 - protein, 501 aa, Streptomyces noursei
  misc_feature (1)..(501): tr|A0A2N8PC14|A0A2N8PC14_STRNR Tryptophan halogenase OS =Streptomyces noursei OX=1971 GN=AOB60_31755 PE=4 SV=1
MTASYLRAALGESINVTVIESKRIKTIGVGEATFSTVRHFFDYLGLSENDWMPKCNATYKLGIRFENWRAKGHYFYHPFERLRVVDGFPLTEWWLNKKPSDRFDQDVFLMSEICDNMRSPRYLDGTLFEQDFVERGGSLDLERSTLAEQATQFPYAYQFDASLLADFLTEYATARGARHIEDDVVEVVRDERGWISHLKTREHGELAGDLFIDCTGFAGLLLNKTLGEPFVSYQNTLPNDSAVALRVPHDAEHTRLRPCTTATAQEAGWIWTIPLFERIGTGYVYASDYTTPEEAERTLRAFVGPQAADVEANHIRMRIGRSRQSWVNNCVAIGLSSGFVEPLESTGIFFIQQGIEELVKHFPDAKWDPKLRDSYNRTVANAMDGVREFLVLHYRTAARNDNAYWRDAKTRELPDGLAARLEAWQSKLPTEETIFPHYHGFEPYSYHAMLLGLGGFEAKPAPVLAYMDDSRAAQEIQRLKDQARDIAKRLPSQYEYLAQMH

SEQ ID NO: 85777 - protein, 515 aa, Sphingomonas turrisvirgatae
  misc_feature (1)..(515): tr|A0A1E3LYW1|A0A1E3LYW1_9SPHN Tryptophan halogenase OS =Sphingomonas turrisvirgatae OX=1888892 GN=BFL28_12855 PE=4 SV=1
MEPVTRIVIVGGGTAGWLTAGTLAAATRESDERPLEITLVESPNVPIIGVGEGTWPTMRRTLKRMGIRETDFLNQCSASFKQGAQFVGWVDGSQGDAYYHPLVLPQGYFETNMARQWLAGVSDGSFAAAVCPQEALCEAGRAPKAITTAEYDAVANYAYHLDAGAFSRFLQEHCTRVLGVRHVAADVTGIRSAENGDIAAVLTMQAGEISGDLFIDCTGFRALLLGEHFGVGFIPWTQVLFADRALAVQVPYPAADSPILPHTLSTAQRAGWIWDIGLQSRRGVGHVYSSAHIDDDAARADLRAYVHSIGGDAEALPMRKIEFQAGHRTRFWERNCVAVGLSAGFLEPLEASAILLVEIAAQFIAEQMPATRAAMDPVARRYNTTFAYRWARIIDFLKLHYLLSRRTEPFWADNRRTESIPESLTELLTLWREQPPWHDDFDRAVEVFPAASYQYVLYGMGFETRVPPRGLSSQARAHGEQLFMHNKQEAAAMIQRLPSTRDLLDRIARYGLQPV

SEQ ID NO: 85778 - protein, 552 aa, Calothrix elsteri
  misc_feature (1)..(552): tr|A0A2A2TE42|A0A2A2TE42_9CYAN Tryptophan halogenase OS =Calothrix elsteri CCALA 953 OX=987040 GN=CK510_21320 P E=4 SV=1
MKNTGNKIENIVIVGGGTTGWMAAAYLVKALQGSVAITLIESDQIPTLGVGEATVPSIRTEFFDFLEIPESEWMPQCNGTFKIGIKYADWSYTPHTTKNNEFYHIFGESKKYDDIPLTHYWLKKRLDGYDLSMSDCCYSSTAVCEFNKSPKFLDGTTGVNYAYHFDANLLAKFLASWTVKKGVVRVVDKVVNVILDNTGAIDFLKTEKGNTHKADLYIDCSGFQGLLINQALKEPFISYSDSLLCDAAVAIPVKTDNIDGLRPYTIATALSSGWSWEIPLYGRLGRGYVYSQKFISPDEAEQELRKFHGSIADDIPAKHLKMRVGRNEHSWVKNCVSLGIASGFIEPLESTGIYFIYAALKHLIRYFPDKSMNPALKDKYNERIAFMVDDVRDFIVLHYCTTHREDTPFWKANKFDLKIPDTLKRLLEVYQAGAPINLPYTDEGGYNNVFDAGFDRFWTNSNYMAILGGMNHLPNSASPILNHKPESVNKAEKIFKAIKDNTKNLLDELPSHYEYIKNLYLNQKSSDEIYSYTSVKKNEIREIDSWLKVKVS

SEQ ID NO: 85779 - protein, 121 aa, Sphingomonas sp.
  misc_feature (1)..(121): tr|A0A031HQN6|A0A031HQN6_9SPHN Tryptophan halogenase OS =Sphingomonas sp. RIT328 OX=1470591 GN=BW41_02668 PE=4 SV=1
MQTRDVLILPYKVTERRDGCWRYGAAMPIPDSRAQKIELFRETRRAFRRNEELFAEQSWVQVMMGQGIMPRSHHPIAANSSDADLARLLDTLRRTVAAAVRGLPDHASYVAHHGGIARDAG

SEQ ID NO: 85780 - protein, 516 aa, Streptomyces yunnanensis
  misc_feature (1)..(516): tr|A0A1M7QPK3|A0A1M7QPK3_9ACTN Tryptophan halogenase OS =Streptomyces yunnanensis OX=156453 GN=SAMN05216268_138 17 PE=4 SV=1
MLSSVVIVGGGTSGWMTASYLRAALGESINVTVIESKRIKTIGVGEATFSTVRHFFDYLGLSENDWMPKCNATYKLGIRFENWRAKGHYFYHPFERLRVVDGFPLTEWWLNKKPSDRFDQDVFLMSEICDNMRSPRYLDGTLFEQDFIERGGSLDLERSTLAEQATQFPYAYQFDASLLADFLTEYATARGARHIEDDVVEVVRDERGWISHLKTREHGELAGDLFIDCTGFAGLLLNKTLGEPFVSYQNTLPNDSAVALRVPHDAEHTRLRPCTTATAQEAGWIWTIPLFERIGTGYVYASDYTTPEEAERTLRAFVGPQAADVEANHIRMRIGRSRQSWVNNCVAIGLSSGFVEPLESTGIFFIQQGIEELVKHFPDAKWDPKLRDSYNRTVANAMDGVREFLVLHYRTAARNDNAYWRDAKTRELPDGLAARLEAWQSKLPTEETIFPHYHGFEPYSYHAMLLGLGGFEAKPAPVLAYMDDSRAAQEIQRLKDQARDIAKRLPSQYEYLAQMH

SEQ ID NO: 85781 - protein, 501 aa, Cylindrospermum stagnale
  misc_feature (1)..(501): tr|K9X1I4|K9X1I4_9NOST 2-polyprenyl-6-methoxyphenol hyd roxylase-like oxidoreductase OS=Cylindrospermum stagnal e PCC 7417 OX=56107 GN=Cylst_4395 PE=4 SV=1
MEKTIHNVVVLGGGSAGFLSALALKVKMPSLNVVVVHSKTIPVIGVGEATTAWIPWFLHTYLGLNRQQFYEETQPIWKLGIKFIWGNSHQSHFNYPFVTHLADKLSVLDKSTAYYCLDSTRESSIYSLLMEQYKSPCFRKENGDFVFDERFGYHIENASFVSYLERRAAELDIKIIDQPVVNIQVAENGYIHQLKLDDGTTLAGDLFVDCSGFRSTLLGEILQEPFCSFSSSLFNDSAVTGTWMRDDVIYPFTTAETMQAGWCWRIDLPEQVNRGYVYSSAFISDDDALAEMKRQNPLMGDDHHSVVRFKSGRHQRFWVNNVVGVGNASGFVEPLESTGLHMIGETIKCVCDVLIDSDQQPTPGLINLANQAIAEKWDDIRDFLSIHFKFNRRVTSDFWQHCWQQTDIGEAEAVVDFFQNNGPSPIGQLLLRKNSVFKYNGYLNLLMGQQVATKYQGNNEILDLDNWRQVKNYFLKNCDNALPIHEAIQVVKERKCQWLSS

SEQ ID NO: 85782 - protein, 501 aa, Alteromonas stellipolaris
  misc_feature (1)..(501): tr|A0A0S1YMJ9|A0A0S1YMJ9_9ALTE Tryptophan halogenase OS =Alteromonas stellipolaris LMG 21856 OX=1160720 GN=AOR1 3_2668 PE=4 SV=1
MSQSMSIKSIVIVGGGSAGWMTAATLSKVLDLSKYSVTLIESEDIKGVSVGEATIPQITLFNRILGIDEADFIRATNATYKLGIEFKDWKRKGHAYFHPFGTFGINMEALPFHHFWLKRFNEGAGGDLCSYSIEAMAAKSGRFGKVNAQNNSPLANMSYAYHFDSTLYANFLRDFAVKRGVRHIKGKVEAVSKHPNGHINTLTLQNGHCIDGEFYIDCSGFRSLLLEKEMGATFNDWSDLLPCDSAIAIPCKSADSMLKPYTQSTAKNAGWTWRIPLQHRIGNGYVYASKFTEKEAALDDLMAQLEGEPLAEPNFLAWKTGMRPQSWIKNCLGIGLSAGFIEPLESTGLHLIQSAIARLMTLFPSNRFCQSDIDMYNRQTTKEFEQIRDFIVLHYALTERNDSEFWRYCRNISLSESLEQKVQLYKDSGRIFRIDNELFNETSWLAVMHGQGLRSEGYHPLVDRMSTSLIDERLSHIASVINKSASLLPEHAHFIAQLNVK

SEQ ID NO: 85783 - protein, 513 aa, Sphingomonas sp.
  misc_feature (1)..(513): tr|A0A031I6N1|A0A031I6N1_9SPHN Tryptophan halogenase OS =Sphingomonas sp. RIT328 OX=1470591 GN=BW41_00535 PE=4 SV=1
MSRGRRILIVGGGTAGWLTAAYLAKALGQSVRITLLESADIGIIGVGEGTFPTIRDTLRFLGIEEPAFVREASATFKQGVRFKGWQAADADGGHSYFHPFEPPFQSHETSLVPYWLLQDEAERPPFAEAVTIQNRVAEAKRAPKQPGEGDFAGPLNYAFHFDAVQLSRILANRARELGVEHVEGRLRTVALNESGQIAGIGTETGAFSADLYIDCTGFRAELIGKALGSPFHSVRNQLFTDRALTCKLPYDRPDAAIESYTIASAHEAGWIWDIGLSTGRGIGCVYSSRYMDDDRAAAVLREHLGPAAHGVVPRNLSFEAGWRTQPWIGNCVAVGLSGGFLEPLESTGVVLIEAAIGMIAELFPHQGPVDLPARRFNELMGARYANIVNFLKLHYCLSRRPEPFWRDNADPVSIPDRLRELLNQWRYRPPSRYDLQLDVESFAFFNYQYILYGMGFRTDLSEGREDFPDVAEARRLFARIKAFGERATRDLPSHRELVQRFAAPALTPARTGS

SEQ ID NO: 85784 - protein, 491 aa, Salinimonas sp.
  misc_feature (1)..(491): tr|A0A5B7Y8A5|A0A5B7Y8A5_9ALTE Tryptophan 7-halogenase OS=Salinimonas sp. KX18D6 OX=2572577 GN=FBQ74_00400 PE= 4 SV=1
MTTTPKKIVIAGGGTAGWIAAAALARKMGPLVDVRLIESETIGTIGVGEATIPPLRTFHKLLQIDEQAFMRATSATFKLGIQFENWGHIGERYIHSFGVTGQQSWLAEFVHFFLSAKEKGLEGTYGDYCFELEAARQHKFATSQQSNIQYAYHLDAGDYVSFLKRFCSALNVTRTEGVISRVAQHDNGDISALHLESGEIIEGDFFIDCTGFKGLLIEETLETGFEDWSHWLLCDSACAVQTESTQPAPPYTRAAAHHAGWQWEIPLQHRVGNGLVYSSKFMDDEEARQTLLKNVKGEPLTSPRTLRFKTGRRKKAWHRNCLALGLASGFVEPLESTSIHLVMMGITRFMQLFPHSGHDPALIDEYNSQTQAELERIRDFIILHYHVTARDDSPFWQHCKDMQVPDSLISRITLFKEQAHAFQKLNELFRVDSWTQVMLGQGITPTHYHPAATMLSEDQLKNSLRQQRERVLAAVKQLPEHADFVKGYCGR

SEQ ID NO: 85785 - protein, 504 aa, Paraburkholderia sp.
  misc_feature (1)..(504): tr|A0A3N6Q990|A0A3N6Q990_9BURK Tryptophan 7-halogenase OS=Paraburkholderia sp. DHOA04 OX=2305225 GN=D1Y85_0460 5 PE=4 SV=1
MLDFRKMKNFVVLGGGTAGWFAALELRRMFGPAVSVTVIESPRVGVIGVGEGGILNFPEALIGRYGIDLDAFLEGTGAVFKLGFEYVGWNNGRDDDVFYHLFHRLPAEGEGRMIDGVAPYWSMLAAHGIGIHHAVYSLPFVLANASQSEVRKALEAAGGLMPWSLHFDAHRVAAWLKLAAMARGIETRVGNVVELLRDAESGHVRALRFEGEELPMPCDFLIDASGFARIALQKTMGSPLRSFTDYMSHDRAIPFYIPHPRPNPHLVTRSLAMSAGWIWQIPVRERVGCGYVYSSAYLSEDEALAEIESRLGQKIEPMPTLRFHAAHFPEVWVGNVMAVGLASGFIEPLEATSIGQMLGQLTMFGETVKQSCGVVPQSTISTFNHRNRLDWDGIRDFLCLHYDVPRRDTPFWRDVTSRAVPSTYSDLKKAWQLRTPRPVDFNAYRAGHVLHFDATSWFAVGQGVGVVPPAAAQADLDMLPREAVRSAEAFLHSVRIRNASARQS

SEQ ID NO: 85786 - protein, 489 aa, Sphingomonas sp.
  misc_feature (1)..(489): tr|A0A0Q6AHN6|A0A0Q6AHN6_9SPHN Tryptophan halogenase OS =Sphingomonas sp. Leaf407 OX=1736369 GN=ASG37_16110 PE= 4 SV=1
MIVGGGTAGWMVAAALARHLGGAVRVRLIESAEIGIVGVGEATLPHIRQFVTRLGIDEGAFMAATDATYKLGIAFEDFGALGDRYVHPFGTFGRDLAGVGFHHFWLRAAADGRNTPIGAYSLGVAAAESCRFAVPRDDDLSLAASYGYAYQFDATKFGPFLRAFAEPLGVERTEAKVVSVDRDSASGNVTTLHLDSGEAIHGDLFIDCSGFRSLLLGQTMGEAWEDWSHWLPCDRAVAVPCASPPGEIEPYTRATAMAAGWRWRIPLTSRVGNGYVFSSAHLDEDAATAALLGAIEGPPLADPRVLRFKAGRRARSWVGNVVAVGLASGFLEPLESTSIYLVQMAIARLIELFPVDGGDDADRAEFNRLVDMEYDRIRDFLILHYHATRRSDSSFWNHVRTMEVPDTLAAKLDLWRATGRVERYGEGLFFEPSWIAVYLGQGVIPAGYDPRADIPPDAALARALQGLQGEIAASVAAMPGHAHALGRRP

SEQ ID NO: 85787 - protein, 561 aa, Ruegeria intermedia
  misc_feature (1)..(561): tr|A0A1M4UV20|A0A1M4UV20_9RHOB Tryptophan halogenase OS =Ruegeria intermedia OX=996115 GN=SAMN05444279_1056 PE= 4 SV=1
MNNRLSKITIVGGGTAGWMTALILEMVFSRTSAPKDRPRICLIESPNIATVGVGEATVPRMPVTLRQAGISERDFFRETNASFKLGVKFCNWNKDAKGNRIDYVNPFAHGQMIEGLDAAEYFLRFGNGDRDFTQSIAPHDDLGRLCKGARPLGQPEFEQRFGYAYHLDAVKFAGMLTRVCTKRGVEHIQDEVQSVELDEQGNVSHLMLERKGRHDIEMVIDCTGFRGLIINQALGEPFMDYSDYLPNDRAMALQVEHPDPDKIESLTRATALGAGWTWRVPLFNRVGTGYVFSSAHRTDDQAADEYLEWLGDSGKGATPRVIPMRIGRVRNAWVKNCVAIGLAGGFIEPLESTAIHMIDHAVRWFAEHLPTKAIEPSLRTRYNRQMNKLYDEVLEFICLHYRLGNRTDDQYWIDARTQLKVPDRLAENLDLWQNRLPLERDIEFATLFDYRVYQTVLLGKQVYDTGYGPGIRDRLRPLKKPIWFQWWKGAKMDLAKILKTMPDHKTLLLDIRGELERPAFGKAVAAKPTVAMPGTVPAPVVVQNMPNLAEIRSGAKDLQLF

SEQ ID NO: 85788 - protein, 499 aa, Alteromonas sp.
  misc_feature (1)..(499): tr|A0A4P6AJU0|A0A4P6AJU0_9ALTE Tryptophan 7-halogenase OS=Alteromonas sp. KUL49 OX=2480798 GN=EYS00_01320 PE=4 SV=1
MTKNTIKTFVIVGGGTAGWMTAAALSRMLQPEHVSVTLVESDAIGTVGVGEATIPDIANFNKMLGIQEADFLKATSGTFKLGIEFSNWGKLGDKYFHPFGTHGVDMNGIDFHQYWLHSLSDSNHPPLESYSMCAVAAKQAKFSFPSSNPRAVTSSIRYAYHFDAIKYATFLREYAQQRGVNRVEGTIRQVSTNPKTGNIDALELESGQRITADFFFDCSGLRALLIDKTLGVQYKDWSHWLPCNSAQAIPTERTEPLLPFTKAIAQKAGWQWRIPTQHRTGNGHIYSRDFLDDEEATQILLDNVDAKPIGEPRTIRFTTGCRDQFWYKNCVAIGLSGGFLEPLESTSIYLIQQGISRFMSLFPSLNASEVIIDEYNRLMCREFEQVRDFIILHYKATERDDSEFWRYCSAMTIPDTLQHKIDLFKAGGRVFRDDNELFTRPSWIAVMLGQNIYPDNYDPMLANIPRSDIQRSLNSMSVSMTAAVEKMKTHAEFIKQYAK

SEQ ID NO: 85789 - protein, 511 aa, Alteromonas sp.
  misc_feature (1)..(511): tr|A0A4P6ALU2|A0A4P6ALU2_9ALTE Tryptophan 7-halogenase OS=Alteromonas sp. KUL49 OX=2480798 GN=EYS00_01540 PE=4 SV=1
MTESIKHIVVVGGGTAGWLTAGRIAAEHKENQAIQVTLVESPNVPIVGVGEGTWPTMRSTLIKLGIREDDFINQCDVSFKQGAKFAKWSKNIEEDFYYHPLVLPQGFSKVNLVPHWQQQGVSQSFSDAVCFQEALCEKGLAPKTIRNPQYGAVANYAYHLNAGKFSQFLQKHCTSNLRVKHVLADVRSVTENELGDIAHVTTEQAGDIAGDLFIDCSGFSALLIGKHYQIPFNSCNDVLFVDNALAVQVPYEQEDDPIASHTISTAQQAGWIWDIGLQHRRGIGHVYSSAFTSEDQAYADLSRYIGRNIDDLSVKKISFDSGYRDKFWHRNCVAVGLAAGFVEPLEASSLVLVELSAQMIAEQLPACRSVMDIIAKRFNDTFTYRWLRIVDFLKLHYVPSQREEAFWQENRAAHSIPESLKELMHLWRYHPPYDHDFTSNNEVFPAASYQYVLYGMGFKTDLSLYRTNDAEMALAKEQFHLNKMNIAKAVDMLPTNRELINKIKAFGLQAI

SEQ ID NO: 85790 - protein, 512 aa, Sphingomonas fennica
  misc_feature (1)..(512): tr|A0A2T4HYD4|A0A2T4HYD4_9SPHN Tryptophan halogenase OS =Sphingomonas fennica OX=114404 GN=CV103_10470 PE=4 SV= 1
MAKRIIIVGGGTAGWLTAAYLIRSLGRSGWSITLVESPDIGIIGVGEGTFPTIRETLSAIGVDEREFLREADGSFKQGVRFSGWTGGPTPGNDTDDYFHPFNLPYGGDEGLLPYWIKAAGEARRPSYADAVTVQGHVIRAGCAPKRASDPGFDGPMNYAYHFDAARFADYLRKVATANGVERIEATINEVRQAEDGRIAAVVPGDGREAIEGDFFIDCSGFRALLIGKALGSPFRHVGDVLFNDRALAMQVPHGDADTPIRPYTLATAHEAGWTWDIGLGARRGIGYVYSSRHSDDEAAERVLRAYIGKAADGLSPRQLRFESGYRSVQWIGNCAAVGLSAGFFEPLESTGIMLIEVAARMISDFLGSPAIDEAAMAAAARQYNRLMLARFDAIVEFLKLHYCISGRRDTAYWRDNSDAASIPEGLRDKLAQWRHRPPSRFDFVVDHETFLPASWQFILYGMGFCTDPAAVSSSHRDDEQAGAAFVRVFQAARQAVAELPPHRALLEQLRAA

SEQ ID NO: 85791 - protein, 503 aa, Lysobacter sp.
  misc_feature (1)..(503): tr|A0A5C7XQD2|A0A5C7XQD2_LYSSP Tryptophan 7-halogenase OS=Lysobacter sp. OX=72226 GN=E6Q50_00480 PE=4 SV=1
MNSGRVTEIVILGGGTAGWMTAAALSKVLSPEYSIRLVESEEIGIVGVGEATIPMIKLYNQALELDEYEFIRQTMGTFKLGIEFVNWGRVGDSYIHGFGKIGQDLGLVPFYQYWLKMHQAGKAAPLDDYSINTYAARQNRFLPPVTDRPNSPLADIAYAYHFDASLYARFLRQYAEARGVKRFEGKVVGVEQNPETGYINALTLDKGDRIAGQLFVDCSGLRGILIEQTLKTGYTDWRHWLPCDRAVAVPCARTQALTPYTRSTARDAGWQWRIPLQHRVGNGHVFSSKFISEDEATAVLMNNLEGEALAEPRVIRYVTGKRNKFWNKNVVAIGLASGFLEPLESTSIHLIQSSIARLTAFFPHGGFDQADIDEYNLHSDFEFDKIRDFIILHYHATERDDTPFWNYVRTMEVPESLARKMALFNSNGRIFREGNELFAEPSWVQVMHGQRMSPKAYHALVDVYSEEKIADYMQNIRGVIANCMRVMPTHEEFIERQCKAKTM

SEQ ID NO: 85792 - protein, 506 aa, Alteromonas sp.
  misc_feature (1)..(506): tr|A0A4P6AU64|A0A4P6AU64_9ALTE Tryptophan 7-halogenase OS=Alteromonas sp. KUL49 OX=2480798 GN=EYS00_18670 PE=4 SV=1
MTTEKRAIQHIAIVGGGTAGWMTAAALSHHFKQSSVSISLVESSQLGTVGVGEATIPTLRRFYAKLGLTDLDVVAAADATCKLGIEFQDWRGKGSSFIHPFGLFGDKQQDIGFQHFWSKGQELGENADISQYSLGVSLAKNNKFTPPNPKPKSRLEIFDWALHFDAVKFAALMKKVATQNGVTHIDGKISEVTLCADGSIDSLKFEDNITSVNADLYIDCSGFHGLLIDKALNTPYIDWTQWLLCDRAVSVQTHVDESPITRTIAKAKQAGWQWRIPLQTRQGNGYVYSSQFIDKADATESLLNDVKGSPLHDPRHFSFTPGRREVAWNKNCVAVGLSAGFIEPLESTSIALIETAIDHLVQTFRQPAYSAADVQRFNEVTRDEYERVRDFIILHYKLNGRDDSELWCYCRDMPVPDTLQAKMDEYQREGKLTRYPWEIFGEDSWIAVYHGLEFYPKGYDKRLARVDEAMFVDQLKAMRTWIANVTEQVPPHEAFLRYAKQAQAAK

SEQ ID NO: 85793 - protein, 499 aa, Alteromonas sp.
  misc_feature (1)..(499): tr|A0A4P6AVR4|A0A4P6AVR4_9ALTE Tryptophan 7-halogenase OS=Alteromonas sp. KUL49 OX=2480798 GN=EYS00_19650 PE=4 SV=1
MSKAVKHLVIVGGGTAGWMAAASMQRFTSLGAFEITLIESPDIPTVGVGEATIPNIVNFNRNLGIDEIDFIRQTQATFKLGIQFEDWANQGSHFFHPFSDYGIAIDGIGFHHYVNRLNHAGHKLRLADYSVVCALAERNKFAQPLNPPPNPLADYAYAYHLDAGLYAEYLKKLSVSRGVNHISDNLAHVDIDENNGYIKAIQLASGQQIQGDFFIDCTGFKGLLIEQAMHTGYEDWSQHLLTDTALAVQTKSSGEPLPYTRCMAKKAGWQWRIPLQHRTGNGYVFASDFESHADAETSLLSNIDNTTITDLKTIHFTPGRRKKIWNKNCFALGLASGFLEPLESTSISLIQTAIAKLQTFFPHAGFSQASEDEVNRLHNQELERIRDFLILHYKLNNRDDSEFWKTCRDMTIPDSLAHKIAMFQDTGHIVEYDHESFEPASWLTMFNGFGIQPKQLDIRAEQIKEEKLVPYLAQMREAIRQAADNADTHQGFINKHCGV

SEQ ID NO: 85794 - protein, 496 aa, Hyphomonas johnsonii
  misc_feature (1)..(496): tr|A0A059FP76|A0A059FP76_9RHOB Tryptophan halogenase OS =Hyphomonas johnsonii MHS-2 OX=1280950 GN=HJO_09859 PE= 4 SV=1
MVKSIVVVGGGSAGWITANLLNAHCRRAGRQTQITLVESPDIPTIGVGEATVPSIRRTLSDIGLPEQELLISAEATFKTLIRYKNWNLGDSYDHPFDRRRRPLTDGAVRRWTAQNNLPFDRSFSALSQLADNHISPKSPRQPQYQGAFPYAYHLDAIKLANRLASFGRERGIQHKLCKVTDVKVSPEGLISAVHTDQGEALTADLYVDCTGFRAALLGGGLGVKMKSFAKHLLCNRAVTMRIPYEVYKPERIVTYTQAIARDHGWQWDINLQTRRGIGYVYSSDFLSEDAAETALRQNEGPHSDGLEARHIRFTSGKRLVSWKGNCVAVGLADGFLEPLESSGLYLVEFAGRAIATMLDDFATAPQATARYYNRIVDELYDEILGFLNLHYVTSKRRDTPFWQAVTADDAILDDLRDRLELWKRRSPTEFDFPGADRLFAQDSYEFILHGMKYVDGPVSGAPAVPDMSALISKSRSELPDHEAILALVQRAAAARA

SEQ ID NO: 85795 - protein, 504 aa, Glaciecola sp.
  misc_feature (1)..(504): tr|A0A2N1HZP2|A0A2N1HZP2_9ALTE Tryptophan halogenase OS =Glaciecola sp. 33A OX=2057807 GN=CXF81_02515 PE=4 SV=1
MNQNKLKIVILGGGTAGWMTANLMAARWKDKDIQLTLIESPDVGIVGVGEGSTPSLQNFFQEIGVQDSEWMPECNATYKNGITFEGWTSIPGFETYCHPFPSKMDNHTFPKFDRNCQLRRHNFDVEAHPDRFFLGSYLSQNQKSPKANHNFPFDHPNGYHFDSGLLGKFLRKKAQQCGVEHLSRHVTRVNQKENGEVRSLDFKEGESLEADFFVDCTGFAGVLLEKTLKVPYIKLDKMLFNDTAVVVATPSDKHSLNSQTKSTALKHGWAWDIPLTSRTGNGYVFSSKYCSIADAETEFREHLGLLEADVEVRTVKWKQGRLEKNWSQNCLAVGLSQGFLEPIEAMALHLVYNSIGHFITEFENGNFTNQNQQKYNQIIDRGFDGVVDYIVAHYRMNSRRDTEYWRDNAENQNMTPSFMAIVQSWLGSSPNNLAEEIRKYDSGSFFPLVSWQILFAGYGVFPSKENVKPQNQGNQSVNMYELDDFIKRCGSNYSAHLEALDALK

SEQ ID NO: 85796 - protein, 506 aa, Sphingomonas sp.; identical to SEQ ID NO: 82743
  misc_feature (1)..(506): tr|A0A0Q6A541|A0A0Q6A541_9SPHN Tryptophan halogenase OS =Sphingomonas sp. Leaf407 OX=1736369 GN=ASG37_16130 PE= 4 SV=1

SEQ ID NO: 85797 - protein, 502 aa, Alteromonas sp.
  misc_feature (1)..(502): tr|A0A4Q8U6S5|A0A4Q8U6S5_9ALTE Tryptophan 7-halogenase OS=Alteromonas sp. KUL49 OX=2480798 GN=EYS00_17460 PE=4 SV=1
MHDPSKAPVKRVVVAGGGTAGWLSAALLKKVIGDAIQVTLVESEQIGTVGVGEATIPPIRLVNQVLGLDEAEFIRETKATVKLAIRFENWKTQGEHYYHTFGAPGKSLAFCHFHHFWLKARQQGHEHDLWEYDLNYLAAEAGKFARINAKDSVLDLPFAYHFDASLYARFLRKRCEMMGVTRVEGKINHVVRHGESGFITGLSLDNGNTIEGDLFIDCTGFQGLLINKTLGAGYDDWSHLLPCDSALAVPSERHEKTAPYTRSIAHSAGWQWRIPLQHRNGNGHVFCSRYISEDEAQHVLMSNLDTKPLGDPKLIRFTTGRRRKQWLKNVVAVGLSSGFLEPLESTSIHLIQSAIVRLLNLFPHNGVSDSLIDEYNKQSELEYEQIRDFLVLHYIQNERYESRFWNDIRNIDVPDSLKHKMELFRQNGTLVREQNDLFSEGSWLQVMYGQGITPQDYHGIVNSMSDEKIQSMLSSIYDIKREPLAQIPDHDTYIEMLCKSAR

SEQ ID NO: 85798 - protein, 546 aa, Mycobacterium marinum
  misc_feature (1)..(546): tr|A0A2Z5YHX6|A0A2Z5YHX6_MYCMR Tryptophan halogenase OS =Mycobacterium marinum OX=1781 GN=MMRN_38050 PE=4 SV=1
MDDNLIKKVVVLGGGTAGWMTAAYLGKALQGNVEITVLEAPSVPRIGVGEATVPNLQRVVFDFLGIPEDEWMRECNASFKTAVKFINWRTPGEGSPVARQWQGRPDHFYHPFGLLPSPQHIPLSHYWARNQLKGGTYEPFDYACFREPAIMDAMKAPRYLDGTQATYYAWHFDAALVADFLRRFATKNLGVVHVQEKMTSAEKDSNGYITALRTEEGHRLDGDLFVDCSGFRGLLINEAMNEPFIDMNDHLLCDSAVATPIRHDDAANGIEPYTSAIAMKSGWTWRTPLLGRFGSGYVYSSQFASQDEAIRDFCTLWQLDPEDTPLNKIRFRVGRNRRSWVKNVVSVGLSSCFLEPLESTGIFLIYAALYQLAKHFPDRRFDPVLIDRFNRKIDTLFDETRDFLQAHFYFSPRTDTEFWRANKELTLTDSIKEKVAMYKAGVPVNPPIATESSYYSNFDAEFENFWTNGSYYCIFAGLGVLPDHTLPAINYQSEAIHEADALFLDVKQKQRHLVETLPSNYEYLLKLHGKDMEPNDPMEPEVTFVA

SEQ ID NO: 85799 - protein, 439 aa, Caballeronia cordobensis
  misc_feature (1)..(439): tr|A0A158G402|A0A158G402_9BURK Tryptophan halogenase OS =Caballeronia cordobensis OX=1353886 GN=AWB70_01546 PE= 4 SV=1
MSEATQAWDVVVIGGGPAGSTAATLLADRGYRVRVLEKARHPRFHIGESLLPANLRLFEKLGVGDEVRAIGMVKRAAEFVSPQHGNRTQRFLFADAWDKSMPSAYQVRRSELDEILLRNAAKHGAHVSEGCRAREVAFAPDHSSATIGVEHDDGRIEQVRARFVVDASGRDTLLANQFKTKRRNERHNSSALYGHFRNARRNEGEHEGNITVFWFEHGWFWFIPLADGATSIGAVVWPAYLKRRPKGTSVEAYFRETIALCGPLAERLKDAELISEVHATGNYAYTGDMTHGRNFLLLGDAFAFIDPVFSSGVMLAMQSAFAGAEAIDEALSNPARAQAALAKFDRDVRHGPREFSWFIYRMTSPTMRNLFMGPRNPLRMKEALLSLLAGDIFGTTPIWHSLRAFKGIYYATALLDWRNSLRAYRMRRRNLSEAESPAN

SEQ ID NO: 85800 - protein, 503 aa, Hyphomonas johnsonii
  misc_feature (1)..(503): tr|A0A059FS99|A0A059FS99_9RHOB Tryptophan halogenase OS =Hyphomonas johnsonii MHS-2 OX=1280950 GN=HJO_05840 PE= 4 SV=1
MEKEPAVNDQVVKKVVIAGGGTAGWIVAAALSRQLGPLIDITLVESDDIGTVGVGESTIPTHRTFHHLLGIDEREFMRATQATFKLGISFEGWGEIGDHYFHSFGMVGKSTWMADFHHIWLQAREMGLAGELGDYCLELKAAQAGKFATSEKSQINFAYHLDAGVYAGFLRKLAEAYGTKRIEGLIETVEQDGETGNITTLVLRSGERIDGDLFIDCTGFRAMLIGKTLNTGFEDWTQWLPTDRALAVQTESTGPALPYTRAIAHDAGWRWRIPLQHRVGNGLVYCGENLSDDEARARLLAELDSEPLTEPRLIRYRTGRRDNIWVKNCVSIGLSSGFVEPLESTSIHLIQIHAMRLVQMFPFHGISEALSRRYNHLARIELEQIRDFIVLHYKLTERTDSVFWRDRAAMPIPDSLRNRIELFRDTGLIHQEKSELFQVDSWLQVMMGQRLQPQGRHHLGRLMSTEQMQIALNGLRANVARGVDRMPLHQDFLNSYLGEPVGA

SEQ ID NO: 85801 - protein, 529 aa, Phycisphaerae bacterium
  misc_feature (1)..(529): tr|A0A2E1M7R7|A0A2E1M7R7_9BACT Uncharacterized protein OS=Phycisphaerae bacterium OX=2026778 GN=CMJ28_07340 PE =4 SV=1
MDLRVRHHYHSCMQSINVEEGNEPAIGPDDRIERVVILGGGTAALLAAAAFARHLPDIEVVMVRSTKMGIIGVGEGTIVTIGRFLHEYLGIDPLRFHREVHPSIKLGIQFDWGAEKPYHYSFTPQYSAGNPAQSRLAHRVGDYCHSEATFADLSSSLMYHGKVAITDPAGNPSQSPSFAYHLENRRFVGFLEQWVKEQGIEAVDAIVEQVDVGEKGVTSLRLDNGQTMTADLFVDCSGFRSELLGTALEEPFVSFKEALPCDRAVVGGWQRSDETYNAFTTAQAMDSGWSWQIEHDEIINRGYVFASDFISDDAAESEFRRKNPKVVDTRVIRFRSGYHRRSWIGNVVAIGNSAGFVEPLEATAIGFMCTAINHLVSFLKTGGHAVADVQRDLFNRHQEENWLQTRDFLAMHYKPNRLSRSAFWDFCREEQPLGDAQEILDFYQAVGPDFRALQPRLRTDSFGAEGYLAILVGQQVPHRGRKTMTTAEVDSWTEWRQNCSRQAERGVGMAEYLDRIRQGRLRLRFSPAN

SEQ ID NO: 85802 - protein, 521 aa, Xanthomonas manihotis
  misc_feature (1)..(521): tr|A0A0W7YLL6|A0A0W7YLL6_XANMN Tryptophan halogenase OS =Xanthomonas manihotis OX=43353 GN=AO826_04525 PE=4 SV= 1
MPDTTPSDPQQRPVRRVVIAGGGTAGWMAAAALSKLLGRHLQITLVESDEIGTVGVGEATIPSLVTFHRLLEIDEAMFMAATQATIKLGIAFEHWRDVDQHYIHSFGHAGTDHWSAGFQHFWLKGRQRGVARDFGDYCLELRAAQEGRFAHLPNGGMNYAYHLDAGLYARFLHRFSEGFGVQRIEGRIGQVETDPESGFLTALTLHNGARVEGDLFIDCTGFAGLLIGKTLGVGSDDWSRWLFADSALAVQTESVGPPVTYTRSRADQAGWMWRIPLQHRVGNGIVYSSRYMDQDGARAVLERNLTGRALTEPRPLRFTPNQRHRVWEKNCVALGLASGFLEPLESTNIHLIQRGIIRLLQTFPQVINAVDIAEYNRQAAQEITHIRDFVILHYHATDRRDTPFWRDCAAMDIPDSLRHRVELFRQSGRVFHQANELFAENSWVQVMLGQGIVPQQHHPVADLMGDAELGRFLETIRTRVEAALVRLPAHADFLQRYCPAPPLPEPAARVPAPQVMATPAG

SEQ ID NO: 85803 - protein, 509 aa, Xanthomonas axonopodis; identical to SEQ ID NO: 82725
  misc_feature (1)..(509): tr|Q8PFD2|Q8PFD2_XANAC Tryptophan halogenase OS=Xanthom onas axonopodis pv. citri (strain 306) OX=190486 GN=prn A PE=4 SV=1

SEQ ID NO: 85804 - protein, 514 aa, Sphingopyxis sp.
  misc_feature (1)..(514): tr|A0A0W1EQD2|A0A0W1EQD2_9SPHN Tryptophan halogenase OS =Sphingopyxis sp. H038 OX=1759066 GN=ATE68_18650 PE=4 S V=1
MAKRSILIVGGGTAGWLTAAYLARFFDLPRNPRLSITLLASDEIGSIGVGEGAFPTIRNTLQFIGIDESAFVRATSATFKQGIRFDDWVRAPAEGQSSHFLHPFEAPYHGDGYSLVSYWLLQDEATRRPFAEAMTIQNRVAEAQRAPKRPGEGEFTGPLNYAYHFDAARLAEVLSAQARAMGVQHLRGTLTGVGLDPETGAIDHVVTAEHGTLAADLYIDCSGFRAELIGGALQSPFRGVRDQLFTDRALACKLPYDRPDVPIESYTIAAAHEAGWTWDIGLAGARGIGCVYSSDHMSDERAAEILAAYTGGRSHDVNVRSIPFEAGYRPASWIKNCVAVGLSGGFLEPLESTGLVMIETAAAMIAEMFPLNGPVGAPARRFNELMAARYENTINFLKLHYCLSQRGEAFWRDNSDPASIPDRLKELLEEWRYRPPGRFDFILDLESFAFFNYQYILYGMEYRTDLSPVREEFPDTAEAERIFARIRSFGDRAASELPAHRAMIDQINAGAAYT

SEQ ID NO: 85805 - protein, 536 aa, Sphingomonas sp.
  misc_feature (1)..(536): tr|A0A430CR90|A0A430CR90_9SPHN Tryptophan 7-halogenase OS=Sphingomonas sp. S-NIH.Pt1_0416 OX=1920123 GN=BRX36_ 05180 PE=4 SV=1
MSQPSIPDHAIRQVVIVGGGTAGWMAAAAFARLLNNGYTQVTLVESEEIGTVGVGEATIPPIQTFNQMLGLDENDFLAATAGTFKLGIEFVDWGQRGERYFHPFGRHGQDLQGVHFHQLWLRERSRHGLPDIAEWSMSAMAARAGRFGRARPDAQSPVRELFYAFHFDAGLYARYLRGYAERGGVTRIEGRIEGVALRPEDGYVEAVTLADGRRIEGDLFIDCSGFRGLLIEGALETGYESYAHWLPCDRAVAAPCALPDPREPDPFTRATAREAGWQWRIPLQHRMGNGLVYCSDHLADDDAEAQLLSALEGELLGDPRRLRFTAGRRRESWNRNVVALGLSSGFLEPLESTSIHLVQAAIQRLIALFPDKRFDPAERSEFNRQMRDLYEDVRDFIILHYKATRRDDTPFWNRVRTMEVPDSLARKMTLWAGKGRLFREGYDLFSNPSWVAVGLGQGIVPQHWEPAVDALDEDLVAQALEQMRAGYADTAARLPSHGDFLRATAPSPLAPGLTGNTGSGFDFARQSGTPRRGPLL

SEQ ID NO: 85806 - protein, 507 aa, Caulobacter sp.
  misc_feature (1)..(507): tr|A0A2G4KHW8|A0A2G4KHW8_9CAUL Tryptophan halogenase OS =Caulobacter sp. BP25 OX=2048900 GN=CSW59_01045 PE=4 SV =1
MTSVRKIVIIGGGTAGWMSAAGLAAVLKGLPVTIELVESAEIGTVGVGEATVPHIRDYNARLGLDEADFMRRTQATYKLGIEFRDWGRRGESYIHPFGAYGHTIGGVPFHQHWLRARAHAEAAGQSFDPIERYSLPIMASRAGKFAPPASDPRSLGSTYNYAYQFDAALYALYLRDYSEARGVTRTEGKIVAVDQRPEDGFVTAVTLEDGRRIEGELFVDCSGFRGLLIEQTLKAGYDDWTHWLPCDRAVAVPCASVEPPVPYTRATSDQCGWRWRIPLQHRVGNGYVYCSGYIEDDEAAHVLLSKLDGQAQAEPRVLRFVTGRRRKAWLKNVVAIGLSSGFLEPLESTSIHLIQVGISTLLELFPNSGCEAADQDEYNRVMVLEFERVRDFLILHYHANQRTDSAFWNDRRTAPIPESLAYKLALFRERGAVVAYKDGFFKEPSWLSVYLGQNVIPSGLDPLVEAVPTVDSARVMAELKAAVARAVQAMPSHEAFLRSLVGPRVPA

SEQ ID NO: 85807 - protein, 589 aa, Microcystis aeruginosa
  misc_feature (1)..(589): tr|A0A3N0X4G5|A0A3N0X4G5_MICAE Tryptophan halogenase OS =Microcystis aeruginosa FACHB-524 OX=2486203 GN=ED562_0 2465 PE=4 SV=1
MQMTQDKEYDVVIMGAGFAGLCQARHLMLKIPNIKVALVDPRPEQRTDKDLKIGESTIEIAALFLAKELGLHDYLIENHAPKQGLNFHWPKNPAKTETIDDYYHAGSNRQVPIPSFQINRSKFEQDLLKMDKAMGINFYNGQVVDVDLTPGDAIKTVKIKVGDERMELQAKHVIDAAGRKFIIGRKTDNLLFGPENLMGLNTGSAWVRVKNVDRTIFHSGYDPLNASTSHYYSTNHYFGEGHWLWMIPIDTQTMELSIGVIHHHDVINSTQVNSQEKFHDFLRNNHQILANIIDSGEAVDFHYWPRISHTSKTLFSPDNWYVLGDAAYIFDAFYSYGTTTIALAIEGITEIVRAKLAGEADAEQKRAAYNEFNLAYSRSVNCLYRGHAKQLGQASVMSWRIYFEYMWWFGVQVPMYVGKWHLDLTYIPIFLKTLNSNIDGLFADLNEQFTELADKDVNIGLMDCYRGDQLFKGYHTLKHFDDFLENTKFEPRRCNVFAGLKATCFYAALWYALFQWKGFGIQGCLNPRHIYHFLRLLGLSGQATIGELIYKFKTKGLPANSEIEAMRQEFKTYQYQPKLQPWLAEATNS

SEQ ID NO: 85808 - protein, 502 aa, Erythrobacter lutimaris
  misc_feature (1)..(502): tr|A0A395LNU5|A0A395LNU5_9SPHN Tryptophan 7-halogenase OS=Erythrobacter lutimaris OX=1538146 GN=DL238_05860 PE =4 SV=1
MAIEKIVIVGGGTAGWMAAAALSRLSESRRVCVTLIESEQIGTVGVGEATIPPMREFNQLLGIDEREMMAATQATFKLGIQFANWGNVGETYLHPFGNYGYQLDGLSFHQVWHRAKSEGDKRPLQVFNLETMAAYFGKFARTQDYERDDLPPMNYAYHLDATRYAAFLRGYAEKRGVVRREGRVSDTTLDGASGFVRSVTMDDGTEMAGDLFVDCSGFRGLLIEQALETGYEDWRHYLPCDRAVALPCAREDGSPPAPFTKATAHSAGWQWQVPLQTRNGNGHVYCSEYMQDDEALDILTANIAGKPQADPNFLRFVTGRRKKFWNRNVVALGLAAGFMEPLESTSIHLVNTGINKLIAILSLDGITQTQEDAFNRLTAKEYARIRDFLVLHYNATRRDDSPFWNHVRTMDVPDTLLEKIDLFRSNGQIFREEDELFTETSWAAVMLGQGIEMGGHSPIAQTMSVTDYRQEFDEMENSIRYLVGHMPAHAEYLARYCPAQAV

SEQ ID NO: 85809 - protein, 587 aa, Microcystis aeruginosa
  misc_feature (1)..(587): tr|A0A3N0X4H9|A0A3N0X4H9_MICAE Tryptophan halogenase OS =Microcystis aeruginosa FACHB-524 OX=2486203 GN=ED562_0 2470 PE=4 SV=1
MNTTQALHYDVVIMGAGFAGLCQARHLMLNIPNIRVALIDPRPENRPDTDLKIGESTVEIAALLICKELGLHDYMIENHPPKAGLNFHWPKNLAETDSIDDYYHVWINRQPPIPTFQINRAKFERDLLKMNKEMGAIFYNGRVVDVDLTEGDQLKTVTVKLEDTTIEITAKHIVDAAGRRFIIGKKTDNLIFGSDQLLGVNNGSAWVRIKDVDRTIFHSGYHPAGTTVSHYYATNHYFGPGHWLWMIPIDRDSKELSLGVIHHHDVIPAATINTQEKFTAFLKANHTVLYKLLQNSELVDFHYLPRVAHKSKVMFSHDNWYVVGDSACIFDAFYSLGTTMIAIAVESITEIIRAKLANEANAEEKRAVYNDFNLAFSDSVNTFMQEHQKQLGHASIMSWRIYFEYMWWFGVLVPMYIGKWHLDPAFLKQFTGPFRTFLNGLFVDVYQDCNKLVERGVNMGLMDAIRADQLIGSYYTFKHFEDFLENSKLEPQRCNIFTSMKNTFFYVAIWYAMFQWKGFGWRGLLKPRNLAHFSYLLAQSGLSALGEMRHNFLTRSLPDNSEIEEMRQEFKEYRYQGKLQPWSAELS

SEQ ID NO: 85810 - protein, 508 aa, Sphingopyxis sp.
  misc_feature (1)..(508): tr|A0A0W1F0N8|A0A0W1F0N8_9SPHN Tryptophan halogenase OS =Sphingopyxis sp. H038 OX=1759066 GN=ATE68_04955 PE=4 S V=1
MNSAIERVVIVGGGTAGWLAACLLASAPRAAKLDVTLIEAPDIPTIGVGEGTWPTMRATLASIGIGEAEFLAACDGSFKQGSRFDGWVTGAEGDRYLHPFTLPPAAPTAELLAAWQTGAPELPFAAAMTAQAHVCDLDLAPRQRAMPDYQGAANYAYHLDAGKFADLLAMHAVQRLGVRHISDHVVDVARDGAGGIASVATRQNGDIAGDLFIDCSGHASLLIGNHLGVGWIDRGDILFNDRALAAQVPVAPGSAIASQTVSTAHAAGWIWDIGLPGRRGIGCVYASRFMDDDAAEATLRAYIARVLPDAPEVPARRLTFPTGHRARFWEGNCVAVGLSAGFIEPLEASAIVMIELSLKALIDNFPARRAAMPIHADRFNDLFRYRWDRIVEFLKLHYALSRREEPYWLAQRDPAQMPPRLTEMLALWRDQPPSAWDFPRVDEIFSAESHQYILYGMGYPVPADLPASERAAALLAENRQRARALAAALPANRDYLDALGPGAQAAAR

SEQ ID NO: 85811 - protein, 508 aa, Shewanella sp.
  misc_feature (1)..(508): tr|A0A2I0DU61|A0A2I0DU61_9GAMM Tryptophan 7-halogenase OS=Shewanella sp. GutDb-MelDb OX=2058316 GN=CXF82_10685 PE=4 SV=1
MDIKTIAIVGGGTAGWLAANHLGKAALSNEHLSVTLIESPDIPTIGVGEGTVPAIRQSLQSFGISETEFIRCCDVTFKQSIKFANWQDKVKHPENNFYHHLFDMPGPVTEGLTRLWLSRKTGTYAEAVSPQHAVCEAYKSPKTISDAEYKGHLGYAYHLNAAKFAKLLGVNAKANFNVKHISANVNDVIMGTEGEIKSLVTDTAGTLEFDFYIDCSGFASLLIDKALHVPFISKADQLFVDKAIAVQVPTDADSVIPPFTVATAHQAGWIWDIALSHRRGVGFVYSTKYMDDATALVKLDKYLGGKLAEYQHRTLPMTVGYRERSWEKNCVALGLAQGFLEPLEATSILLTDFAAGFLANRFPASATQLTAVRDRFNHVMGYAWERVVDFIKLHYCLSDRSDSQFWIDNRDPKTMSVELIKRLSLWQDFAPNREDFFSKFEVFDLENYLYVLFGMNKTPDCKISLPDELAHIEKQGQRLEEVTRQLVKELPNHRELLEKIKQYGLQKL

SEQ ID NO: 85812 - protein, 371 aa, Caulobacter sp.
  misc_feature (1)..(371): tr|A0A2G4KHZ5|A0A2G4KHZ5_9CAUL Tryptophan halogenase OS =Caulobacter sp. BP25 OX=2048900 GN=CSW59_01050 PE=4 SV =1
MKRVLISGGGVEAWMTGAALATAGRGVLEVQVADQGRRPEGRIAALPALRGLHARLGISDESLASEAGARPRLGARYNDMLEPFGQTGAALDGVAFHHHWRAAGKPAALEAWSLAAQAASRGRFTPGSADPRSPLSTLDHGLTLDAAAYADLLKAVALKAGAEIAPTNAHVEVIIDTAATSPGDDWIDWSAWLSTGRRLADDTGLVSTFEPAPLSAGRRTHAVSGNRVAIGAAYAAFGAGDGGDLHLLQGAIARLISLFPDTPAAAAEFERLSAASAERARDMAILRWGDLSAPPEELAWKIAQFESRGRVVMYDEEVWPESAFVHAFLARGITPRRTDPLALRQPPERVRDLLERMRRVLEQTAEAMPRA

SEQ ID NO: 85813 - protein, 513 aa, Sphingomonas sp.
  misc_feature (1)..(513): tr|A0A430CNA7|A0A430CNA7_9SPHN Tryptophan 7-halogenase OS=Sphingomonas sp. S-NIH.Pt1_0416 OX=1920123 GN=BRX36_ 07250 PE=4 SV=1
MDAHPTADRIARRPAQQRVVIVGGGTAGWMTAAALARFVPVGTRITLIESDAIGTVGVGEATIPGIRLFNQMLGLDEAAFLRETNGSFKLGIRFEGWLGEGSGYLHAFGSIGRALGLVPFHHYWLRGGGAANPASLWTHMASAQAAMAGRFAPDPGRPDLPSGLAWAYHFDASLYAALLRRHAEAAGVVRIEGRIASVTRDASGRIDHVVLEGGEAHSGDLFIDCTGFRALLIGETLAEPFDDWSELLPCDRALAVAGERAAPLPPYTRAIAHGAGWRWRIPLQHRTGNGLVYDSRHLSDDEAAARLLSALGNEAMGEPRLLRFTTGRRRRAWVGNCVALGLAAGFLEPLESTSIHLIQSGIARLLDYWPGTTLQSVEVDAYNREAEAEWLAIRDFLILHYHANARPEPFWAERRAVPLPASLAARIALFRANSRFRREGDELFAEPAWVQVMVGQGILPAGHHALADALSADELDDFLSLTRRHAAQVASRLPTHDAFLAAHCAAPAQRVTP

SEQ ID NO: 85814 - protein, 533 aa, Streptomyces sp.
  misc_feature (1)..(533): tr|A0A249M193|A0A249M193_9ACTN Tryptophan halogenase OS =Streptomyces sp. CLI2509 OX=1984801 GN=CAC01_22670 PE= 4 SV=1
MPETDNRIRKVVILGGGTAGWMTASYLGKALQGTVDIQVLEAPAIPRIGVGEATVPNLHRVLFDYLGIPEEEWMRECNASFKMAVKFVNWRTPGRGEPDSRTRPDGKPDHFYHPFGILPDHDNTPLSHYWFKNKYEGVTDKAFDYSCFREPPVMDAKKSPKWMDGESSTRYAWHFDAALVADFLRRFATDKQGVEHIQDEMVRAEQDERGYVTALHTKSGRVLDADLFVDCSGFRGLLINKALGEPFIDMSDHLMCDRAVATAVPHDDDANGIEPYTSAIAMSSGWAWKIPMLGRFGSGYVYSSRFTTQEEATREFCELWNLDPETTKFNHVRFRVGRNRRAWVNNVVSIGLSSCFLEPLESTGIYFITAAIHQLAKHFPDRTFPQALVDSFNEEIEVMFDDTRDFIQAHFYYAPRDDSEFWRAQKTLKLPENIQRKIAAYKAGLPINSPITDESTYYGNFEAEFRNFWTNGSYYCVFAGLGLEPDAPLPALAHKPESVAGAQPLFTKVAQEQRHLLETLPSAHDYLRRLHAK

SEQ ID NO: 85815 - protein, 507 aa, Brevundimonas sp.
  misc_feature (1)..(507): tr|A0A0Q5LJZ3|A0A0Q5LJZ3_9CAUL Tryptophan halogenase OS =Brevundimonas sp. Leaf168 OX=1736283 GN=ASF81_14230 PE =4 SV=1
MTQDNAGPIRKIAILGGGTAGWMTAAALSHRLAGGAVSIELVESDEIGIVGVGEATLPHIRAFNTAMGIDEQTLIDQTQATFKLGIQFVDWGRRGDSYIHPFGAYGEPIEGIDFHHVWAALRAMGDAADISDYSYPVRAAQANRFQRPVSDPGSMLSTFSYAFQFDASLYAAFLRQVSCGRGVVRTEGKVVDHVLNRATGEVDAIVLSDGRRISGDLFVDCSGFRGRLINQALETTFEDWSHWLPCDSAFAVPCRTTAPVGPYTRATARAAGWQWRIPLQHRTGNGHVFSSAHISDEDAVATLMSNLEGPALAEPRRLGFKTGRRQRLWSRNVVAIGLSGGFLEPLESTSIYLIQLGITTLLDLFPDRVGMAADAQEYNRIMALEFDRIRDFLVLHYVANQRDEPFWREMRTMPWPDSLSAKVEAFKSRGLLPDYDIGVFLPPSWLAVLVGQNIVPNGWDPRVDRLEPHVLSDKLGALRDAVRSTVDRTPDHMTFIRDAAARARGLQ

SEQ ID NO: 85816 - protein, 510 aa, Kinneretia asaccharophila
  misc_feature (1)..(510): tr|A0A4R6N049|A0A4R6N049_9BURK Tryptophan halogenase OS =Kinneretia asaccharophila OX=582607 GN=DFR39_109152 PE =4 SV=1
MKIKRIAIVGGGTAGWLAANHLGRELHGDREVEITVIESDEVPIIGVGEGTVPSIKTSLRKFGISELDLLLSCETTLKTGIKFSGWLDAQRHGAGHHYYHPFSTPFPEGLDLTPSWLLQGRRPDYQDVSIAARLSEAGLCPKRIESPPYEGEVDYAYHVNAYQFARLLARNAQARFGIRHVVGTIIGADRDETGKVSALRMKTGERLGFDFYVDCSGFASILTQQTLRVPFVDKSHQVLTDTALVQQVPFEATAAIPPYTLAQAHRAGWIWDIPVLQRRGTGFVYSSRHMSEDEAVRTFAAYLGRSEADFQPRKIRMQIGFRQQFWVSNCVALGLAQGFVEPLEATSILLTDFTADLLAKNFPREHGDEARLQPHFNRLAQNAWERVIDFVQMHYHLSDRDDSAFWRDCRYGTHLSDLLQERLDTWRLRPPIASDFASRFEMFNVENFLYVLYGMKFPTRGFPVSPKELDSSAAQFVGLQACTDQLASELLPHGHWLRELHAALAAQGTP

SEQ ID NO: 85817 - protein, 495 aa, Salinimonas sp.
  misc_feature (1)..(495): tr|A0A5B7YA64|A0A5B7YA64_9ALTE Tryptophan 7-halogenase OS=Salinimonas sp. KX18D6 OX=2572577 GN=FBQ74_03900 PE= 4 SV=1
MSQPHRIVIVGGGTAGWMAANLFAHHFKHHPVTITLAESDNVPTVGVGEGSTPSLKQFFRDLGIEDAQWMPRCQATYKVAIQFHGWSPASGNSSYRHPFISQLDTFSERAFYVNSQTRRLGLDVTTSPDAFLFNSYLAEQKRSPLTPDNFPFRIEYGYHFDAGLLGEFLKEHALSQGVRHTVCDVQDVALHPNGDIRALIDSNDNEIHAELFVDCTGFNSLLLQKALKVPFSSFSDNLFNDRAVVLPTPADPSAPVETQATALSAGWTWAIPLQHRTGNGYVYSSQYISDDQAETELRTHLGMLEDDAPARFLSMKVGQADKHWYRNCLALGLSQGFIEPLEATALHLVQLSIRFFCEAYVKGNFTAQHQVSCNQKITGHFNNVRDYIVAHYKLNTRNDSAYWRDNRNNMHLSENLLQILDTWYRREDLARFLSEKSHATHFGATSWHCLLAGYGAFPGLAPEQPGTGDLFKEHQLASFFNGCLLNFSPQSQRLP

SEQ ID NO: 85818 - protein, 424 aa, Streptomyces sp.
  misc_feature (1)..(424): tr|A0A0N0SWQ3|A0A0N0SWQ3_9ACTN Tryptophan halogenase OS =Streptomyces sp. MMG1121 OX=1415544 GN=ADK64_37990 PE= 4 SV=1
MSPTLPGVTDDFDVIVIGGGPAGATTAGLLAKRGHRVLLLDRERFPRYHVGESLIPGVMVPMEELGLVERMEAKGFERKYGGTLVWGNNEVPWNFSFTTGGRIPYAFHTRRADLDALILDRARELGVLVVEDATVKDSIEEDGRVVGVRYNLRGLNASHEARGRLVIDASGQARVIGRKYTEVNWNEQLRNVAVWTYFDNCHRLPGDEWSNILIEGTADGWFWGIPIDKGVFSVGYVTRSEVASGSDKSLEDLFQSEIASTTKLKDILKDATQAAGYRSARDWSYTQDRFHGNGWVLVGDAAAFVDPLFSTGVALATLAGSTLSKVVDQILNHPEIEEKALDRYSTAYQDFFHDIRQFVEGFYDRSKTKGFYFNLAQDINDPDRKNDAEVDFVKLISGLSGRAGGLFELDVDDLIADATAVSAD

SEQ ID NO: 85819 - protein, 509 aa, Caulobacter henricii
  misc_feature (1)..(509): tr|A0A0P0NWY5|A0A0P0NWY5_9CAUL Tryptophan halogenase OS =Caulobacter henricii OX=69395 GN=AQ619_03815 PE=4 SV=1
MDENGRTGEAIRRIVIVGGGTAGWMTAAGLSAVLGGTRIAIDLVESAEIGTVGVGEATVPHIRNFNAKLGLDEADFMRKTQATYKLGIEFRDWGRKGESYIHPFGAFGQPLGGVAFHQHWLRARQRGEADSIEAYSLPIIAARLKKFAPPATDPRSLGSTFSYAYQFDAALYAQYLRAYAEARGVRRTEGKIQDVSLDGETGFVQAVILESGQRIEGDLFIDCSGFRGLLIEQALKTGYEDWTHWLPCDRAAAVPCDSVEPPTPYTRATSDDAGWRWRIPLQHRVGNGYVYCSHYISDDEAARVLLAKLDGKAQADPRFLRFTTGRRKKQWNRNVVAIGLASGFLEPLESTSIHLIQLAVSTLLELFPERGCATADQDEYNRVMDLEFERIRDFLVLHYHATQRDDSAFWRDKAAAPIPDSLAYKMALFRDRGVVVKYRDGFFLEPSWLAVYLGQNILPRGYDPMADAIDPAEAARKLAELKAAVQSTAEAMPDHQAFLERFCDARGAA

SEQ ID NO: 85820 - protein, 502 aa, Caulobacter sp.
  misc_feature (1)..(502): tr|A0A2G4KJ46|A0A2G4KJ46_9CAUL Tryptophan halogenase OS =Caulobacter sp. BP25 OX=2048900 GN=CSW59_01055 PE=4 SV =1
MTASIREVLIIGGGTAGWMTAAALAKALPPGVRVRLVESEQIGTVGVGEATIPPINTFNQVLGLDEADFMRATKASFKLAIEFVGWMGEGHRYLHPFGNFGLDIEALKFHQAWLRALHEGWAPPIDAFNLSAQASHLKRYAPPARDPGQVLSSLKYAFHFDAGLYARYLRAYAEQRGVIRIEGKVAEVRQHGETGFVTGVALESGQALEAELFIDCSGFRGLLIEQALQAGYDDWSHWLPNDRAVALPCVTGGDGLTPYTRATADAAGWRWRIPLQHRTGNGYVYSSKHISDDEALSRLRATVDGEPLGEPNFLRFQAGRRKQAWVKNVVAIGLSSGFLEPLESTSIHLIQAGITKLLALFPHTGFDPVEIAEYNRLTALQVELIRDFIILHFKANGRDEPYWRDARAMAIPQSLQHKIELFAASGRLFVSDYDLFAEASWIAVLLGQGVVPRRHDPLVDALETDALKAQLSRLAGLIRQTAEALPPHEAFIARYCAARDPA

SEQ ID NO: 85821 - protein, 505 aa, Caulobacter henricii
  misc_feature (1)..(505): tr|A0A0N7JHN0|A0A0N7JHN0_9CAUL Tryptophan halogenase OS =Caulobacter henricii OX=69395 GN=AQ619_11175 PE=4 SV=1
MQNERAIRSIVIVGGGTAGWMAAAALRSALGRGSSIQLIESAEIGIVGVGEATIPAIRQFNALIGLKEAAFMRQTKASLKLGIEFVGWGDAQSRYLHPFGVYGPHNDLGDFHQLYLMLRDKGLADDIGAYSLCGQAARRGRVAAPTVDPASPLSRFTSAYHFDAILYGRHLRRFSEQLGVKRLEGEVIDVTLRSEDGFLESLTLKDGQTVSADLFIDCTGFRGLLIEGALKTGYDDWSHWLPVDRAVAVPCERVGPITPYTTSTVREAGWQWRIPLQHRTGNGYVYSSRFTTEEIATRTLMDNLDGAPLAEPRHLRFVTGRRRKAWNRNVVALGLASGFLEPLESTSIHMVHSGLVKLLQHFPDREFSPVNIDTYNRRVSEEAQEVRDFIILHYHATTRRDSEFWAYVASMPIPDSLRDRIAIFRDRGMLVSRPDELFSQSSWLAVMLGQGVIPQSYNPLADRSDPQDTAASFAALQRQIAQLVETMPDHEAFLAQNNMLDTVEA

SEQ ID NO: 85822 - protein, 71 aa, Xanthomonas fragariae
  misc_feature (1)..(71): tr|A0A1Y6HD69|A0A1Y6HD69_9XANT Tryptophan halogenase OS =Xanthomonas fragariae OX=48664 GN=PD5205_00131 PE=4 SV =1
MSHTVSSTPQQRPVRRVVIARGGIAGWMAAAALSKVLGRQLQITLVESDQIGTVGVGEATIPSLITFHRLL

SEQ ID NO: 85823 - protein, 505 aa, Sphingomonas sp.
  misc_feature (1)..(505): tr|A0A1I3WIC9|A0A1I3WIC9_9SPHN Tryptophan halogenase OS =Sphingomonas sp. NFR04 OX=1566283 GN=SAMN03159338_3210 PE=4 SV=1
MTPPRRIVIAGGGTAGWMTANLLAHRWPLMSIELLEAPEIPTIGVGEGSTPSLKRFFEVLGIAEAEWMPRCHATYKANIRFVGWSPDAPADAYSHPFTTQLDLHTIDAFFANCRNRRGGYDVPTDPGTFLLNGALADAGKAPLAPPSFPFKIDYGYHFDAALLGMFLRERAVARGVVHRPAKIVSAVRHENGDIAAVCTERGDVVPGDLFVDCTGFAGLLLQGALGVGFRSFADNLFNDAAVVIPTMPTEPAAPPVETRATALSSGWAWSIPLQSRVGNGYVYARGYLSDDAAEVELRGHLGLLDSDVAARHLRFRTGQVAQHWHRNVLAVGLAQGFIEPLEATALHLVLNTVEKFMRQYEEGGFTPAKAGAFNDTIRAMFERVRDYIVAHYKLNTRTDTAYWIDNRAHDCLSLPLRRILDLWYRHGDLAAEFAADPDLTYFSAESWHCLLAGYGTFPPPRADQRDDVDFHRANGVEAFLHGCSMNFPSHADALARHTATASAGA

SEQ ID NO: 85824 - protein, 500 aa, Phenylobacterium deserti
  misc_feature (1)..(500): tr|A0A328ABJ0|A0A328ABJ0_9CAUL Tryptophan halogenase OS =Phenylobacterium deserti OX=1914756 GN=DJ018_13495 PE= 4 SV=1
MPDSTVRTVVIVGGGTAGWMTAAAIAQALGPHVAIRLVESSEIGTVGVGEATIPHIRAFNAKLGLDEAEFMRSTQATFKLGIEFRDWGRPGDSYIHPFGAFGPDLGEIGFHQHWLRLRAEGLETSIEAFSAPIVISRLGRFAHPSADPRALLSTFSYAYHFDAGLYAAFLRRYAEERGVQRTDARVADVRLRGADGFIDAIVLDTGEQVSGDLFVDCSGFRGLLIEQALKAGYESWAHWLPCDRAVAAPCHAQEPATPLTRSTALDAGWAWRIPLQHRVGNGYVYCSDFISDEEAEATLLSRLESEPLADPRRLRFQAGRRRKQWSRNCVAIGLSSGFLEPLESTSIYLIQAAIGHLISLFPDGSWDPVDETEFNRLMELELERVRDFLILHYRATQRPGAFWDARRQMAIPDSLAYKLALFEERGAVVRYKDGLFQEPSWLAVYFGQHVSPTGFNPLSAGLPAEALRREFAGIEQAIRRQAEALQPHESYVAQLCAVGA

SEQ ID NO: 85825 - protein, 501 aa, Pseudoxanthomonas sp.
  misc_feature (1)..(501): tr|A0A4Q8LMU7|A0A4Q8LMU7_9GAMM Tryptophan 7-halogenase OS=Pseudoxanthomonas sp. NML140781 OX=2480812 GN=EA656_ 16290 PE=4 SV=1
MTDSSQPRPVKRVVIAGGGTAGWMAAAALSRTLGKVLDITLVESEEIGTVGVGEATIPTLVTFHRLLDIDEQAFMAATGATIKLGIQFEGWREPGQDYIHSFGTTGKDHWTAGFQHFWMKGRQRGLARDYGDYCLELRAAQEQRFAHLARNGMNYAFHLDAGLYARFLRRFSEGFGARRIEGRIATVQTSAQGDIAALVMEDGTRVEGDLFIDCTGFRALLLGQTLGVAFQDWSHWLFADSALAVQTESVAPPVPYTRSMAGPAGWQWRIPLQHRVGNGIVYSSRFMDQEAARAALLDNLEGPPLFEPRPLRFTPGQRQVTWKRNCVALGLASGFLEPLESTNIHLVSRNLTRLLQSFPHVIRQVDIDEYNAQTEAEMVHIRDFVILHYHVTRRRDTPFWQACAQMDIPATLRHRIDLFAQTGRVFHVPNELFAENSWIQVMLGQGIAPAQYHPVADLMDDAELARFLDGIHQQVEQTVARLPTHADYLRSYCAQPRPALA

SEQ ID NO: 85826 - protein, 493 aa, Sphingomonas sp.
  misc_feature (1)..(493): tr|A0A0Q6AU75|A0A0Q6AU75_9SPHN Tryptophan halogenase OS =Sphingomonas sp. Leaf407 OX=1736369 GN=ASG37_03615 PE= 4 SV=1
MSVTRVVIAGGGTAGWMAAAAIARTMGRMVEVTLVESETIGTVGVGESTIPPLVTYNRLLGINEAEFMAATAATFKLGILFDGWKTADSRYFHSFGTTGRDHWAAGFQHYWLNGLTRGHAQPYDDYCTELVAALQGRFAHLPGDATNYAYQLDSGRYAQFLRAMAERDGTRRIEGRIAQVELDGETGDIAALQLDGDRRFPGDLFLDCTGFRALLIEGALHAGYDDWTHWLPCDAAIALQTDSVGPPVPYTRAMAHDAGWQWRIPLQHRVGNGIVYCSRYLDRDAALDRLVNNVEGKVRTDPNFLRFTTGARRRQWHRNCVAIGLSGGFMEPLESTSIHLIQRAVLRLLRLFPQARVSPADVAEFNDQQLQDMEQIRDFLILHYKATDRRDSPFWRQCSAMDVPNSLAQKIDLFRQTGRVFRRNEELFGENSWVQVMMGQGIVPERHHPIAARLTDDELDRLLSMVRRQVADTVATMPPHGDYLARYCPADRP

SEQ ID NO: 85827 - protein, 501 aa, Sphingorhabdus wooponensis
  misc_feature (1)..(501): tr|A0A3R8Q320|A0A3R8Q320_9SPHN Tryptophan 7-halogenase OS=Sphingorhabdus wooponensis OX=940136 GN=D7D48_09660 PE=4 SV=1
MAIDHIIIVGGGTAGWMAAAALSRLRAGRPVAITLIESEEIGTVGVGEATIPPFLDFNRLLEIDERDLLSMVQGSFKLGIQFVNWGKIGDSYIHPFGNYGYQVDGISFHHVWHKYQQAGDKRPIQVFNVETMAAHFGRFARTEDYQRDDLPPVNYAYHIDAGRYARYLRNYAETRGVVRREGKISDVTLDNESGFVSSVTMENGDVLKGDLFIDCSGFRGLLIEQALKTGYDDWSNYLPCNRAVALPCFREDGSGPLPYTRATAHSAGWQWQVPLQHRNGNGHVYCNEYMSDDEAHSILVNNIAGKPGAEPNFLRFVTGRRKKFWNKNVVALGLASGFMEPLESTSLHLVNTGINKLIALLSLDGVTQAQEDAFNRLTGKEYARIRDFLILHYNSTTRDDSPFWNYCRNMPVPDSLTEKVELFRQNGQIFREDDELFTETSWAAVMMGQGIKMGGHNAMADAVREPNTRREIDEMEKSIQFVVQHMPSHGEYLNRYCPAPA

SEQ ID NO: 85828 - protein, 504 aa, Sphingomonas sp.
  misc_feature (1)..(504): tr|A0A0Q6AHI8|A0A0Q6AHI8_9SPHN Tryptophan halogenase OS =Sphingomonas sp. Leaf407 OX=1736369 GN=ASG37_16100 PE= 4 SV=1
MSEAAAPIESVVIVGGGTAGWMAAAAASRYLNNGRRSITLVESDAIGTVGVGEATIPPILQFNGLLGIDEKEFVAKTGATFKLGIEFVNWGGVGERYLHPFGTIGRDFEGVAFHQHWLKHRRAGGMADFERFSMSAQAAAAHRFAAPVSDPRSPASQLAYAYHFDAGLYAKFLRERAEGQGVRRVEGRIASVERDGESGHVTALVLDDGRRVAGQFFIDCSGFRSLLLGETLGVGYRDWSHWLPCDRAIAVPSQRTDPLLPYTRATAREAGWQWRIPLQHRTGNGHVYSSGFTTDDRAQEILLANLDGAPTADPRRLSFKAGVREKLWEKNVVALGLSGGFLEPLESTSIHLIQTGISKLFWLFPDTAHAEVERREYNRLMSEQFDYIRDFIILHYKATTRADTPFWQYVRDMPIPDTLAHKIELFREKGRILRYDHDLFEVPSWVSVMFGQGIWPTGHDAVADSLDEALVAGTMERMVAAYADLAQRMPPHADHVARTAPMRG

SEQ ID NO: 85829 - protein, 510 aa, Erythrobacter lutimaris
  misc_feature (1)..(510): tr|A0A395LK73|A0A395LK73_9SPHN Tryptophan 7-halogenase OS=Erythrobacter lutimaris OX=1538146 GN=DL238_06675 PE =4 SV=1
MTAQPIRKIVIVGGGTAGWMAAAGISRVMGQFPGLSIELVESEAIGTVGVGEATVPQIRSFNTLLGIDEAEFVRETHATYKLGIEFVDWLRPGHSYVHPFGSYGLDMLGIEFHHFWLHGRAADDPAPLDEYSIGAMAGKAGRYFPPQLDNPKSPLSKLAYAFQFDATRYARYLRARAERQGVVRHEGRIVDVLQDADSGFVTAVRMEDGREIGGELFIDCSGFRSLLLGQTLGVPFIDWTGWLPCDRAVAIPCELGGDSQPLTRATAREAGWQWRIPLQHRIGNGLVYSSAHMDDEAALDLLLANLDGKPLAEPNRLRFAAGLRERPWEKNVVALGLAAGFLEPLESTSIQIVQASIARLMALFPDSSFGQAEIRRFNADSVRDMVDIRDMLVLHYLKTEREGELWRACRAVDPPDGLAHKLEMFESSGRIFRENNEFFTEPSWLAVMVGQGVEPARFHPLAMTIGAEETRKRLAHIREVIASTVAQMPTQDRFLAEQGSAIPASERLTA

SEQ ID NO: 85830 - protein, 492 aa, Erythrobacter lutimaris
  misc_feature (1)..(492): tr|A0A395LTY3|A0A395LTY3_9SPHN Tryptophan 7-halogenase OS=Erythrobacter lutimaris OX=1538146 GN=DL238_10350 PE =4 SV=1
MTDRQRIRNVVIAGGGTAGWTVAAALAKNLGQALNVTLVESDEIGTVGVGESTIPTARRFHELVGVDERDFVKATGASFKLGILFEGWGAEEESYFHSFGTTGRSTWLADFHHIWLRARELGLAEPFGHYCTEHQAALAGKFAGGPDTPLNYAYHLDATAYGKFMRRHAEALGVSRREGRIARVERRPENGHIAALELEDGQRVEGDLFIDCTGFRALLIEQALGTGFEDWSEWLPTDRALAVQTERVGPAQPYTRASAHAAGWQWRIPLQERVGNGLVYCSEYLSDDAASALLEERTEGAFTTEPRLIRFRTGMRRKVWNGNCIAIGLTAGFVEPLESTSIHLIMIAAIRLLQFFPVEDISPAMVERFNDVSRRELEHVRDFIILHYCLNRRDEPFWRRQAEMDLPHSLQERIDAFRERGHAYQDQDELFRVDSWAQVMLGQGIVPEAYHPFASLIGTEDLERSLATLAQGSKQLSAGLPGHDDYLKSLLG

SEQ ID NO: 85831 - protein, 546 aa, Mycobacterium marinum
  misc_feature (1)..(546): tr|A0A3E2N3E5|A0A3E2N3E5_MYCMR Flavin-dependent tryptop han halogenase RebH OS=Mycobacterium marinum OX=1781 GN =rebH PE=4 SV=1
MDDNLIKKVVVLGGGTAGWMTAAYLGKALQGNVEITVLEAPSVPRIGVGEATVPNLQRVVFDFLGIPEDEWMRECNASFKTAVKFINWRTPGEGSPVARHWQGRSDHFYHPFGLLPSPQHIPLSHFWARNQLKGGTSEPFDYACFREPAIMDAMKAPRYLDGTQATYYAWHFDAALVADFLRRFATKNLGVVHVQEKMTLAEKDSNGYITALRTEEGRRLDGDLFVDCSGFRGLLINEAMNEPFIDMNDHLLCDSAVATPIRHDDAANGIEPYTSAIAMKSGWTWRTPLLGRFGSGYVYSGQFASQDEAIRDFCNLWQLDPEDTPLNKIRFRVGRNRRSWVKNVVSVGLSSCFLEPLESTGIFLIYAALYQLAKHFPDRRFDPVLIDRFNRKIDTLFDETRDFLQAHFYFSPRTDTEFWRANKELTLTDSIKEKVAMYKAGVPVNPPIATESSYYSNFDAEFENFWTNGSYYCIFAGLGVLPDHTLPAINYQSEAIHEADALFLDVKQKQRHLVETLPSNYEYLLKLHGKDMEPNDPMEPEVTFVA

SEQ ID NO: 85832 - protein, 505 aa, Bowmanella sp.
  misc_feature (1)..(505): tr|A0A4Q9XKQ8|A0A4Q9XKQ8_9ALTE Uncharacterized protein OS=Bowmanella sp. JS7-9 OX=1605368 GN=TK45_12685 PE=4 S V=1
MKKSRVVIVGGGSAGWMTACYLNHVFGNNSQFEVTLIESADVPTIGVGEATVHTLRGFLEACDLSEGEFMVATDATLKHGILFKHWQIGDDPKDQYFHPFEDIAPIAPEGVINHWLNLKFKSATPPRFDRFMGVQGILAAAEKSPKLMHDSQYRAPVPYGYHLDAIKFAHFLRDVSVKRGVKHICDHVTDVNHQDGIIGSVRLASGQQVEGDLFIDCSGFRSILASALGATFISYSDKLFCDKAVTARVPQSDKFVPKPYTTATARRSGWTFDIDLQSRKGLGYVYSSQHLSEMEAEAEFRQVFGLGDEQGVNHFTTRVGRQDRAWVGNCVSIGLAQGFIEPLESTGLYFIEMSLRFLTDYLVLEDSDAARDKYNAVLNNLFDQTVDFIVLHYVLTKRHDTPFWQDIQTNMARSGDLNELLQLWKHKAPTDSDFLNAGLIFRATNYAAILYGMESLPQDLPTIVRHMGIEQSHEVLSKIQSVQKMAITSSPSHQEFLQKFLGAFS

SEQ ID NO: 85833 - protein, 589 aa, Microcystis panniformis
  misc_feature (1)..(589): tr|A0A552QBF4|A0A552QBF4_9CHRO Tryptophan halogenase OS =Microcystis panniformis Mp_MB_F_20051200_S9 OX=2486223 GN=EWV53_00615 PE=4 SV=1
MQTTQNKEYDVVIMGAGFAGLCQARHLMLKIPNIKVALVDPRPEQRTDKDLKIGESTIEIAALFLAKELGLHDYLIENHAPKQGLNFHWPKNPAKTETIDDYYHAGSNRQVPIPSFQINRSKFEQDLLKMDKAMGINFYNGQVVDVDLTPGDAIKTVKIKVGDERMELQAKHVIDAAGRKFIIGRKTDNLLFGPENLMGLNTGSAWVRVKNVDRTIFHSGYDPLNASTSHYYSTNHYFGEGHWLWMIPIDTQTMELSIGVIHHHDVINSTQVNSREKFHDFLRNNHQILANIIDSGEAVDFHYWPRISHTSKTLFSPDNWYVLGDAAYIFDAFYSYGTTTIALAIEGITEIVRAKLAGEESAEQKRAAYNEFNLAYSRSVNCLYRGHAKQLGQASVMSWRIYFEYMWWFGVQVPMYVGKWHLDLTYIPIFLKTLNSNIDGLFADLNEQFTELADKDVNIGLMDCYRGDQLFNGYHTLKHFDDFLENTMFEPRRCNVFAGLKATCFYAALWYALFQWKGFGIQGCLHPHHIYHFLRLLGLSGQATIGELIYKFKTKGLPANSEIEAMRQEFKTYQYQPKLQPWLAEATNS

SEQ ID NO: 85834 - protein, 504 aa, Sphingomonas guangdongensis
  misc_feature (1)..(504): tr|A0A285QZT1|A0A285QZT1_9SPHN Tryptophan halogenase OS =Sphingomonas guangdongensis OX=1141890 GN=SAMN06297144 _2535 PE=4 SV=1
MSEPIRDVVIVGGGTAGWMMAAAAARFLADGQRRITLVESEAIGTVGVGEATIPPIREFLGLLGIPEAEFVAATGATMKLGIEFHGWGAPGERYIHPFGQQGRDFDGIDFHMAWLKHRAADGIGPLEDYWLSAVAARASRFAPPSADGRSPLSQLAYAYHFDASRFAAYLRRRAEDHGVVRVEGRITRVAHDGASGHVAQLHLDGGRIVTGDLFIDCSGFRSLLLGDAMKVPFRDWTHWLPCDRAVAVPSARTEPLLPLTRAIAHDAGWRWRIPLQHRTGNGLVYASGLLSDDAATARLLAALDGAAEGEPRTLSFRTGRRDRLWEGNVVALGLAGAFLEPLESTSIHLIQSGIQKLFALFPDRGFAPILTQEYNRLMAAQIDAVRDFVILHYSANGRVGEPFWDALRTMTLPDTLATRLALFREKGRVLRYDDDLFSVASWVAVLIGQGVMPTGYDPLVDALDDARVIAAMRELRGGYARVAAQLPAHGAVVQELAARGAATG

SEQ ID NO: 85835 - protein, 276 aa, Dyadobacter soli
  misc_feature (1)..(276): tr|A0A1G7WU83|A0A1G7WU83_9BACT Tryptophan halogenase OS =Dyadobacter soli OX=659014 GN=SAMN04487996_122168 PE=4 SV=1
MEEIRKYPFIRHKGIVRQSAEGLTLDPYNHDHNWEGYQFFREAFDKILLERAIAYGAEFQSGVVLKSIEFDRNSIASLSTNLGSFKADFFVDATGRSASLAKKLGIGYLVKSKPLFVHYGYVQTGGSDLFDSPQMIWDEAGWTWISQITENLISWNRLSPCNPKISKGWLPAQIANLNSAGPPKAADVTWRIANKISAENYFLLGDAAFVLDPVSSKGVLKAIMSGMMCGHLLAQLNPRTSNIDDIHRYYNNWVNEWFLRDLQVLRSVYDGRGVGI

SEQ ID NO: 85836 - protein, 517 aa, Streptomyces sp.
  misc_feature (1)..(517): tr|A0A286CNI1|A0A286CNI1_9ACTN Tryptophan halogenase OS =Streptomyces sp. Ag82_G6-1 OX=1938853 GN=SAMN06272727_ 5379 PE=4 SV=1
MLNRVVIVGGGTAGWMTASYLKAAFGDRIDITLVESGKVGAIGVGEATFSDIRHFFEFLGLKESDWMPACNATYKLAVRFENWRKPGHHFYHPFEHMQSVDGFPLAEWWLKNGRSDRFDSDCFVMANICDAERSPRHLDGRMLAQPFDENAEEPRGLTMSEHQGKTQFPYAYHFEAALLAKYLTTYTVERGAKHIIDEVKDVKLDERGWISSVVTAEHGELTGDLFIDCTGFRGVLLNKALEEPFISFQNTLPNDSAVALQVPQDMEARGIRPCTTATAQEAGWTWTIPLYGRIGTGYVYASDYLSADEAERTLREFVGPSAADAEANHIKMRIGRTSRSWVNNCVGIGLTSGFVEPLESTGIFFIHHAAEQLVKHFPGPDWSPVQRDNYNSAVAHVMDGVREFLALHYAAAGRNDTRYWKDTKTRELPEGLAERIERWKHQLPDSETIYPYYHGLPAYSYMCVLLGMGGIDVKPSPALSLADDSAAQKAFQSVHDRAAGLIGQLPTQYEYFTHMRR

SEQ ID NO: 85837 - protein, 499 aa, Verrucomicrobiales bacterium
  misc_feature (1)..(499): tr|A0A257M5V5|A0A257M5V5_9BACT Uncharacterized protein OS=Verrucomicrobiales bacterium VVV1 OX=2015575 GN=CFE2 6_03480 PE=4 SV=1
MHSSDQISKLLVLGGGSAGLMAAVTIKRLLPHLDVQLVRSAEIGVIGVGEGTTAVFPSHFFDTLKVSKAEFYRETQPTWKQGIRFEWGPREYFNYTFEFQYDAQRQGMAFANGFYADEDCRDLDSPSALMDRGKAFISGPLGRPLVRGNYAFHIENHRLVTYLEKLAKSSGIGLFEGQLLNVERSSSGDVSAITVEDGRRFEADLFIDASGFRAELIGRVLNEPFLSFSSGLFCDRAVIGGWDRGEEPLVAYTTAETMDSGWCWKIEHEHWINRGYVYASQFISDDQALEEFLRKNPKVSNTPRVVKFRSGRYDRSWVNNVVAIGNSSGFVEPLEATALAQIIYGTRWLIELLRTTGLQPSDSSRHLYNTQMGRAWDEIRDFLAFHYKFNHRIDSPFWSHCHQDTSLGSYQGLYDYYLDEGPGPLIIHEVPHKPNIYGVEGFLAMLVGMRVPYKRRHQASPAEREAWARHSAAVAAKAASGVDSVKALAAIRSPGWVWE

SEQ ID NO: 85838 - protein, 459 aa, Sphingomonas guangdongensis
  misc_feature (1)..(459): tr|A0A285R4Y1|A0A285R4Y1_9SPHN Tryptophan halogenase OS =Sphingomonas guangdongensis OX=1141890 GN=SAMN06297144 _2539 PE=4 SV=1
MRVAVVGDGVAAALAGAVLARAGAAVIRVPTEEGGTGLGPFGPALTAMPDWQASDIAAALPPVPGASFALGIAFAGWAANGGGWFLPFGDVGAALGPISFAQVIARMRAQGHALRFADFALATQAAQAGRFAPPSPDPRSPLSTLAMGVHYPAEALADALTALAPVQAVAPLVRVEHSEGRIAALVLADGAMLVADLYVDATGGDGRLIGHLSPGWESWAECLPCARATVTATAETQPPPPYAFHSADRDGWAATIPLDGRRVETRFSVAGAGTPYVNGRRTAAWRGNCVALGAAAGVIEPVLGAPLLLALRQAERIAALLPHAADQSAEAAEYNRLTAAELDRARDAAVALWATNGRVGEPLWDAARDRGSDQLRWTLDLYRSRGRVPLYDEELLSRADWIAILDGQGLRPRRLDPLGAAVSDAAVTAHAGRLRDRLLAAVRQMPSHADQLARYRAAS

SEQ ID NO: 85839 - protein, 415 aa, Dyadobacter fermentans
  misc_feature (1)..(415): tr|C6VW94|C6VW94_DYAFD Tryptophan halogenase OS=Dyadoba cter fermentans (strain ATCC 700827 / DSM 18053 / NS114 ) OX=471854 GN=Dfer_2003 PE=4 SV=1
MQTVDVLVIGAGPAGTVAASYLKKQGYDVTILEKEKFPRFQIGESLLPCCMEHLTEAGLREAIEPLNFQKKTGAAFMRGEKRCEFFFEDQFTKGWTWTWQVKRADFDSKLAEATREKGVDVNFECEVTAVECGPEKQIVDYKDAEGNAHRIEAKFIIDSSGYGRVLPRLFNLSKASAFTPRGAVFSHLEDKNRSEEASNNIFVHSFDNNKSWIWAIPFSDGSTSVGIVGDREKIEALAENNGEQYKEFIRNFADLNGRFKESDFKFEPRAILGYSIGVTQMSGEGFVLSGNSTEFLDPIFSSGVTFATASGLLSAKMTHKHLQGEAVNWKKDYEEVIQQGINVFRSYVTGWYSGDFQTIVFAKHIDEDIKRQICSVLAGYVWDQSNPFVKKHDTILPTLAKVIKMKEKAEETDLS

SEQ ID NO: 85840 - protein, 504 aa, Rhodanobacter sp.
  misc_feature (1)..(504): tr|A0A1E4HGG7|A0A1E4HGG7_9GAMM Tryptophan halogenase OS =Rhodanobacter sp. SCN 67-45 OX=1660133 GN=ABS82_06820 PE=4 SV=1
MTDPRIRNIVIVGGGTAGWMAAAAFAKVLGPDYAIRLIESEEIGTVGVGEATVPHLKLFNNLLEIDEIEFIRQVQGTFKLGIQFNDWGRIGDTYIHGFGTIGHDVSLLPFHQFWIKANQLGIAEDIGAYSLNTVAAPLGKFMPSATDVPAGSPLADIAYAYHFDAGRYARYLRGYAERRGVRRTEGKISQTLLRAHDGFVEAVVLESGERIDGELFIDCSGFRGLLIEQALHTGYLDFTHWLPCDRAVAVACEKVGPPTSYTRSTARDAGWQWRIPLQHRTGNGYVYSSSHVSDDEAAATLLAHLDAPAVGEPRPLRFTTGVRKKFWNRNVVALGLSSGFLEPLESTSIYMIQSGIARLLNLFPQRDFSEVVINRYNAQAVFEYERIRDFLILHYHATRRDDTPFWRQCRTMSIPDQLRENIALFRDSGRFFRNAEEMFALVSWVQVMIGQGIIPRGYHPLVDQMPERDLRKFIAGVGQVVASCVDSMPMQQAFIDRYCTAGAA

SEQ ID NO: 85841 - protein, 530 aa, Rhodanobacter sp.
  misc_feature (1)..(530): tr|A0A1E4H9J4|A0A1E4H9J4_9GAMM Tryptophan halogenase OS =Rhodanobacter sp. SCN 67-45 OX=1660133 GN=ABS82_12745 PE=4 SV=1
MPRLKKVLVVGGGTAGWLAACYLAKAMNSTAPESVQVELVESPNIRLLGVGEATFPSIRGTLAAIGLDERRFLVGATATFKQGIQYVNWVRPPGMPGADRFFHPFNTPSRRPGSPELLPYWLLGAAPEGTPFAEAVTMQSRLVDHGRAPKHASDADYQAPMNHAYHFDAAAFAATLAEHGQGLGVKRHLATVERTELDERGNIAQVVTTELGALSADLYVDCTGLRGSLIGGAMRSAFRSRRDVLFVDRAVALQVPYPAPDTPILPYTRATAQPAGWVWDIGLQKRRGIGHVYSSRHMDATQAEEIARRYVGAAADALEAQHLQFETGYRPEHWRGNCVAVGLAGGFVEPLESTGIALVELAVCMLTHLFPADHDDMERTARRFNEMMVARYERIIDFIKMHYCLSQRRDSAFWIDNANPASIPQTLRDRLQLWRRRPPHRLDFVTDLEMFMPASWQYVLYGMEFRTDLEHARSAYPQMDEARREFAMIQQVAGRALQDLPDHRALVEQLCRQHAQRNPVRTNEPVAVGG

SEQ ID NO: 85842 - protein, 513 aa, Pseudoalteromonas sp.
  misc_feature (1)..(513): tr|A0A4Q6YK47|A0A4Q6YK47_9GAMM Tryptophan 7-halogenase OS=Pseudoalteromonas sp. CO133X OX=1777237 GN=EXT40_105 20 PE=4 SV=1
MQHKEVKKVVILGGGTAGWLSAGLIAAQPHLTHNAQITLIESPDIATIGVGEGTWPTMRQTLKTIGISESEFIQRCDASFKQGSRFDGWCDDKGDAHYYHPFSLPVAYQQLNIAPYWFANKDAVSFSHAVASQTYLCDHHKAPKNHLHSAYQGEANYGYHLDAGKFATLLQQHCTTKLNVEHIISHVECINSNEDGYISSLQTRDHGTIAGDLFIDCSGTHAKLLHQHYGIELIEQQDVLFNDRAVAVQVPYLNPQQELLSYTKATAQDAGWIWDIGLQSRRGLGMVYSSRFASSEDAKQALSQYIAKTQPDTNQNELTFREISFTPGFRRRFWYKNCLAIGMSAGFIEPLEASALVMVELGLNNLLANFPTHRAAMPTLAKRFDEQCHYRWQRIIEFLKLHYVLSKRTSPYWQAHKEVNSVPQQLQENLALWQYQSPWLNDFDRAQEVFSAASYQYVLYGMKQLPQFPALTMPSAIVEHFSANQQQAKRGLQQLPTNRELLNHIQQFGIQPI

SEQ ID NO: 85843 - protein, 512 aa, Bowmanella sp.
  misc_feature (1)..(512): tr|A0A4Q9XQL2|A0A4Q9XQL2_9ALTE Tryptophan halogenase OS =Bowmanella sp. JS7-9 OX=1605368 GN=TK45_03585 PE=4 SV= 1
MRSMQSQIVIVGGGSAGWLTAGVLASEFKHTPDINITLIESSDVPTIGVGEGTWPSMRATLERIGLSENALIQHCNATFKQGSLFRQWRNNSPQDRYHHPFTAPQASNQFDLAPHWLPFAEQVPFAFAMSTQPAMIEAGRGPKNISTPQYAFVQNYGYHLDAGKFVSLLKQHCVTQLGVRHIVDNVTDVVGDKDDVIQQVMTEKNGAVCGELFIDCSGFAALLIEKHYGIKLHKQDHVLFNDNALAVQVPYAADDTPIASATLSTAQTAGWIWDIGLQTRRGVGYVYSSAHSSSDEAMQTLDRYLGGLPADSRVREIPIVPGYREVFWHHNCVAVGLSAGFIEPLEASALVLIELAASFIAEQLPFDSHSMKTVSQRYNQTFTYRWQRIIEFLKLHYVLSSRDDSDYWRDNRAASSQPESLQALLALWQTQCPSRYDFPMAEEMFPAASYQYIYYGMGGQSHLPPKASIARYAERAMQEFSQVRQQSANLARQLPSHRELIEKIAAYGLQKI

SEQ ID NO: 85844 - protein, 538 aa, Burkholderia anthina
  misc_feature (1)..(538): tr|A0A3P0BY27|A0A3P0BY27_9BURK Tryptophan 7-halogenase OS=Burkholderia anthina OX=179879 GN=DF034_30780 PE=4 S V=1
MSNPIRNIVIVGGGTAGWMSASYLVRALQQQANITLVESAAIPRIGVGEATIPSLQKVFFDFLGIPEREWMPQVNGAFKAAIRFVNWRKSPDGSRSDHFYHLFGNVPNCDGVPLTHYWLRKREQGFQQPMEYACYPQTEALDGKLAPCLADGTRQMSHAWHFDAHLVADFLKRWATERGVKRVVDEVEQVHLDDRGYISRLSTKEGRTLEADLFIDCSGMRGLLINQALKEPFIDMSDYLLCDSAVASAVPADDARDGIEPYTSAIAMNSGWTWKIPMLGRFGSGYVFSSKFTSRDQATADFLDLWGLSDKQPLNQIKFRVGRNRRAWVNNCVSVGLSSCFLEPLESTGIYFIYAALYQLVKHFPDTSFDPRLIDAFNAEIVYMFDDCRDFVQAHYFTTSRDDTPFWRANRHDLRLSDAIREKVERYKAGLPLTTTSFDDSTYYDTFDYEFKNFWLNGNYYCIFAGLGLLPDRSLPLLRHRPESIDKAEAMFARIRREAERLRTTLPTNHDYLRSLREGDAGLSRSQPGPTLATPEIL

SEQ ID NO: 85845 - protein, 509 aa, Pelomonas sp.
  misc_feature (1)..(509): tr|A0A0Q6W5J7|A0A0Q6W5J7_9BURK Tryptophan halogenase OS =Pelomonas sp. Root1237 OX=1736434 GN=ASC91_21010 PE=4 SV=1
MRNRPLQRIVIVGGGSAGWITAAPLARMLCRPDQPDQHCEVTLVESADIGTVGVGEATLPTIQFYNQLLGIDEADFVRSTRATFKLGIEFQDWGRIGNRFFHGFGGFGPAIHNRPLWAYWLRLQALGDQLPSYEEWSTATVMARQMRFVPPTPGEPSPSNAFDYAFHFDASLYGAYLREYALKHGAKRVEGTITRVETRPEDGFVAALHLSDGRRVEGDLFIDCSGFRALLIDGAMKSPYEDWSRWLPCDRALAVPCERAGPMTPYTRSTARTAGWQWRIPLQHRTGNGLVYCSGYLSDDEAQRTLLDNLDGKALDEPRQQRFVTGRRKQGWVKNVVAIGLSSGFLEPLESTSLHLIMDAVSRLTAMLPDQSFQPALADEFNRQMAYRYESVRDFIILHYKLGERRDSEFWRYCADMPIPDDLAHQIDLFRKTGRVAVIEPEGFAEPSWASILLGLGVYPERYDPYIDLVDPQLIRRHLHSVHSSISRTVASMPSHADFLGRISAPPKA

SEQ ID NO: 85846 - protein, 435 aa, Shewanella halifaxensis
  misc_feature (1)..(435): tr|B0TPS5|B0TPS5_SHEHH Tryptophan halogenase OS=Shewane lla halifaxensis (strain HAW-EB4) OX=458817 GN=Shal_037 1 PE=4 SV=1
MMSTDQAVQDELERYPTEAVDIAIIGAGPSGSIAASLLHAQGKKVLVLEKQHFPRFSIGESLLPCCMQVIDEANMLEAVNQAGFQFKNGAAFRHQDKYTSFDFTDKFTQGPGTTFQVERANFDKLLADEAVSQGVEIRYGHTVESIDLSAEPSLSVSNGKGQTQTINAKFVLDASGFGRVLPRLLDLEKPSTLPTRSAVFNHIHDNISDPNFDRNKILISVHPDNQDIWYWLIPFSDGRCSVGVVGEPEQLSSLSGYASNGFSDEIGNSDLDKILKTMINQEPGLRALLADAELINESGLLKGYSANVKTLATDKFALLGNAGEFLDPVFSSGVTIAMQSASMAAKTVIRQLDGERVDWQQDYAEPLMKGVDTFRTYVEAWYDYSFQEAIFFDKPDPKIKQMICSILAGYAWDDNNPFVSESKRRLNMVVELCRS

SEQ ID NO: 85847 - protein, 513 aa, Streptomyces sp.
  misc_feature (1)..(513): tr|A0A1C6LJ67|A0A1C6LJ67_9ACTN Tryptophan halogenase OS =Streptomyces sp. AmelKG-E11A OX=1100822 GN=YW7DRAFT_00 187 PE=4 SV=1
MLESIVVVGGGTSGWMTASYLSAAFGERISVTVVESARVGTIGVGEATFSTVRHFFEYLGLSEETWMPACNATYKLGIRFENWRAPGHHFYHPFERQRVVDGFTLPDWWLADGGATERFDKECFLVGTLCDTMRSPRHMDGALFEGDLTDRPAGRSTLAEQGTQFPYAYHFDAALLADFLRDYAVARGVRHVVDDVVHVARDERGWISHVATRGSGDLAGDLFVDCTGFRGLLINDALDEPFESYQDTLPNDSAVALRVPVDMEREGLRPCTTATAQAAGWIWTIPLFGRVGTGYVYARDYCTPEEAERTLRRFVGPAADDLEANHIRMRIGRSRRSWVNNCVAVGLSSGFVEPLESTGIFFIQHAIEQLVKHFPDADWDPALRNAYNTLVNRCMDGVREFLVLHYYGAARADNEYWRDTKTRKIPDSLAERVEQWRTKLPHPESVYPHYHGFEAYSYVCMVLGLGGIPLKPSPALRMLDPSAAQREFRLLATQAEDLRRTLPSQYAYFAQFR

SEQ ID NO: 85848 - protein, 496 aa, Pelomonas sp.
  misc_feature (1)..(496): tr|A0A0Q6WQF5|A0A0Q6WQF5_9BURK Tryptophan halogenase OS =Pelomonas sp. Root1237 OX=1736434 GN=ASC91_28310 PE=4 SV=1
MTALMLATTAYGPRLKITVLESPQVGIIGVGEGSTPWLRRFFEILGIEESEWMPACNATYKSGITFDGWSTKPGFERYFHPFVSMLDNMTMHPFVDNVHARLDGADVYAHPDRFFTSAALARQARGPRALPNFPFDVWYGYHFDATLLGQFLGRKAVERGVTHLRRHVTQVLLNERGDIDRLQLDDGEALAADFFVDCSGFASLMIGKALQTPFIGFGENLFNDAAVAMPTPLEGPIESQTVSTALRHGWAWKIPLTQRQGNGYVYSSAHCSADEAETELRQHLGLLDADIPARHLKMRVGRMSKVWNRNCVAIGLSQGFIEPLEATALLFVQVTASMLVEVLEKGDLGAASQDAFNAAMHKRFENTRDYIVAHYKTNSRTDTDYWRENAENMHLSDSLQGVLMTWMSRKPLVAALKTGRFGGGYPAVSWYALLAGMGIFPDVQDLQPPTEHQARHRLEAVDDFIQRSATNFPDHRELLANIPPGVGDKALQIYTW

SEQ ID NO: 85849 - protein, 536 aa, Serratia plymuthica
  misc_feature (1)..(536): tr|S4YS53|S4YS53_SERPL Tryptophan halogenase OS=Serrati a plymuthica S13 OX=1348660 GN=M621_21745 PE=4 SV=1
MSKPIKNIVIVGGGTAGWMSASYLVRALQQQANITLIESAAIPRIGVGEATIPSLQKVFFDFLGIPEQEWMPQVNGAFKAGIKFVNWRKSPDHSRNDYFYHLFGNVPSCDGVPLTHYWLRKREQGFQQSMAYACYPQPGALDGNLAPCLHDGTRQMSHAWHFDAHLVADFLQRWAVERGVNRVVDEVVEVNLNDHGFISSLLTKEGRKLEADLFIDCSGMRGLLINQALKEPFIDMSDYLLCDSAVASAVPNDDAQVGVEPYTSAIAMNSGWTWKIPMLGRFGSGYVFSSKFTSRDQATTDFLNLWGLSDNQPLNQIKFRVGRNKRAWVNNCVSIGLSSCFLEPLESTGIYFIYAALYQLVKHFPDTSFDPRLADAFNAEITYMFDDCRDFVQAHYFTSSREDTPFWLANRHDLRLSDSIKEKVERYKAGLPLTTTSFDDSTYYETFDFEFKNFWLNGNYYCIFAGLGMLPDRSLPLLQLRPESIEKAEAMFARIQREAERLRASLPTNYDYLRSLRGGDAGLFRPGPTPASPESL

SEQ ID NO: 85850 - protein, 490 aa, Alteromonas confluentis
  misc_feature (1)..(490): tr|A0A1E7ZG90|A0A1E7ZG90_9ALTE Tryptophan halogenase OS =Alteromonas confluentis OX=1656094 GN=BFC18_02955 PE=4 SV=1
MNNNKKQRVVIAGGGTAGWMAAAALSRLLHNRVDVTLIESSDIGTVGVGEATIPTLTFFHRLLKIDEKAFMAATNATFKLGINFENWKTTSDAYLHAFGATGKDCWAAGFQHFWTRGRQLGLSDDFGAYCLERVAAEQGKFAHLPQNGLNYAYHLDASKYAMFLRNLAEQAGIRRIDARIEQVATRKDNGYIRHLQLDNGEKIEGDLFIDCTGFRGLLIEETLHTGYEDWSHWLLCDSAVAVQTESVSLPLPYTRSIAHEDGWQWRIPLQTRVGNGLVFCSKYLSERDAITRLTDNIEGAPLNSPRVIKFRPGRRTKQWNRNCVSLGLASGFIEPLESTSIHLIQQGIVRLLRMFPHDEIRPAIVDEFNRQSVDEIEHIRDFIILHYHVTARTDSAFWRHCRHMDIPETLAQRLQIFRESGQIHRKANELFDDSWQQVMIGQGLLPEGYHPIADMMSEQELKEFLSHIKGNVDRTVSQLPPHHVYLKTRA

SEQ ID NO: 85851 - protein, 507 aa, Duganella sp.
  misc_feature (1)..(507): tr|A0A1I2UK49|A0A1I2UK49_9BURK Tryptophan halogenase OS =Duganella sp. CF458 OX=1884368 GN=SAMN05518865_11815 P E=4 SV=1
MRDEQFQRRPVRRVVIAGGGTAGWMVAAAVSRSLGKVLDIKLVESDEIGTVGVGEATIPSLLNFHRLLEINEQEFMAATKATFKLGISFENWRNVNEDYIHSFGMTGIDHWTAGFNHFWRKGRERKLAGDYGDYCLELKAAQLERFGHLPREGINYAYHLDASAYARYLRRYSEGYGVQRIEGKIAKVHTDAANGHITALQLDGGAMLEGDLFIDCTGFRALLVGETLGEGFEDWSQWLHNDSAIAIQTSSTGPAVPYTRAIAHEWGWQWRIPLQHRVGNGMVFSSKFVDDDTARAGLISNITGEQLVQPRVIRFKPGQRRKVWNKNCVAIGLASGFLEPIESTSIHLIQRGIIRLMQMFPSAGIFQSEIDEYNRQAWTEIEHIRDFIILHYKVTNRRDSPFWRHCAEMEVPKSLRRRIDMFRETGRVFRLSNELFAENSWVQVMLGQGIMPLQHHPSADLMGDAELSCLLDGIRNNVARTVAQLPPHQQYVENYCAAYMEEYLAPK

SEQ ID NO: 85852 - protein, 518 aa, Bowmanella sp.
  misc_feature (1)..(518): tr|A0A4Q9XNS3|A0A4Q9XNS3_9ALTE Tryptophan halogenase OS =Bowmanella sp. JS7-9 OX=1605368 GN=TK45_05995 PE=4 SV= 1
METPKKISSVIVLGGGTAGWLTANHLAKKLQPGTANGVCVTLIESPDIPTIGVGEGTVPAIRDTLKYLGISETELLRECDATFKQSIEFINWMAPSDRQTHRYHHVFDYPPAEYAPHLLDWVMQKEQKPDFANAFSYQQAVIEAGKAPKGITHPEYEGVCNYAYHFDAAKFGQLLARHARTNLGVKHIQANISRVDTDEAGNICCLHSDQGQQFVADLFVDCSGANSTLLGQTLNVPFISKKAHIFTDTALAVQVPYTDPQQPIACSTLATAQQAGWIWDIGLTTRRGVGLVYASDFQTEQSALDDLQRYLGTDADALTVRKIPMRTGYYERFWQGNCVAVGMSQGFVEPLEATGLLLFDVSARMLAEQFPVTHQDICRCAARYNKKLRYAWDRVLDFVKLHYCISNRRDSEFWLAHQDSNTWSATLEEDIQHWQRHLPSQYDFTDRASVFNLENHLYVLYGMQFNTMPAAFLQQQADHTQAQQFYRRIADYAQQAAKQLPEHRDLLQRIARFGLQPL

SEQ ID NO: 85853 - protein, 505 aa, Pseudoalteromonas sp.
  misc_feature (1)..(505): tr|A0A4Q6YKI0|A0A4Q6YKI0_9GAMM Tryptophan 7-halogenase OS=Pseudoalteromonas sp. CO133X OX=1777237 GN=EXT40_095 60 PE=4 SV=1
MMIKKIAIVGGGTAGWLAANHLGQSLQGSNIEITLIESPTIPTIGVGEGTVPSMRNSLQKFGISESDFINECDVTFKQSIKFVNWLDKTKHGSNFYHHLFDHPHIFGEQLTDAWLASNESSDYASFVSKQHLCCEKNLAPKTITTPEFMGVNGYAYHFDAKKFAAFLSRHAEQSFSVKHHFADIKDVVVDDAGYITHLVDEHDVAMAFDFVIDCTGFSAAILGNKLGVEFLDKSACLLTDTAITLQVPTSPDDEIPPYTIATAHQAGWIWDIALTQRRGVGFVYSSKYMTEQQALDKLHTYLGEKFNHLTPRKIPMKVGRREKMWHKNCVAIGLSQGFVEPLEATAILIADFSANLLAKRFPRCKADIALVIDDYNRHVNYVWEQTFDFIKMHYCISDRTDSEFWIDNRKDEQLSQQLKNNLARWHRFAPNREDFASKFDLFDLENYLYVLFGMRYLPASDTLNTVRGFEQLTSLKQQRVNQLLDELPTHRALLEKIKKFGMQKQ

SEQ ID NO: 85854 - protein, 602 aa, Microcystis panniformis
  misc_feature (1)..(602): tr|A0A552QBE9|A0A552QBE9_9CHRO Tryptophan halogenase OS =Microcystis panniformis Mp_MB_F_20051200_S9 OX=2486223 GN=EWV53_00610 PE=4 SV=1
MNSTITQSREYDVVIMGAGFAGLCQARHLMLNIPNIRVALIDPRPVERTDKDLKIGESLIEVAALFLCKELGLHDYLIENHPPKSGLNFHWPKDTSKTASLDDYYHVWANRQTPVGSFHLQRAKFEQDLLAMNCQMGADFYNGRVKDVDLTQGDDLKTVYAKVGEENITLQAKHVIDAAGRNFIIGRKTDNVLSGPENLLGVNNGSAWLRVKNIDRTIFHSGYHPEGASTSHYYATNHYFGQGHWLWMIPIDKKSMELSIGIIHHHDVIPAKSINNLEKFSSFLDANHTILSRLIDSGEVVDFHYWPKIAHKSKVLFSPDNWYIIGDAAHIFDAFYSYGTTMIAFEVESVTEIIRAKLAEEAAAEQKRSAYNDFNLAYARTVNCLYRDHAYQLGHASVMSWRIYFEYMWWFGVHIPTYIGKWHLDLNFIPRYVKIANGNVDGIFADLCKEFHQLVEEGANIGLMDAYRADQLWGNYGTLKHFDDFLENTKFEPRRCNVFASMKAVYFYIAIWYALFQWKAFGLAGWLTPRHWYYFGRMLSLSVQATIAEVIYKWKTRGIPDNTQMEKMREEFKSYHYQPQDKYSFPVEEVANKAVKIESFAS

SEQ ID NO: 85855 - protein, 497 aa, Streptomyces antioxidans
  misc_feature (1)..(497): tr|A0A1V4DA44|A0A1V4DA44_9ACTN Tryptophan halogenase OS =Streptomyces antioxidans OX=1507734 GN=VT50_0207675 PE =4 SV=1
MSSEDREQYDVVVVGGGPGGSTLAALVAMRGHRVLILEKETFPRYQIGESLLPSTIHGVCRMTGVAEKLAAAGFTPKKGGTFRWGANPEPWTFSFSVSPKIAGATSHAYQVERSKFDTILLEHAVEKGAEVRFLASVSDVLEDGERVTGVRYTDAAGTEHEVRATYVVDASGNGSRLHKRVGGTREYSQFFRSLALFGYFEGGKRLPAPNAGNILSVAFESGWFWYIPLTPDLTSVGAVVRRENADRIQGDPERALMALIDECPLIKEHLSDATRVTEGQYGQLRVRKDYSYHQTTFWRPGLVLIGDAACFVDPVFSSGVHLATYSALLAARSISSSLAGIVSEEAAFTEFEARYRREYGVFYEFLMSFYDMHVDEDSYFWSAKKVTHNQHTELESFVELVAGVSSSEFDLDGAESAALRMKSKSAEFVSAIDEMSTDAEGNMTPLFRSSAVRQAMQEGAQVQSRAFLGEDLGPDVPMFPGGLITSDDGMLWQPGPA

SEQ ID NO: 85856 - protein, 436 aa, Rhodopirellula baltica
  misc_feature (1)..(436): tr|F2AMS1|F2AMS1_RHOBT Tryptophan halogenase OS=Rhodopi rellula baltica WH47 OX=991778 GN=RBWH47_02553 PE=4 SV= 1
MSTPKMKDFYDCVVIGGGPAGGAAASIVADSGVSTLLIERDPVPRFHVGESLMPECYWPLERLGLIDQVKRSGWQTKKSVQFVTHTGKESAPFFFREHDERECSTTWQVERSEFDKMLFDRASELGADCFDQTRLIDVQTEPGETEDQPVARAVVVRTADGTEKTIGCKVVVDATGQQAFLAGKMGLKEINPDLKKAAIWTYYRDAVRGEGDNDGATIILNTKSRDSWFWFIPQSRGITSVGCVGDNDYLLKGRGTPEEIFEEELANCPGLQPRLANATRVGKITTAKEFSYMTRRHSGPGWVLIGDALGFIDPVYSSGVYFALEMGVRAGDAIVEGLKKDDLSAEQLGKWTDDFKEGASKVRQLVHAFYNKDFSIGRFMKEHPEYRGNVTDLLIGRVFHEDAGKMFPALDRSIEMARANAMSKADSMAETKPMST

SEQ ID NO: 85857 - protein, 498 aa, Alteromonas confluentis
  misc_feature (1)..(498): tr|A0A1E7Z6K9|A0A1E7Z6K9_9ALTE Tryptophan halogenase OS =Alteromonas confluentis OX=1656094 GN=BFC18_20795 PE=4 SV=1
MTSATKTRVVVAGGGTAGWLSAFSLVTRLGNLLDITLVESEQIGTVGVGEATIPTMRNFHQLMGIDEREFMSATQATFKLGIEFENWGQKNESYIHSFGEIGQRAWMAEFHAFWMAARDSGLNDSLDDYCLELKAAKAGKFALAAGKKPVNYAFHLDATAYAAWLRKKAEAAGVKRVEGKINNIVVDEQSGNIRSLELDNGECVQGDVFIDCTGFRGLLIGDALGVEYEDWSHYLAADSAIAVQTESPEPPRPYTRAIAHDAGWQWRIPLQTRTGNGIVYSSRFLSDEDAEKTLLANLTGKPLTEPRRIKFKTGRRVKTWHKNCVAIGLSSGFLEPLESTSIHLVTTALIRLMKLFPFSDNFGILAERFNQESAVELETIRDFIILHYHQTARDDSPFWDHYRTMDIPDSLRHRMTIFAENGYVWPDDVSLFRVDSWIQVMMGQGLQPKQYHHAGKMLPPEGLKQQLAALKQQIENQVAQLPPHEQFIQKYCPAGKVG

SEQ ID NO: 85858 - protein, 499 aa, Alteromonas confluentis
  misc_feature (1)..(499): tr|A0A1E7ZDY3|A0A1E7ZDY3_9ALTE Tryptophan halogenase OS =Alteromonas confluentis OX=1656094 GN=BFC18_06130 PE=4 SV=1
MDSRMSAHIRKLVVAGGGTAGWMAAALLKKVLGHLEIELVESQDIGIVGVGEATIPPIQTYNQFLGLDEKAFLSETNASIKLAIRFENWKQKGSSYYHTFGAPGATVGFVGFQHYWLRAMKAGLNKSFWDYDLNYLACKAGTFNKIQTDNPVYQLPYAYHFDATLYGQFLRRLAEKSGVVRTEGKIEHVKTNPETGFVEALQLTSGKQIHGDLFLDCTGMRGLLLQKTLGVEYEDWSKWLCADSALAVPSQRHEKTAPFTRSIAHESGWQWRIPLTHRNGNGLVYSSRYMDDDTAEQTLMSNLDTAPLDTPRKITFRTGRTVKQWHKNVIGIGLSSGFLEPLESTSIHLIQSGIVRLLKMFPNHAITPSMEALYNAESKEEFETIRDFIILHYNVTERDDSEFWRDMQKLALPERLATKIDAFRDTATLHNEQNDIFRDASWVEVMLGQGIMPQSYHPSANNFSDQEILAIMQKIEAAKLQPLGSLVAHDDFLRKITAN

SEQ ID NO: 85859 - protein, 520 aa, Alteromonadaceae bacterium
  misc_feature (1)..(520): tr|A0A4R5GYU3|A0A4R5GYU3_9ALTE Tryptophan 7-halogenase OS=Alteromonadaceae bacterium M269 OX=2546219 GN=EYS14_ 19900 PE=4 SV=1
MADARCVFENLLRFLPRVDLVSVAEPHKIVILGGGTAGWMAANLMAKRWANKPIEITLVESPSVGIIGVGEGSTPTLKRFFESIEITEQEWMPRCDATYKVNIRFSGWSPESGIADYSHPFTCQTDTFSHRAFEVNCRTRRLGLNTHTRPDDFLLNGVLANQNKGPVTPENFPFVMEYGYHFNSQLLGEFLAEIALQRGVQHQQADVVSVSKHNNGDIAALVTKEGMEIKGDFFIDCSGFRSVLLKGALGVPFESFKSNLFNDSAVVLPTPIQQDIPSETLSTAMSAGWCWRIPLTSRFGNGYVYSSDFISSEQAEVELRQHLGMQDSDQECRHLKMKVGQAKYHWMNNCLGIGLAQGFIEPLEATALHLVQISIEMFMAKYDESQLTGKHRDSFNQDIHDRFERVRDYIVAHYKMNTRHDSEYWRVNRENNHLSDSLCHILDVWFKCEDLGVEIERQNLNSHFDSISWHCLLAGYGKFPPLAPNQPGTGDLYQDQGVDEFLRRCSLNFQQHSENLNNLR

SEQ ID NO: 85860 - protein, 501 aa, Alteromonadaceae bacterium
  misc_feature (1)..(501): tr|A0A4R5H184|A0A4R5H184_9ALTE Tryptophan 7-halogenase OS=Alteromonadaceae bacterium M269 OX=2546219 GN=EYS14_ 20905 PE=4 SV=1
MAIPHIIIAGGGTAGWMAANLIQQSWPQTRVTLIESKTIGTIGVGEGSTPYLKHFFKQLGITDEQWMPACNATYKTGIQFSSWTNKPGYSSYFHPFFSQLDIKPGDPFFYNANMQRMGYQANAHPDKYFVNTQLAAQCLAPIPNREIGFELDYGYHFDAGLLGTFLKQRAIQLGVEHIEGDIENVEVSESGNISHLVTKAGAKLSADFFIDCTGFQSLLLQKTLNVPFTSFKDNLINDAAVAIQTPNASDFAISPKTVSTAFKHGWAWNIPLTNRTGNGYVYSTEHCSPDEAEHELRQALGIGANKDIKARHLKMRVGRVSQHWHRNCLAIGLSQGFIEPLEATALMLVQYSIQQFIDRYQDLKTPEAQKRTLYNQEINRMFDGIRDYIVTHYCMNSRTDTAYWQHCREESILSDNLTELLEAWTSKDKDFDSVLEKQQSSLVYLRPSWYIILAGMGCFPETLSEPPTSIRIPDANLSLRLCQKYASELFNDHRSVLASRL

SEQ ID NO: 85861 - protein, 525 aa, Duganella sp.
  misc_feature (1)..(525): tr|A0A1G7THE2|A0A1G7THE2_9BURK Tryptophan halogenase OS =Duganella sp. OV458 OX=1855290 GN=SAMN05216320_10410 P E=4 SV=1
MNSNEMHGGAIRRIVIVGGGTAGWMTAAPLAQRLLRHPTEPCEVTLVESPEIGTIGVGEATLPTIRAYNAALGLDADDFVAKTKASYKLGIEFKDWGHVGNRFFHAFGDFGPPLAGLSAHQHWLRLASAFNNMPDLENWSMPSVMARHGKFVPPNEEKPGVTDAYSYGFHFDASLYARYLRDYAVARGVQRIEGMIVDVEQHAESGFVTAIKLRDGRRIEGDLFIDCSGFRGLLIEGALKAGYEDWSNYLPCNSALAVPCASAPQLTPYTRSTAKEAGWLWRIPLQHRIGNGHVYSNGFTTDEQARRVLLDGLDGEALDEPRQIRFVTGRRRKSWDKNVVAIGLSAGFVEPLESTSINLIETAVGKLLELFPERDCNPALADEFNRVMSLRYESVRDFIVLHYKLTRRDDSDFWRYCAAMPIPDSLRHQIALFRETGRVAIVDRGGFAEPSFVAMMMGLGALPKRYDPLAGRVDIRTVHGHFAGLRDMITQAVALMPDHGAYVASQAAAAVSSHTENKKLMEAHA

SEQ ID NO: 85862 - protein, 504 aa, Duganella sp.
  misc_feature (1)..(504): tr|A0A1G8A410|A0A1G8A410_9BURK Tryptophan halogenase OS =Duganella sp. OV458 OX=1855290 GN=SAMN05216320_11099 P E=4 SV=1
MRDPNNRQPVRRVVIVGGGTAGWMAAAGIAKVLGKRLDIKLIESEEIGTVGVGEATIPTLINFHNVLEINEQEFMAETQATFKLGISFESWRNVKEDYIHSFGTTGVDHWTAGFQHFWHKGVERGLAGDYGDYCLELKASLEHRFAHLPNNGMNYAYHLDAGRYAKYLRKLSEPRGVQRIEGKIVSYNKHDNGDVRSVVLASGQEIEGDLFIDCSGFRGLLIGEAMDEPLTDWSQWLFCDRAIAVQTEAVADAVPLTRSMAHQAGWQWRIPLQHRVGNGIVYSSRYLDDDAARKQLLANVQGRTLIEPRVIKFKPCQRHLTWKGNVVAIGLSSGFLEPIESTSIHLIQRSVIRLMQMFPSDGIQQADIDEYNAQCNSEIEHIRDFIILHYHANNRTDSQFWIDAREMSIPASLQHRIDLFRETGRVFRVPNELFAENSWIQVMLGQGIMPKSHHQTADLMGDEELKAFLGNIKGRIDRTVVQLPTHQAYVQRYCGRPDEGIKAA

SEQ ID NO: 85863 - protein, 505 aa, Planctomycetaceae bacterium
  misc_feature (1)..(505): tr|A0A1Z9QPB8|A0A1Z9QPB8_9PLAN Uncharacterized protein OS=Planctomycetaceae bacterium TMED240 OX=1986835 GN=CB E00_08375 PE=4 SV=1
MKIVIVGGGSAGWITASYLASTVEADVTIIHTDLVETIGVGESTTPTIQHIAKKVGIDEPEWMKQCEATFKYGVEFNDWNRIGSRWLHTFDDIYPFEIMHSPLQDLGKYNAKIGRTSCDYFLSLNKGSGKSREYNDLHGPGETLLERGLSPYDHAGRNTITNFPGYSFHVNAHKFGQAMKNACKFPITEIQKKVMHVNYNEDGVESIVLEDGDIIQGDVYFDCTGFQRLLIGELTDWNSYYPTIPNNRAIAGTAVTDIPFKPCTQAFAQQDGWIWKIPTTERWGSGFVYSSDFTTDDEAEERIVKFYADQGIKYMPVRRIKFDAGRCNEVAVKNVIANGLSQSFIEPLEATSLMITCSTARSFEELYNKNHTWNASKSKALSRFMHRIIDHNKRFVYYHYILSERQDSEYWRNISQGHDAVQEVCDYADSFKSDRWCEQGETKFNRFNLISMILGFEKTYCNELEDISAEDIEDYEFFKGMSKKHYEHLIRNNLTVDEYIDKING

SEQ ID NO: 85864 - protein, 498 aa, Pararheinheimera mesophila
  misc_feature (1)..(498): tr|A0A3P3QLS9|A0A3P3QLS9_9GAMM Tryptophan 7-halogenase OS=Pararheinheimera mesophila OX=1547515 GN=EIK76_11185 PE=4 SV=1
MTPIKKVVILGGGTAGWLSAALLKKVLGAVVEIELVESDAIGTVGVGEATIPPIRVLNQVLGINEAQFLRETKATIKLAIKFENWRTQGDSYYHSFGAPGRSLTFCHFHHLWLKARQQLGDMTSIWQYDLNYLCAEAGKFASITAKDPILELPYAYHFDAGLYAAFLRKFSEPMGVVRTEGIVDQVTQHHNGHIKSLLLNDGREVKGDFFIDCSGFVSLLLQRKLGVGYDDWSHFLPCDRAWAVPTERFEQTLPYTRAIAHQAGWQWRIPLQHRNGNGLVFCSAHYTEQQALDVLMGNLQSTALAEPKLIKFKTGRARKQWHHNVLAVGLASGFLEPLESTSIHLVQSGIVRLLKMFPHNGIEPATVAEYNKQSEAEFVYIRDFLLLHYHVTERTDSQFWRDMRQLQIPDSLKHKIELFQADGSIFREQHDLFHDASWLQVMLGQGVLPRDYHPLADNFSEAQLKDMLSGIRAIKQEPLAKLPSHDEFLRRACGISAG

SEQ ID NO: 85865 - protein, 506 aa, Duganella sp.
  misc_feature (1)..(506): tr|A0A1G8A3T4|A0A1G8A3T4_9BURK 2-polyprenyl-6-methoxyph enol hydroxylase OS=Duganella sp. OV458 OX=1855290 GN=S AMN05216320_11096 PE=4 SV=1
MLRRIVIVGGGSAGWLTAGLMAADHRDLQITLIESPDVAPIGVGEGTWPSMRDTLRRIGVSEADFFRECDASFKQGSRFNRWVDGGDSDCYFHPFMLPQGYGEVDVPQHWQAQHPDVPFADLASVQPHLCVHGRAPKQAATPEYASVANYGYHLDAGKFGVFLRKHCLEKLGVHYVPDHVSAINSHPDGDIASLQTNKHGALEGDLFIDCTGMQSLLLGQHFGVPLISQRHVLYNDSALAVQIPYASDDAPIASQTSSTAQSAGWIWDIGLPTRRGVGHVYASSYISDDQAEAELRAYIAQTGGPGEIPQPRKLSFNPGYRERFWQRNCVAIGLSAGFIEPLEASALAIVEMSAAMLSDDLPATREAMDIVARRFNDAFRYRWERVIDFLKLHYVLSKRRDTAYWRDNTSAVPERLAELLTLWQHRAPSRSDFYRLEEVFPPASYQYILYGMGFRSDFSRAARPQESARADAYFQQAAALARKMLGALPDNRALIHHIKLHGLQKI

SEQ ID NO: 85866 - protein, 533 aa, Serratia plymuthica
  misc_feature (1)..(533): tr|A0A3M3K800|A0A3M3K800_SERPL Uncharacterized protein OS=Serratia plymuthica OX=82996 GN=ALQ63_01428 PE=4 SV= 1
MSKPIKNIVIVGGGTAGWMSASYLVRALQQQANITLIESAAIPRIGVGEATIPSLQKVFFDFLGIPEQEWMPQVNGAFKAGIKFVNWRKSPDHSRNDYFYHLFGNVPSCDGVPLTHYWLRKREQGFQQSMAYACYPQPGALDGNLAPCLHDGTRQMSHAWHFDAHLVADFLQRWAVERGVNRVVDEVVEVNLNDHGFISSLLTKEGQKLEADLFIDCSGMRGLLINQALKEPFIDMSDYLLCDSAVASAVPNDDAQAGVEPYTSAIAMNSGWTWKIPMLGRFGSGYVFSSKFTSRDQATTDFLNLWGLSDNQPLNQIKFRVGRNKRAWVNNCVSIGLSSCFLEPLESTGIYFIYAALYQLVKHFPDTSFDPRLADAFNAEITYMFDDCRDFVQAHYFTSSREDTPFWLANRHDLRLSDSIKEKVERYKAGLPLTTTSFDDSTYYETFDFEFKNFWLNGNYYCIFAGLGMLPDRSLPLLQLRPESIEKAEAMFARIQREAERLRASLPTNYDYLRSLREGNAGLSRPGPSPEFR

SEQ ID NO: 85867 - protein, 518 aa, Erythrobacter sp.
  misc_feature (1)..(518): tr|A0A1G0A759|A0A1G0A759_9SPHN Tryptophan halogenase OS =Erythrobacter sp. RIFCSPHIGHO2_12_FULL_63_10 OX=179797 5 GN=A3J40_03505 PE=4 SV=1
MTKRIKSVCIVGGGAAGWLTAGLLAARRSVPDGSGLSVTLVESESIGIIGVGEGTWPTMRNTLKKIGISETDFMRRCNASFKQGAKFARWRTGAKDDFYYHPLVLPEGFPMVDLAPYWNAAALKQSGVPSFSDAVCFQEFLCENGLAPKMISSPEFGGIANYAYHLDAHLFAELVQEHCIEKLGVTHIIDDVVEVERGEDGDIAAIINQRTGRLEADLYVDCTGFASKLLGEALEVPFIDCSDVLFIDRALAVQVPYEDENSPVVSHTVSTGQRHGWIWDIGLKNRRGVGYVYSSSHAQGDDVEAELAAYVGPQFKHLSTREIKIRAGHRAQFWKGNCVAVGMSAGFLEPLEASALVMTELSADYLAAMLPATRSGMDVVAARYNEITQYRWDRVIEFLKLHYMLSERDDTQFWRDNRDPASIPGRLLDQLELWRYNSPSELDFSSSHEMFPAASYQYVLFGMGFKMDASMQAHALRDPVAAEQAFERNALLKRKWGSKLPTNRDLLTKLGQYEFQKI

SEQ ID NO: 85868 - protein, 502 aa, Alteromonas sp.
  misc_feature (1)..(502): tr|A0A4Q8UJT4|A0A4Q8UJT4_9ALTE Tryptophan 7-halogenase OS=Alteromonas sp. KUL49 OX=2480798 GN=EYS00_00345 PE=4 SV=1
MINESAQYNVSANAVKKVVIAGGGTAGWMAATALSRLIGKSVSVTLVESKDIGIVGVGEATIPPIRTLHKLLGIDESQFMQATQATYKLGIEFENWRDKGHSYIHSFGITGRECWAGEFHHFWLRAQSLGFGGEFGDYCVELKAALENKFATSDKAPLNFAYHFDAVAYGKFLRSIAEQSGVKRIEGNIAKVNKCVERGYLTSLLLESGEVIEGDLFIDCTGFKGLLIEQALHTGYENWQHWLPCDTAMAMQTEAVEPPPPYTKSVAHTAGWRWKIPLQSRVGNGLVYCSKYMTDDEARETLTAQVTGAPINDPRIIRFTPGKRRLGWNKNCVALGLASGFIEPLESTSIHLIMTGIIRLLRNFPFDGITQSAIDEYNNKFNSEMDAILDFIVMHYKVTNRMDSPFWQHCQTMDIPKSLQHKIALFADTGRVFLDDGDIFRVDSWTQVMLGQGLTPRQYHRVADEMSTEELQRFMAGLKQHVDHHVSQLPQHSDFLKHRMGA

SEQ ID NO: 85869 - protein, 502 aa, Alteromonas sp.
  misc_feature (1)..(502): tr|A0A4Q8UK77|A0A4Q8UK77_9ALTE Tryptophan 7-halogenase OS=Alteromonas sp. KUL49 OX=2480798 GN=EYS00_01315 PE=4 SV=1
MQSNDIKNIVIVGGGTAGWMAAAALSKLLYADDINIRLIESEAIGTVGVGEATIPHILYFNRLLGLDENDFIRQTNATFKLGIEFVDWGKLGDSYIHPFGPYGFDMEGMHFHHLWLRQHKQGKAKPIDEFNLQILAAKAGKFMRDKPDMKGSPLSTIAYAFQFDAALYVKFLRNVAEKRGVIRKEGKITHASVNSDNGHVSSVHLENGEVISGDLFIDCSGFDGLLIEKTLKTGYDDWSHYLPCNSAVTRLSERLDDLPPYTRATAKTAGWQWRIPLQSRTGNGYVFSNQFISDEEALTTLNAGLDKAPTSDPRYLRFTTGIRKQVWNKNVVSLGLSAGFLEPLESTSIHLIQTAIARLMTNFPDKSFNQPDIDYYNARTRLEYEQIRDFLILHYKATTRDDSEFWRYCKDMAIPASLEQRIAIYKENARLYRHDNELFNHVSWFAVFHGQGIIPKAYNPIANQLPVYELDKRLEEIHKVTSKCLDHMPDHQSYLSRIIAES

SEQ ID NO: 85870 - protein, 507 aa, Caulobacter henricii
  misc_feature (1)..(507): tr|A0A0P0NXY9|A0A0P0NXY9_9CAUL Tryptophan halogenase OS =Caulobacter henricii OX=69395 GN=AQ619_06000 PE=4 SV=1
MTDGGLKSLTIVGGGTAGWMSAAMLSRALGSTVAITVVESDEIGTVGVGEATIPAIKLLNGFLGLDENDFLAATHGTIKLGIEFVDWHTVGQSYLHAFGPVGRPLGMAAFHHYWNRRRLQGHDESLWDYSLNARAARAGKFDRLQQAGGGYLEGLVHAFHFDAALYAKYLRRYSEAQGVRRVEGRIVGVNQHSETGFVTDLTLQDGRRVEGEFFIDCSGFRGLLIEETLKTGYDDWRGWLPMDSAIAVPCASATPLLPYTRATAREAGWQWRIPLQHRTGNGHVFCSEHISAAEATDVLMRNLDGAPLAEPRQLNFTTGRRRQFWNKNVVAMGLASGFMEPLESTSIHLVQSALSRLVALFPNRDFNAVEIAEYNRQTALEYEYIRDFLILHYKATSREDTPFWRACKAMDIPDTLKARMELFAQSGRVFSQEDDLFKEASWIQVLIGQGVLPGAVHPLTRQVTDPQLDDYMTNLRQIMARAVDGLPDQADFIARHCASGAQSADRP

SEQ ID NO: 85871 - protein, 347 aa, Xanthomonas fragariae
  misc_feature (1)..(347): tr|A0A1Y6HCN7|A0A1Y6HCN7_9XANT Tryptophan halogenase OS =Xanthomonas fragariae OX=48664 GN=prnA_3 PE=4 SV=1
MAATQATIKLGIGFEHWRDLDQRYIHSFGHAGTDHWSAGFQHFWLKGRQRGVARDFGDYCLELRAAQEGRFAHLSNGGMNYAYHLDAGLYARFLRRFSEGFGVQRIEGRIGTVETDPHSGHLTALTLQNGTRVEGDLFLDCTGFRGLLIGQTLGVGADDWSHWLFADSALAVQTESVGAPVAYTRSRADQSGWMWRIPLQHRVGNGIVYSSRYMDHDSAAQVLQRNLAGRALTELRPLRFTPNQRHRVWEKNCVALGLASGFLEPLESTDIHLIQRGITRLLQTFPQIINDLDIAEYNRQAAEEITHIRDFVILHYHVTDRRDTPFWRDCAAIDIPDTLRHWVELFR

SEQ ID NO: 85872 - protein, 499 aa, Glaciecola sp.
  misc_feature (1)..(499): tr|A0A2N1HV27|A0A2N1HV27_9ALTE Tryptophan halogenase OS =Glaciecola sp. 33A OX=2057807 GN=CXF81_08855 PE=4 SV=1
MKKQQRKIKKVIIAGGGTAGWMAAAALSKLIGNNLDVSLIESDEIPTVGVGEATIPTLHVFHQLLGISEQEFMAATNATFKLGISFENWRDVSKDYIHSFGFLGQGCWAAGFQHFWLKGRERGIASQLGDYVPEHLGAREGKFAVLAGQELNHAYHLDAGLYAKFLRKIAEKYRTKRIEGKIAKVTLDEESGYIDSLTLASGQVVEGDLFIDCTGFKGLLIEEALHTGYDDWSHVLPCDSAIAVQTNTVGKPVPYTRAIARDAGWQWRIPLQNRTGNGFVFCSKYMSDEEATKTLLDNIEGERLNEPRVIKFKTGQRRKHWNKNCIAMGLSSGFIEPLESTGIHLFQRAIVRLLLMFPSQGIKQSDIEEYNVQTKEEAENIRDFIILHYHLTERKDTAFWRYCSSMDVPDSLKHRMSLFRESGQVFKKSDELFGETSWIQVMMGQGLMPEQYHPIVDMMSDNELRDFLNNIKSRVKRQVENWPDSNDFIKHYCPSSVNT

SEQ ID NO: 85873 - protein, 504 aa, Caulobacter henricii
  misc_feature (1)..(504): tr|A0A0P0NY20|A0A0P0NY20_9CAUL Tryptophan halogenase OS =Caulobacter henricii OX=69395 GN=AQ619_03800 PE=4 SV=1
MTRVNRLRKVVIVGGGTAGWMTAAALGRFLTRDGQTEVTLVESEAIGTVGVGESTIPQINIFNRMLGLDENDFVRKTKATFKLAIEFVDWKAIGHSYHHPFGPYGVDMEAVSFHAYWLKLHGMGLEPDLGAYSLNAVAAQQGRFMRPNGQANSPLGAIAYAFQFDAGLYARYLRDYAEARGIVRQEGKIATVQQDGLTGFVTSVTLESGAVVEGDLFIDCSGFRGLLIEQTLQTGYEDWSNWLLNDRAVAVPCTLGGSNAPVTRATARPAGWQWRIPLQHRLGNGYAYSSAHISEDEATAYLLAHLDGEPLAPPNQIRFTAGRRKKSWNRNVVAIGLSAGFMEPLESQSIHLIQVGIARLLAMFPDRNFHQPDIDRYNRVMAFEYEKIRDFIILHFKATQRNDTPYWDYLREMPIPDYLADKIALFQSHGRIFRENEELFNDTSWFAVMVGQGLLPGGYDPMVEVMGDEELVRRMADIKAVIARSAEVMPDHFDFIRANCDAMG

SEQ ID NO: 85874 - protein, 534 aa, Streptomyces misionensis
  misc_feature (1)..(534): tr|A0A1H5DKW0|A0A1H5DKW0_9ACTN Tryptophan halogenase OS =Streptomyces misionensis OX=67331 GN=SAMN04490357_5857 PE=4 SV=1
MTGEDRRIKKVVILGGGTAGWMTAAYLGKALQNTVEITVLEAPTIPRIGVGEATVPNLQRVLFDFLGINEDEWMRECNASFKTAVRFVNWRTEGAGQATARELPQGGPDHFYHPFGLLPDYDQTPLSHYWYKNKYEGLTDEPFDYACFREPPVMDAKLSPRWLDGRHATRYAWHFDAALVAKFLCRFATEKQGVRHVQDEMTRVEQDERGFVTALHTASGKVLDADLFVDCSGFRGLLINKAMAEPFIDMSDHLLCDSAVATAIPHDDEANGVEPYTSAIAMSSGWSWKIPMLGRFGTGYVYSSKFTGQDEATREFSEMWGLDPENHEFNHVRFRVGRNRRAWVKNVVGIGLSSCFVEPLESTGIYFITAAIYQLAKHFPDRSFNETLINRFNREVESMFDDTRDFIQAHFYFAPRNDSPFWRANKELTLPENIREKIDAYRAGLPINSPVTDESTYYGNFEAEFRNFWTNGSYYCIFAGLGLVPDAPLPALSYKPESVIGAQPLFERVKRQQQDLLDTLPTTYDYLRQLHGTS

SEQ ID NO: 85875 - protein, 509 aa, Erythrobacter sp.
  misc_feature (1)..(509): tr|A0A1F9ZEW9|A0A1F9ZEW9_9SPHN Tryptophan halogenase OS =Erythrobacter sp. RIFCSPHIGHO2_12_FULL_63_10 OX=179797 5 GN=A3J40_11825 PE=4 SV=1
MTSKQADTPDDRAIRSILIVGGGSAGWMTCAALANALPKGCRITLVESEAIGTIGVGEATIPPIRTFNAMLGIDEREFLRETQGSFKLGIEFVGWGSQGSRYFHPFGPHGRPFDIRDVHQLWLQARSEGDQSEFDDLAMAWHLARAGRFAIPAADRRNVLSTFDYAYHFDASRYARYLRSYSEKRGATRIEGKVADVAVDGETGFVTHVTMENGEQLAADLFIDCSGFRGLLIEGTMKAGYEDWTHWLPCDRAVAIPCTHGAEFVPHTRSTAREAGWQWRIPLQHRVGNGYVYCSKFIDDDAALETLLGNLEGEPLAEPNQLRFVTGMRRKFWDRNVVAIGLSSGFMEPLESTSLHLIQAGISKLLALFPDRTFDAMVIDEYNHIARTEFERIRDFIILHYKLTRRDDSELWRYCSAMDIPDTLAFKIEHFRRYGRHIAREMDLFGPPSWHAVHIGQGNLPEAFDPIAGYREQGPQEWLGKLRAAMAAEAAKQPLHREFIERHCRAPAP

SEQ ID NO: 85876 - protein, 500 aa, Alteromonas sp.
  misc_feature (1)..(500): tr|A0A4P6B475|A0A4P6B475_9ALTE Tryptophan 7-halogenase OS=Alteromonas sp. KUL49 OX=2480798 GN=EYS00_06665 PE=4 SV=1
MRAVNKVVILGGGSAGWMTAAALATVLKNQYAEIVLIESQSIGTVSVGEATIPQIALFNSILGIDENEFVRETQATFKLGIEFANWKQKGHAYMHPFGSFGTDMDAIQFHHYWLKMFQQGQAHDLDAYSLAAVAAKQGKFMRPENRGNSPLSKIAYAFHFDATLYAKYLRKLAEGRGVKRIEAKMEDVCLRDTDGFIDSLVLDNGQTISGDLFIDCSGFNGLLIDKTLNAGFEDWSQWLPCDSAVAMPCLAKNSVYPYTVSTAQDAGWTWRIPLQHRIGNGYVFPSQFVDTQKAVDVLTQQMENEPLNEPNILRWKTGMRKEFWVKNCVAIGLSAGFIEPLESTGLHLIQAGIAKLLGMFPHQGFEQIDIDTYNQQTAVEMERIRDFIILHYKATDREDTEFWRYCKHMTIPEYLQQKIDLYKANGRIYRQDVELFNETSWLAVMHGQGIMPKGYHPLVDTLPEAEIHSRLEHIKQVIDNSANVMPSQAAFIDKYCKASG

SEQ ID NO: 85877 - protein, 520 aa, Alteromonas sp.
  misc_feature (1)..(520): tr|A0A4P6ARN9|A0A4P6ARN9_9ALTE Tryptophan 7-halogenase OS=Alteromonas sp. KUL49 OX=2480798 GN=EYS00_00340 PE=4 SV=1
MSQQSIKNVVIVGGGTAGWLSAGVLAAKLGQQSLQKTSAINVTLVESPEVSTIGVGEGSWPSLRDTLLDIGIKESEFITQCHASYKQGSTFSRWKYDDKPHQYQHPFTTPSGYVEMDIHAQWQNLCAEESFEQSFCIQPEMCDLGKAPKQVKTPDYAYVLNYGYHFDATALAHLLTSHCVSNLGVNHIKAHISSVNSAADGNIASLTTNEGDVIEGDLFIDCSGGKALLIGEHFGVNWRSMSGVLMNNRAMAVQVPYEDSDNDISSTTIATGKPFGWTWDIGLQHRRGVGMVYNDQFASSDQVQSTLLAHVGERASQATIDQCTIRSLSFDPGYREQFWVKNCLSLGMSSGFIEPLEASAIAMIELGLRMLYEQFPKDMFHMERLSKRYNDRFTYRWERVIDFLKLHYILSERSDPYWLAQRDPMSIPDSLKEMMEMWKYQPPSRFDFIQNEEIFPSASYQYVLYGMGYHTQVNHLLSTTPEAKKAMAIRKQLEQQRPQFMAGLPTNRQLLEQLVAMHSK

SEQ ID NO: 85878 - protein, 496 aa, Sphingomonas sp.
  misc_feature (1)..(496): tr|A0A0Q6AK39|A0A0Q6AK39_9SPHN Tryptophan halogenase OS =Sphingomonas sp. Leaf407 OX=1736369 GN=ASG37_05325 PE= 4 SV=1
MQAPLIRRIVIVGGGTAGWMTAAALSAKLGNGVATTLIESEAIGTVGVGEATVPHIRHFNAALGIDEADFLSRTNATFKLGIEFRDWGRIGDSYIHPFGAYGAPIGGVDFHQHWVRLHKAGRAAPFEAFSLPIRAARADRFAHPDPDPHSLLSTYSYAYQFDAGLYGRYLRAFAEARGVVRQEGRVVDVALRNDGFVESVRLDDGRTIAGDLFVDCSGFRGLLIEQALHAGYDEWSHWLPCDRAIAMPCATTGTISPYTRATALSAGWAWRIPLQHRVGNGHVYSSGFLDDEAALTALLAGLDGPPIAEPNRLRFTTGRRRRQWIGNTVAIGLSAGFLEPLESTSIHLIQLAIGRLLDLLPQGDWDPRDAAEFDRLMAREYDRVRDFLILHYHATERDDSPFWNHCRTMDVPDSLATQLALFRERGVVAPYADGMFLEPSWLAVYLGQRVVPHRVDPRVLTTGEGEAAALLAAMAARYGAAAEGLPGHAATLGLAA

SEQ ID NO: 85879 - protein, 505 aa, Xanthomonas axonopodis
  misc_feature (1)..(505): tr|Q8PIA3|Q8PIA3_XANAC Tryptophan halogenase OS=Xanthom onas axonopodis pv. citri (strain 306) OX=190486 GN=prn A PE=4 SV=1
MTQAQIRRVVIAGGGTAGWIAACALSHQFRNLLDITLVESEQIGTVGVGESTVPPIRTFHRFLQIDEQEFLRAVAGTFKLSISFEHWRRHGERYIHPFGITGQSTLVCAFHHLWLESQRRGMPGSFGDYCLETVASRVDRFALHGEPAVNYAYHLDAALYAKFLRARSEACGVKRVEGRIQQVTVQPHSGDVASLVLEDGQTIEGDLFIDCSGFRGLLIEQTLHTGYEDWSHWLPCDRAVAVQTEALGPPVPYTRAIAHEAGWRWHIPLQHRVGNGLVFSSKHLSDDQAHAKLLRDVAAPAVREPWMVPFRTGRRLKAWNKNVVSLGLASGFIEPLESTSIHLTISAVVRLLALFPAEGIAPSQVQLFNDVSRAEMEHVRDFVTLHYHATQRDEPLWQQCRQMELPESLALRLRAWRERAHAWQGADELFRVDSWTHVLMGQGIAPEQHHPLTRAFSDHDLRRLLDGIAQPIQHAVQQMPSQQDFIERYCKAGEQVWGMRSPVPA

SEQ ID NO: 85880 - protein, 500 aa, Erythrobacter sp.
  misc_feature (1)..(500): tr|A0A1F9ZG11|A0A1F9ZG11_9SPHN Tryptophan halogenase OS =Erythrobacter sp. RIFCSPHIGHO2_12_FULL_63_10 OX=179797 5 GN=A3J40_07855 PE=4 SV=1
MNRDGIDRLVIVGGGTAGWIAAAAFVRLLGHQTRIELVESDAIGTVGVGEATIPQIIRLNTVLGLDENDFLRFCKGTFKLGIEFVDWSGPGSRYLHTFGDAGINLGSVHFHHYWRRHAMRGGKERLWDYSLHQMAVDEGRFGKLDRVGNTQMTGLAYAYHFDASLYARYLRNYCEQWGVTRTEGMVQNVVRDGESGDIRSIELDNGKSVAGDFFIDCTGFRALLLGQELGVDYLDWSRWLPCDRALAVPSERMEKIPPFTRATARQAGWQWRIPLQHRTGNGHVYSSGFMSDDEAARLLLGNLDTKALDDPRPIRFTTGRRSSFWSHNCVAIGLSSGFLEPLESTSIHLIQSNVSRLIEMFPRAQIGDAERDEYNRRTIHEFEQVRDFLILHYYLNAREDGEFWRYCRNMALPDPIRDKIALFAASGRIGRDVDDLFRDASWAQVMLGQGILPADYNPMADQMNDAQLAQFMGDLKKLIGKAVAGLPSHDDYIARNCAAG

SEQ ID NO: 85881 - protein, 505 aa, Xanthomonas manihotis
  misc_feature (1)..(505): tr|A0A0W7XDX6|A0A0W7XDX6_XANMN Tryptophan halogenase OS =Xanthomonas manihotis OX=43353 GN=AO826_15480 PE=4 SV= 1
MTQAQIRKVVIAGGGTAGWIAACALSHQFRNLLDITLVESEQIGTVGVGESTVPPIRTFHRFLQIDEQEFLRAVAGTFKLSISFEHWRRQGERYIHPFGITGQSTLVCAFHHLWLESQRRGMPGSFGDYCLETVASRVDRFALHGEPAVNYAYHLDAALYAKFLRARSEACGVTRIEGRIQQVTVQLHSGDVASLVLEDGQVIEGDLFIDCSGFRGLLIEQTLHTGYEDWSHWLPCDRAVAVQTQALGPPVPYTRAIAHEAGWRWHIPLQHRVGNGLVFSSKHLSDDEAHAKLLRDVAAPAVKDPWMVPFRTGRRLKAWNKNVVSLGLASGFIEPLESTSIHLTISAVVRLLALFPAEGIAPSQVQLFNDVSRAEMEHVRDFVTLHYHATQRDEPLWQQCRQMELPESLALRLRAWRERAHAWQGADELFRIDSWTHVLMGQGIAPEQHHPLTRAFSDHDLRRLLDGIAQPIQHAMRQMPSQQDFIERYCKAGEQVWGMRSPVPA

SEQ ID NO: 85882 - protein, 505 aa, Erythrobacter lutimaris
  misc_feature (1)..(505): tr|A0A395LKW6|A0A395LKW6_9SPHN Tryptophan 7-halogenase OS=Erythrobacter lutimaris OX=1538146 GN=DL238_06660 PE =4 SV=1
MEQRKPTRVVVLGGGTAGWMSAAGIARLLGDRVEVQLVESDDIGIIGVGEATLPHIRGFVERLGIDEAAFMRATHATYKLGIDFRDFGRIGESYIHPFGSFGEELAGVGFHHYWLELQRHGMAQPLGDYSLCVAAALANRFEPPAQDMSLRSTYGYAYQFDATLFGPFMRDFGLSIGVTRQEGLVTGVDRNAASGDVTALLLEDGRRIEGDLFVDCSGFRSLLLGQELGEEWEDWTHWLPCDRAAAMPCAHASEDLRPYTTATAMPAGWRWQIPLQHRLGNGYVFSSAFIEEEAACEAIRNAAEGDPLADPRVLRFRPGRRKRSWSHNVVAVGLASGFLEPLESTSIYLAQMAITYLIELFPQDGRIADADRAEFNRLVDMEYDRVRDFLILHYHATTRDDSEFWNHVRTMTVPDSLAEKMELWRKAGRIERYSDGLFYDASWIAVYVGQGWLPERHDPRPGMIDPHKLKVAADRLQQEIGDEVSRMPGHRDYLRGEAARLAEPA

SEQ ID NO: 85883 - protein, 503 aa, Alteromonas sp.
  misc_feature (1)..(503): tr|A0A4Q8UJ14|A0A4Q8UJ14_9ALTE Tryptophan 7-halogenase OS=Alteromonas sp. KUL49 OX=2480798 GN=EYS00_06655 PE=4 SV=1
MTAAALSKLLNPNLFTVTLVESDAIGTVGVGEATLPHLRFFNQRLGIDEGEFIRATNATIKAGIEFSNWGNIGDAYIHPFGDYGEPLNNVGFHHYFYQAQKRNTALSLDDYSLPVMACKQGKFAFPTSEPNLLTSTYSYAYHIDAGLYAKYLRGFSEKLGVVRVEGKVESVAMRKSDDSIASLKLDNGDIINGDFFVDCSGFRGRLIEQCLHAGYEDWSHWLPCDRAIAVQSEHNGKPLPYTKAIAQEAGWQWQIPLKHRMGNGYVYSSQYISDDTALQTLLDNLPGKPTSEPNRLRFTTGKRKSSWVKNCVAIGLSSGFLEPLESTSIYLIQAAIMKLVELLPQRENLDAKRSEYNRYFSNEMDKIRDFLILHYHATKREDTPFWSFCNHLNIPQSLAEKMQLYKEIGVIEDYKYGLFLTPSWLAVYHGQGVTPSQGDVRVNQATLAHAEKYMNLLKPNIQRCVNKMPTHEHIVAMLHETEHNNPTASQLNRPANFSLYGRS

SEQ ID NO: 85884 - protein, 510 aa, Alteromonas sp.
  misc_feature (1)..(510): tr|A0A4Q8UCP5|A0A4Q8UCP5_9ALTE Tryptophan 7-halogenase OS=Alteromonas sp. KUL49 OX=2480798 GN=EYS00_11915 PE=4 SV=1
MNQTSQNSSKQKIVIVGGGTAGWLSAAIIAAKHKVADGECGLDITLVESSDIPTVGVGEGTWPTMRNTLKDIGLSEKEVFKRCSAAFKQGGKFVNWVAGNNDYYYHPFTVPLGYGRVEMAPYVDNIAEFANATNFQQHVCEHNMAPRTLSEEEYSSAQSNYAYHLDAGAFADQLREFSKSTLGVKHTVATVLSVQSNGTNNIESITLDNGECLSADLFIDCSGFKSLLLGETLQEPLVSTDDVLFNNSALALHVPYEGDYEIKPYTQATAQEAGWIWDIGLASRRGVGHVYSTNFISDDKAETLLRNYVGDQAGELSARVIRFNSGYRKNIWKGNVVGIGLAAGFVEPLEATALMLIEISARFVAEQMPLPNAAMPIVSQRFNKQMQYRWQRIIDFLKLHYIFNQRSEDYWVANRNPATIPDSLKEDLEIWKYRGPQIADFSAAIELFPAASYQYVLYGMGFSPDFSLQSHFYNERDLATKVIQQNQLITQQKLSSLPNHRDYIAQWLAS

SEQ ID NO: 85885 - protein, 500 aa, Sphingomonas fennica
  misc_feature (1)..(500): tr|A0A2T4I482|A0A2T4I482_9SPHN Tryptophan halogenase OS =Sphingomonas fennica OX=114404 GN=CV103_08020 PE=4 SV= 1
MSAHPIETVVIVGSDTTLWLAAAVLRNALRPAGLAVEAVELPATLRPADVHATLPPLEALHAQLRIDEKALLRSTGGAFSLGQNFTDTSGAAPAFLHAYGSCGAPIEDREFFAYWLKARRHGLAVPLDDFSLTASAARHGRLMIPDDETDRYGRADYGYHLPALAYARSLKMLAIRDGVRAHETSALGIALDPDRGTIKAVELEGGRRIEGQLFIDATADARLIGRALGVRVESWRDHFPVDRVLAATGPRFASIPIYAEVRVSEGGWTALHPTQAATHVVHAYASASASDEEAAVAAARAAGMPIADIAIRSPEPGRRESAWAGNCVAIGAAACTFDPVHGVDLHAAQLGLVHLLSFFPAGTDHAAERAEYNRIMRSSLCRLRDFQSAHYALNRYGDAPFWTAAREAALPAELAQDIATFRARGLVAPREDESFSPDSWRALFVGHGTVPESYIPAVDTVAADAVKEHFRRMLGFVRDQVMRQPTHDQYLDGIGGASRG

SEQ ID NO: 85886 - protein, 510 aa, Alteromonas sp.
  misc_feature (1)..(510): tr|A0A4P6AS70|A0A4P6AS70_9ALTE Tryptophan 7-halogenase OS=Alteromonas sp. KUL49 OX=2480798 GN=EYS00_01330 PE=4 SV=1
MEVCIVGGGTAGWMAASAMAKKFENQSINVTLVESEDIGTVGVGEATLPHIRFFNQALGIDEREFMKETRATFKLGIEFVDWGKIGQSYIHPFGDFGQSINNIDFYQAWLSQPSSRSNSDLSDYAFGTVAATQGKFQFPHSGQTRAQRSFGYAYQFDSGLYAKFLRRFAENLRVTRIEGKVVDTTIEPNSGNVTSLTLSNNRVVKADLFIDCSGFRGLLIEQALQTGYQDWSSWLPCNRAVAVPCERQDSIPPYTRATAQEAGWIWRIPLQHRTGNGHVYWSEFTSDQDALDTLIMQLDGKPTAEPKQLYFKTGRRNAFWKNNVIAIGLSAGFLEPLESTSIHLIQEGITELLALFPHENYAHIDGARVLQINELDSDEYNQRMALQFERIRDFLLLHYVANDRNDSEMWRYFNSMSLPGSLVEKLHLWKKRAYVQRYEHGTFLPPSWVAVLLGQNISPENCDPRCASISSDEFHRHAATIKKDIKNAVDAALPHEAFLRKFGAYYGEPV

SEQ ID NO: 85887 - protein, 533 aa, Xanthomonas manihotis
  misc_feature (1)..(533): tr|A0A0W7Y2N5|A0A0W7Y2N5_XANMN Tryptophan halogenase OS =Xanthomonas manihotis OX=43353 GN=AO826_00810 PE=4 SV= 1
MGMWPVERGQLAPFAYPSAVLAQECIGMIPAPLRNIVIVGGGTAGWMAAAAFARVLGPTFKVQLIESEQLGTVGVGEATVPHIKAFNNLLGIDEAEFVRQTQGSFKLGIEFVDWQRPGSTYMHGFGTQIGHPLGLLPFHQYWIKQHARGKAQPLGAYTLNTVAAARGKFMTSAGDVPANSPLANIAYAYHFDATQYAHFLRRYSQQRGVTRIEGLVEQVQLHPESGHVQSLQLASGQTVHGDLFIDCSGFGGLLIEQALHTGYHDFTHWLPCDRALAVPCEKVGPPTPYTRSTARAAGWQWRIPLQHRTGNGYVYCSAHISDDEAAATLLANLDGKPLADPRPLRFTTGRRKQCWNRNVVALGLASGFLEPLESTSIHLIQSGISKLLELFPREGISPVLVQRYNDRLAFEFDRIRDFLLLHYHATERDDSAFWRHCRQMPITPELQATLDLFRDSGRFYRNAEEMFAEISWVQVLVGQGILPQGYHPLVDQVPDRDAEGFLASVAQTISHCVDVMPGHQHFIDRYCKAAAVP

SEQ ID NO: 85888 - protein, 510 aa, Sphingomonas fennica
  misc_feature (1)..(510): tr|A0A2T4I449|A0A2T4I449_9SPHN Tryptophan halogenase OS =Sphingomonas fennica OX=114404 GN=CV103_08015 PE=4 SV= 1
MRIVIVGGGSAGWMCAAGLARLLPATDYDITLIESDEIGTVGVGEATLPHIKTFNDMLGIDEAEFLRETQGTFKLGIEFVGWDRAGDRYIHPFGAFGEPWVGVDFQHHWVRAAQAGFDPGPIQDYSFAVAAARADAFEFPDGDRNSIRSTYAYAYHFDAGLYAAFLRRWATARGVRRIEGQVIDVGHNAISGHVETLRLKSGATLAGDIFVDCSGFRSLLLGGVMGVAWQDWSEWLPCDRALAVPCRRTTALTPYTRATAQRAGWTWRIPLQHRVGNGYVFSSRYCDEVQARETLLAAIEGEPLAEPRLLRFAAGRRALAWERNCIGIGLASGFLEPLESTSIFLIQAAVIDLASLMPTPGFGNRMDPRLIAEFNRLFEIQYDRVRDFLVLHYAANSREGEPLWDHVRAMRLPDSLTHKIELFEASAAAPDYAYGLFSRDSWLSVLFGQGLRPRAYNRLADHLPLEELERRMRDLRSRIAANAGLMTAQEDFIAGYCPASPPAPPMESAA

SEQ ID NO: 85889 - protein, 497 aa, Salinimonas sp.
  misc_feature (1)..(497): tr|A0A5B7YAZ9|A0A5B7YAZ9_9ALTE Tryptophan 7-halogenase OS=Salinimonas sp. KX18D6 OX=2572577 GN=FBQ74_03905 PE= 4 SV=1
MQQSVRKLVIAGGGTAGWMAAALLKKVLQAQVDIELIESKDIGTIGVGEATIPPIQTFNQFLGLDEKAFLRETNGTIKLAIAFENWRKQGESYFHTFGAPGATLGFCGFQHYWLRAKKAGLEASLWDFDLNYLSCKAGKFNKIQTENPVYSMGYAYHFDSTLYGQFLRRLAEQAGVKRTEGTIEHVALDNESGFVKALQLTDGRQIDGDFFIDCTGMRALLLQKALGVEYEDWSHWLAADSALAVPSKPHTQTAPYTRSIAREVGWQWRIPLTHRNGNGLVYSSAYMDDEKATNMLMGNLDTDALDEPRKIRFKTGRAQKQWHKNVVGIGLSSGFLEPLESTSIHLIQSGIVRLLKMFPNGAVNPSMEALYNTESKDEFETIRDFIILHYYLNERDDSDFWQDMQRLSLPVRLEQKINAFRDTATIFNEQNDIFRDASWVQVMMGQGIMPNDYHPSADVHSDQAILDIMSKIYEAKQQPLAQMLSHDDFLARFTQIQ

SEQ ID NO: 85890 - protein, 505 aa, Sphingomonas sp.
  misc_feature (1)..(505): tr|A0A0Q6AXI3|A0A0Q6AXI3_9SPHN Tryptophan halogenase OS =Sphingomonas sp. Leaf407 OX=1736369 GN=ASG37_05260 PE= 4 SV=1
MTIGQQAIATVAIVGGGSAGWMTAAALARFLPPGVAVTLIESDAIGTVGVGEATIPQLRLFNQNIGIDEDDFVARTGGSFKLGIEFAGWNGEGSRYLHAFGTIGRALGLVPFHHYWLAAGGAGDPASLWRHSACAAAARADRFGRDPGSAQAPSGLAWAYHFDAARYAAYLRALAERGGVTRVEGRVVDVALSGGDTIAAVMLADGRRIAADFFIDCSGFAALLIGRMPGSAWDDWSSLLPCDRALAVPCAATAPITPYTRATARAAGWQWRIPLQGRTGNGLVYASDYLSDDAALATLLGNLDGAASGDPRPLRFTTGRRRSPWIGNCVALGLAAGFLEPLESTSIHLVQSGIARLLALWPSAPARAADIAAFNRQSEREWLAVRDFLIAHYVLNGRDEPFWRDRRATPLPDSLAERIELFRGSGRILRDEHELFAEVAWLQLLIGQGVMPQGHHPLVRSLPTARLPEFLSLSATHVESIVARMATHDEFLRAHCPAPQAKVAA

SEQ ID NO: 85891 - protein, 506 aa, Xanthomonas axonopodis
  misc_feature (1)..(506): tr|Q8PER5|Q8PER5_XANAC Tryptophan halogenase OS=Xanthom onas axonopodis pv. citri (strain 306) OX=190486 GN=prn A PE=4 SV=1
MIPAPLRNIVIVGGGTAGWMAAAAFARVLGPTFKVQLIESEQLGTVGVGEATVPHIKAFNNLLGIDEAEFVRQTQGSFKLGIEFVDWQRPGSTYMHGFGTQIGHPLGLLPFHQYWIKQHARGKAQPLGAYTLNTVAAARGKFMTSAGDVPANSLLANIAYAYHFDATQYAHFLRRYSQQRGVTRIEGLVEQVQLHPESGHVQSLQLASGQVVHGDLFIDCSGFGGLLIEQALHTGYHDFTHWLPCDRALAVPCEQVSPPAPYTRSTARAAGWQWRIPLQHRTGNGYVYCSAHISDDEAAATLLANLDGKPLADPRPLRFTTGRRKQCWNRNVVALGLASGFLEPLESTSIHLIQSGISKLLELFPREGISPVLVQRYNDRLAFEFDRIRDFLLLHYHATERDDSAFWRHCRHMPITPELQATLDLFRDSGRFYRNAEEMFAEISWVQVLVGQGILPQGYHPLVDQVPDRDAEGFLASVAQTISHCVDVMPSHQQFIDRYCKAATLP

SEQ ID NO: 85892 - protein, 509 aa, Alteromonas sp.
  misc_feature (1)..(509): tr|A0A4Q8UEY8|A0A4Q8UEY8_9ALTE Tryptophan 7-halogenase OS=Alteromonas sp. KUL49 OX=2480798 GN=EYS00_08205 PE=4 SV=1
MQSTLENIVIVGGGTAGWLTAGILAASFKRNNQTKLPTITLVESPNIPIAGVGEGTWPSMRRTLKHLGIRESDFITQCDATFKQGAKFSGWVTGSPEDSYYHPLVLPHRYDLENLATHFVNSAPEQDFASLLCAQGAICDLNLSPKNMSHKDYQGHLNYAYHLDATKFSQFLQSHCSKELGVQHVVANVQLVESAPDGDIAALLIDDGKRISGDLFIDCSGFKGLLINEHFNVPYKSCKDILFSDRAAAIHLPYPQNDTIAPYTISTATDAGWIWDIGLPSRRGTGHVYSSEFMSDDEAVNVLSHYANQTISADDVRLFNIEPGYRERFWHKNCVAIGLSAGFLEPLEASSLVLVEMSAHFIAEQFPNHKNIVPIVANRFNNTFSYRWSQIIDFLKLHYVLSERTSPFWQRHRDKSTWTDSLKEQLELWKYNVPWHGDFDHAREVFPSASYQYVLYGMRPRYTRPSANQPHGALEQIKRAEANVKQQISQFSQQLYDQRTLLHHLVNAH

SEQ ID NO: 85893 - protein, 488 aa, Alteromonas sp.
  misc_feature (1)..(488): tr|A0A4P6ATM6|A0A4P6ATM6_9ALTE Tryptophan 7-halogenase OS=Alteromonas sp. KUL49 OX=2480798 GN=EYS00_17605 PE=4 SV=1
MKKAVNNVVILGGGTAGWMAAAVLSKALSKINITLVESEQIGTIGVGEATIPSIHFFNDLLGINSSEFIKHTSGTFKLGIQFENWHKKDGAYFHAFGSTGLGMWAAGFHEYWQRGVELGISKPFETYNIEAVAAKRNKFAHQKGGLNFAYHLDASLYANMLKGVATKHGVTRVEGLVEQVTTDADSGYITGLTLKSGREISGDLFIDCSGFKGLLINETLKTEFVDWSHWLPMDRAIAVQTELTGNPVPYTRSIAHHAGWQWRIPLQHRMGNGIVYSSQYMSDDEAENMLLSTIKGKPITTPRPIKFVTGHRKKLWNKNCVAIGLAGGFIEPLESTAIHIIQQGIMQLLKYFPSYGINALETAQYNDYMISDYNEIKDFIILHYCQTQREDSPFWEFCKNMQIPESLKDRMTLFEQTGRFVQRKDEIFVDSWLQVMIGQGLIPKQHHPLADEMSEQELRQFLSQIENDHIQRVETIPTHTNYLSRITS

SEQ ID NO: 85894 - protein, 522 aa, Streptomyces glaucescens
  misc_feature (1)..(522): tr|A0A089WZR2|A0A089WZR2_STRGA Putative tryptophan halo genase OS=Streptomyces glaucescens OX=1907 GN=SGLAU_045 05 PE=4 SV=1
MAKSVVIVGGGTAGWMTASYLKAAFGERLSVTLVESKNVPTIGVGEASFSTIRHFFSYLGLQETDWMPDCHATYKLAIRYDNWRAEGHHFYHPFERPRVVEGVSLADWWLHKRPSEDYDRDCSVIAALCDAKRSPRRLGGALLAPELGAQDPVSMSRSTMDEQKTQFPYAYQFDATLLAKLLTGYGTDRGVRHVLDDVVDIAVDERGHISHVRTKESGDLAGDLFIDCTGFRGMLLNKALGVPFISYQDTLPNDSAVALRVPMEMADQGMGPYTRASAQAAGWIWTIPLHGRVGTGYVYASDYCTPEEAERTLRAYWGPAADDLTANHIKMRIGRSENSWVNNCVAIGLSSGFVEPLESTGIFFIQNAIEQLVKHFPGGPNDEQLRKSYNRQVANVMDGVREFLVLHYVAAKRNDNDYWRDAKTRRMPDALGARIEQWQAKLPDPDTIFPYYHGFEPYSYTAMILGLGGLDVRPLPGLAMMDDVAAEKELRLVRDQAKSLVETLPSHWDYIAHLNDRAGARA

SEQ ID NO: 85895 - protein, 587 aa, Haliangium ochraceum
  misc_feature (1)..(587): tr|D0LZL4|D0LZL4_HALO1 Tryptophan halogenase OS=Haliang ium ochraceum (strain DSM 14365 / JCM 11303 / SMP-2) OX =502025 GN=Hoch_5510 PE=4 SV=1
MRIPSDCDVAVLGAGPAGSSFAALVKKYAPGLRVVVLERARFPRWRIGESTIPVANAVLRDLGVYERLAASDAVKKIGITFVWGKDRQPWNADYLQLAREGAGEDPGAVLDVVGQDFAGLRREQQSEPFTAFNIRRDRFDALLLEQARGFGAEAFEGVRATSVRREGDEMRVAWSDDDGASGTLNAGFVLDATGLGALMTRGRRERDPHMNNFAVYGYFAGAGWKVTYSGERSHTTVFIASIPHGWIWYFPIAEDVMSVGVVTHRDHFRDRLAGIELETFYREQLAACPEIAPLLADARLRDDVLPGGARVGASQDWSSWAEQPVGPGWAAAGDAAVFVDPILSSGVTLALQSGHRAAYTLLTARAHPEFDRDALWRAYADYLRGEAGAFLKLARFFYGNNRAAESWWWEAQRLVNASGQLDIDPARAFTMATAGFFPLPRALSLEIVGPLITGAAGSDADLRYVHENSGVPAPEQLAEQSYEVLTRFRLALRTEPARSAPPGQLRVFHDLVSDDPAFSHRLAAAPTEISPQLAPVVDALQEERSVRALMDRAPSLVPPHLAQPADARRLAAHIVRVAAIKGFVQLS

SEQ ID NO: 85896 - protein, 521 aa, Caulobacter sp.
  misc_feature (1)..(521): tr|J2HQ63|J2HQ63_9CAUL Tryptophan halogenase OS=Cauloba cter sp. AP07 OX=1144304 GN=PMI01_00373 PE=4 SV=1
MSKRILIVGGGTAGWLTAGYLARTFGAQSPGGVEITLVESAEIGILGVGEGTFPTIRKTLRRIGIDEATLVREASATFKQGARFAHWRFEPGRGQPDHYLHSFQASHDPSGLDLLPYWLLGAAGDQEWSQVNTPQKVTADAGRAPKLISHPDYVAPLNYAYHFDAAKLAVVLRKAATGLGVRHVVDTVDEVLLAEDGAIAAVRGRASGLMTADLYVDCTGFRAQLIGQTLKSPYKSCRPVLFCDSALAMQVPYDRPDAPIASYTISTAQEAGWTWDIGLDSRRGVGHVFSSDHTDLDAAERVLRGYVGKAGDGLDIRHIKFEAGYREINWVKNCVAIGLSSGFFEPLEATGIVFAEVAAVMLATLFPWGGEMETAARQYNELMRRRYERTLDFIKLHYCLSERRDTAFWRDNVAASTIPDSLHDLLDRWRFRPPDAIDIDPNVDIFTEASWQYVLYGMGYRSDLTPKAGVYRYFNEARAAFADIRKQADYACQNLPTHRDLVELAQRRGFGGDKAEGGDAR

SEQ ID NO: 85897 - protein, 508 aa, Caulobacter sp.
  misc_feature (1)..(508): tr|J3AGG5|J3AGG5_9CAUL 2-polyprenyl-6-methoxyphenol hyd roxylase-like oxidoreductase OS=Caulobacter sp. AP07 OX =1144304 GN=PMI01_02807 PE=4 SV=1
MQDNRIRDIVIVGGGTAGWMAAASLKRHFGSAPISITLVESSEIGTIGVGEATIPTIRRFYQALGLSDIDVLRATGGTCKLGIRFNDWLKPGSSFVHPFGLYGQDLNGVAFHHYWMRLRALGEQVPVGDYSLGASLAAAGKFTTPSRNPPSSLSIFDWALHFDASLFAKLMRQVAEQGGVRRIDARITKVNLRGEDGFIESIDLDTGATVTGDLFIDCSGFRGLLIEEALHTGYEDWSHWLLCDRALAVQSEGKGDPPPYTDVTARPAGWQWRIPLQHRYGNGYVYSSRHATDDEARAVLVGSLDERLLHEPRKITFNPGRRLKAWNKNCIALGLASGFLEPLESTSIALIETGIEKIKLLFPSRDFDPCVVDEFNEMSRLEFERVRDFIILHYKANRRTDDPTGFWTHCREMSIPDTLQKKIDLWKAQGHFIRYRWEMFSQPSWLAIYAGFDMLPETYDLSVDGLDAGQLSGALAEMRRAVAEVVAATPPHGDFIERYARPQPVAAE

SEQ ID NO: 85898 - protein, 503 aa, Erythrobacter sp.
  misc_feature (1)..(503): tr|A0A1F9ZC65|A0A1F9ZC65_9SPHN Tryptophan halogenase OS =Erythrobacter sp. RIFCSPHIGHO2_12_FULL_63_10 OX=179797 5 GN=A3J40_00120 PE=4 SV=1
MSDRIKSILVVGGGSSGWMAAALFAHLFQGLYRIRLVESEDIGTIGVGEATIPAIKKYNELLELDEAQFMRLTQSSFKLGIQFNNWDRIGSSYMHGFGVIGQDMGWLRCHQYWLKMHQQGEASDFANFSINTVAALKNRFMPARADMGDSPIAHIAHAYHFDAGLYARFLRNYAEERGVVRTEGKIVDVALRPDDGFIEAVTLESGERIEADFFIDCSGLRGLLIEQAMKTGYDDWTHWLPCDRALAVPCSRSDNFTPYTKATAHGAGWQWRIPLQHRTGNGHVYSSQYIDDEEAERILLANLDGEQLAAPFHVRFTTGKRRKVWNRNCVAVGLASGFLEPLESTSLYLIQSSLIRLIRLFPDGRLDQANIDEFNRQTDFEYERVRDFIILHYKATKRDDTPFWRYCRDMEVPATLQRKIDLFRANGRIFREDEELFSEESWIQVMLGQGIVPQGYDPLVDVKSEPQIVQYLGNIENVIGKCVAVMPSHADFVEKYCRAESAP

SEQ ID NO: 85899 - protein, 532 aa, Serratia plymuthica
  misc_feature (1)..(532): tr|A0A447QCH7|A0A447QCH7_SERPL Geranylgeranyl reductase family OS=Serratia plymuthica OX=82996 GN=NCTC8900_044 54 PE=4 SV=1
MSKPIKNIVIVGGGTAGWMSASYLVRALQQQANITLIESAAIPRIGVGEATIPSLQKVFFDFLGIPEQEWMPQVNGAFKAGIKFVNWRKSPDHSRNDYFYHLFGNVPSCDGVPLTHYWLRKREQGFQQSMAYACYPQPGALDGNLAPCLHDGTRQMSHAWHFDAHLVADFLKRWAVDRGVNRVVDEVVEVNLNEHGFISSLFTKEGRKLEADLFIDCSGMRGLLINQALKEPFVDMSDYLLCDSAVATAVPNDDAQVGVEPYTSSIAMNSGWTWKIPMLGRFGSGYVFSSKFTSRDQATTDFLKLWGLSDNQPLNQIKFRVGRNKRSWVNNCVSIGLASCFLEPLESTGIYFIYAALYQLVKHFPDTSFDPRLADAFNAEITYMFDDCRDFVQAHYFTTSREDTPFWLANRHDLRLSDSIKEKVERYKAGLPLTTTSFDDSTYYETFDFEFKNFWLNGNYYCIFAGLGMLPDRSLPLLQLRPESIEKAEAMFARIQREAERLRASLPTNYDYLRSLREGGGGMSRPASPESL

SEQ ID NO: 85900 - protein, 505 aa, Sphingomonas sp.
  misc_feature (1)..(505): tr|A0A0Q6AWX9|A0A0Q6AWX9_9SPHN Tryptophan halogenase OS =Sphingomonas sp. Leaf407 OX=1736369 GN=ASG37_03630 PE= 4 SV=1
MSGRIRRVVVVGGGTAGWLAACRIAAAADPSAQQPLSVTLIESPDIATIGVGEGTWPTMRGTLARIGIDEATFLRATDASFKQGSRFDGWRTGAADDRYYHPFTAPADLPAADLLRDWRRGTFADHVCAQPDVCADDLAPRQPAMPPYAGALNYAYHLDATKFAALLRETAVGRLNVTHIRDHVTGVEPAANGDIAAVVARDTGRITGDLFLDCTGQAALLIGGHCRIGTIDRTATLFNDRAIAVQVPVAPDSPVASQTNATAHDAGWIWDIGLPARRGIGCVYASDFLDDDAAAATLTAYLARTAPHVDPAGLSFRQLRFRSAHRERFWVGNCLAIGLSAGFLEPLEASAIVLIELSLDALLDGFPADRAAMDLHARRFDALFRYRWDRIVDFLKLHYVPSRRDTPYWRAHRDPASIPPSLCDLLALWRTQPPSPADFAQAGEIFPAASYQYVLYGMGVTPPPIGPLRPRPDTASVLHQMRQRARTLTASLPTNRAYLNGIAHV

SEQ ID NO: 85901 - protein, 530 aa, Caulobacter sp.
  misc_feature (1)..(530): tr|J3AJK1|J3AJK1_9CAUL Tryptophan halogenase OS=Cauloba cter sp. AP07 OX=1144304 GN=PMI01_02461 PE=4 SV=1
MTQPINDILIVGGGTAGWMTAAYLARRLGSMRPDGVRITLIESSEIGIIGVGEGTFPTIQNTMRTIGVDEARFMREAGAAFKQGIRFVDWKTAPRDGVHGHYYHPFAQPRLLNGGLDLAPYWLMGEAGNVPFSDAVTLQDKVCDAMRGPKRVDDPQYGGPMAYAYHFDAGKLAGLLRDVGKATGVKHLLGNVLSVNRTDDGSIASVTTREHGDLTADLYVDCTGFAGALIGDAMGSSWIDKSDVLFVDRALALQVPYDRPDAPVATTTISTAHEAGWTWDIGLPERRGTGYVYSSRHTTDDRAEQILRGYVGKAGEGLTPRLLKLKVGHRDRHWVKNCVAVGLSGGFLEPLESTGIVLIEAAAYMLARNLPRRGGMEAAARQFNTAMTDRYLRAIDFIKLHYCLSQRTDNSFWTDNADPVSIPETLRDHLAMWRHRPPNVFDFPNLHESFKYFNYQFILYGMGFETQVDPAAHVHGELARADFARVREAGVRAAAGLPDHRALLTQVYAHGFSTKVPDAAMAEAAESLRR

SEQ ID NO: 85902 - protein, 533 aa, Serratia plymuthica
  misc_feature (1)..(533): tr|A0A318NW21|A0A318NW21_SERPL Tryptophan 7-halogenase OS=Serratia plymuthica OX=82996 GN=CT690_14695 PE=4 SV= 1
MSKPIKNIVIVGGGTAGWMSASYLVRALQQQANITLIESAAIPRIGVGEATIPSLQKVFFDFLGIPEQEWMPQVNGAFKAGIKFVNWRKSPDHSRNDYFYHLFGNVPSCDGVPLTHYWLRKREQGFQQSMAYACYPQPGALDGNLAPCLHDGTRQMSHAWHFDAHLVADFLQRWAVDRGVNRVVDEVMDVNLNDHGFISSLITKEGRKLEADLFIDCSGMRGLLINQALKEPFIDMSDYLLCDSAVASAVPNDDAQVGVEPYTSAIAMNSGWTWKIPMLGRFGSGYVFSSKFTSRDQATTDFLNLWGLSDNQPLNQIKFRVGRNKRAWVNNCVSIGLSSCFLEPLESTGIYFIYAALYQLVKHFPDTAFDPRLADAFNAEITYMFDDCRDFVQAHYFTSSREDTPFWLANRHDLRLSDSIKEKVERYKAGLPLTTTSFDDSTYYETFDFEFKNFWLNGNYYCIFAGLGMLPDRSLPLLQLRPESIEKAEAMFARIQREAERLRASLPTNYDYLRSLREGDVGLSRSGPSPEFR

SEQ ID NO: 85903 - protein, 494 aa, Alteromonas sp.
  misc_feature (1)..(494): tr|A0A4P6AM05|A0A4P6AM05_9ALTE Tryptophan 7-halogenase OS=Alteromonas sp. KUL49 OX=2480798 GN=EYS00_01920 PE=4 SV=1
MNTSSQNRKQRLVIAGGGTAGWMAAAAFSRILGKEVDVTLIESSDIGTVGVGEATIPTLVFFHKLLKISEQEFMAATNATFKLGINFENWKSLDHAYLHAFGVTGKDCWAAGFQHFWLRGLKEGIASDFGDYCLERQAAEANKFAHLPNNGLNYAFHIDASKYASFLREHAEKDGLKRIDATIGSVNLNEENGFIESLTLDNGETVHGDFFIDCTGFRGLLIEKALHTGYEDWSHWLPCDSAVAVQTKSVSEPIPYTRCIAHEAGWQWRIPLQHRVGNGMVYCSNYLSDDEVITKLLGNVEGEPLNDPRVIHFRTGRRRKQWNRNCLALGLASGFLEPLESTSIHLIQQGIVRFLRMFPTAGIVEEDVNEFNRQADFDIEHIRDFIILHYHVTQRTDTPFWRHCRQMDVPDSLKHRIDLFQKTGRVFREGSELFDDSWQQVMIGQGLMPTSYHPIVDTMSLQELKGLLNGVTQQIDRTVGKLPPHNDYITRYCS

SEQ ID NO: 85904 - protein, 510 aa, Phenylobacterium deserti
  misc_feature (1)..(510): tr|A0A328AC32|A0A328AC32_9CAUL Tryptophan halogenase OS =Phenylobacterium deserti OX=1914756 GN=DJ018_13505 PE= 4 SV=1
MNPQTSLRRVVIVGGGTAGWMAAAALSRLRRNGQTEITLIESDEIGTVGVGEATIPPIQTFNALIGLDEADFLRRTQGTFKVGIEFRDFTRLGHSYIHPFGEFGADMEAIKFHQFWLKLQKLGRTPGIDAYNLCAMAAALGRFEKPRSDRPPGPLSSLTYAYHFDAGLYARYLRDLSEPRGVVRREGRVVDVSLRGEDGHIESVTLEGGLKVEGDLFIDCSGFRGLLMEQALGTGYEDWTHWLPCDRAVAVPCEGAAAPTPYTRATARIAGWQWRIPLQHRIGNGYVYSSAHISDDEAAATLLANLDGKPLADPRPLRFTTGVRKKAWNRNCVALGLASGFMEPLESTSIHLIQNGVARLLSLFPDGGGVDPVEIEEYNRVSYGQWCAIRDFIILHYHATQRDDSEFWRHCGTMPIPDSLQRKLDLWRGKGRVFRYDDELFGESSWIAVLLGQVGLPQGYDPLADTLPVEEVDYNLQRMRQYVRRVAEAMPTHEAFIRSYCPAQPIAARP

SEQ ID NO: 85905 - protein, 500 aa, Caulobacter sp.
  misc_feature (1)..(500): tr|J3A7Q9|J3A7Q9_9CAUL Tryptophan halogenase OS=Cauloba cter sp. AP07 OX=1144304 GN=PMI01_03647 PE=4 SV=1
MIDRAIKSIAIVGGGTAGWMAASLLAQTLRGTGCAITLIESPDIGIVGVGEATIPPILDFLKLIEADLDAFLQATQATFKLGIKFQDWSRVGESYWHPFGSFGVSIDRRPFHHVWHKARAEGLDMAVADFSLAAALGEAGRFAPPDPRASGPLAGLRHALHFDAALVAKFLRDHAERRGVRRLEREVARAVLRDDGFIDALTLTDGGQVKADFYIDCSGFRGLLIEQALETGYEDWTKWLPCDRAIAAPTAHAGPPAPYTLAAAQDAGWRWKIPLRHRVGNGYVYASQAIDDETALSELLAAIGEPLAEPRKLRFTTGRRKAFWNRNCVALGLASGFLEPLESTSIHLVCSGLYKLLDHFPDRDFAPSNIAAYNQALIAEYETFRDFIVLHYCATARDDTPFWRHRAQAPVPASLAERMELYRACGRINTRPGELFTDLSWFYVLEGMGLRPRAHDPLVDASDFRQVRAILPRLAQQVAAVVAQSPTHQAALDAGRSVAA

SEQ ID NO: 85906 - protein, 514 aa, Streptomyces sp.
  misc_feature (1)..(514): tr|A0A0P4R3X0|A0A0P4R3X0_9ACTN Tryptophan halogenase OS =Streptomyces sp. NBRC 110027 OX=1546107 GN=TPA0598_02_ 01300 PE=4 SV=1
MINSVVIVGGGTAGWMSASYLKAAYGDRINVTLVESDRVATIGVGEATFSTVRHFFDYLGLDEREWMPECSGSYKLGIRFENWREPGQHFYHPFERLRTSDGYTLADWWLQEGDRSEPFDRSCFITPALCEAKRSPRLLDGSLFAGGLDGSLGRSTLEEQRAQFPYAYHFDAALLAKFLTKYGTDRGVRHVVDDVTQVGRDERGWISHVATREHGDLTGDLFIDCTGFKGMLINETLEEPFESFQDVLPNNRAVALRVPQPDQATTGMNPYTTATAMDAGWIWNIPLFGRNGNGYVYSDEFCTPEEAERTLRAHVAPGQDDLEANHIRMRIGRNRRSWVNNCVAIGLSSAFVEPLESTGIFFIQHGIEQLVKNFPDERWDPALADDYNNRVAEVLDGVKEFLVLHYKAAQREDTPYWKEAKTRALPDGLAERLAIGTSHLLDERTIYQPYHGFEQYSWITMMLGLGHEPERPRPSLAHIDPTNARAELARLRADADELVAALPSCYEYIASLNS

SEQ ID NO: 85907 - protein, 503 aa, Sphingomonas sp.
  misc_feature (1)..(503): tr|A0A1I3N6S1|A0A1I3N6S1_9SPHN Tryptophan halogenase OS =Sphingomonas sp. NFR04 OX=1566283 GN=SAMN03159338_0658 PE=4 SV=1
MAVAAPYRIVVAGGGTAGWMAAAALVRFLGPGFTITLVESDAIGTVGVGEATIPQIRMFNASLGIDEDAFVAATQASYKLAIEFVGWTKGGRYMHAFGDVGRDNGLLAFRHTWLRGMAEGVAEPLAAYALNNVAALANRMQRGPARTARVLPEMPYAFHFDAGLYARFLRTYSEARGVVRHEGRIEAVIRNGEDGDVAALHLDGDRRIEGDLFLDCTGFHARLIGEAMGVGYQDWSHWLPCDRALAVPSARARDFTPYTRATAHDAGWQWRIPLQHRTGNGIVYSSRHLSDDEAAARLLAALDEPALADPRPIRFRTGRRDAAWAGNVIALGLASGFLEPLESTSIHMIQSAVERVLKLLPGRRPIAPLRDSYNLQAAHEAERIRDFLILHYWANDRDAPFWRERREVPLPDGLAEKIALWRGTGEIVREEGDLFSDVAWLQVLVGQGVTARGYHPLADQPPRAQIAEYLDLLAKLNAREVAQMLPHSDFVRAHGAADAEIAA

SEQ ID NO: 85908 - protein, 491 aa, Caulobacter sp.
  misc_feature (1)..(491): tr|J2PNY1|J2PNY1_9CAUL Tryptophan halogenase OS=Cauloba cter sp. AP07 OX=1144304 GN=PMI01_03342 PE=4 SV=1
MGDNRISQVVIVGGGTAGWMAAAALAKALGPLVSIRLVESDEIGTVGVGEATIPQIKLFNGLLGLDEDDFIRQTQGTFKLGIEFVGWTRPGHAYLHAFGGVGRDLGMVNFHQYWLKHRQGGGTSDFWAYSLNGAAAKANRFDRQPGLAYAFQFDAALYARYLRAHAERLGVVRTEGKILGATLREPDGFVESVTLERGEAVGGDLFIDCSGFRGVLIEQALKTGYDDWSHLLPCDRAVAVPTASTGPLRPYTQAIARPAGWQWRIPLQHRTGNGHVFCSRYVSEDEATATLMANLEGEPLAEPRLLKFVTGRRKAFWNRNVVALGLASGFMEPLESTSIHLIQSGLSRLLNLFPDQGFAQADIDEYNRQAGLEFERIRDFLVLHYWANQRSEPFWTACRDMAIPSELARKVEIFRAHGRLFREPEDLFFETSWLQVLLGQGVEPRGCHPMTDLVSGAQLEGFLADLRKITADAAGALPDHADFIRQQCAVR

SEQ ID NO: 85909 - protein, 515 aa, Phenylobacterium deserti
  misc_feature (1)..(515): tr|A0A328AC26|A0A328AC26_9CAUL Tryptophan halogenase OS =Phenylobacterium deserti OX=1914756 GN=DJ018_13530 PE= 4 SV=1
MVRPIRNIVIVGGGTAGWLTAGVIAAKHRSRIVRNTFSVTLVESPNTPIIGVGEGTWPTLRTTLAKMGVSETDFIRECDASFKQGAKFARWTTGAEDDAYYHPLMLPQGFSQVNLAPHWLAREDGQSFCDAVCPQGQICDEGLAPKTIATPEFEGAANYAYHLDAGKFAPFLQRHCCDTLGVRHVLADVQRVEMAEDGDIRAIVTEQAGAIEGDLFVDCTGFRSLLLGEALGVPFRDCSHILFCDTALAVQVPYESEASPIASHTISTAQSSGWIWDIGLPTRRGVGHVFSSAHISDEAAEQELRAYLGPAAKNLPVRKLSIRAGHRETFWKRNCVAVGLAAGFLEPLEASAIVLIELSAKLIAERMPACREVMDVVASRFNATTHYRWGRIIDFLKLHYVLTQRRDSAFWRDNLLEESVPERLQELLQLWRHQSPWAFDEFDRIDEVFPPASYQYVLYGMGFRTEVEPDALEGEATLARRAWRENQQQTERLRAALPRHRDLIRKIAERGLQPV

SEQ ID NO: 85910 - protein, 494 aa, Sphingomonas sp.
  misc_feature (1)..(494): tr|A0A4V1JWY7|A0A4V1JWY7_9SPHN Tryptophan 7-halogenase OS=Sphingomonas sp. UV9 OX=1851410 GN=EQZ23_00520 PE=4 SV=1
MDKRSVQRVVIAGGGTAGWIAAAALVKQLGPLLEITLVESEDIGTVGVGESTIPTSRTFHNFLGIDEQAFMRATQASFKLGISFENWGREGERYIHSFGTIGRASTWMGDFHHLWLHARERGLADPLGEYCFELKAADAERFATGKDARINYAYHLDAGRYARFLRELAEPAGVRRVEGKIERVEQNGETGFVEALVLDSGMRIEGDLFLDCTGFRGLLIEQALQTGYDDWTQWLPTDSAIAVQTASVGPAVPYTRAIAHEAGWRWRIPLQHRVGNGIVYARDCLSDDEARAKLLADVEGEVLTEPRVIRYQTGARRRVWNKNVVALGLSSGFVEPLESTSIHLMKIAITRLIQLFPFDGIDDALIARFNTMSRREAEGVRDFIILHYHLNQRDEPLWRRCRKMQVPDTLAERIALFRQDAQAYQASEDLFRVDSWVQVMLGQNLEPHGFHRMGRMISDANLTNALGDIRTDVASRVARLPAHQDFLNRYCATA

SEQ ID NO: 85911 - protein, 503 aa, Novosphingobium sp.
  misc_feature (1)..(503): tr|A0A117V107|A0A117V107_9SPHN Tryptophan halogenase OS =Novosphingobium sp. FSW06-99 OX=1739113 GN=AQZ49_17980 PE=4 SV=1
MSQPYRIVVVGGGTAGWITASVLARYLAPARFAVTLVESEEIGTVGVGEATIPQIQLLNAALGIDEYAMMRATQATYKLGIEFVGWGTPDSRYIHAFGPTGRQLGQVPFQHFWLRSRALGNNTPLDAYCLNAAAAYAGRFARSDQVKSPTLGGLVHAFHLDANLYARYLRGYAEGRGVTRIEGRIMGAERDGETGDVAGLVMADGSRIGGDLFIDCSGFRSLLLGETLSTGFESWAHWLPCDRALAVPCASAPQLEPYTRSTARAAGWQWRIPLQHRIGNGLVYSSAHLSDEAAADLLLAHLDGAALADPRPIRFVTGRRRAFWAHNVVGTGLAAGFMEPLESTSIHLVQSAAERLIRFLPSGAIDPADVAAFNAQTTFEWERVRDFLILHYHVNQRPEPFWRDCAAMAVPDTLREKIDLFSANGRITRFNEELFSEPGWLQVMAGQGLNPRGWHPLADDPSEAELGEVLGLMRRAVDKLVADMPDHAAWISRHCAAAPSETY

SEQ ID NO: 85912 - protein, 514 aa, Sphingomonas sp.
  misc_feature (1)..(514): tr|A0A5B8LMX5|A0A5B8LMX5_9SPHN Tryptophan 7-halogenase OS=Sphingomonas sp. HKS19 OX=1813879 GN=FPZ24_15810 PE= 4 SV=1
MNRPVNRIVIVGGGTAGWLAACLIAARSDTAAAMPISVTLIESPDVPTIGVGEGTWPTMRRTLERIGIAEAEFLLACDASFKQGSRFDGWLTGAAGDHYFHPFTPPVSGDPRGVVAAWQADAERPFAEAVCAQPAMCMRDLAPRQRAMPDYAGALNYAYHLDAGKLAALLAKHGVERLGVQHVRDHVTAVEQAVDGDIAAVRTRDNGAVSGDLFIDCTGHAALLIGGTYGVDFIDRSGELFNDRALAVQMLVAPGSAIGSQTNATAHEAGWIWDIGLPTRRGVGCVYSSRHMSDDDAAATLQAYLRRAGFDDIPAFRRLSFTSGHRARFWERNCLAVGLSAGFLEPLEASAIVMIELSLNELLDNFPATRPLMDVHARRFNDLFRYRWDRVVEFLKLHYVLSRRDEPYWREHRDAASIPPRLADLLRVWAHQPPSIADFPAVEEIFPAASHQYVLYGMGFPPPAASPIELDAAVPSLSQVDQRARSLAASLPTNRAYLDDLRATNLPADLDLTA

SEQ ID NO: 85913 - protein, 521 aa, Caulobacter sp.
  misc_feature (1)..(521): tr|J2GCE3|J2GCE3_9CAUL Tryptophan halogenase OS=Cauloba cter sp. AP07 OX=1144304 GN=PMI01_03771 PE=4 SV=1
MQMNPPKPAALKVVIVGGGTAGWMCAAGLARLLDPAAYAITLIESDDIATVGVGEATLPHIKTFNDLLGIDEARFLGATQGAFKLGIEFRDWGQRGDRYIHPFGVFGEPWGGVDFQHHWVRAQLAGQAPASLQDYSYAVAACRANAFEFPNEDRKSIRSTYAYAYHFDASLYARFLRGWATERGVTRIEGMVQEVARDAESGHLEALTLKSGARIAGDLFVDCTGFRSLLLGGEMGVGWDDWAKWLPCDRALAVPSERVGALTPYTRSTAQTGGWIWRIPLQHRTGNGYVFASDFIDEDRARDTLLAQLDGKALAEPKLLRFKAGRRVKTWSGNVVGLGLASGFLEPLESTSIHLIQAAVIDLVNLMPTPGEGDRMDGRLAKEFNRLSEMQYERIRDFLILHYRANQRHGEPLWDHVRDMTIPDSLARRIALFEARAWAPEYKYGLFSRDSWLSVLVGQGITPRGYDRLADGLDLGELETRMRDLKARIDANVQAMASHGDFIARYAPGAVDEAALASAAV

SEQ ID NO: 85914 - protein, 495 aa, Shewanella sp.
  misc_feature (1)..(495): tr|A0A2N1EPN3|A0A2N1EPN3_9GAMM Tryptophan halogenase OS =Shewanella sp. ALD9 OX=2058330 GN=CXF88_09745 PE=4 SV= 1
MNKSIKKVVIAGGGTAGWMAAAAFSKLLGKNLEIVLVESDEIGTVGVGEATIPTLHIFHRLLGLKEQDVMAATNATFKLGIQFENWHDVNKDYLHSFGFLGKDCWACGFQHFWLKGKQQGLVSDIGDYCTEHLAARQGRFAVLPNQDYNHAYHMDASLYAKFLRKFAEHHGMTRIEGKIADVLQHDDTGNIRALKLENGELIEGDLFIDCTGFKALLIEQTLNTGFEDWSHWLPCDSAIAVQTEAVQKPIPYTRSIARESGWQWRIPLQTRTGNGLVFCSKYISDADATELLLNNIEGAPINQPRVIKFKTGTRRQHWNKNCIAIGLAAGFLEPLESTSIHMIQRSIVRLLQLFPSQGIIDTDIAEFNQQTKVEMDNIRDFIILHYKVTDREDSRFWRYCKNMPIPASLQHRIDMFSQSGKVYKYGNELFGESSWIQVMMGQGLMPKEYHPIVDMMDEAELTSFLNSIKATVKRKVDTLPAHHDFVQHYCKSASM

SEQ ID NO: 85915 - protein, 614 aa, Westiellopsis prolifica; identical to SEQ ID NO: 83391
  misc_feature (1)..(614): tr|A0A4Q9J2U2|A0A4Q9J2U2_9CYAN Tryptophan halogenase OS =Westiellopsis prolifica IICB1 OX=1970206 GN=B4U84_2739 0 PE=4 SV=1

SEQ ID NO: 85916 - protein, 493 aa, Sphingomonas sp.
  misc_feature (1)..(493): tr|A0A1I4A9Q0|A0A1I4A9Q0_9SPHN Tryptophan halogenase OS =Sphingomonas sp. NFR04 OX=1566283 GN=SAMN03159338_4462 PE=4 SV=1
MTDNRIRRIVILGGGTAGWMSAAALSRALAGQRVAITLVESDAIGTIGVGEATIPTIHWFNQIIGLDERQFMAETKATVKLGIEFVGWNGEGSRYFHPFGTFGPPGDGTMFLHRLIRGRMDGDTAPTEVYSLTAQAARSGRFARPVPDRRSLLSTLGYAYHFDAGLYARYLRGLAERAGVTRVEGMVGSVQQDGEGGFVRSLTLDDGRVVEGDLFLDCSGLRGLLIGETLGVGYDIWSHWLPCDRAWAAPSAAETHLTPFTRATAAEAGWRWRIPLQHRVGNGYVFASRFQDEAAARASLLAAMEGPPLADPRLIRFTPGMRREAWRANVVAIGLSSGFLEPLESTSIHLIQSGLAKLLSLFPAADCSPLLARQFNRVFGQEMLDIRDFLILHYHATAGREEPMWRERQSMAIPDTLTERLAHFRSSGRIVLSSDELFRDASWFAVLDGQGERPGDHNPLIEGIEAQENLRQLTALRANIARAAEALPALSPA

SEQ ID NO: 85917 - protein, 508 aa, Novosphingobium subterraneum
  misc_feature (1)..(508): tr|A0A0B8ZPN2|A0A0B8ZPN2_9SPHN Tryptophan halogenase OS =Novosphingobium subterraneum OX=48936 GN=NJ75_01077 PE =4 SV=1
MSATDQRRIVIAGGGTAGWMTAAALARLASPHWQVTLIESEEIGTVGVGEATIPMVRLFNQTLGIDEAQFLRETHGTWKLGIAFEGWGGFDDRYIHGFGLTGRSLGVLPFHHYWLRGRAHGLAGPLGEYVLNAVASDANKFAHIDRPQGSALPPMPYAYHFDASLYAAFLRRYAEGRGVRRIEGRIVGFDRDVLNGNLAALRLERGDVIDGDLFVDCSGFRSLLLGQEMGVGYLDWSQWLKCDRAVAVPCDRAEPLVPYTRSIAQPAGWCWRIPLQHRTGNGHVFCSDLMSEDEATARLIGRLDGEQLADPRTIRFKAGRREKFWERNVVAIGLSSGFIEPLESTSIHLIQTAISRLVDFMPNGPVHDADRDAYNRLAAFEIERIRDFVILHYVANGRHGEPFWDSLRQMEAAGQLPDALGERLAMFRASGRIVREHDELFDVPGWVQVMIGQGVVPARWHPLADQVAPESLKAFLDTVRGAYEKDVARMPSHAEYVSHVCGQVPAHA

SEQ ID NO: 85918 - protein, 509 aa, Sphingomonas sp.
  misc_feature (1)..(509): tr|A0A1I4A6J5|A0A1I4A6J5_9SPHN Tryptophan halogenase OS =Sphingomonas sp. NFR04 OX=1566283 GN=SAMN03159338_4436 PE=4 SV=1
MRCPGERSMHDKPVTSVVIAGGGTAGWMAAATLSRSFAPEALKITLVESAEIGTVGVGEATIPPILPLNAQLGIDEDELVRRTQGTYKLGIEFVDWGARGSRYFHPFGSYGADLGGVAFHHHWLRTREGALDDYSLNARAALSGRFDRPAEDPRSVLSKLSYALHFDATLYAALLRERSLAQGVEAIEGKIAEVVLDPASGHVDHLSLADGRVLRGDLYIDCTGFRGLLIEQALQTGYEDWSHWLPMNRALAVPTAPNGPPVPFTRSTADAAGWRWRIPLQHRVGNGHVYSSAFTDEAAATEALVAGLDGAMLADPRTLSFTTGRRRKAWHKNVVALGLAGGFVEPLESTSIHLIQRGVVTLMSLFPAAGFVQAEIDCYNRLMQTEMEEVRDFVILHYKQTLRDDTPFWRQVQAMPVPDSLAERMAIFAHSGRVLLGPGELFRETSWVAVLLGQGIMPRGHDPLADAIPEKDLRLTLQRMRAVIGRGVEALPTHADFLGRLSVGRHPTT

SEQ ID NO: 85919 - protein, 500 aa, Sphingomonas sp.
  misc_feature (1)..(500): tr|A0A5B8LLD1|A0A5B8LLD1_9SPHN Tryptophan 7-halogenase OS=Sphingomonas sp. HKS19 OX=1813879 GN=FPZ24_15795 PE= 4 SV=1
MHRPRRIVIAGGGTAGWMAAAAIARTMGRTVEVTLVESDMIGTIGVGESTIPPLQVFNRLLGINEADFMRATSATFKLGILFDNWKEQGHRYFHSFGFTGKDHWSAGFQHFWLYGRAKGHSQSYDDYCLEVIAALGGKFAHLPDDGMNYAYQLDSTAYAAFLRAMAESDGTTRVEGKIARVELDSESGDIAALVLDAGTRIEGDLFLDCTGFRAVLIEGALHAGFDDWTHWLPCDSAIALQTESVGPAVPYTRAIAHDAGWQWRIPLQHRTGNGLVYCSRYLSQDEALARLLGNVEGEVLTKPNILKFGAGARRKQWHRNCIAIGLSSGFMEPLESTSIHLIQRAILRLIRMMPNHSISDRDIAEFNDQQFEDMRQILDFLVLHYKATDRRDSPFWRQCAAMDIPDSLAQKIELFRETGRVFRKNEELFAENSWVQVMMGQGIVPRTYHPVAEKLTDDELDRFLGMLRETVRKTVATLPDHPAYVARYCGVQQPQPAATA

SEQ ID NO: 85920 - protein, 513 aa, Caulobacter sp.
  misc_feature (1)..(513): tr|J2Q9W5|J2Q9W5_9CAUL Tryptophan halogenase OS=Cauloba cter sp. AP07 OX=1144304 GN=PMI01_00874 PE=4 SV=1
MAGNRIVIVGGGTAGWLTAAYLAKQLGADRPGGARITLIESPEIGIIGVGEGTFPTIRSTLATLGVSEARFMRESSATFKQGVRFVDWERRSADGKSSEYFHPFNLPLRPEGRDLSPYWLLDHQAGAPLAFADAVTTQGKIIEAGLAPKRLEDADFQGPMNYAYHFDAARFADFLRGVAKELGVIHLAAKVETVQLDAETGDIASVTAGELGVIEGNLFIDCSGFRALLIGEALGAPFRRCDDVLFNDRALAVQVPYPAPDAPIAPYTLATAHEAGWTWDIGLDGRRGVGYVFSSRHTDEARAEQVLRAYVGPEADHLPVRLLKFQTGYRERQWIGNCVAVGLSAGFFEPLESTGIMLIEVAATMIAEVFPLRDRAAMDSAARTFNGLMAGRFERIVSFLKLHYCLSKRDEPYWRDNADPASWPQGLRDLMAQWKHRPVSRFDFLVDLETFLPASYQYILYGMNAATDFAPVEGRYADGAMARQAFAKVAGAATEALKHLPPHRTLVEAYYRR

SEQ ID NO: 85921 - protein, 476 aa, Sphingomonas sp.
  misc_feature (1)..(476): tr|A0A1I3TK21|A0A1I3TK21_9SPHN Tryptophan halogenase OS =Sphingomonas sp. NFR04 OX=1566283 GN=SAMN03159338_2262 PE=4 SV=1
MSLRTILVVGGGMVGWSAAAALKRRLPQLDITIVPVAPPADALADRIASTLPSILGFHGDLGIGLGDAVLRTGSHYRLGTLFRDWVEGAPDYVHAYGRAGMPIGGAPFPSLWARAALAGAAPPFDALSAAAMMARTGRFVTPQADGLLSEHSFGLALDIPRYTAMLMAFARHVGVQGHLGEVAHVEQDARGDIAAVVLDNGTRLTADLYCDCTGPAARLHGTMAVPHESWQAWLPCDRIVLDDIAGDDEAAPMERVTATNHGWRWVSARQRGTVYCAASGARHEGAVAFRSGATLEPWRGNVVAIGDAAVGVEPLEWSNLHLAHSAIDRLIAMLPAGRPHPLEAAEYNRQALAEARRVRDFLVLHYATARRDTPFWQARAQASLPESLAHTLRLFRERGRLPYYEEETFDRDSWLAVLFGQQVLPRRIDPLTDAVPPDEAAAALASLRDSIAQAIERVPTAARFRALQMERLHERA

SEQ ID NO: 85922 - protein, 188 aa, Oceanospirillum sp.
  misc_feature (1)..(188): tr|A0A2D5GI67|A0A2D5GI67_9GAMM Tryptophan halogenase (F ragment) OS=Oceanospirillum sp. OX=2021254 GN=CMI12_162 30 PE=4 SV=1
IKFTPGKRRLGWNKNCVALGLASGFIEPLESTSIHLIMTGIVRLMRLFPFDGVTQSAIDEYNTKYDSEMAAILDFIVMHYKVTNREDSPFWQHCKNMPIPPSLTHKLNLFKDTGRVFLDDGDIFRVDSWTQVMLGQGLTPNQYHKVADEMSEAELERFMMGLKQQVTQNINKLPSHAAFLDQYLKGKQ

SEQ ID NO: 85923 - protein, 504 aa, Novosphingobium sp.
  misc_feature (1)..(504): tr|A0A117V0X4|A0A117V0X4_9SPHN Tryptophan halogenase OS =Novosphingobium sp. FSW06-99 OX=1739113 GN=AQZ49_17770 PE=4 SV=1
MMPSPDTDRAIRSIVIVGGGSAGWMTAAALCRTLQRDCTITLVESEEIGTVGVGEATIPPIRLFNEMLGIAEADFVKATHGSFKLGIQFVGWQQPGQTYFHPFGTYGKPFDTVGVHQFWLAQHRAGAIDPLDNYCMAWVLAQAGKFAPPSRDPRNVLSTYDYAYHFDAVRYAAFLRSYAEARGVIRIEGKAVSVALKGETGFVESVTLADGRVIAGELFIDCSGFRGLLIEGALHTGYEDWSHWLPCDRALAVPCAPTADFIPYTRSTAQSAGWQWRIPIQGRTGNGYVYSSGFIDDDRAASDLLGRLDGTPLADPRPLRFVTGRRRKSWNRNVVAVGLSSGFMEPLESTSLHLIQANISKLLAFFPDRDFDPLVIDEFNRVASGETERIRDFLILHYHLNRRDEPLWQYCANMAIPDTVQARIDHFRRFGRLIVRDMDLFGAPSWTAVHIGQGNLPERLDPVAHYREADGAAWLAKFKAAMAAEAQRLPSHRDYVAQHCRGDV

SEQ ID NO: 85924 - protein, 513 aa, Novosphingobium sp.
  misc_feature (1)..(513): tr|A0A102D4A0|A0A102D4A0_9SPHN Tryptophan halogenase OS =Novosphingobium sp. FSW06-99 OX=1739113 GN=AQZ49_17605 PE=4 SV=1
MTQAVKSVCIVGGGSAGWLTAGLIAARHRGAPGGEHCLSITLVESVERGAIGVGEGTWPTMRQTLRKIGISETDFIRACHASFKQGAKFVGWRTGDPDDFYYHPLVLPEGFPDLDLAPHWHEAAASSFSDTVCFQEFLCENGLAPKLITSPEYGGIANYAYHLDAGQLGKLLRDHCVGKLGVRHLDDEIVRVEQADNGDVTAVVGLRHGPIKADLFIDCSGFSSLLLGQTLGVPFVDCSDVLFIDRALAVQVPYDGPDSPIVSHTVSTAQKHGWIWDIGLQSRRGVGYVWSSRHAGADRVADELAAYVGPAFADLNPREIAIRSGHRACFWKNNVVAVGLAAGFLEPLEASALVLVELSADYIATAMPATRHAMDIVARRFNAMTRYRWDRIIEFLKLHYMLSEREDTAFWRDNRDPDTIPQNLCDQLELWRHHPPGEHDFASANEMFPAASYQYVLYGMGFRTEPLRRPTADERHAAQDAFARTTATKRKLAAMPTNRALLDKLAQYRFQPI

SEQ ID NO: 85925 - protein, 500 aa, Sphingomonas sp.
  misc_feature (1)..(500): tr|A0A1I3WIJ1|A0A1I3WIJ1_9SPHN Tryptophan halogenase OS =Sphingomonas sp. NFR04 OX=1566283 GN=SAMN03159338_3211 PE=4 SV=1
MQADATSVIVVGGGTAGWMTAALLAKILGARAHVTLVESEAIGIVGVGEATIPPICAVNAMLGIDEGAFLRATGATIKLGIRFDGWGRPSDSYDHSFGGAGRDLPFCGFHHFCTRAAMEGLPANYWDHDFNALCIQAGRFAPDAETAPNPVWPLPHAYHFDAGLYGHFLRGIAEGLGVRRIEGRVVDISRAPETGDVTALHLEDGRSLEGALFIDCSGSRGLLIEQFLQTGYEDWSHWLPCDRALAVPSAREAVSPLYTRATARAAGWQWRIPLQHRNGNGLVYSSAYIDDDAAADTLMAGLTTAAQDAPRLLRFRTGRARRQWHHNVVAIGLSSGFLEPLESTSIYLIQSAIVRLLHLFPHDGRPDPQRAEYNRQSAIEYERIRDFVILHYHAQHRPEPFWTERRAAALPDRLDEKIALFASTGTIVQDPFDIFTEASWVKVLLGQGITPAAYHPLAGGFSRDALARQFEQMAMVKRQGVARLPLHDAWLSATMARTAA

SEQ ID NO: 85926 - protein, 500 aa, Streptomyces sp.
  misc_feature (1)..(500): tr|A0A428X205|A0A428X205_9ACTN Tryptophan halogenase OS =Streptomyces sp. WAC 00631 OX=2203201 GN=DMH02_10880 P E=4 SV=1
MALPDSEEFDVVVVGGGPAGSTLAALTAMQGHRVLVLEKEFFPRHQIGESLLPATVHGVCRLTGVADELAAAGFPRKRGGTFKWGANPEPWTFSFSVSPRMTGPTSYAYQVERAKFDEILLNNARRVGAEVREGCAAVDVVEDEERVRGIRYTDADGREHRASATFVVDASGNGSRLYRRVGGTREYSEFFRSLALYGYFEGGKRLPEPNSGNILSVAFESGWFWYIPLSPDLTSVGAVVRREMADKIRGDSDKALAALIAECPLISEYLADARRVTEGPYGKLRVRKDYSYHHTTFSRPGMILVGDAACFVDPVFSSGVHLATYSALLAARSINSVLAGLVGEDRALREFESRYRREYGVFYEFLLSFYEMHQDENSYFWQAKKVTRANRPELESFVELIGGVSSGERVLTDAEVLAKRFSSGSAEFAAAVDELAGSEDGSMVPLFKSSVVREVMQEGGQVQMRALLGEEAEPEAPLSADGLVPSPDGMFWLPAQGTGE

SEQ ID NO: 85927 - protein, 508 aa, Sphingomonas sp.
  misc_feature (1)..(508): tr|A0A1I4AL06|A0A1I4AL06_9SPHN Tryptophan halogenase OS =Sphingomonas sp. NFR04 OX=1566283 GN=SAMN03159338_0052 PE=4 SV=1
MNPIRRILILGGGTAGWLTAAYLARYLDIARQRRFAITLLESPALGIVGVGEGGFPTIRQTLEFLGIDERSFVRRASATFKQGIRFDDWLHAPQPDGARHRFLHPFEAPFHTEGAGLVPYWLLQPEGCRAPFAEAMTIQNHVAAQGRAPKRAEEAGFGGPLTYAYHFDAVRLAQLLRDRAIELGVTHLEGEVFSAHTDAEGAIDRIETREHGSLTADLYIDCSGFEAALIGKALGAPFTSVRHHLFTDRALACKLPYADPEAPIATTTVAAAHEAGWTWDIGLQHARGIGCVYSSAHLSDERAVEILDAHCGGAPHEARLITFEPGYRRTPWVKNCVAVGLSGGFLEPLEATGVVLIEAAAAMIAELFPHAGPVDAPAARFNALMAARYERIVDFLKLHYCLSRREEPFWRDNRDPASIPDTLQALLDQWRHRPPSRFDFLLDVESFAFFNYQYILYGMGFRTDLSAAREGFPHTDAAERQFARIRGFGEQAVADLPGHRELIRQLSG

SEQ ID NO: 85928 - protein, 507 aa, Shewanella sp.
  misc_feature (1)..(507): tr|A0A2N1EMS9|A0A2N1EMS9_9GAMM Tryptophan halogenase OS =Shewanella sp. ALD9 OX=2058330 GN=CXF88_13400 PE=4 SV= 1
MAKAVKKIIIVGGGTAGWLTAAIIASHHKSQTGNDLTIILVESSDIPTVGVGEGTWPTMKNTLQQIGLSESEVFKACHATFKQGGKFVNWVHGNGDFYYHPFTVPLGYGRIDLAPYIDNIKDYAKHTNFQHAICESGLAPRSMAEGEYQGSCNYAYHLDAGAFADLLKQHCKAKLAVEHVIGTVEQAHVDSQGNISHISLADQGSIDGDLFIDCSGFASLLLGKTLNVPFVKLDHVLFNDRAIAMQVPYTDQHSPIASHTIATAQDSGWIWDIGLTHRRGVGHVYSSRYMTDEQAEANLRRYIGPQAEGLSVKKISYQSGHRERYWQKNCVAVGMAAGFVEPLEATAIMLVEISARYIADNLPVNDTIMALTAKRFNQQMEYRWGRIVDFLKLHYMLTKRPEPYWQAHCHPDSIPQSLQEDLSIWAYRGPTSKDFNGPNELFPAASYQYVLYGMGFSPDYSQHAHLYQQQAQATQILNRNVQLTQQMLNTLPPHRDFIEQWLTHSQQ

SEQ ID NO: 85929 - protein, 517 aa, Caulobacter sp.
  misc_feature (1)..(517): tr|J2QBQ9|J2QBQ9_9CAUL Tryptophan halogenase OS=Cauloba cter sp. AP07 OX=1144304 GN=PMI01_00658 PE=4 SV=1
MSEAPSTSATSSDRDGAISRIVIVGGGAAGWMAAAALSRGLGPRGPAITLIESEEIGIVGVGEATIPPIRAFNSLIGLDESAFVRETQGTFKLGIEFVDWTRLGDRYFHPFGVYGHDFGVAPFEAVWRRLRRAGQAQPLDAYSVCARAAAQGRFAPIPQAAGGPPPMGYAFHFDATLYARMLRTHAEAAGVVRREGKVVDVSLRGADGFVEAVTLASGERIAGDLFIDCSGFRSLLLGQALGTPFEDWSRWLPNDRALAVPSANAGPPTPFTRSTAREAGWQWRIPLQHRTGNGYVFSSRHVSIDEATATLLSGLDGEPLAEPRLLTFQAGRREACWVKNVVALGLASGFLEPLESTSIHLIQAGIARLLEMLPTRAFEPADARRYNRLMAADFDNVRDFLVLHFHVTQRDDTPYWRELRAMTPPESLAERLSIYRATGRIFRESDELFTKTSWLAVMEGQGAQARDDDPLALAVPQELGAARLAKIAEMARQAVDRMPTHGDFIDAHCLARMSAPV

SEQ ID NO: 85930 - protein, 514 aa, Novosphingobium sp.
  misc_feature (1)..(514): tr|A0A102DD93|A0A102DD93_9SPHN Tryptophan halogenase OS =Novosphingobium sp. FSW06-99 OX=1739113 GN=AQZ49_05555 PE=4 SV=1
MSHRIRHVVILGGGTAGWLAAGIIAARHRNRMAEGFRITLVESPDTPIIGVGEGTWPTLRSTLQRMQVSETDFFRECDVAFKQGAKFARWATGRDDDFYYHPLMLPQAFSQVNLAPHWLADDAGASFCDAVCAQGVICEEGLAPKAITTPEYEGAANYAYHLDAGKFADFMQRHCTQKLGVAHILANVTRVNQADNGDVTSLDTDRAGRIEGDLFVDCSGFRSLLLGQTLGVAFRDCSDVLFCDTALAVQVPYADDTSQIASHTISTAQTAGWIWDIGLPTRRGVGHVYSSRYTSEEHAERELRAYIGPAARDLSVRKIPIRSGHRETFWSHNVVGVGLAAGFLEPLEASAIVLIEMSAKLIAEQMPQTREVMQIVARRFNDTTRYRWGRIIDFLKLHYAVSQREDTAFWRDNRRAETIPDRLQELLYLWRYQSPWLYEEFDRLEEVFPAASYQYVLYGMGYKTEVEPALLAGDAQVAERAFRENRAQTEKLRQRLPRHRDLIRKIVEYGMQPV

SEQ ID NO: 85931 - protein, 510 aa, Pelomonas sp.
  misc_feature (1)..(510): tr|A0A0Q6X6T8|A0A0Q6X6T8_9BURK Tryptophan halogenase OS =Pelomonas sp. Root1237 OX=1736434 GN=ASC91_26410 PE=4 SV=1
MNDRLREVVVLGGGSAGWLVAGLLAAEHPDLRITLIESTDVPTIGVGEGTWPSMRDTLRRIGLSEPEFIRRCQVSFKQGSRFDGWARGGAGSDGDRYYHPFMLPVGYGDVDLVQPWLATQGQRPFADVVSPSVQVCEAGRAPKQVQTPDFAAVANYAYHFDAGLFGQMLREHAVAKLGVHHVIDHVEAVLSFENGDIAALRTREHGEIKADLFIDCSGLTSRLIGQHFGVPLKSEREALFNDAALPVQVPYATPDAPLASVTVATAWAKGWIWDIGLPSRRGVGCVYSRDHASDDEAHAALTAYLDATGAPAERPTPRSIRFDPGYREQFWVRNCVAIGLASGFIEPLEASALALVELSAQRLCDELPMTRASMEAVARRFNDDFSYRWARVIDFLKLHYALSQRDDSDYWRAHRDPATWPERLRELLPQWQMRAPARHDFGRIDEVFPSASYQYVLYGMGFRPDAESLPAAKLQAAQACFDEAARQARRFVPGLPGHRSLLDHIHKTET

SEQ ID NO: 85932 - protein, 518 aa, Pelomonas sp.
  misc_feature (1)..(518): tr|A0A0Q6X502|A0A0Q6X502_9BURK Uncharacterized protein OS=Pelomonas sp. Root1237 OX=1736434 GN=ASC91_03230 PE= 4 SV=1
MSDIQSIVIVGGGSAGWLAACFLQRALGAVRQTPLPITLIESPRIAGIGVGEATLPTLRGMMQALGLPEAALFGAADATLNNGVRFHGWRSGGSAADDSYDHPFDAPPPFGGFATTAHWLNLMQRGLTQQPMAQACTVQTTLFDGHQSPKLMDSPDYQAPVSYGYHLDAAKLAMLLQQTALRRGVRHVQGEVAQVQRGAAGIEAVELADGRRFAASFFVDCSGADSLLLQRALGVPWVSYADWLPCDRSIAVPVAYARDDTALRSHTAITAQDAGWSWEIDLQSRRGTGYVYASRFCSDDEALQRLQQLNAGHRALAAPHFTTLRAGHAARIWEQNCLALGAAGGFVEPLESTSLYLVEWALQMFVDHVAPSGNSAVCRDRLNRLAGDFHQELRDFIVAHYTLSQRRDTPFWRTCTDAAALPPRLVELLALWDAKVPTATDLDSRLSPFGPSNWSYVLAGLHRLPSQGIGLAAHISAEVSQQALAHVRDVRRAASEQSPTMRDYLRSQQGMAPQVTAH

SEQ ID NO: 85933 - protein, 520 aa, Duganella sp.
  misc_feature (1)..(520): tr|A0A1I2LSA1|A0A1I2LSA1_9BURK Tryptophan halogenase OS =Duganella sp. CF458 OX=1884368 GN=SAMN05518865_10543 P E=4 SV=1
MVAIPTRRILIVGGGSAGWLCAAYLAKMFGGSKEITLVEAPEIGAIGVGEGSFPSLRATLAALGIPETEFVRESSATFKQGITFQNWLYGGDHYFHPFSMPSQRPGAPELLPYWLQGMAGDTPFAEAVTMQQRVVDAQRAPKRAGDSDYNGPMNYAYHFDAARFAGLLAKHARKLGVRHLQDHVEGVQLALDGAIASVETREHGALTADLYIDCSGFRALLIGAALGAPFRSVSDILFCDIALAVQVPHPAPDAPIASATISTAHEAGWTWDIGLQERRGIGYVYSSRHTSDERAEQVLRAYAGPAADGLNVRKIPMRVGYREQHWIKNCVAIGLAGGFLEPLEASGIGLVETAVHMLGALFPHNGDMAPLARHFNQFMSERYARIVDFIKLHYCLSQRHEQFWIDNCDPATWTDSLRDKLAMWRCRPPQRMDFLTDVEMYPPTSWQYVLYGMGFPKVMPPLPSLEPMADAARQEFANIAAVAARAVADLPDHRAFVTQLCQHENAFRNDFHAIRATVSR

SEQ ID NO: 85934 - protein, 647 aa, Streptomyces sp.
  misc_feature (1)..(647): tr|A0A1C6R1W7|A0A1C6R1W7_9ACTN Tryptophan halogenase OS =Streptomyces sp. AmelKG-E11A OX=1100822 GN=YW7DRAFT_06 385 PE=4 SV=1
MASQDGGTPHETGTGGDFAGDLRGFLGSLPRGDADAVLGWFGGSPATAPGEGLTPELTALFEDGEGGPRDAGIDPASRPRQGDPRAVRRVGVIGGGTAGYLTALALRAKRPWLEVTLVEAKGIPIIGVGEATTPSMVPFLHHYLGIDPQELYEAVAPTWKLGIRFDWGGKPGGFMAPFDWGSNSVGVLGSLATQDDINAFTFQSLLMERDRAPVFRSGDDGRLSLMKHLPFAYHLDNARFVRYLTELAERRGVGHIDAKIDDVVLGADGWVDHLVTDGGERLDFDLYVDCSGFRSLLLGKALDSPYVSFADSLFTDRAVTAVVPHHGRIKPYTRATTMDAGWCWTIPTRDDDHVGYVHSSGFISVEEATAELQRLYPEAHTFRTVHFRSGRHEEAWIGNVMAIGNSYAFVEPLESSGLMMITLGILSLVGSLPGSWDEPCPRKVVNAALAKKWDEIRWFLAMHYRFNTRKDTDFWRACRADTDVSGLEALLEVFAGGAPLRFRDPVVRGFLESTAPTFYGLDGVDCLLLGQGHPTRLLPMTEPVDAWRARKAAADVLVDRALTAAQALTAFDQDPRLNAQLVGDPDSWVVRTGTNRLVSADPDAPAARGSAAGGSADGAAVDGASGEGASGGALAGTGSSRGDGTDG

SEQ ID NO: 85935 - protein, 233 aa, Sphingomonadales bacterium
  misc_feature (1)..(233): tr|A0A259HLS5|A0A259HLS5_9SPHN Tryptophan halogenase (F ragment) OS=Sphingomonadales bacterium 39-62-4 OX=19705 99 GN=B7X78_05390 PE=4 SV=1
IPLQHRQGNGVVYCSDFLGHDVALEKLLSSVEGEKLVKPNHIRFRTGARRKQWHRNCVAVGLSGGFMEPLESTSIHLIQRAILRIVRMLPAGAISQRDIDEFNDQQFTDMEQIRDFLVLHYKVTDRRDTPFWRHVSAMDVPESLTHKIELFRETGRVFRKNEELFAENSWVQVMMGQGIMPQSHHPVAAKLRDEEMAHLFGTLRDQVARTVAALPVHGDYVVRYCGADVPVAA

SEQ ID NO: 85936 - protein, 503 aa, Massilia glaciei
  misc_feature (1)..(503): tr|A0A2U2HDC7|A0A2U2HDC7_9BURK Tryptophan 7-halogenase OS=Massilia glaciei OX=1524097 GN=C7C56_025540 PE=4 SV= 1
MTLTPVRKIVVVGGGTAGWMTASALSKTLGPACQIRLIESDEIGIIGVGEATIPHINEFNRALGIDEDTFLRATQGTFKLGIEFVNWGQTGERYIHGFGRVGQPGDALPFHHFWLRMAKLGRAGPLAAYSMNTAAPHHAKFMRAPPEMRGSPLQDLVHAFHFDASLYARFLRDYAEQRGVRRTEGKIARVSQREPDGFIDAVVMESGERIEGDFFVDCSGMRALLIEQTLHAGYEDWSHWLPCDRAIAVPCASAGELLPMTRSTAHAAGWQWRIPLQHRTGNGHVYSSGFMEADQAEAILMANLDGEPTAQPRHIRFQTGRRKKSWSHNCVSVGLASGFMEPLESTSIHLIQTAISRIINFFPQAGFDAADIAEYNLQTQVEYERIRDFLVLHYKVTRRTDSAFWDYCRTMPIPESLQRKIDLFLSNGRIYREQDELFTEMSWLQVMVGQGAMPRGYHPFADLRPEAEVAAYLGNVEQVIAKCVKAMPSQAEFIAAHCAAGAN

SEQ ID NO: 85937 - protein, 496 aa, Alteromonas confluentis
  misc_feature (1)..(496): tr|A0A1E7ZDY0|A0A1E7ZDY0_9ALTE Tryptophan halogenase OS =Alteromonas confluentis OX=1656094 GN=BFC18_06135 PE=4 SV=1
MMRLHNIVIAGGGTAGWMAANLIAHAWRDKPVSVTLVESADIPTVGVGEGSTPTLKRFFSDLGIAEQDWMPACNATYKVNIRFRNWSPGSGIKEYSHPFISQPDTFTERAFHVNCHTRRLGLDVNTQPDDFLLNGWLAKAHRAPKTPPNFPFRIEYGYHFDSALLGRFLTKHATTLGVMRKEGNIAQVLKHANGDIRGLQMADGSFVEGDFFIDCTGFRSLLLQQALEVGFTSFSDNLFNDSAVVLPTPAAGQLPVETVSTALSAGWAWSIPLSHRTGNGYVFSSAHISHDQAETELRQHLGLADNDGEARFLSMKVGQAHKHWHRNCLALGLAQGFIEPLEATALHLVQLSTEFFIEHYEKGHFGSAHQDTFNAHISERFNRVRDYIVAHYKLNTRDDTDYWRENRNNMALSESLLQLLDVWYRKGDLPAEIQRQNLHHHFGTTSWHCLLAGYGCFPPLAKNQPGLGDLFVEKDLDAFFRGCLLNFPTQQDYLQR

SEQ ID NO: 85938 - protein, 498 aa, Pelomonas sp.
  misc_feature (1)..(498): tr|A0A0Q6WVJ2|A0A0Q6WVJ2_9BURK Uncharacterized protein OS=Pelomonas sp. Root1237 OX=1736434 GN=ASC91_09620 PE= 4 SV=1
MTQTFNRIVIVGGGTAGWMTAAAIATGLKGRCTVEVVESEEIGIIGVGEATFPSIRNYNRLVGIDEAEFLRATHGTYKLGIEFRDWRVQGERYFHTFGDFGEMQGPHALWGQYRRLADPALGGLGEQCLPTVMAMRGRFMQPDDEGRAPYKYAYHFDATLYAGFLRRLAFGRGARRTDGRIVGVTRRADGGVHSLRLADGREIEGDLFIDCSGFGSLLLGKTLEEPFVDFSRWLPVDSAWACPCERTGTALTPYTRATALEGGWAWRIPLQSRTGHGHVFSSRHIDADRARDQLLQQLDGKPLAEPRLLRFTTGHRERFWVHNVVALGLSSGFLEPLESTSIFLIQSGLGHLMTLLTSGQPISEGVVAGYNARAVREFNRIRDFIILHYCLTARRDSALWRDMATMELPETLAFKIDAWRRLGLLHLQGDEGFDEHSWLAIHAGMQHWPERTDPVLQEMPPDEARQALQQRRHAIAESVARLPSHEAFLGQVLARGGA

SEQ ID NO: 85939 - protein, 489 aa, Pelomonas sp.
  misc_feature (1)..(489): tr|A0A0Q6WA51|A0A0Q6WA51_9BURK Uncharacterized protein OS=Pelomonas sp. Root1237 OX=1736434 GN=ASC91_21260 PE= 4 SV=1
MAPPKHIAIVGGGTAGWMTANLLRHRWARLGVDVTLIESADIGTIGVGEGSTPFLRHFFRTLGIEERDWMPACDATFKSSIRFPGWSTVAGYESYVHPFFSEADRELGNLFFTNACLRRRGQAADANPRDFFLAAELARQRRAPLGTDYAYHFDAGKLGAFLRTHAVGLGVRHIVDTVARVELRENGDIAAVHMKSGARVDADLFVDCSGFKGLLITETLGEPFLSYRDNLFNDRAIAIPTPLVDGEDIPCETVSTALRHGWAWQIPLTTRYGNGYVYSSDFVSDDEAERELREQVGAAAEGATARRLRMRVGCVKQHWRQNCVAIGLAQGFIEPLEATALMLIQLSVEQFIAAMEGGEFERRQQDAFNRRVSEMFEGVRDYVVAHYQLNTRRDTDYWRANRANKNISDRLASLLDVWDRGGDFEAELERHGAKLMYLRPSWYCLFAGMGRFPAELRAAPQAVTAAVARQSLANMARAFRSHHRCLMGE

SEQ ID NO: 85940 - protein, 526 aa, Alteromonas confluentis
  misc_feature (1)..(526): tr|A0A1E7ZG93|A0A1E7ZG93_9ALTE Tryptophan halogenase OS =Alteromonas confluentis OX=1656094 GN=BFC18_02950 PE=4 SV=1
MQDTTQIKSVVIVGGGSAGWLTAALLAAQHSADIHITLVESPDVPLLGVGEGTWPTMRGTLQKIGIDEVTFLNACHASFKQGTHFHQWRTGNSNDEYYHPFSLPFNYFDTDCAAWWQREASQSSFAHAVTTQSTVCDHFLAPKQVETPPFAGVLNYGYHLDASQFAHLLKTHAVSKLGVTHVVDHVERVIAAPGNAIQGLTLKSGKQIKGDLFVDCSGFSARLIGEHFGEPLLSCKAQLPNDSAVALQCAYTQSDTEIPSVTRSTAQANGWIWDIALTNRRGVGHVFSSEYSAEDDAINALQQYILANSALAPKSRDDIAQQARLFRFQPGYRQRPWIQNCIAIGTASGFLEPLEASALVMTELAASHLAESLPRYHYQLPAAARQFNREFSTKWARIVDFLKLHYVLSERRDSDYWRKVTRMSDCSEQLYDWLTLWKTRSPSAADFSFREEIFPAASYLYVLYGMGFPTDFQHSASVLQHRQPQAFKQQEQHKLLQQHLAGLPGNRALLSQLAQIAVTSGKHHEQ

SEQ ID NO: 85941 - protein, 505 aa, Sphingopyxis witflariensis
  misc_feature (1)..(505): tr|A0A246JD86|A0A246JD86_9SPHN Tryptophan halogenase OS =Sphingopyxis witflariensis OX=173675 GN=CDQ91_20145 PE =4 SV=1
MNRVGDSRITKVVIVGGGTAGWMAAAALSRTMDNLSIRLVESDEIGTVGVGEATIPAIRLVNALIGIDENEFIRETGGTFKLGIQFHDWGGIGDVYMHAFGQIGRSLGMLPFQQYWLRGRSDGVAGRLGDYSLNETAARQNRFARLPQIPNTSLDGVAYAFHFDAALYAAYLRKIAEAAGVERTEGKIASVRRNAETGHVEAVVLENSTVIDGELFIDCSGFRALLIEEALETGFEDWTHWLPCDRAIAVPSANAGPARPYTQAIAHKAGWQWRIPLQHRTGNGHVFCSDFISEDEATATLLANIEGRPLAEPRTLRFRTGMRTKAWNGNVVALGLASGFLEPLESTSIHLIQNGIAKLLAHFPDRDFDAANIDAYNRRVRFDYERIRDFVILHYHANQRTDSPFWIRCREMGIPETLVRKIELFKSQGQIVREGDELFIEIGWFQVLTGQNIMPDGYHPMADQLTHDELAGFCADIETIVARTASHLPGHEDFIAQHCAAGVPA

SEQ ID NO: 85942 - protein, 525 aa, Paenibacillus curdlanolyticus
  misc_feature (1)..(525): tr|E0I5L9|E0I5L9_9BACL Tryptophan halogenase OS=Paeniba cillus curdlanolyticus YK9 OX=717606 GN=PaecuDRAFT_0941 PE=4 SV=1
MKERIQSVVILGGGSAGWMTASYLSKAFGDQLQITLIEADTIPKIGVGEATIPNLQRVFFDFLGLREEDWMPHCNASFKAAIKFVNWRKAPQEGEPDNYFYHLFGQVPDCDNVPLSHYWARRMLEDGDHEEMAYACYDKAPLLDAKLSPRMQDGTRKMSYAWHFDANLVAAFLRKLAVGWGVRHVVDELDNVELKPDGSIQALTMRKGGRYEADLFVDCSGFRGLLINQALKEPFIDMSDYLFCDSAIASNIPHDDERFGVEPFTSSIAMRHGWTWKIPMLGRFGSGYVYSSKFASEDEATEDFIKLWNLDPNKAKLNKIRFRTGRNRRAWVKNCVSIGLSSCFLEPLESTGLYFIYAAIYQLVKHFPDKSFNPTLINRFNEEIEGMFDDSRDFIQSHYLITSRDDTEFWRANKHELKISDALKHKLETYKAGLVVCPPLTTNESSYYNNFEMEFRNFWTNSNYYCMFAGMNWLPDQALPKLAYRPEAVKKANAMFAQLKKQTAELGTSLPSTYDYLKMLHGVTI

SEQ ID NO: 85943 - protein, 508 aa, Shewanella halifaxensis
  misc_feature (1)..(508): tr|B0TJC4|B0TJC4_SHEHH Tryptophan halogenase OS=Shewane lla halifaxensis (strain HAW-EB4) OX=458817 GN=Shal_114 6 PE=4 SV=1
MDIKRVAIVGGGTAGWLAANHLGKALLNNEQLSITLIESPDIPTIGVGEGTVPAIRQSLKSFGISETELIRRCDVTFKQSIKFVNWLDKHKHGQDNFYHHLFDMPGSVMEELTERWLSKKESRYAGSVSPQHAVCGAFRAPKNISDPEYAGKLGYAYHLNAAKFAELLGENAKERFRVEHIRATVQEVILGQGGEIKSLVTDSAGTLDFDFYIDCTGFASLLIDKALKVPFVNKAEQLFVDKAVVVQVPTAGDDIIPPFTISTAHQAGWIWDIALSNRRGVGFVYSSKYMDDETAINKLNKYLGGKLVAHQHRVIPMTVGYRERSWEKNCVVLGLAQGFLEPLEATSILLTDFSAGLLAQRFPTSTLQLPRIQQRFNHVMNYAWERVVDFIKLHYCLSDRDDSPFWVDNRDPATMSDELKNRLAMWQDFVPSREDFFSKFEVFDLENYLYVLYGMEHTPKGKVCCEQRCADSNVLQQRLNTLATHLVTELPQHRDLLEKIKRYGLQKL

SEQ ID NO: 85944 - protein, 501 aa, Massilia glaciei
  misc_feature (1)..(501): tr|A0A2U2HLA2|A0A2U2HLA2_9BURK Tryptophan 7-halogenase OS=Massilia glaciei OX=1524097 GN=C7C56_012655 PE=4 SV= 1
MQQNNVKKIVIVGGGTAGWMAAASLSKILGNKVALRLVESDEISTIGVGESTIPMIKMFNQVLGINEDEFMRETKATFKLGIEFADWGKLGDKYMHGFGKFGQDLWTVDFYQYWLKMHQAGKAPDLENYSINRMAAKAGKFMRPPADMGNSPLSEITYAFHLDAGLYARYLRKFSEAHGVVRTEGKVAETVLDPVNGHVAAVVMENGERIEGELFIDCSGFRGLLIEQALKTGYEDWSHWLPCDRAYAVPCELAGELLPYTRATARPAGWQWRIGLQHRTGNGHVYSSKFMSDDEAASILMNNLDGKALAEPRQLRFVTGKRKKVWNKNVVAIGLSSGFMEPLESTSIHLIQSTVARLITFFPDRGFDQADVDEFNRQCDFETERIRDFLILHYNATGRDDTPFWDHCRTMVLPESLRRKLELYKAHGRIVRDNNELFAEVGWLQVMHGQGIKAGGYHPLVDLLGEREVGEYLAEVAGVVGKCVSVMPSHAQFVAAIIAAK

SEQ ID NO: 85945 - protein, 497 aa, Pararheinheimera mesophila
  misc_feature (1)..(497): tr|A0A3P3QGL9|A0A3P3QGL9_9GAMM Tryptophan 7-halogenase OS=Pararheinheimera mesophila OX=1547515 GN=EIK76_12555 PE=4 SV=1
MNNVHNRIKKVVIAGGGTAGWMTAAGLTKLLGKNLEVVLVESDDIGTVGVGEATIPTLHIFHRLLNIKESEVMAATNATFKLGIQFENWKALGEDYIHSFGFLGKDCWACGFQHFWVKGRQKGIATEIGDYCVEHLGARQGRFAVLPNQDLNHAYHMDASLYAKFLRRISEQHGIRRMEGKIREVQQHMDGTISALLLESGELVEGDLFIDCTGFRALLIEQTLNTGFEDWSHWLPCDSAYAVQTKTTHEPVAYTRAIARQAGWQWKIPLQSRVGNGLVFCSKFITEAEAKQTLVDNLEGEMMFEPRLIKFKTGTRRQHWNKNCVAIGLSSGFLEPLESTSIHLIQRSIIRLLQMFPSNGINSADVAEFNRQTKIEMDNIRDFIILHYKATERTDTKFWRYCKDMEIPDTLAHRMELFKQSGKVYKFAQELFGESSWLQVLIGQGLMPEQYHPIVDLMPDSELNDFLMSIKQNVKRTVSQFPTHHEFIQHYCKSSLV

SEQ ID NO: 85946 - protein, 498 aa, Alteromonadaceae bacterium
  misc_feature (1)..(498): tr|A0A4R5GZT1|A0A4R5GZT1_9ALTE Tryptophan 7-halogenase OS=Alteromonadaceae bacterium M269 OX=2546219 GN=EYS14_ 19895 PE=4 SV=1
MTKPVKKVVILGGGTAGWMAAALLQKVVGPIIDVELVESEAIGTVGVGEATIPPIKLVNQVLGFNEAEFIKETNATIKLAIKFENWKRQGESYYHTFGAPGKSFAFCHFHHFWKRAVDNGYSESLWDFDLNYLCCEEGKFAQINSKDPILDLVYAYHFDASLYAKYLRKLAEGFGVTRTEGMVQKVEQNEQGYIEALHLKSGQKIAGDLFIDCSGFKGLLIQETLGAGFDDWSHWLPCDRAVAVPSERFEHTAPYTRSIAHSAGWQWRIPLQHRNGNGLVYSSSHYDEQDAMDLIMQNLESEPLDDPRVIRFKTGRRRKQWHRNVVSVGLSSGFLEPLESTSIHLIQSAIVRLIQLFPHQGIDDANVAEYNRQSKVEFEQIRDFLILHYHLNERDDSQFWRDLREMEIPDTLAHKMSLFAESGGLFREQNDLFLEPSWMQVMMGQGIMPKDYHPIANNMPQDKLFAMLNEILRVKREPLSKLPMHDAFLKTYCDSYRG

SEQ ID NO: 85947 - protein, 505 aa, Luteimonas cucumeris
  misc_feature (1)..(505): tr|A0A562KXR4|A0A562KXR4_9GAMM Tryptophan halogenase OS =Luteimonas cucumeris OX=985012 GN=IP90_02990 PE=4 SV=1
MQNDADRDAESPKPVRRVVIAGGGTAGWMAAAAVSRLFGETLEISLVESEEIGTVGVGEATIPTLTTFHRLLDIDEREFMAAAQGTIKLGISFENWRSEQHRYIHSFGSTGKDHWSAGFQHFWRRGRELGLAGSYDDYCVELQAALQDRFAHLKHYRMNYAYHLDASLYARFLRGMSERNGCRRIEGKIAEVLTDPGSGFIRALRLERGEVIEGDLFIDCTGFRALLIEQALGVGFEDWSQWLPNDRAIAVQTSAVRDAVPYTRAIAEKWGWQWRIALQHRVGNGIVYSSRHVGDDEARQVLLGSVEGEVIKSPWPVRFRPGRRLQCWHRNCVALGLAGSFIEPLESTTIHLIQRGITRLMQSFPHVVSQAGIDEYNTQMADELQHVRDFVVLHYHATERRDSSYWEYLANMTLPATLQRRIDLFRETGTVFHAAGELFAENSWIQVMMGQGIEPRRHHPAAETMSETELARFLADIRGSVDRIVAQLPPHMDYIRRYAPGAVPA

SEQ ID NO: 85948 - protein, 493 aa, Pararheinheimera mesophila
  misc_feature (1)..(493): tr|A0A3P3QII9|A0A3P3QII9_9GAMM Tryptophan 7-halogenase OS=Pararheinheimera mesophila OX=1547515 GN=EIK76_12140 PE=4 SV=1
MQQVKKVVVAGGGTAGWVAAAALSKRLQGLIEVVLIESEEIGTVGVGESTVPPVQLFHNLLGIDEQEFMKATDATFKLAISFEHWGRTGDQYFHPFGVTGKGSFLTDFQHYYLHGLTQGVDAPFGDYCYELQAAKQHKFGKTEKSTINYAYHLDAGRYARFLRKFSEDLGATRVEGKIAQVQQHVNGDIRSVILESGEEISGDLFIDCTGFRALLIEQTLQTGYERWDHWLPCNKAVVVQTEPGPTIHPYTRAIAHDSGWQWKIPLQHRAGNGLVYASDYLSDEKAKQRLLDGLEAPALFEPRVLHYQTGRRKKLWNKNCIAIGLSSGFIEPLESTSIFLFMSGIIRLLRLFPFHGVTPALMDEYNQQSITEVEKIRDFIILHYHQTERNDSPFWDYCRTMTIPDTLAHRMELFRESAHAFQTGDEMFRLESWSHVMLGQRLQPNSYHQLVAGLGQGELSRHLQSIRETINAAVDRLPSHRDFLRQYCPSNLS

SEQ ID NO: 85949 - protein, 507 aa, Pelomonas sp.
  misc_feature (1)..(507): tr|A0A0Q6WVM4|A0A0Q6WVM4_9BURK Tryptophan halogenase OS =Pelomonas sp. Root1237 OX=1736434 GN=ASC91_28615 PE=4 SV=1
MSDPSIRKIVIVGGGTAGWMAAAPLAQRFAQAGQGACEIVLIESPDIGTIGVGEATLPPIRAYNQTLGLDGAEFVKRTQGSFKLGIEFRDWGHVGHRFFHGFGDFGPAIDARAPWQHWLRLQRQVDGLPSYEDWSTSTVMARRNRFTPPEGGAPSAANAYSFAYHFDAGLYAAFLREYAMARGAQRIEGLIVDVELRPEDGFVAAVKLKDGRRIDGDLFVDCSGFRALLIGGAMQSPFEDWSALLPCNSAQAVPSERVEPLTPYTMSTAKAAGWQWRIPLQHRTGNGHVYCSQFISDDEAASTLLAGLDSKALDTPRQLRFTTGRRKQGWVRNVVAIGLASGFLEPLESTSIQLIMDGVGRLIQFFPDRQFKPHLAAEFNRRMALQYESIRDFIVLHYKLTDRRDAELWRYCAAMPIPDTLAHQIELFRSAGRVAILDPDGFAEPSWVSLFFGLGLRPESYDPFVDHIDPEALLQHFVRLRQAITHTVGGMPEHGDYVARHVKAPSA

SEQ ID NO: 85950 - protein, 495 aa, Bowmanella sp.
  misc_feature (1)..(495): tr|A0A4V6MZS3|A0A4V6MZS3_9ALTE Tryptophan halogenase OS =Bowmanella sp. JS7-9 OX=1605368 GN=TK45_15570 PE=4 SV= 1
MRVQAVQKVIILGGGTAGWITASLMAKVLGKVVSIELIESDQIGTVGVGEATIPPIQNFNAALGIQESEFLRATKGTIKLGIQFENWWKQNSQYMHAFGNIGKNFPFCDFHHFWRRAQDLGIEQDYWDFSLNYQAAINNKFAPVQQIEGTNLPGIAYAYHFDAGLYAQFLRDWSIQRGVVRTEGTVAKVNVDEATGNIRSLQLQDGNEKSADLFVDCTGLRALLIEQTLNTGYEDWSHWLPCDSAWAVPCERTEPLVPYTRSIAHEAGWQWRIPLTHRTGNGIVFSSKFCDPEQAKATLLANLDGAPLNEPRLIQFKTGRRRKQWHKNVVAIGLSSGFLEPLESTSIHLIQSCATRLIKCFPHEGIRQQEVDEFNRQSALEIERIRDFIILHYKANERGDTDFWRYCQQMDIPDTLARKIDLFKSTGKVFRDYDDLFTEAAWQQVLIGQGVTPQDYMSIADSLSREQLQDLFDSLKTLINRTVDKLPPHDAYLPR

SEQ ID NO: 85951 - protein, 531 aa, Planctomycetaceae bacterium
  misc_feature (1)..(531): tr|A0A2E5K825|A0A2E5K825_9PLAN Uncharacterized protein OS=Planctomycetaceae bacterium OX=2026779 GN=CMJ82_0411 5 PE=4 SV=1
MTRLIRATLFINYLLTLQHNKSENMSGDKDSLAVRRIVIVGGGTAGWMTAAYLAKFTHLSECEITLIESPDQPTIGVGEASIPSLVRFVRNLGFDEVEMMKYCHATYKLGIRFDDWTGKGNSFWHPFGVCGSRINHADLFHFWYREIFNGNDEIANYAEYSLQVQLCEQNKAPRSFRDHSPIMESGGYAYHLDSHRFAEYLKAKAIPMGVLHYLENVSAVERGSDGQLISIRTETNNIVSGDFFVDCTGFESLLIEKELGSIFEKWDDELLCDRAIVCRTDATAPLPPYTISKSLSSGWAWRIPLSTNTGFGYVYSSEHLTDAEAKKELAIEFDLNADLLTQPPIEMKIGCRPKSWVHNCVAIGLSSGFTEPLESSGIHMIQMAIETLLDLFPDKTMNSSLQDSFNSRIYQSFMAIKDFLLIHYLFSATQDGAFWEDARNVAMSPRLNAILENYREHGWIGVAGDEVFGEASFHHLLSGCSVLPRRPHRLSEMVARDEIIAIMDQIRGRNSEVVSKMPEQSLLIDFFMNSP

SEQ ID NO: 85952 - protein, 538 aa, Burkholderia pseudomallei; identical to SEQ ID NO: 84273
  misc_feature (1)..(538): tr|A0A0F6L4G5|A0A0F6L4G5_BURPE Tryptophan halogenase OS =Burkholderia pseudomallei MSHR4000 OX=1435370 GN=prnA PE=4 SV=1

SEQ ID NO: 85953 - protein, 511 aa, Pelomonas sp.; identical to SEQ ID NO: 84497
  misc_feature (1)..(511): tr|A0A0Q8GM57|A0A0Q8GM57_9BURK Tryptophan halogenase OS =Pelomonas sp. Root662 OX=1736580 GN=ASD88_20715 PE=4 S V=1

SEQ ID NO: 85954 - protein, 401 aa, Unknown
  misc_feature (1)..(401): tr|A0A0R2W0N8|A0A0R2W0N8_9GAMM Tryptophan halogenase (F ragment) OS=SAR92 bacterium BACL16 MAG-120619-bin48 OX= 1655625 GN=ABS23_11955 PE=4 SV=1
EAEFIAAVQGTFKLGISFENWKQRGENYIHSFGLTGQDCWAGGFQHFWLKGRQRGISEDFGHYSTELMAAKAGKFAVLPNNGLSYAFHMDASLYAKYLRKIAEQHGGQRVEGKIVQVNLNSDSGFIDSVTLASGRTLEGDLFVDCSGFRGLLISETLKTEYDDWSQWLPCDSAVAVQTASVSEPVPYTRAIARESGWQWRIPLQSRVGNGLVFCSRHLSDDDAKAALLANVEGETLTQPRVIKFRTGQRVEHWRKNCVALGLAAGFVEPLESTSIHMVQRGIIRLLQMFPLDGISAPDIVEFNRQMTDEYLFIRDFVIMHYHVTERDDTAFWRECKSMAIPASLQHRLNLFKQTGRVFQQAGDVFAENNWTQVMIGQGLIPDQYHPIVDMMSDTELDNFLK

SEQ ID NO: 85955 - protein, 525 aa, Unknown
  misc_feature (1)..(525): tr|A0A0R2W430|A0A0R2W430_9GAMM Tryptophan halogenase OS =SAR92 bacterium BACL16 MAG-120619-bin48 OX=1655625 GN= ABS23_06750 PE=4 SV=1
MTTKIQKLVIVGGGTAGWLSAGIIAAEHSATATDNTAPDGFQLTLIESPDISTIGVGEGTWPSMRSTLQKMGVSETDFFRECSASFKQGTLFTGWTKGSNDTYTHPFTTPHGYAETNLAPHWQPLRNQVKFAEAVSPQSALFPAKLAPKQITTPEYAFNVNYGYHLDAGKFAEFLRKHCVEKLGVKHIKANVIGINSAANGDIASINTDSHGTIDGDLFIDCSGSRAILLGEHFGVGSCNKNSVLFNNTALAAQVPYNDEQDPIESCTLSTAQTAGWVWDIGLPTRRGIGHVYSSAHNSEEQAGQELLNYIGKTVGEKAAANTTMRKVQFSPGYRDEFWHKNCVAVGMSAGFIEPLEASALVLVELCAAMIAEQLPANREVMDLVAKRFNQKFLYRWERIIDFLKLHYILTQRTDTEYWRDNCRAESIPDSLQESLSLWRHQSPWHRDTRHVDEMFPSASFQYILYGMDFETQPNQTQRRSEMEAQKVAGTLFQENAMRTQKLCTSMPSNRDLINKIYRYGLQKI

SEQ ID NO: 85956 - protein, 530 aa, Erythrobacteraceae bacterium
  misc_feature (1)..(530): tr|A0A4R0NUV9|A0A4R0NUV9_9SPHN Tryptophan 7-halogenase OS=Erythrobacteraceae bacterium CFH 75059 OX=2528174 GN =EYB45_07140 PE=4 SV=1
MAPSRNVRAGVAASPRCNHGSWVRRGAGVSERGLRHVVIAGGGTAGWMAAAALGVLSDLEVTLIESEEIGTVGVGEATIPQIRLFNAAVGLDEGEFFRATRGSYKLGIMFEGWSGEGSRYMHAFGPTGAAHGVLPFHHHWLHARSAGLARDFGAYSLNRVAATAGRVPSPLGRGDEPQSPYAYHFDAALYAKLLRAHAEAAGVRRVEGRIVDVVLSSDGEAVEALVLASGSRIPADFFVDCTGFRAVLLEALAPREFDNWSHWLPCDRAWAVPCAAAGDFTPYTRATARQAGWQWRIPLQHRIGNGYVFCSRFCDEEDARRVLLANLDGEPESDPRLLSFTTGTRRRHWVGNCVALGLAAGFMEPLESTSIHLVQSSIARLLQLLPSDPRATCCAVEFNRQAQSEWCRIRDFLILHYHANGRQGEPFWDERRAAALPDTLVEQLELWRHTATVSRRDEDLFTLEGWSQVLIGQNILPACVHPLAAGAEPEALRARLDAILARHAAAVERMPTHAAALRQAMMTEPQRKRA

SEQ ID NO: 85957 - protein, 514 aa, Caulobacter sp.
  misc_feature (1)..(514): tr|J2Q9U9|J2Q9U9_9CAUL Tryptophan halogenase OS=Cauloba cter sp. AP07 OX=1144304 GN=PMI01_00880 PE=4 SV=1
MARPIKNIVIIGGGTAGWLTAGIIAAKHRARAATGFSVTLVESPNTPIIGVGEGTWPTLRTTLATIGVSETDFFRECDAAFKQGARFARWTTGAADDAYYHPLMLPQGFSQVNLAAHWLAGDGAQSFCDAVTPQGRLCDDGLAPKTITAGPYQGVANYAYHLDAGKFAPFLQRHCCDKLGVRHVLADVRSVAMTEDGDIRGVVTEQCGEIQGDLFVDCTGFRSLLLGETLGVPFRDCGDVLFCDTALAIQVPYENENSPIASHTISTAQSAGWVWDIGLPTRRGVGHVYSSRHISDEDAERELRAYIGPAGRDLPARKIGIRSGHRETFWKRNCVAVGLAAGFLEPLEASAIVLIELSAKMIAMQMPACREVMDVVAARFNATTHYRWGRIIDFLKLHYVLSKRSDTAFWRDNRDPETVPERLADLLRLWRHQPPWLHDEFDRVEEVFPTASYQYVLYGMGFRTEIEPEALADERAMAERAMRENVVQTERLRANLPRHRDLIRKIVEHGLQPV

SEQ ID NO: 85958 - protein, 415 aa, Pseudomonas sp.
  misc_feature (1)..(415): tr|W2DA36|W2DA36_9PSED Tryptophan halogenase OS=Pseudom onas sp. FH4 OX=1284393 GN=H097_20940 PE=4 SV=1
MPTVEMEHRQVVVIGAGPSGAIAAALLKRKGHDVLIIERQYFPRFSIGESLLSHCIDFIEEAGMLDAVNAAGFQLKTGAAFAWGERYSAFDFGDTFSDGKPTTFQVQRADFDKLLADQAALQGVEIRYGQTLVGVDFAAGHRYLHVRRENGREYHIKAGFVLDASGYGRVLPRLLDLEAPSNFPLRQAVFTHVEDRIEHPGFDRSKILITTHPTQRDIWFWTIPFSNGRCSVGVVAAKAHFDGHDADLDACLRGFIEQTPSLSRVLANALWDTPARTIGGYSANVTTLHGPGFALLGNAAEFLDPVFSSGVTIAMRSASMAAGLLHRQLTGESVDWQTEFAEPLKRGVDTFRCYVEGWYAGTFQDVIYHPGSSPEIRRMISSILAGYAWDERNPFVSEPKRRLRMLSEICAGDNV

SEQ ID NO: 85959 - protein, 506 aa, Pseudoalteromonas sp.
  misc_feature (1)..(506): tr|A0A4Q6YIH5|A0A4Q6YIH5_9GAMM Tryptophan 7-halogenase OS=Pseudoalteromonas sp. CO133X OX=1777237 GN=EXT40_122 15 PE=4 SV=1
MKEIKKLAILGGGTAGWMCAAYLSKFHTDLDITLIESSKIGAIGVGEGSTPHLKQFMQQLGIAEQQWIPYCDATFKAGIYFKNWNGDHRAYFHPFYSEMDINTAEVFFVNANARRRGHEQWCGPDSYFLTGHLAKNALSPKAKSPMVREQHYGYHFDAKKLAHILKGYAIERGVTHIDDEFVAAITNAQGEISELKLKHSAPVNADFYIDASGFNALLIGETLGCRFQPFTDQLLNDSAVTVACPQNMNQPLQAATHSTALSAGWLWQIPLTSRVGTGYVYSSAFLSKQQAEQELAATLNISVNDVEFRHVSMKVGARSSAWQKNVMAIGLAQSFIEPLEATSLMVTQQSILWLSKAISKIQTSPTQTEKLRLHTNQQLHYLVNGIKDYICAHYTTSKRRDSAYWRAVTQTTEIPTRLEPLLAAWRNGDDFDAYLYHQYPESVYSRPSWYSLLAGMDYRDSALNAPTESAQQEIDLAAHAYLESLCSKHFEPHIMQLKAMQQNNFE

SEQ ID NO: 85960 - protein, 516 aa, Bowmanella sp.
  misc_feature (1)..(516): tr|A0A4Q9XRF5|A0A4Q9XRF5_9ALTE Tryptophan halogenase OS =Bowmanella sp. JS7-9 OX=1605368 GN=TK45_05990 PE=4 SV= 1
MTTSNSTKKTLTIVGGGSAGWMTALYLQRYFHQQGVQIHLIESDKIGPIGVGEATVHSIRFLFAALGLDEQELMRETNATLKLGILFRNWMKPSAAGVHEYFHPFEQQRPAGAIDISSEWVMGQHFNHQRYDQGVCLSSLLAEKSASPKTPMSRPYQGVVPYGYHLDATLLGQFLRKKGLEAGITYQVATVTNVNVEDGEISSLQTSEGVHQADFYIDCSGFSGKLIDALQPDNWESFTDVLPCNKAVAIQRDYAPGETPRPFTTSTALSHGWAWQIDLVNRQGNGYVYDGNRLSAEQAEAELREFLGDEAATRSALHLDMKVGFRPQSWVGNCVAIGLSSGFIEPLESTGLHLINVAARLFATHFSAANISDSVRRSFNRQMRGVYEDLKQFIVLHYCLTDRDDTDFWRQAQASAEGCEGLAEKLTLWKHKVCEFMDLSGGYSTTFNDENYRYILYGMGHLPALHLQPSSTQNQSLFDQVNHMAANLLLQTQSHLAYLQHLHGKPLFSAKDTRSQ

SEQ ID NO: 85961 - protein, 503 aa, Phenylobacterium deserti
  misc_feature (1)..(503): tr|A0A328AD71|A0A328AD71_9CAUL Tryptophan halogenase OS =Phenylobacterium deserti OX=1914756 GN=DJ018_13510 PE= 4 SV=1
MDERIRSICIVGGGTAGWMTAAALTKVLGPEYARITLVESDEIGTVGVGEATIPQIGIFNRLLGIEEDEFVRRVNGTYKLGIQFVDWGRKGHTYFHPFGPFGVDMEGVSFHAFWLRLMQGGDPRPITDFSIQSAAADAGKFMRAITSDPRSMLSKIAYAFHFDAGLYARFLRELAEARGAVRQEGRIVEVAKRGSDGFIEAVVLQDGTRIEADLFVDCSGFRGLLIDGAMGAEFEDWSHWLPCDRAVAVPCERVSETTPYTRSTAREAGWQWRIPLQHRTGNGYVFSSAHISEDEATAVLLKNLDGAPTADPRVLRFKGGVRKTSWIKNCVALGLAAGFIEPLESTSIHLVQSGIAKLLTMFPSRSFHQADIDRYNRITAQEWEQVRDFIILHYKVTERSDTPFWDHVRTMDVPEALAEKLRVFQTHGRVFRENEELFNDTSWFAVLIGQLMTPNSYDPVADVLSLEETRRRLDQIQSAIATSVDYMPKHDRFIADNCAAARV

SEQ ID NO: 85962 - protein, 504 aa, Novosphingobium sp.
  misc_feature (1)..(504): tr|A0A102D3Z2|A0A102D3Z2_9SPHN Tryptophan halogenase OS =Novosphingobium sp. FSW06-99 OX=1739113 GN=AQZ49_17990 PE=4 SV=1
MDSNPHTLRSIVIVGGGSAGWMAAAALANAVGTAIAITLVESDAIGTIGVGEATIPPIHSFNARLGIAEADFLRATRGSFKLGIEFVGWGTAQSRYFHPFGSYGADFDRVSLHHWWLRERQRGDATSFDDYTMCWALARDNRFGPPVDNPRDVRSTHSYAYHFDAGLYARFLRAYAEARGVRREEGRVTGVGRDGASGLITHVTLDDGRQIAGDFFVDCSGFAALLIERTMQAGFESWAHWLPCDSAVALPCANAGPITPYTRSTAHAAGWQWRIPLQHRQGNGHVYCSAMMDDDAALGVLHAHLDAPATADPRVIHFTAGRRRKAWVGNCVAIGLSSGFLEPLESTSLHLIQSGIERLLLVLPDRRHDPLHAEEFNRATAAEYERIRDFIILHYHAQTRPEPFWRQCAAAPLPDELAYKIRHWVDAARLVSPQDELFKNPSWLAVYLGQGMIPARYDTMADVRAGSVDAATHLRRLREMMRAAAQTFPAHDAVLAQFAPQPAA

SEQ ID NO: 85963 - protein, 504 aa, Massilia umbonata
  misc_feature (1)..(504): tr|A0A4P8I286|A0A4P8I286_9BURK Tryptophan 7-halogenase OS=Massilia umbonata OX=864828 GN=FCL38_20530 PE=4 SV=1
MVNHVVIVGGGSAGWLTAGVIAADHPSLTVTLIESPDVAPIGVGEGTWPSMRDTLHRIGVSEAAFFRECDAAFKQGSRFNGWRHGGGAEDYYFHPFVLPQGFGEADLVGCWQRDLPNVPFADLVSFQPHLCVQGRAPKQPATPEFAAVANYGYHLDAGKFGVFLRKHCLEKLGVRYVPDHVTAVNSRENGDIASLQTKEHGALEGDLFIDCTGMQSLLLGRHYGVPLLHRKDVLFNDSALAVQVPYASADSPIASQTTSTAQRAGWIWDIGLPTRRGIGHVYASSHTTDEQAEADLRAYVGVDMPTPRKLTFQPGYREQFWHRNVVAIGLSAGFIEPLEASALALVEMSAAMVSDDLPATRDAMDIVARRFNDAFTYRWERVIEFLKLHYVLSGRTDSDYWHDNRRSETIPARLRELLVLWRHRPPSRLDFNRIEEVFPSASWQYVLYGMDFRPDRERITRRDSTTGADGYFREAAELTRRMLRALPSNREMIDHIRLHGLQKI

SEQ ID NO: 85964 - protein, 521 aa, Xanthomonas axonopodis
  misc_feature (1)..(521): tr|A0A098PUH0|A0A098PUH0_9XANT Tryptophan halogenase OS =Xanthomonas axonopodis pv. vasculorum OX=325777 GN=GW1 5_0218920 PE=4 SV=1
MSHTTPLDPQPRPVRRVVIAGGGTAGWMAAAALSKLLGRHLQITLVESDEIGTVGVGEATIPSLVTFHRLLEIDEAAFMAATQATIKLGIAFEHWRDVDQHYIHSFGHAGTDHWSAGFQHFWLKGRQRGVARDFGDYCLELRAAQEGRFAHLPNGGMNYAYHLDAGLYARFLRRFSEGFGVTRVEGRIGQVETDAQSGFLTALTLQDGTRVEGDLFLDCTGFAGLLIGKTLGVGSDDWSRWLFADSALAVQTESVGPPVTYTRSRADQAGWMWRIPLQHRVGNGIVYSSRYMDQDGARAVLERNLTGRALTEPRPLRFTPNRRHRVWEKNCVALGLASGFLEPLESTNIHLIQRGIIRLLQTFPQVINAVDIAEYNRQAAQEINHIRDFVILHYHATDRRDTPFWRDCAAMEIPDSLRHRMELFRQSGRVFHQANELFAENSWVQVMLGQGIVPQQHHPVADLMGDAELSRFLETIRTRVEAALVRLPAHADFLQRYCPAPPLPEPAARVPAPPVMATPAG

SEQ ID NO: 85965 - protein, 505 aa, Pseudoxanthomonas sp.
  misc_feature (1)..(505): tr|A0A4Q8LSS2|A0A4Q8LSS2_9GAMM Tryptophan 7-halogenase OS=Pseudoxanthomonas sp. NML140781 OX=2480812 GN=EA656_ 14650 PE=4 SV=1
MSVSSIRNIVIVGGGTAGWMAAAAFARVLGPTYNVTLVESEQIGTVGVGEATVPHIKAFNNLLGVDEAEFVRQTQGTFKLGIEFVDWHHVGDRYFHGFGSEIGHPLGLLPFHQYWIKARRAGWAKPLGHYTLNTVAAPQGRFMTSASDVPPGSPLANIAYAYHFDAALYARFLRSYAEQRGVRRIEGIVETVHQHPESGDVIAVTLQDDTRVGGDLFVDCSGFRGLLIEQALHTGYEDFTHWLPCDRALAVPCEKVGPPVPYTRSTARAAGWQWRIPLQHRTGNGYVYSSAHLSEDEAAATLLANLDGKPVGEPRPLRFTTGRRRKCWNKNVVALGLASGFMEPLESTSIHLIQSGISKLLELFPREGLSPVLRQRYNDRLAFEFDRIRDFLVLHYKATTRSDSSFWRQCSDMAIPDTLQTALDLFADSGRFYRNGEEMFAEISWVQVMIGQGILPASYHPLVDQIPDADLKGFLVSIERTIAHCAHAMPPHEAFIARTCAAAVS

SEQ ID NO: 85966 - protein, 496 aa, Caulobacter sp.
  misc_feature (1)..(496): tr|J2PDF3|J2PDF3_9CAUL 2-polyprenyl-6-methoxyphenol hyd roxylase-like oxidoreductase OS=Caulobacter sp. AP07 OX =1144304 GN=PMI01_04480 PE=4 SV=1
MAEQVVKKVVIAGGGSAGWMAAAALSKQLGPLLDITLIESDDIGTVGVGESTVPTARTFNALLNLDEPEFMSACQATFKLGISFENWGEIGDRYIHSFGQIGKSTWLGDFHHFWLQAKAQGFGGDLGDYCLELKAAEDHRFFTDENASLNYAYHIDATLYGRYLRAKSEGKGVRRVEGKITSVRQRSDDGFIEALVLESGEVIEGDLFIDCTGFRSLLMGGALEVGFEDWTNWLPNNSALAVQTRSDAPAYPYTRAIAHRAGWLWGIPLQGKIGNGFVYSSDHMSDDEAQAGLRDMIEGEMVAEPRLIRFRAGRRRKAWHKNCVALGLAAGFIEPLESTSIHMIMVAVHRLLQLFPFAGCNEALSDRFNHLADDEIEKIRDFVVLHYKLTERTDSPFWDHCRTMAIPDSLAHRIALFRDNGHVFRAPGELFQTDSWLQVMLGQRLQPGGHHHMGRLMPPEQLRQALNDLKGNIARAVDRMPSHQDFVNRYCPIAPA

SEQ ID NO: 85967 - protein, 504 aa, Sphingomonas sp.
  misc_feature (1)..(504): tr|A0A4Q0GRY4|A0A4Q0GRY4_9SPHN Tryptophan 7-halogenase OS=Sphingomonas sp. UV9 OX=1851410 GN=EQZ23_06165 PE=4 SV=1
MADHPLRIVIAGGGTAGWMAAATFARFLETGYEIDLIESDAIGTVGVGEATIPQIHLFNDALGLDEDAFLRATGGTFKLGIEFVDWFKPGHRYMHAFGDVGRDVGLLPFHQYWLRARSLGLAGDLGAYSLNTHAALAERMQRGAARTARTLPSMPYAYHFDAGLYARYLRRYSETRGVNRIEGEIVRVTRDGESGDVSGLVLENGTTVAADLYIDCTGFRGLLIEEALGTGYEDWTHWLPCDRAIAVPSARSEAFTPYTRSTAHTAGWQWRIPLQHRTGNGVVFSRAHMSEDEATATLLAGLDTPAMADPRTIAFRTGKRNRMWNRNVVALGLAAGFMEPLESTSIHLIQSAISRLLKLLPGRVIADADRTEFNRQSDFEYERIRDFIILHYKATARDDTPFWRECRDMAVPDTLAAKIELWRGNGHIVREHEELFTEVGWLQVLAGQGIIPAGHHPLADAISTNDLGEFMDTIDKLNAREVVQMQDHAAFVAQHCAAPAGLGA

SEQ ID NO: 85968 - protein, 504 aa, Caulobacter sp.
  misc_feature (1)..(504): tr|J2PUT6|J2PUT6_9CAUL Tryptophan halogenase OS=Cauloba cter sp. AP07 OX=1144304 GN=PMI01_02808 PE=4 SV=1
MAHLNKIVIVGGGSAGWICAAMLSHYFQNGPTQVELIESEEIGTIGVGESTIPPFLQLIRTLGIDEQDFIQQTQAAFKLAIRFENWRKKDEVYYHPFGQIGGPLEVNEFYQCWLRAKQNGHPSGLQDFAPATVMADTGKFMLPGKAQRTMIANANYALHIDARLVALYLRKFAEARNVKRTEGIVTDVALRADGGVEKVIMKDGREVAGDFFIDCSGFRSLLIGKTLGEPFRDWSDVLLCDRAVATQTENISPPHPYTLAQAQDFGWRWRIPLQHRAGNGYVYSSKYLSDDEATATLLSQTEGEVLRDPWVVHFKTGMRERLWVKNCVAIGLAGGFIEPLESTALHLIYKGMDYLLRFFPDMDADPTLAAEYNRRMTVDYEEIRDFVVLHYATTQRDDTPFWREYQKVELPESLQQRIALFKASAVLRDGVDDMFRAPSWQSVMEGMGIRPQRYQQLVDRIPLSVINNMLDKSAPMLAEFVATLPNHEDFLREHCPAEPLKRSA

SEQ ID NO: 85969 - protein, 509 aa, Sphingomonas sp.
  misc_feature (1)..(509): tr|A0A4Q0GTS1|A0A4Q0GTS1_9SPHN Tryptophan 7-halogenase OS=Sphingomonas sp. UV9 OX=1851410 GN=EQZ23_06180 PE=4 SV=1
MDGLGQHIVILGGGTAGWMTACLVAHRWSARGVRVTLVESPEIGIVGVGEGSTPQLKHFFDTLGIAEADWMPACDATYKLGIGFEGWSDRAGHERYFHPFPTALDGHTAPQFFYNARARRTGRDVEAHPDRFLLPARLAAESCAPQPAANFPFEVSYGYHFDAYKVGAFLASHATGTLGVVHLQRRIASVERIPAGEVVALIDTAGDRIAGDVFIDASGFRSTIFAALDVPFVSYADALFNDRAVVMPIAHTPGAPIPSQTRATALSAGWAWHIPLTSRIGNGYVYSSRHLTEAQAEAELRAHIGADAGEARHLAMRVGRVRDSWSHNALAVGLAQGFLEPLEATALHLVIATVEAFLDGVDTGGATDTVRTAFNTRIAARYDGVRDYIVAHYRLNQRHDDPTGYWAESRGVEVLSDDLKLLMSTWFTGGDMVAAIDRAGLARYYSAISWHCLFAGYGTFPDAARFPPPGADIDPVDIPKIADFLTRCASNFGSHASRLHQLADHKDYV

SEQ ID NO: 85970 - protein, 507 aa, Sphingomonas sp.
  misc_feature (1)..(507): tr|A0A5B8LDA8|A0A5B8LDA8_9SPHN Tryptophan 7-halogenase OS=Sphingomonas sp. HKS19 OX=1813879 GN=FPZ24_00095 PE= 4 SV=1
MIDRPPSPIKTITIVGGGTAGWMTAGLLSHLFKSYTIRLIESDEIGIIGVGEATIPGIRDYVNMAGIDQIEMIRATQATFKLGIDFVGWRDGTDRYFHGFGRIGQDFMWLHTHQLWLAQRERGGARHFDDYALNCRAGMANKFCLPDTSSPGSPIAGLDFAYQFDASLFARYLRERSEPMGVERIEGKIVDVALDPANGHVAHVVLEDGRTVDGDLFVDCSGMRGLLIGQALGVEYEDWNHWLLNDRALAVPCERVEPLTPYTRVTARDHGWQWRIPLQHRTGNGHVYSSDHISDDEAASVLLANLDGKPLADPRPVRFRPGKRHHAWEKNVVAIGLSSGFLEPLESTSIHLIQTGITRLIALFPHQGFAAADIAEYNRRHDFEFTDVRDFIIAHYKVTERADTPYWDYLKNIQVPDSLASRLELFASSGRFFMRGAGELFREESWVQVLLGQGLKMQPDPNVRMVPDAVQDEFLADIVDVVADVADAMPDHAAFIDRHCKAPPLPA

SEQ ID NO: 85971 - protein, 501 aa, Sphingomonas sp.
  misc_feature (1)..(501): tr|A0A1I3ML93|A0A1I3ML93_9SPHN Tryptophan halogenase OS =Sphingomonas sp. NFR04 OX=1566283 GN=SAMN03159338_0466 PE=4 SV=1
MSAPLSHIAIIGGGTAGWMAAAALSRVLDTRAIAITLVESEAIGTVGVGEATIPPIQAFNALLGIDEAEFLRATKGTAKLGIEFVDWQAKGTRYFHPFGIHGIDFGAIPFEALWQRARLAGEAAPLEAYSICAEAARLGRFQRPATSGNNPLTHLGYAYHFDAALYAGFLREKAEQWGVRRQEGRIVTVARDADGAIASVVLENGTRIAADFYIDCSGFRSLLLGETLGVAFEDWAQWLPNDRAVAVPCALGPEGRSPFTRSTARGAGWQWRIPLQHRVGNGLVYASAHCSDAEAEAQLLGSLEGAPLAEPRLLRFQAGRRARFWEKNCVALGLASGFLEPLESTSIHLVQAGIARLLEMLPVGGGTPADIRRYNRLMAAEFETIRDFLVLHFHVTARDDTDYWRHLRTMALPDTLAERIAIYRASGRLYREADELFSKTSWLAVLHGQGVDPSGYDPIADGMPRDEAAARLARIAEVTALAASRMPTHEAFLHESGALQR

SEQ ID NO: 85972 - protein, 513 aa, Massilia umbonata
  misc_feature (1)..(513): tr|A0A4P8HNI1|A0A4P8HNI1_9BURK Tryptophan 7-halogenase OS=Massilia umbonata OX=864828 GN=FCL38_13190 PE=4 SV=1
MNQHIKHIVIVGGGAAGWITAGRIAARHARADSGITVTLVESPTIGPIGVGEGTWPTMRGTLMKMGISETDFMRECEATFKQGAKFARWVDGTADDYYYHPLMLPQGFGQLDLVPYWQTACAGRSYSDSVCLQEQVCEHGLAPKMITTPEYASVANYAYHLDAGKFVGFLTRHCTGKLGVTHIQGDVTAVRSSPDGDIAAVVTAQQGEIAGDLFIDCTGFSSLLLGKHLGVPFVDRNDVLFIDKAIAAQVPYEREDAPIASHTISTGQAAGWIWDIGLVNRRGIGYVYSSRHTSDEQAEAALRAYIGPAGKTIGTRSIPIRSGHRQLFWKNNCVAVGLAAGFLEPLEASALVLVELSADMLAEQLPATRDTVDIAARRFNETFLYRWDRIIDFLKLHYILSKRTDNAFWIDNRAPETIPDSLKDLMRLWRYRPPGNCDFTSNNEVFPAASYQYVLYGMGFRTDPAFLRPSAGEQRAAQEHLSHNSAAVKKALKMLPPHRELIAKIHAYGLPAV

SEQ ID NO: 85973 - protein, 507 aa, Sphingomonas sp.
  misc_feature (1)..(507): tr|A0A1I3T6P0|A0A1I3T6P0_9SPHN Tryptophan halogenase OS =Sphingomonas sp. NFR04 OX=1566283 GN=SAMN03159338_2088 PE=4 SV=1
MRAAGQPLRSILIVGGGTAGWMAAALLERLLDRQPVTITLLESPDIRTVGVGEATVPAIRDYFRAIGVSEAEVLREAKGTAKLGIEFRDWARPGDSFFHPFGLYGIASRGVGFHHYWLKRRAAGDATPLADYCLATQMALRGLIMPPAENPPNDLGIFDWTVHFDAGLFARFLARLATGRGVRHVEGTVATVEQDGDSGFLTGVTLQDGSRIEADLFLDCTGFRSLLLGGTLGVPYVDWGHLLPCDRAVAMPCAHGDAFTPYTRSTALSAGWQWRIPLQHRVGNGYVYASAHLSDDEAQAVLRGGLEGEALAEPNFLRFTTGHRARVWEKNVVALGLSAGFLEPLESTSLTLIQSGVERLGNLMPDRGFAPELADEFNRITALEYARIRDFLLLHYWANGRVGEPLWDACRSLVLPEALAHKVALFRSRGVFARYEWESFRDPSWLSMYAGFDLLPDRYDPLADHFTDGELEGAFARMREAIGRAVSLAQPHRDYLQAIGGLAGAGV

SEQ ID NO: 85974 - protein, 529 aa, Sphingomonas sp.
  misc_feature (1)..(529): tr|A0A1I3UTI7|A0A1I3UTI7_9SPHN Tryptophan halogenase OS =Sphingomonas sp. NFR04 OX=1566283 GN=SAMN03159338_2591 PE=4 SV=1
MSVSSGIPFFFHGSARVKRVQNIVIVGGGTAGWLTAGVIAARHQSRMPGGFTVTLVESPGTPIIGVGEGTWPTLRTTLAKIGVSETDFFRECDAAFKQGALFARWTTGAEDDAYYHPLMLPQGFHQLSLVPHWITDAKGRSFCDTVTPQGRICDAGLAPKTIATPEYDGQANYAYHLDAGKFAPFLTRHCTTKLGVRHVLADVRAVERAENGDVAAINTEQAGRIEGDLFVDCTGFRSLLLGETMGVKFKDCGDVLFCDAALAAQVPYPEENAPIATHTLSTAQDAGWIWDIGLPTRRGTGYVYSTRHTSDDQAEATLRAYLGPAGADVPVRRIPIRSGHREIFWKNNVVAVGLAAGFLEPLEASAIVLIELSAKLIAEQMPAVREVMDVVAKRFNATTLYRWGRIIDFLKLHYVLTKRTDTAFWRDNLLPETIPERLQELLTLWRYQPPWFHDEFDRVEEVFPPASYQYVLYGMGFRSEVEPQALSGDQRLAERAMRENAAQTERLCAGLPRHRDLIRKIHEHGLQPV

SEQ ID NO: 85975 - protein, 505 aa, Xanthomonas axonopodis
  misc_feature (1)..(505): tr|A0A098PX53|A0A098PX53_9XANT Tryptophan halogenase OS =Xanthomonas axonopodis pv. vasculorum OX=325777 GN=GW1 5_0213460 PE=4 SV=1
MTQAQIRKVVIAGGGTAGWIAACALSHQFRNLLDITLVESEQIGTVGVGESTVPPIRTFHRFLQIDEQEFLRAVAGTFKLSISFEHWRRQGERYIHPFGITGQSTLVCAFHHLWLESQRRGMPGSFGDYCLETVASRVDRFALQGEPAVNYAYHLDAALYARFLRARSEACGVTRVEGRIQQVTVQPHSGDVASLVLEGGQVIEGDLFIDCSGFRGLLIEQTLHTGYEDWSHWLPCDRAVAVQTEALGPPVPYTRAIAHEAGWRWHIPLQHRVGNGLVFSSEHLSDDEAHAKLLRDVAAPAVKDPWMVPFRTGRRLKAWNKNVVSLGLASGFIEPLESTSIHLTISAVVRLLALFPAEGIAPSQVQLFNDVSRAEMEHVRDFVTLHYHATQREEPLWQQCRQMELPESLALRLRAWRERAHAWQGADELFRVDSWTHVLIGQGIAPEQHHPLTRAFSDHDLRRLLEGIAQPIQHAVQQMPSQQTFIERYCKAGQPVWGMRSPVPA

SEQ ID NO: 85976 - protein, 516 aa, Pseudoxanthomonas sp.
  misc_feature (1)..(516): tr|A0A4Q8LNU4|A0A4Q8LNU4_9GAMM Tryptophan 7-halogenase OS=Pseudoxanthomonas sp. NML140781 OX=2480812 GN=EA656_ 16275 PE=4 SV=1
MDEAIRHVVIVGGGSAGWLTAGLIAAEHRDRHGPTLRVSVLESPDVPAIGVGEGTWPTMRDTLRRIGVGEADFVRACDATFKQGSQFVGWVDGGAHDRYTHPFTLPKGYGETQLAVAWAAQGELPFAHLACFQPHLCDAGRGPKQFATPEYAAVANYAYHLDATRLGAFLRQHCVERLGVQHVVGHMDAVLSHENGDIAALAVRDQPALQGDLFVDCTGLRALLLGAHYGIAPVGVEDILFNDRALALQVPYADLNAPIACQTLSTAQRAGWIWDIGLSARRGVGHVYSSAFTSDEEAEADLRAYIQASGGPAAATLPPARRIDLQPGYRPTAWHRNCVAVGLASGFVEPLEASSLVLVELAAARLADEMPATRAQMELLAARFNETFAYRWQRVIEFLKLHYVLSRRPTPYWQAHREDASLPPRLRELLQLWRHQSPSRSDFPRSEEIFPSASWQYILYGMGARPHSRPARRSEDLQAAQACFAESAALVQRMLPALPSHRALVEHIKAHGLPRL

SEQ ID NO: 85977 - protein, 509 aa, Sphingomonas sp.
  misc_feature (1)..(509): tr|A0A5B8LL05|A0A5B8LL05_9SPHN Tryptophan 7-halogenase OS=Sphingomonas sp. HKS19 OX=1813879 GN=FPZ24_12850 PE= 4 SV=1
MAEAAPLRIVIVGGGTAGWMAAAALSKLLPARDYTLTLIESDEIGTVGVGEATLPHIKVFNDTLGIDEAQFMRETQASLKVGIEFVGWDRPGDRYVHPFGTFGEPWAGIDFQHHWARAKAAGCDVGELHDYSFAIAACRNNAFELPNEDPKSIRSTYAYAYHFDAGLYAAFLRRWSIARGVERIEGKVVDVARDASSGHVASVTLESGAVIEGDLFIDCSGFRSLLVGQTMDTAWCDWSHWLPCDRAFAVPSLRTEPLLPFTRATAQEAGWTWRIGLQHRTGNGHVFCSSFTDEDRARDVLLGALDAAPLGEPRMLRFQAGRRAAAWAGNCVAIGLASGFLEPLESTSIFLIQAAVMDLINLMPTRRSGIDPRLAAEFNRLFEVHYDRSRDFIVLHYLANRREGALWDHVRNMELPDGLAHKIALFEASAAAPDYRYGLFSRDSWLAVLVGQGILPNAHSLLAEAIPLAELEAQLADLKYRIDVNAADMTRHGDFIRSYCPAPALEPAA

SEQ ID NO: 85978 - protein, 504 aa, Sphingomonas sp.
  misc_feature (1)..(504): tr|A0A4Q0GRZ2|A0A4Q0GRZ2_9SPHN Tryptophan 7-halogenase OS=Sphingomonas sp. UV9 OX=1851410 GN=EQZ23_06230 PE=4 SV=1
MTDNRIRRVVIAGGGTAGWMAAAAIARTMGSLIDLTLVESDAIGTVGVGESTIPPMITFNRLLGINEAEFMRETQATFKLGILFDDWKVRGERYFHSFGITGKDHWSAGFQHFWLHGLTKGHDQPYDDYCLELRAALQGKFAHLPDDRMNYAYQLDSTRYAKYLRGMAEADGTRRLEGKIAQVELDSESGDIAALVLESGARIEGDLFLDCTGFRALLIEGALHAGFDDWTHYLPCDSAIAIQTESVRPALPYTRAMAHDAGWQWRIPLQHRTGNGLVYCSRYLDRDAALDRLLGNIEGKTLTEPNMIRFVTGARRQQWHRNCIAIGLSGGFMEPLESTSIHLIQRAVLRLLRLFPSGAVSPRDVAEFNDQQHTDMLQIRDFLILHYKATERRDSAFWRHCAAMPIPESLEQKIELFRETGRVFRKNEELFAENSWVQVMLGQGIVPQSYHPIATKLRDEELARLLGGLRENTNATVAGLPEHAAYVSRYCAPARPVPAHSAAA

SEQ ID NO: 85979 - protein, 501 aa, Sphingomonas sp.
  misc_feature (1)..(501): tr|A0A1I3TMQ8|A0A1I3TMQ8_9SPHN Tryptophan halogenase OS =Sphingomonas sp. NFR04 OX=1566283 GN=SAMN03159338_2263 PE=4 SV=1
MNAHSIRDVVIVGGGTAGWMAAAAFSRFLDNGYTRITLVESDEIGTVGVGEATIPPILRFNQMIGLAENQFLAETGGTFKLGIEFVDWGALGDRYFHPFGNYGQDLEGVPFHQLYLRERARRPMPEIAAWSMSAVAASLGRFGRPSATAQSPIRELFYAFHFDAGLYAQLLRTLAESRGVTRIEGKVVTVAQRAEDGFVQSVTLADGRVVAGDLFIDCSGFGGLLIEETLRTGYEDWRHWLPCDRAIAAPCAPVGEPTPFTRATARAAGWQWRIPLQHRIGNGLVYCSEYLEDDTAEQQLLDSLESPALAEPRRLRFTTGRRRALWSHNVVALGLAGGFLEPLESTSIHLIQSGIARLLTLFPDNRFDPVEREEYNRQMRALYDDVRDFIILHYKLTNRDDSAFWNRCRTMNLPDSLAHRLALFGQKGRIFREAAELFSSSSWVSVCLGQHLVPRDIAPLVDALDSDRVAAAMEQLRRGYQGTASKMPTHGAFLSQCLKGM

SEQ ID NO: 85980 - protein, 500 aa, Massilia umbonata
  misc_feature (1)..(500): tr|A0A4P8HVR4|A0A4P8HVR4_9BURK Tryptophan 7-halogenase OS=Massilia umbonata OX=864828 GN=FCL38_20515 PE=4 SV=1
MEQQRQKKPVRRVVIAGGGTAGWMVAAGLSKSLGKLLDIKLIESEEIGTVGVGEATIPTLMNFHHLMEINEQEFMAETMATFKLGISFENWRNVNEDYIHSFGTTGTDHWTAGFQHFWHKGRERGIAGDYGDYCLELKAGLKDKFAHLPHNGMNYAYHMDAGRYAKFLRRFSERYGVQRVEGKIVEVRKNLLSGDITALRLDSGAELEGDLFIDCTGFRGLLIGQTMGVDYEDWSHWLFNDSAVALQTKSVRDAVPYTRSIARDAGWQWQIPLQHRVGNGLVYSTRYTDDETALRTLQAAVDGEPLMTPRVIRFTPGQRKQTWKGNCVAIGLASGFLEPIESTSIHLIQRGIIRLMQMFPQDGISQADIDEYNQQADYEIQHIRDFIILHYNVTNRRDTPYWRDAATMKLPPSLQHRIDLFRDTGRVFRVPNELFAENSWIQVMLGQGIMPASHHQTADLMGDEELAHFLGNISGAIDRTVAQLPSHQKYVEQYCSGTGW

SEQ ID NO: 85981 - protein, 519 aa, Novosphingobium sp.
  misc_feature (1)..(519): tr|A0A102D684|A0A102D684_9SPHN Uncharacterized protein OS=Novosphingobium sp. FSW06-99 OX=1739113 GN=AQZ49_148 95 PE=4 SV=1
MTGTPDSRIRRIVILGGGTAGWITAGLIAARYRQRGDDGLQIALVESVALGTIGVGEGTWPSIRETLRQIGLSETEFLRTCDAGFKQGSRFVGWVDGAPQDAYLHPFTLPVLDGDALTRWMGQPHQGRTFADALSFQSAACGAGLAPKAMTHPEYAGAVSYAYHFDAGKFAQMLARHVTTRLGVEHHDAAIASVEARPDGDIAALIATDGRRFAGDLFIDCSGLAARLIAGHCQVPFTSCRDVLFANRAWTTQLPYPAPDAPIASTTNATAQAAGWIWDIGLQSRRGLGHVYSDAHQSDDDALAALHAYVRAAGGDADALTYRRIAFEPGHRQRFWQGNCIAVGLSAGFIEPMEATAIALIEMGARMIGDVLPATRDGLARAARQYNACFEYRWARIIDFLKLHYVLNRREGSDFWRDNRRAASIPASLAEALAAWHHQCPAPVDFAHREELFPAASYQYVLYGMGAWSAPPPRLDGATDALVAERVAACARMADGLATTLRPNRETLQTIARYGLKAI

SEQ ID NO: 85982 - protein, 505 aa, Pseudoxanthomonas sp.
  misc_feature (1)..(505): tr|A0A4Q8LS08|A0A4Q8LS08_9GAMM Tryptophan 7-halogenase OS=Pseudoxanthomonas sp. NML140781 OX=2480812 GN=EA656_ 14760 PE=4 SV=1
MGDNRIGSVVVVGGGSAGWMAAAALATYLGRQARVRLVESEQIGIVGVGEASVPHMRTFNAQVLGLDEREFAHRTQATAKLGIAFEDWGRIGERYVHGFGTIGQSRGPLPFHQFWLKQFLGGRAEPIGAYSLQTVMAPLERFVPGVANAPAGSPLADIAYAYHFDAGLYAQYLRQVSEARGVERIEGRIVQVHQHPETGHVTSLTLDGGQQVEGELFVDCSGFVGLLIEQTLQAGYIDWSQWLRCDRALAVPCARSGPIAPYTRATARGAGWQWRIPLQHRTGNGYVYSSAYVDDDQAAATLLGHLDGAPQGQPRQLRFTTGMRRRFWQGNVVALGLAAGFLEPLESTSLYLAQSGISRLLALFPTRDFDPLLAQRYNRESAFEYERVRDFLILHYHATTREDTPFWRDCRTMQVPESLREAMELFAADGRYFRNGEDFFALPSWVQVMLGQGIVPRGYHPIVDDMPQEALARYVEGTRERLAEAVAAMPTHQQFLDRYWKAEAP

SEQ ID NO: 85983 - protein, 503 aa, Limnohabitans sp.
  misc_feature (1)..(503): tr|A0A0P0LJ20|A0A0P0LJ20_9BURK Flavin-dependent tryptop han halogenase PrnA OS=Limnohabitans sp. 103DPR2 OX=167 8129 GN=prnA PE=4 SV=1
MQNPLIQNIVIVGGGTAGWMTATALASVLRGKYNIRLVESDEIGIVGVGEATIPMIQRFNKVAGIDENEFLKATYGTFKLAIEFVNWGQVGDRYMHGFGPIGQDLWTVPFEQYWHKMRTAGKAADLGSYSITRAAARANKFMRPDLSVPNSPLGDITYAYHFDANLYAKYLRKLCEARGVVRTEGKITQVSQRASDGHVDAVVLASGERVEGDLFIDCSGFRGLLIEETLKTGYEDWTHWLPCDRALAVPCESAPQLLPFTRSTAHKAGWQWRIPLQHRIGNGHVFCSQHISEDEAAATLLSNLDGKPLADPRLIKFNTGMRKKAWNKNVIAVGLSSGFLEPLESTSIHLIQAAVAQLVEFFPDQGFSQIDIDTYNAQSRFQYERIRDFIILHYHANQRTDSEFWKACAHMRVPDSLKEKIALYQTHGRIFRFNEELFSQVGWLQVMEGQNLKPARYNPLVDLQDEGSIQEYLESVRNVIAKCVDFMPDHAEYIAKHCAAPAM

SEQ ID NO: 85984 - protein, 496 aa, Phenylobacterium deserti
  misc_feature (1)..(496): tr|A0A328AFP1|A0A328AFP1_9CAUL Tryptophan halogenase OS =Phenylobacterium deserti OX=1914756 GN=DJ018_13885 PE= 4 SV=1
MQGQVVKKVVVAGGGTAGWMAAAALSRHLGSLLEITLIESDDIGTVGVGESTIPTARTFNALLGIDEREFMRTTQSTFKLGISFENWGQVGDRYIHSFGQVGKSTWMGGFHHFWLQAKAEGFAGDLGDYCFELQAAEAGKFATSENANINYAYHLDATLYGRFLRKMSEGKGVRRVEGKIRSVRQNAQTGFIEALVMESGEEVEGDLFIDCTGFRGLLIEQTLKAGYEDWSHWLPTNSALPLQTRSVGPAMPYTRAMAHGAGWQWRIPLQHRVGNGFVYCSDYMSDDEAQAQLLANVEGEVLTEPRVIRYKTGKRRKTWDKNCVALGLASGFVEPLESTSIHMIMIGILRLMQLFPFSGCSEALMDRYNEQADAELEKIRDFIILHYKVTERSDTPFWDRVRTMEVPEPLAHRIALFRDSGQVYQSPGELFQVDSWLQVMLGQRLEPKGYHHMGRLMPPAQLRQSLVDLKGNIDRAVNSLPTHQAFLEQYCPADAT

SEQ ID NO: 85985 - protein, 514 aa, Phenylobacterium deserti
  misc_feature (1)..(514): tr|A0A328AAS8|A0A328AAS8_9CAUL Tryptophan 7-halogenase OS=Phenylobacterium deserti OX=1914756 GN=DJ018_16595 P E=4 SV=1
MDRRRSILIVGGGTAGWLTAAYLAKFLEASGQGALTITVLESPEIGIIGVGEATFPTIRTTLQFLGIDEARFIRETSATFKQGIRFTDWARAPTDGRQSHFLHPFEAPLHPDGASLVPYWLLQDERDRAPFAEAVTIQARVAEARRAPKRPHEDAFTGPLSYAYHFDAAKLAALLTRRATSLGVRHLQDQVRQVQLDEHGAISQVVTDANGALEADLYIDCTGFRAELIGRALKARFKPVSRWLFTDRAVTAKVPYAQPDAPLESYTISTAHEAGWIWDIGLNGMRGIGCVYSSRHMSDERAEGVLRSYLGPDAEPVTRRIAFEAGYRERQWIKNCVAVGLSAGFLEPLESTGVVLIEAAAAMIAEFFPHNGPIDAPAARFNELMTARYDNIINFLKLHYCLSQRPEPFWLDNRDPASIPERLAQLLEQWRYRPPSRFDFNLDVETFAFFNYQYILYGMGFRTDLTPGRNDFPNVGAAEKVFARIRAYGERASQDLPGHRELIEQINAEAPLPA

SEQ ID NO: 85986 - protein, 504 aa, Caulobacter sp.
  misc_feature (1)..(504): tr|J3A751|J3A751_9CAUL Tryptophan halogenase OS=Cauloba cter sp. AP07 OX=1144304 GN=PMI01_03772 PE=4 SV=1
MRAAPVNRVVVVGRDAPLWLAASVVQAALGAAGVTVQAVELPSLLTAGDVHATLPAQEALHNMLRLDESALLRATGGGFSLGQNFTDVSGAAPALFHAHGSYGAPIDGKDFFPFWLKARGLGLGVALEDFSLTAVAARHGRILLPDEATEAYGRTDYGYHLPALAYAARLKTLASRQGVAAHQAVVAEAVLDPDTGDILALALDEGRRVEGQLFIDATGREGRLIGGALGVARENWRPYFPADRLLTASGPRFAAIPPYAEVRAWAGGWVGLYPSQARTHVVQAYSSATCGDDEALQAAAEVAGLGLGEAVVRTLDPGRRLAAWERNCVAIGEAACAFDPVHGVDLQAVQLGLVHLLSLFPAGGDAGVERTEYNDVMRLTFERVRDFQSAHYVLNRYGASAFWTQARAAAVSPELAHQIETFQARGEMPPFEHETFPTDSWRALFTGHGLRPETHAPMIDRTAPDLMKSEFRRILGFVKDQVLKQPTHDLYLESVCQGDGAHGR

SEQ ID NO: 85987 - protein, 487 aa, Sphingomonas sp.
  misc_feature (1)..(487): tr|A0A5B8LJA5|A0A5B8LJA5_9SPHN Tryptophan 7-halogenase OS=Sphingomonas sp. HKS19 OX=1813879 GN=FPZ24_12845 PE= 4 SV=1
MTRVVILGRDAPLWLAACVLQAALRAAGVVVTAIELPSKLYPSDVYATLPGIEALHARLGLDERDLLRGTRGAFSLGQNIVDMLGGNPAFLNAYGGYGTAIDGADFFGYWVKGRDAGLPAGFEDFSLTAAAARQGRVMIPDEASEVYGRADYGYHLPAIAYAGGLKSVATRTGITVLSANHIAVERDETGDLIALVADGQRIAGDLFVDATGDDAALIEKTLGIAQDSWRTHFPVDRMFVARGPAFDPIPTYAELRAWHGGWTALYPGQAATHVVHAFASSLIGDEDALRGAGSASGLALSDAVLRPSDPGCRTEPWAHNCVAIGGAACALDPVHNLDLHALQLGLIALLTHFPAGADAAPSRAEYNRVMRGSFERLRDYQAAFYALAPFPGLFWHAGRAAEPPATLAHIIATFHARGELPPMEEDSIPFDHWRAMLTGLGVVPVSWPPRIDATDDAEVAAQFRRMLGFVKDAVSRQPTHAQALGHG

SEQ ID NO: 85988 - protein, 525 aa, Shewanella sp.
  misc_feature (1)..(525): tr|A0A2N1EPT6|A0A2N1EPT6_9GAMM Tryptophan halogenase OS =Shewanella sp. ALD9 OX=2058330 GN=CXF88_09760 PE=4 SV= 1
MMQKPITEIVIVGGGTAGWITAGLLAAEHNVDNGVLAHSPKLNITLIESPDVATIGVGEGTWPSMRSTLSKIGIDENDFIRQCDASFKQGSRFINWCADPQSKVTDSYLHPFSLPHGHQELDLCQYWLPHAEQVSFAEAVCSQQVLTQLGLAPKSIATAQYHFQNNYGYHLNAAKFSQLLTEHCTQKLGVTHIRDHVSQIINNDHGDIDKLITKQHGEISGQLFIDCTGAKSLLLGEHLQVPFLCQKSVLFNDRALAIQVPYPDANSPIASCTHSTAQSNGWIWDIGLPTRKGVGYVYSSSHTNDIDAQQTLFNYLGVDGAAADKLEPRQLTINPGYRAKCWQNNCIAIGMAAGFIEPLEASALALIEWTASTLAQQLPPNRMVMDTIATRVNERYQLHWQQIIDFLKLHYVISRREVDGYWRDHRESNSIPDSLQAMLELWRYQTPSQQDISYKEALFPAASFQYVLYGMGYNTQLPNHVKPSMQQLAQRLFNDNQQRTQALAKNLPSNRELLDKVAQYGFPKL

SEQ ID NO: 85989 - protein, 496 aa, Bowmanella sp.
  misc_feature (1)..(496): tr|A0A4Q9XQN5|A0A4Q9XQN5_9ALTE Tryptophan halogenase OS =Bowmanella sp. JS7-9 OX=1605368 GN=TK45_03600 PE=4 SV= 1
MTMHTIKRIIIAGGGTAGWMAAASFGKLLGKTLDITLVESDEIGTVGVGEATIPPLLTLHKLLNINEQEFMAATNATFKLGISFENWRNVDEDYIHSFGTTGKDCWAAGFQHFWMKGQQLGIAAEYGDYCPELIAAQQNKFALLNNHSINYAYHLDATRYAGFLRKIAEMHGVKRVEGKIDKVHKCQDSGNITALQLQSGQIIEGDLFIDCTGFRALLIEQALHVGYDDWTHILPCDSALAVQTTSVEEPIPYTRSIAHEWGWQWKIPLQNRVGNGVVYCSKYVSDDEAKARLLASVTGDCLTEPRLIKFKTGQRRKHWHKNCVAIGLSSGFIEPLESTSIHLIQRSIVRLLQMLPYNQIEQSDIDEFNQQTEHEVNNIRDFIVLHYHVTNRSDSPFWNHCRNMDIPASLQHRIDLFKRTGRVFKVPNELFGENSWVQVMLGQGLLPEQYHPIVDMMSEQELDEFLKHIQSNVQRLVAQLPSHQTFIQHYCPTRVA

SEQ ID NO: 85990 - protein, 506 aa, Luteibacter yeojuensis
  misc_feature (1)..(506): tr|A0A0F3L2H4|A0A0F3L2H4_9GAMM Tryptophan halogenase OS =Luteibacter yeojuensis OX=345309 GN=VI08_04140 PE=4 SV =1
MANGTTNIVIVGGGTAGWMAASAFARTLNRQATIRLVESEEIGIVGVGEATVPHIKAFNQLLGLNEAQFVARTQGTFKLGIEFRDWNRLGDSYVHGFGTMGHDIGLLPFHQYWIKARLRGQAEDLLDYSVNTVAAMRGKFMPAPVDVPANNPLGSIAYAYHFDAALYARFLREFAEGLGVRRTEGKVQDVETNPENGHVTAVRLENGDRVEGDLFIDCTGFRGLLIEGTCRSGYDDWSHWLPCDRAMAVPCAKVGPPTPYTRSTARGAGWQWRIPLQHRTGNGYVYSSQYISDDEAAATVLGNLDGVALADPKPLRFTTGVRRQPWMRNVVALGLASGFMEPLESTSIHMIQSGISRLLQLFPATGDIDPVLVERYNAQSRFEAERIRDFLILHYKATERNDTPFWDHCRTMSIPDSLQANIDLFRHSGRFFRNAEEMFAMVSWVQVMVGQGIMPTGYHPMVDQMPDADLPKFMASVREVVSKNVDLMPTHEQFIARECPAPQVAA

SEQ ID NO: 85991 - protein, 506 aa, Planctomycetaceae bacterium
  misc_feature (1)..(506): tr|A0A2E7EHE3|A0A2E7EHE3_9PLAN Tryptophan halogenase OS =Planctomycetaceae bacterium OX=2026779 GN=CMJ77_04840 PE=4 SV=1
  misc_feature (105)..(105): Xaa can be any naturally occurring amino acid
  misc_feature (171)..(171): Xaa can be any naturally occurring amino acid
  misc_feature (220)..(220): Xaa can be any naturally occurring amino acid
  misc_feature (282)..(282): Xaa can be any naturally occurring amino acid
  misc_feature (308)..(309): Xaa can be any naturally occurring amino acid
  misc_feature (326)..(326): Xaa can be any naturally occurring amino acid
MGDNTHVKQILIIGGGTAGWMAATYLNRFLRQLGCKVTLVESPEVSTIGVGEATIPSLVRFVREMKLDEDDFMRRCNASYKLGIEFNDWVHPKHKYWHPFGICGXIIDRLDLFHFWHKALRNGRDVGPYSSYALQVLLCESLKAPRPLGGSSTIIQRGTYAYHLDAALLGXYLADIGVTEGVEQIFDSVQHVQLGDDGLIEHVDTESGRRLSADLYIDCXGFRAQLIEKSLGVPFVDWSHHLLCDRAVVVDLPTDTKARPYTRSAALPAGWMWQIPLSHRLXCGYVYSSAHTDEENAVRELLGALGEXXPFTDAPRYLRFPVGHRXDFWRGNCISVGLAGGFIEPLESTGIHLAQKGIETVLRFLPDQSLCPALIRQYNETMSNLYEEVRDFIVLHYILSKRDGDPFWRDSRNVPLPESLAKTLEIYDENGLVEMSRDSVFHEISFYHILCGGDRLPRRVLPLADISNFNAACEILGKIKLQNQGLADTLPSHQALMEWLHGDIDG

SEQ ID NO: 85992 - protein, 495 aa, Acinetobacter sp.
  misc_feature (1)..(495): tr|A0A2U3MUA9|A0A2U3MUA9_9GAMM Flavin-dependent tryptop han halogenase RebH OS=Acinetobacter sp. KPC-SM-21 OX=2 126983 GN=rebH PE=4 SV=1
MLDLRNAKQITVIGGGAAGWFAALVIRKIFHPGVAVKVIASEKIGIVGVGEGGLLNIVQTLNHLQIPTGEFIKETKANYKLGFRYKGWRTGLENDEYFHFFMNHRLVEMSEKYADIYPVMAAYIALGKELHKIIPIYQDIIKPIGFDEMTKHLLQTENQGGIGVSFHFDSFAVAEFLKKIAIQRHVVYEDAEVQDFEQDEQGNVCKIITDKGITQTDFIIDASGFKRILIGKYLKSDFESFEKYLILDKAIPYHLQHPKENPELITTATAFEAGWEWQIPLKDRIGAGYVFSSAHKTEQQAMDELEQRHGNKIELFKTLSFVPGIYKKVWIKNVVSVGLASGFVEPLEATSLGQTFEQLRSLGQVISQSGWLITDKNIEKYNEGNLLAWHGIRDFLRMHYDCTRKDNAFWQDISNLPYPDEYHELKQIMQQRTLREIDINHYIGKGWQGIFHVHNWSLVADGLGLISKQAAVNDLNLLPKEVAIKAFEQVQMKMT

SEQ ID NO: 85993 - protein, 495 aa, Sphingomonas sp.
  misc_feature (1)..(495): tr|A0A1S6FIF2|A0A1S6FIF2_9SPHN Tryptophan halogenase OS =Sphingomonas sp. LM7 OX=1938607 GN=BXU08_06865 PE=4 SV =1
MTVPGIRDIVIVGGGTAGWMCAAALAHTLGGTDHRITLIESDAIGIVGVGEATVPSIREFNRLLRIDEDEFLRATKGSFKLGIEFVGWNGADQRYFHPFGYFGVDMSGIGFHHHWLRHIEQAGIEDPWHYNMEAQAASAGRFARETRHGPVNHAFHFDAGLYARFLRERVEGRGVTRIEGEIVDVALDSENGHVTSIALKSGARIDGDLFIDCSGFRGLLIEGALETGYRDWSHWLPCDRAVAMPCASTGQITPYTRATAREAGWQWRIPLQHRTGNGYVYCSRYLDDDAAAELLMSRLDGEPLASPNKLRFTAGHRNKLWHRNVVALGLAGGFLEPLESTSIHLIQTGIIRLLGLFPRNGIDPAVVDRFNADSILEYERMRDFVLAHYAVSSGVESPFWRDVRATPLPDSLSARLDAFRTSGNILNEPAEFFGQTNWFAILWGQGLRPRDRHPIADALPAQELDRRLTVLRQRFAEGLAEMPAHAAFLAGHCAS

SEQ ID NO: 85994 - protein, 503 aa, Sphingomonas sp.
  misc_feature (1)..(503): tr|A0A1S6FIX6|A0A1S6FIX6_9SPHN Tryptophan halogenase OS =Sphingomonas sp. LM7 OX=1938607 GN=BXU08_07220 PE=4 SV =1
MSDTVIRSIIIVGGGTAGWISAAVLSRFLDPKRCSITLIESEEIGTVGVGEATVPLMQHLNGLLGIDEREFVKATQGSFKLGIEFRDWGSIGNTHFHGFGDYGDAIEGIAPHHHWLKLRGEGDSTPIDEYSLPSAMARRGRFAPPSPDPASQTSFYRYAFHFDAILYARFLRTYCEQRGIRRVEGRVVNAELEGETGRIAAVLTADGQRHAADLFIDCSGFRGLLIEETLGTGYEDWRHWLPCDSAVVAPSAPVGPPAPYTLSTAREAGWQWRIPLQHRMGNGYVYSTRFTDDARARDLFTANVQGKLLADPRVLRFTTGRRRKFWNGNCVAIGLAGGFMEPLESTSIQLIQTAIARLIDYFPDRNWDPRIADEYNRVTTSEFERIRDFLILHYCLTRREDAPLWDYCRTMELPDTLAHKIETFRAAGRVPLLAEESYQEPSWVAIFAGNGFLPDRYDPLVDRIDSEKLRAGLAQRRRLLVRAAEAMPPHEVFIQRCCPAEAA

SEQ ID NO: 85995 - protein, 463 aa, Xanthomonadales bacterium
  misc_feature (1)..(463): tr|A0A2M7X1E7|A0A2M7X1E7_9GAMM Tryptophan halogenase (F ragment) OS=Xanthomonadales bacterium CG_4_9_14_3_um_fi lter_62_6 OX=1974107 GN=CO182_08620 PE=4 SV=1
GWMAAAVLAKAMGPQLAIRLIESDEIGVVGVGEATIPQIRLINQFLGLDEDEVLRQSQGTFKLGIQFNDWRRLGDSYLHAFGDIGLPLGMLAFHPYWLRARQTTATSADLWAYSLNAQTAMANRCARLGPAADSPLSGIKHAFHFDAMLYSQMLRRHCEGQSLHRSEGRIVDVRLRADDGFIESVVLASGETISGDLFIDCSGFRGLLIEGALKVGYEDWSHWLPCDRALAVPSARTAPMRPYTQASARAAGWQWRIPLQHRTGNGHVYCSRYLSDDEASAILLANLEGEALAEPRPLRFTTGRRRQFWQRNCVALGLASGFMEPLESTSIHLVQSGISRLLNLFPDRHCDAALSAEYNRQTTFEYERIRDFIILHYHASERSDTPFWRDCAAMSIPESLQRKIDLFSSSGAIVRDGEELFTEVAWLQVMLGQGICPRRYHPLADAISAAQLKEFLANIRALI

SEQ ID NO: 85996 - protein, 508 aa, Planctomycetaceae bacterium
  misc_feature (1)..(508): tr|A0A2E8AXX5|A0A2E8AXX5_9PLAN Tryptophan halogenase OS =Planctomycetaceae bacterium OX=2026779 GN=CMJ62_04145 PE=4 SV=1
MADENPNSPYRKVGIVGGGTAGYLTALALKKQIPHLEVTVVESESIPVIGVGEATTPLIVMFLHQGLGLDAAEFYRVVQPTWKLGIKFEWGLPGDYAFHYPFDRNDSWNAIQQTGDIRNGCLTSVFMKNDKSHMLRSAGGSKLTPIHNKTNYAYHLENECFIGYLRSKLKDAGVEMRLGTIQEVKLNEAGTAIDHLFSPELGNLSFDLYVDCSGFRSVLLEKAMGSKFISYADSLYTDSAWTVTRPNNGQPKPYTTAVTMDHGWTWIIPVRTEDHLGYVYSSGFCDDESALAEMKRKYPDAIDPKLVKFRVGRHEQAFVGNVMSVGNSFGFVEPLESTGIHMIISTILEFVRNFPKSDNDVTSRQTINTTTNATWDNIRWFLGVHFRFNKRFETEFWKTCREKVDISGFETIRQLFYEKGPFLENGIDENPDYRHLGRYTIFPWNAFDLFMLGQGELPHEVATKIPAKTRGDLANKAVVWDQIQLRALPQNEALAAIDTWPSLVGSRN

SEQ ID NO: 85997 - protein, 497 aa, Sphingomonas sp.
  misc_feature (1)..(497): tr|A0A1S6FIG9|A0A1S6FIG9_9SPHN Tryptophan halogenase OS =Sphingomonas sp. LM7 OX=1938607 GN=BXU08_07125 PE=4 SV =1
MSEQVVKRVVIAGGGTAGWVAAAALVKQLGPLIDITLVESDEIGTVGVGESTIPTSRNFHQLLGIDEQAFMRATQATFKLGISFENWGRIGDRYIHSFGENGKRSTWMAEFHHFWLEARAQGFGGSLSDYCFELQAADAGKFAKADGLDINYAYHLDATLYARFLRALAEPAGVKRVEGKIARVEQHAETGFITALVLESGVRVEGDLFVDCTGFRALLIEQTLETGFEDWTRYLGTNSAFAVQTRSTGPAIPLTRAIAHEAGWRWRIPLQHRVGNGIVYCSDFMSDEDARAKLLNDIEGEPLTEPRLIRYRTGARRKVWNKNCVALGLASGFIEPLESTSIHLVKVAVTRLIQSFPFGGCHEAAADRFNAQSRQEIEGIRDFITLHYHLTQRDDSPFWDRCRTMEIPDSLAQRLALFRGDAHAWQDGIDLFRVDSWVQVLLGQGLAPESHHRLAKMMNPSELRQALGALKANIDGAVARLPAHQDFLARYCPAGDA

SEQ ID NO: 85998 - protein, 512 aa, Pelomonas sp.; identical to SEQ ID NO: 84495
  misc_feature (1)..(512): tr|A0A0Q8GD62|A0A0Q8GD62_9BURK Tryptophan halogenase OS =Pelomonas sp. Root662 OX=1736580 GN=ASD88_19315 PE=4 S V=1

SEQ ID NO: 85999 - protein, 462 aa, Rokubacteria bacterium
  misc_feature (1)..(462): tr|A0A2V6RY24|A0A2V6RY24_9BACT Tryptophan halogenase OS =Candidatus Rokubacteria bacterium OX=2053607 GN=DME16_ 21815 PE=4 SV=1
MASAWDFDVAVIGGGPGGSSAATALARRGRTVLLLERDRFPRFHIGESQLPWSNEVFRALDVHDAIAEAGFVKKWGASFRTVDGATEQYADFQFAAETPSPQTFQVPRATFDEVLLRHSERSGAKVLEEHRALDAAFEPDGVVLRFVGPDGTEQAVRVGFVVDASGRTGFLTKKLGHHEFDPVLRNIAVHAQYEGIPRLEGRRAGDIRMFTRADMGWIWLIPISQSVTSVGAVIPQSVHRRESKAVPEDSLTHYLTGTAGLAPLLAHARRVSPARFDADYSYLGSSLAGDRWIAVGDAAAFLDPIFSTGVLLAMQAGLEAAEAIDDSLREGEPARHRFAACERLVRQRYHHFRRFAVGFYDPYFRDLWFRPASRLGIFGAILSVLAGNWRPSWMTRQRIRLPSSAGASRSAWGGGPMPSSRIPGAAISAPSRSDPMSTAVPRSGSGTTWSSCSWPRGSSACP

SEQ ID NO: 86000 - protein, 509 aa, Pelomonas sp.; identical to SEQ ID NO: 82577
  misc_feature (1)..(509): tr|A0A0Q8GGZ6|A0A0Q8GGZ6_9BURK Tryptophan halogenase OS =Pelomonas sp. Root662 OX=1736580 GN=ASD88_16495 PE=4 S V=1

SEQ ID NO: 86001 - protein, 521 aa, Altererythrobacter sp.
  misc_feature (1)..(521): tr|A0A2E6K871|A0A2E6K871_9SPHN Tryptophan halogenase OS =Altererythrobacter sp. OX=1872480 GN=CL575_06745 PE=4 SV=1
MAVMQTSSHTTGDSAAPLNVAIAGGGTAGWMAAAALARLTACKVTLVESDAIGTVGVGEATIPQIRLFNRGLGIDEAEFLRETKGTFKLGIEFDGWRKAGTSYMHAFGNVGAGAGLLPFHHLWLRGRELGSAKDFGAYSLNEAAARAGRMQTWPADKAPQPDMPWAYHFDATLYAAFLRRFAETRGVTRIECRIETVERGGESGDIAALVLDGGRRIEADFYIDCTGFRGLLAGDMPVQGFEDWSHWLPCDRAMAVPCKTGGEFTPYTRAAAHTAGWKWRIPLQHRIGNGLVYCSDYLADEEAEAQLLADLDGEPLGDPRTMRFTTGMRRAPWSGNCLALGLAAGFMEPLESTSIHLIQSGIARFLSMLPRPGMEAAMADEFNRQSAFEWSAIRDFLILHYAANERSGEPFWDRARAMDLPASLATRIELFRSTGYLSREHDELFTEAGWTQVLLGQGILPRATHPNADALGPAALERLLAGIESDIADTVGAMPGHAQFLRSYCMPQTANRPAATKETAR

SEQ ID NO: 86002 - protein, 497 aa, Erythrobacteraceae bacterium
  misc_feature (1)..(497): tr|A0A4V2MM98|A0A4V2MM98_9SPHN Tryptophan 7-halogenase OS=Erythrobacteraceae bacterium CFH 75059 OX=2528174 GN =EYB45_07120 PE=4 SV=1
MTDGVRAPDCVVLGGGSAGWIAACLLHQAFAGRGATVTLVENPEIGIIGVGEGSTPQLKAFFDRLGVDEAEWMAACDATFKLGIRFHGWSKRPGFSHYIHPFPSPVDLHTEPPYTRVCAAARRGAAVDFAHPDDWFLASRLALAGLSPHAADSFPFAPSHGYHFDAYKLGAYLRGWATSRGVRHVRAEVAAVECAGDERIGALVCADGTRLTADMFVDCSGFRSELMQKTLGEPFIAFDDNLFVDRAVVMATPPPGQATPLTEAIAMRAGWRWRIPLQSRCGNGYVYSSAFVSDDEAEHELRQALGMLSAGETRRLRMKVGRVRQSWRGNCLAVGLAQGFIEPLEATALHIVIHTVERFIAAWAPDAGPDRLRAFNEAVATRYDGIRDYIVAHYRLNQREGNFWRANASNHSLSEPLKQVITAWFTHADLRQRLAEIYGPHSAYSSASWHCLFAGYGTFPTRPQPVPHDMTMAGEALATVQTMLAACARNFGPLEAS

SEQ ID NO: 86003 - protein, 480 aa, Xanthomonas translucens
  misc_feature (1)..(480): tr|A0A199P2G0|A0A199P2G0_XANCT Tryptophan halogenase OS =Xanthomonas translucens pv. poae OX=227946 GN=A6R73_17 910 PE=4 SV=1
MAAAALVRVLGAGATRITLVESEAIGTVGVGEATIPPIALFNALLGIDENAFLRATQGSFKLGIEFVDWLQPGQRYFHPFGTYGVDFGTVPFDGLWQRMHRAGRAAPLAAYSLNTLAAMRGRFMRPQQGDALLSRLGYAFHFDAALYARLLREYAEGRGVTRLEGKVEQVLRRSPDGAIASIVLACGTRIDADFFIDCSGFRGLLIEDAPGAGFVDWSHWLFNDRAVAVPSARASAFMPYTRSTAREAGWQWRIPLQHRTGNGYVYSSDYLSDDAATATLLANLDEQILAEPRTLRLRAGRRALFWSGNCLALGLAAGFLEPLESTSIHLIQAGIARFLEMLPDRAGNPADIRRYNRLMAQEFDSIRDFIILHFHATARPGAYWERARTMPIPDSLAERLQIFAHSGRVFREADELFSKTSWLAVMQGQGLSARGFDPLAAAMPDAEAAARLQRVAAAAAMAVERMPTHADVIRAHCAAT

SEQ ID NO: 86004 - protein, 443 aa, Caballeronia arvi
  misc_feature (1)..(443): tr|A0A158GCC4|A0A158GCC4_9BURK Tryptophan halogenase OS =Caballeronia arvi OX=1777135 GN=AWB74_01291 PE=4 SV=1
MSETQQQTWDVVVIGGGPAGSTAATLLADRGYRVRVLEKARHPRFHIGESLLPANLRLFERLGVADEVRAIGMVKLAAEFVSPQHDNRLQRFMFADAWDKSMPSAYQVRRSELDEILLRNAAKHGAHVSEGCRARDVAFATDHSSATISAEHDDGRIEEVRARFIVDASGRDTLLANQFKTKRRNARHNSSALYGHFSNARRNAGQNEGNITVFWFEHGWFWFIPLADGATSVGAVVWPTYLKRRPKGTTVEAYFRETIALCPPLAERLSDAELISEVHATGNYAYTGDMTHGRNFLLLGDAFAFIDPVFSSGVMLAMQSAFAGAEAIDGALSNPADAPAALAKFDRDVRHGPREFSWFIYRMTSPTMRNLFMGPRNPLRMKEALLSLLAGDIFGTTPIWHSLRAFKGIYYVTAALDWRNSLRAYRMRKRNLSDAERAELSAN

SEQ ID NO: 86005 - protein, 480 aa, Synechococcus phage
  misc_feature (1)..(480): tr|A0A0E3HW58|A0A0E3HW58_9CAUD Tryptophan halogenase OS =Synechococcus phage ACG-2014c OX=1079998 GN=Syn7803C97 _192 PE=4 SV=1
MKIVIVGGGTSGWMSAAALCKTFPKWNITMISNGESIGVGESTTPHFDQYLKYMDISDEEFIAASRATFKSSSRFEDFASVGSVFHYPNGQFQPENDYNEWMIAKEYFSDNLPSFAEVFMPFVTVAEQGKLPLKDPILGEYCLSKDRSFHIDAFSFVNYLKNRFCKDVKCIKGKVKKVNRSIGIDNIVVDGTKVSADLFIDCSGQNSILTNSEYIKYNTILTDTALVTRTEYTDKDKEMVSYTNAKGMTAGWQWTIPTWDFISRGYVFSSQFQSQDAAAYEFGYDDFKVVNFKNGRRVDAWVDNCISIGLSYGFIEPLESTGLFNTHHGILALLDILREGTLPARFARDRYNFNMAEHMDGWREFVEAHYYYSSRRDTRFWRAVSEVEYPIKGAHADIQQIMLSGDGFPPEHMPIVYILAGSGYTNVNKRLVEYFKPSFPIGQRKVDAWIQKYGRILRHSENLPTMHQHLSKYFYSNLGA

SEQ ID NO: 86006 - protein, 485 aa, Sphingomonadaceae bacterium
  misc_feature (1)..(485): tr|A0A419MYY8|A0A419MYY8_9SPHN Tryptophan 7-halogenase OS=Sphingomonadaceae bacterium KCTC 52944 OX=2339262 GN =D5I55_07850 PE=4 SV=1
MSAALLSRFSENGYKVILVESEDIGTVGVGEATIPQINLFNTALGIDEDEFVRETQGTFKLGIEFVDWHRKGAAYMHAFGAVGRDIGIVPFQHYWHRARSLGKAKDLRHYALNEMAALDGRMQRGPLRTTDRLGDMPYAFHFDAGLYAAYLRRYAEARGAQRIEGKITTADLDPETGHVTCVRLEDGQSVSADYFIDCSGFRGLLIEEALKTGYDDWTHWLPCNRALAVPCAHGSGEIAPYTRSTARDAGWQWRIPLQHRIGNGYVFCSDFISEEDARATLLANLDGAAQAEPRLLKFVTGKRRKFWNKNVIAVGLASGFMEPLESTSIHLIQSSLSRLLKMLPGKQVNPAVADEFNRQADFEFERIRDFLILHYKATERDDTPFWRHCRDMAIPDTLTAKIELFRANGHIFREHEELFTEVGWLQVFVGQGVLPEGHHPLADDVEEKDLADYMETLELLIAREVRQMPSHMDFIRKHCSAKAAA

SEQ ID NO: 86007 - protein, 498 aa, Verrucomicrobiaceae bacterium
  misc_feature (1)..(498): tr|A0A4Q2XIQ3|A0A4Q2XIQ3_9BACT Uncharacterized protein OS=Verrucomicrobiaceae bacterium OX=2026800 GN=EOP88_04 865 PE=4 SV=1
MIQNLLVLGAGSAGLIAAISLKKKIPQLNVRVVRSKSIGVIGVGEATTPNFPRHLFEYLGIPRKRFYSLARPTWKLGIKFLWGERGSFDYTFNLQLDTKWSDLKQPTGFYCDDDFDNASFPGALMNHNMAFPRQENGAPDIHEWHAFHIENKLFVQVLEDVAREYGIEFIEGDVESVEKGPQGIAALHLKDGQRVAADFFVDASGFRSELMGKALEEPFFSFNKSLFCDRAVVGGWDRRPGEAILPYTVAETMDSGWCWRIDHEKVIHRGYVYCSGAVSDDDAREEFLRKNPQNTEEPRIVKFRSGCYERQWVQNVVALGNSGGFVEPLESTGIMMLCSHTQTLVDFLTHTNLNPTDTIRDLYNDLTVNGWKDVRDFLAIHYKFNGKLDTPFWKQTREDCDVSGVAELIKFYQENGPTGFCRYRLPNTQTDFGLEGFLVMFVGNKVPYKNRYTPTAQEKQIWNARKLEYIEKAKRSLTSEEALAYVHHPGWKWNADPE

SEQ ID NO: 86008 - protein, 517 aa, Rickettsiales bacterium
  misc_feature (1)..(517): tr|A0A2E3I7F8|A0A2E3I7F8_9RICK Tryptophan halogenase OS =Rickettsiales bacterium OX=2026788 GN=CMP20_06720 PE=4 SV=1
MAQAIKSIVIVGGGTAGWITAGTIAAKLQSEHADGFNITLVESPDVKPIGVGEGTWPTMRRTLKAMGVRETDFIRQCNVSFKQGAKFAKWVTGAEDDFYYHPLVLPQDFDSTNLARHWMERPFEQSFSQAVSPQEAVCEVGLAPKSIATAEYTSIINYAYHLDAGRFSAFLQQHCTEKLNVRHVLDNITAINAAENGDIASVSTTTNGDIGGDLFIDCTGFKSLLLGEHFKVGFKSCKDVLFVDQALAIHVPYESEDAPIASHTISTGQSAGWVWDIGLQNRRGVGHVYSSAHTTEEQASEELLNYIAQTGGHVNEADIRKIPLNPGHRVKFWHQNCVAIGLSAGFLEPLEASSLLLMEISASMIADQFPATRDAMEIVAQRFNRTFLYRWDRIIDFLKLHYMLSKRNDSAFWIDNRDSASIPQSLQDQLTLWQYQPPWHNDFEHAIEVFPAASYQYVLYGMGFDTQASALGMSEVYKQKASSLRQKNTQQIQQMLKTLPSNRALINKIHQYGLQKV

SEQ ID NO: 86009 - protein, 512 aa, Lysobacter capsici
  misc_feature (1)..(512): tr|A0A108UBM5|A0A108UBM5_9GAMM Tryptophan halogenase OS =Lysobacter capsici AZ78 OX=1444315 GN=AZ78_3686 PE=4 S V=1
MHNDAERGASATRPIKRVVIAGGGTAGWMAAAAISKIFGATLQISLIESEEIGTVGVGEATIPTLSTFHRLLDIDEREFMAATQGAIKLGISFENWTTEQHRYIHSFGSTGKDHWSAGFQHFWRRGRELGLAGSYDDYCVELQAALQGKFAHLKNYRMNYAYHLDASLYARFLRTMSEGNGCRRIEGKIVEVLTDADSGYITALRLERGEVIEGDLFIDCTGFRALLIDKTLGVGFEDWSHWLLNDSAIAVQTTSVCDPVPYTRAIAEQWGWQWRIALQHRVGNGIVYSSRHVGDDEAKQALLGSVDGEILKNPWPVRFRPGRRLRCWSHNCIALGLAGSFIEPLESTTIHLIQRGITHLIRSFPQVISQAGVDEYNTQMADELQHVRDFVVLHYHATQRRDSPYWEYVSSMTLPDTLRRRIELFRETGTVFHVPGELFAENSWIQVMMGQGVTPKTHHPTADTMSEADLRRFLDDIRNHVDTTVRALPSHQAYLSQYCPSAPRATVPAHVA

SEQ ID NO: 86010 - protein, 505 aa, Sphingomonas sanguinis
  misc_feature (1)..(505): tr|A0A147IKA8|A0A147IKA8_9SPHN Tryptophan halogenase OS =Sphingomonas sanguinis OX=33051 GN=SB4_17315 PE=4 SV=1
MDKPVTRIVIVGGGTAGWLAACRIAAATMGSVTVTLIESPDVPTIGVGEGTWPTIRRTLERIGIGEAEVLLACDGSFKQGTCFDGWTTGVDDDRYYHPFVPPIDVDPADLPGDRPFAFTACAQPQVCVENLAPRQPAMPDYGGALNYAYHLDAAKLATLLARHATTRLNVRHVRDHVVSVDRVESGDIGAVTTRQSGAIAGDLFLDCTGRRGLLIDETLGAELIDASSVLFNDRALAVQLPVTPDSPIASQTMATAHAAGWIWDIGLPTRRGIGCVYASAFMSDDQAEGILTDYCRRIALESPAPRRLSFRSAYRAQPWTANCLAIGQSAGFMEPLEASAIVMIELSLDALLDDFPVDRKVMAIQAQRFNALARYRWERIVDFLKLHYVLSQRDEPYWRAHRDPASIPDRLVEALVLWRHRAPSALDLPMQEELFPAASYRYILWGMGFPAPLPSPVRRAARPDLPNQLRQIDQRARALTASLPTNRAYLDALRAEQAPLAERIA

SEQ ID NO: 86011 - protein, 505 aa, Brevundimonas sp.
  misc_feature (1)..(505): tr|A0A0Q5V9L0|A0A0Q5V9L0_9CAUL Tryptophan halogenase OS =Brevundimonas sp. Leaf363 OX=1736353 GN=ASG17_11425 PE =4 SV=1
MQTEAIEDILIVGGGTAGWMTAAALAKGLKGSARITLVESEDIGTVGVGEATIPAILLFNCMLGLDEDAFVRETQATFKLGIEFRDWGALGDRYFHPFGRYGSDLEKMSFHQHWLRQRALGETHPLADYSLSTQAAAAGKFVRPVDDPKNVLSRIAYAFHFDAGLYAAFLRRFAEGLGVTRVEGRIADVRVADDGAVTGVALADGRTLDADFFIDCSGFRGLLIEQALKAGYEDWSHWLPCDRAVAVPCESSGPPTPFTRSTAREAGWQWRIPLQHRIGNGYVHCSRFISEEDATATLMSNLDGRPLADPRTLRFTTGRRRASWVKNVVAIGLASGFLEPLESTSIHMIQSAIARLMTLFPDRRFDPAVTAEYNRQTRIEAEQIRDFIILHYHATARVDSPLWDHVRTMEPPESLRQKIDLFRSSGRFFRDGDELFSETSWAAVLTGQNVIPERFDPMAATHDPQMMAAKMARMRDVIGRAVADMPSHADYIARHCRAPHVAFAA

SEQ ID NO: 86012 - protein, 495 aa, Brevundimonas sp.
  misc_feature (1)..(495): tr|A0A0Q5V197|A0A0Q5V197_9CAUL Tryptophan halogenase OS =Brevundimonas sp. Leaf363 OX=1736353 GN=ASG17_04620 PE =4 SV=1
MTQPKRTRVVIAGGGTAGWLAAALLTRQLGPLLDVTLVESEQIGTVGVGESTIPTVTRFHALIGVEERGFMTATGATFKLGISFEGWGRTGDRYIHSFGDVGKSTWMGDFQHFWLEARDRGVAGALGDYCFEHQAADAGKFAAGGDGRLNYAYHLDAGRYARFLRAHSEAAGLTRVEGKIETVERDAGSGVITALALDGGRRVEGDVFLDCTGFRGLLIGDAMGVGFEDWGHWLPTNRALAVQTVSTEPAAPYTRAIAHDAGWRWKIPLQHRVGNGLVYASDHLSDDEAQARLLSSIDGERLIEPGLIRFRTGRRLKTWEGNCIALSLAAGFVEPLESTSIHLIMTGLARLVQAFPFDGISPAVVDRFNAQSREEMERIRDFIVLHYHLNQRDEPFWKAHRENDVPQTLKDRLALFGEQAQAYQAPDELFRVGSWMQVMLGQNLTPRAHHAMARMMPTDQLAGALADLKSNIDRAVDRLPTHQAFVDSYCAEAVA

SEQ ID NO: 86013 - protein, 165 aa, Verrucomicrobiaceae bacterium
  misc_feature (1)..(165): tr|A0A4Q2X2R5|A0A4Q2X2R5_9BACT Tryptophan halogenase (F ragment) OS=Verrucomicrobiaceae bacterium OX=2026800 GN =EOP88_26985 PE=4 SV=1
MSNAEGMRGMIRTIVVVGGGSAGWLTACRLAARSVGMGSGIKVLLVESATVPSVGVGEGTWPTMRNTLRKIGIDETTFIRSCDVALKQGARFVGWTDGSADDAYYHPLNPPAGAGDVDLAPYWLGLPDAKAETDADGASFADWVDYQSALCDAGLAPKTITAPEY

SEQ ID NO: 86014 - protein, 507 aa, Stenotrophomonas panacihumi
  misc_feature (1)..(507): tr|A0A0R0AQ83|A0A0R0AQ83_9GAMM Tryptophan halogenase OS =Stenotrophomonas panacihumi OX=676599 GN=ARC20_04060 P E=4 SV=1
MDNSRRIRKVVIAGGGTAGWLAGCALSHQFGDQLEITLVESELIGTVGVGESTVPPIRAFHHFLNIDEQEFLRAVAGTFKLSISFENWRRHGERYIHPFGMTGQNTLVCHFHHYWLDSLRRGMKSELGDYCLETVASRDDRFALGTQPQVNYAYHFDAGLYARFLRARAEKQGLVRIEGKIQQVHQDSHSGDVTALTLEDGQRIEGDLFIDCTGFRGLLTEQTLHTGYEDWNQWLPSDRAVAVQTESVGPPVPYTRAIAHEAGWRWHIALQHRVGCGLVFSSRHMSDDEARAKLLRDVGAPAIKEPWLVPFRSGRRLKAWNHNVIALGLASGFIEPLESTSIHLTISAVVRLLQLFPSNGGEESLRALYNEVSQKEMEHVRDFIILHYHATQRDEPMWKAAREMELPESLAIRLRAWRERAHAWQGTDELFRVDSWTHVLLGQGITPGAPHPLAGALSDADLSRLLTAVRQPIDRAVAQMPSQQGFIDRYCKAPPEVWGARRPMATA

SEQ ID NO: 86015 - protein, 500 aa, Rickettsiales bacterium
  misc_feature (1)..(500): tr|A0A2E6MRA1|A0A2E6MRA1_9RICK Uncharacterized protein OS=Rickettsiales bacterium OX=2026788 GN=CMP33_04510 PE =4 SV=1
MKICVVGGGSAGWITLSYLVATVDADITIVHSDEVDPIGVGESTTPTIKHIADTVGVDEKVWMKDAKATFKYGVEFHNWNKKGSRWFHTFDDLVPHQVFHKPMCDNGKQNHKKELSSVDYYINHKKGKGDSIEYNDYHGPMEYLLTEGLSPFSKNGNCTISDYPGYSYHINAFQFGESLRKHTAKDKFTEIVGTVNKIHTEKQNISAIELSTGQKIEADIFFDCTGFKRLLIGTMSSWKHYDDLINDRAIWGTIKTQSFKPVTQAHAQPYGWIWEIPTVGQIGSGYVYSSKHQKYDDALKTITEFWKSKGHKFEPFKSVEFDAGMLENVSKHNVVANGLAQSFIEPLEATSVMVTCTTVKAFVDLYKKGSKNLVKAHDKVMQKFILHTKHFVHMHYRLSERNDTSYWREVGNDPNVVQELCDYADTFKNARWCETGDTKFNQFNLISLLFGYEKDYVNEIEKIDDELLENYNHYTKAMMEHYLFLIRNNLTVEQYLNSLD

SEQ ID NO: 86016 - protein, 503 aa, Xanthomonadales bacterium
  misc_feature (1)..(503): tr|A0A2H0HSE5|A0A2H0HSE5_9GAMM Tryptophan halogenase OS =Xanthomonadales bacterium CG17_big_fil_post_rev_8_21_1 4_2_50_64_11 OX=1974109 GN=COW59_07120 PE=4 SV=1
MENADRAIRSIVILGGGTAGWMTAASLANTLGSNCRIELIESEAIGIVGVGEATIPPIKLFNHALGIDENVFLKASKGTFKLGIEFVNWTRLGQRYFHPFGQFGAEFDSVPLYQYWLRERARGDDTPLQDYAMAWVAARDNKFAPPLADRQRIQSTYDYAYHFDAGLYAQFLRVYAEARGVRRSEGKVVDVALRAEDGFIQSVKLDAGSVIEGDLFIDCSGFRGVLIEDALHTGYENWQHWLPCDRAVAVGCTHGSGPLTPYTRSTAHQAGWQWRIPLQHRMGNGHVYCSQFSSDDEATAVLLANLEGEPLATPRPLRFTTGRRKAFWNRNCIAIGLAAGFMEPLESTSIHLIQSAIARLLALFPDRHCEPLLAHEYNRITGQEYERVRDFLILHYKAVARDDAPLWRYTAAMNIPDTLRYKIDQFRSSGRIVAEPLELFQNPNWLAVLIGQEVWPQHYSALVDLRSAVDAPRLLASLRRVSAQASAALPDHAHYIAQHCRAG

SEQ ID NO: 86017 - protein, 504 aa, Brevundimonas sp.
  misc_feature (1)..(504): tr|A0A0Q5VCS6|A0A0Q5VCS6_9CAUL Tryptophan halogenase OS =Brevundimonas sp. Leaf363 OX=1736353 GN=ASG17_12270 PE =4 SV=1
MPANKIRDIVVVGGGTAGWMCAAALSKVMGTEQYNLTVVESEQIGTVGVGEATIPMILLFNQVLGIDEDEFVRETNGTFKLGIEFVDWRRLGHSYFHPFGLFGQDMDGVPFHNFWLRWAKSGGANADSGRFNAETEAARLNRFMRTPDTQNGALPRINYAYQFDAARYAAYLRRFSEKRGANRIEGKITQVHQNPTDGFITSVELEDGQQIRGDLFIDCTGFRGLLIEQTLKAGYDDWSHWLPANRAVAVPCAKSGDMTPYTRATAREAGWQWRIPLQHRTGNGYVFSSEYISEDEATAKLMSRLDGEPLAEPRVLRFVTGRRKKSWDKNVIAMGLAGGFLEPLESTSIHLIQVAISRILAYFPRDFIDPKLADQFNRDMAFDYDNVKDFLIAHYKVTEREDTPFWAYCKHMDIPEALKTRLQIFQERGDAMVRQYELFKEGSWWAVLSGQGMIPDSYHPVADVISEEDLRQRLSRIRTAIQDRVNAMPVQEAYLRDAKLSATA

SEQ ID NO: 86018 - protein, 507 aa, Sphingobium ummariense
  misc_feature (1)..(507): tr|T0IZK0|T0IZK0_9SPHN Uncharacterized protein OS=Sphin gobium ummariense RL-3 OX=1346791 GN=M529_00930 PE=4 SV =1
MTCTRRILIVGGGTAGWLTAAYLARFFSLAGHGGIEITLLESPELGIIGVGEGTFPTIRATLSFLGIDETQFLRATSATFKQGIRFDDWLHAPAPDGTRHHYLHPFEAPLYTDDANLVSCWLHKDSESRPRFAEAVTIQHGVAESRRAPKKFDEGAFSGPLNYAYHFDASGFARVLRDRAVELGVRHVTGLLTGVEPDADGGIARVLTREHGALEADLFVDCSGFRAELIKKALGAPLKSVRHLLFTDRALACKIPYAAPDAPIESFTIATAHAAGWTWDIGLESARGIGCVYSSTHMTDDEAAEVLRGYIGHDAYKARIIPFEPGYRETQWVKNCVAVGLSGGFLEPLESTGVLLIEAAVAMLAELFPLAGPIDAPAKRFNELIVGRYERIIDFLKLHYCLSRRDEPFWRDNADPASIPETLQELLRQWRYRPPNRFDFLLDLESFAFFNYQYILYGMDFRTTLGERADELPSAAADRLFARIRGFSLQATRELPTNRALMRQINA

SEQ ID NO: 86019 - protein, 547 aa, Rickettsiales bacterium
  misc_feature (1)..(547): tr|A0A2E3M8F0|A0A2E3M8F0_9RICK Tryptophan halogenase OS =Rickettsiales bacterium OX=2026788 GN=CMP19_13085 PE=4 SV=1
MSNQPIKHVVIVGGGTAGWLCAGVLAARLGNRIGNSDESAINITLVESPNVPSIGVGEGSWPSLRDTLQEIGIKEADFLTCCHASFKQGSTFAGWRNGHQGDKYQHPFTTPTGYTELDIHRCWQQFFSSESFEQSFCLQPDICHAGLAPKQNSTPEYAYVLNYGYHFDASALATLLTNHCKTSLGVKHTQAHIANVVTQDNGDIESLVTENGDTIKGDLFIDCSGQQGLLIDKHYHVPWHSVSSVLLNNRAVAVQVPYGSIDLSASADTIASTTIATAQTCGWTWDIGLQHRRGVGLVYASDYASEENAESILREHLAKRLPQSELENLTYRHLQFDPGYRKQFWVNNCIGMGMSAGFIEPLEASAIAMVELGIRMLCDQFPQNRQHMSHVASRYNQRFTYRWERVIDFLKLHYVLSEREEPYWLAQRSESSIPDSLNALLDLWQYQAPSRYDLIENEEIFPSASYQYILYGMGFHTTGRQLDKNSNMVKKAFALKQSLQKGKRQLLAGLPTNRDLLTAISHCVEKETTTNDNDKKEGPRHDVIGFR

SEQ ID NO: 86020 - protein, 508 aa, Rickettsiales bacterium
  misc_feature (1)..(508): tr|A0A2E3IBK6|A0A2E3IBK6_9RICK Tryptophan halogenase OS =Rickettsiales bacterium OX=2026788 GN=CMP20_14160 PE=4 SV=1
MSKAVKKIVIVGGGTAGWLTAAIVAAQHKTDDNNGLQIILVESSDIPTVGVGEGTWPTMKNTLQQIGLKESEVFARCHAGFKQGGKFVDWVHGNGDFYYHPFTVPLGYGRIDLAPYVEKIENYAVESNFQHHICEAGLAPRSMAEAEYKGQCNYAYHLDAGEFAEVLKEHCRNNLNVTQIIGTVDRVNLSDDGAIASITLKSDEQIDGDLFVDCTGFASLLLGQALEVPFICADKVLFNDSAIALHMPYDDATSPIATHTIATGQNAGWIWDIGLTHRRGVGHVYSSQYLSDDEAEANLRRYLGSGSDDIPVRKIGFKSGHRAQVWKKNCVAVGMAAGFVEPLEATAIMLVEISARFIADNIPPDTSLTPIIEKRFNQQMAYRWSRIIDFLKLHYMLTKRPEPYWQAHTDPDSIPESLQEDLALWKFRGPITSDFDAAIELFPAASYQYVLYGMGFKPDFSRQPHLYNEQANAQKIIHRNQQLTQQLLQTLPPHREYIERWLSTQSMR

SEQ ID NO: 86021 - protein, 505 aa, Sphingomonas sanguinis
  misc_feature (1)..(505): tr|A0A147JE62|A0A147JE62_9SPHN Tryptophan halogenase OS =Sphingomonas sanguinis OX=33051 GN=NS258_00265 PE=4 SV =1
MTKVTEDGVRVVIVGGGTAGWMAGAALTRLLSGQCSVRLIESEAIGVVGVGEATLPHIRAFNERLGIPEAEFMARTRATFKLGIEFRDWGRIGDSYIHPFGTFGRGTGAIDFHHYWARLMREGHDLPPLDALSYACALARDARFDHPDQTRGGLSSTFGYAYQFDALLFAPYLRGLAEEAGAIRTEGMVVDVERDGETGLIRSVTLADGERVEGDLFIDCSGFRSLLLGQTLEEPFEDWSKWLPTDRAVAMPCRTETAVTPYTSAIAMPAGWRWRIPLQHRTGNGYVYASDFISDADAARALEEAVEGEPLAEPRLLRFKAGRRRRSWIGNCVAVGLASGFLEPLESTSIYLVQQAITALIELFPGREIAASDRDEFNRVIDLEYDRIRDFLILHYHATTRDDSPFWNYVRTMPIPDSLAEKMELWRRRARVVKYREGVFLDASWIAVYLGQGIVPEGWDPRADVAGTPDLLRAVTDLRAEIAADVGARPEHRAFLEHYCPMVAA

SEQ ID NO: 86022 - protein, 287 aa, Sphingomonas sanguinis
  misc_feature (1)..(287): tr|A0A147IJY4|A0A147IJY4_9SPHN Tryptophan halogenase (F ragment) OS=Sphingomonas sanguinis OX=33051 GN=SB4_1818 5 PE=4 SV=1
MVQPVQHIVIVGGGTAGWLTAGVIAARHQGRRPHGFTVTLVESPNVPIIGVGEGTWPTLRATLKTMGVSETAFFRECDASFKQGARFNRWTTGAAEDGYYHPLMLPQSFGQVNLASHWLAGEGDASFCDAVTPQGRICDAGLAPKTIATPEYEALANYAYHLDAGKFADFLRRHCCEQLGVRHVLADVEEVLLAESGDIRAVRTAQAGEVTGDLFVDCTGFRSLLLGEAMGVPFRPLNDVLFCDTALAIQVPYDDPEAPIASHTISTAQSSGWIWDIGLPTRRGVGQ

SEQ ID NO: 86023 - protein, 534 aa, Glycomyces artemisiae
  misc_feature (1)..(534): tr|A0A2T0U838|A0A2T0U838_9ACTN Tryptophan halogenase OS =Glycomyces artemisiae OX=1076443 GN=B0I28_11644 PE=4 S V=1
MDTSPTDHRIRNVVVLGGGTAGWMTASYVAKAFQGTVNVTVLEAPAVPRIGVGEATVPNLHKAFFSFLGIEEDEWMRECNASYKMAVKFVNWRTEGEGEAASRTHKGKPDHFYHTFGILPNHERLPLSHYWFADKQAGCTEDQFDYACYREPAAMDAKLAPRDREGNRWTNYAWHFDAQLVADFLCRFSVKTLGVTHIQDRFTEAVRDERGFVTALKTETGRTIEGDLFVDCSGFRGLLINQTLREPFLDMSDYLLCDSAVAAAVPHDDEANGIEPYTSAIAMKSGWTWKIPMLGRFGSGYVFSSRFTDRDTASADFCRLWGLDPDSTALNQISFRVGRNRRTWVKNVVAVGLASCFLEPLESTGIYFIYAAIFQLVKHFPDKRFDPVLAKRFNAEIETMFDDSRDFIQAHFKFAPRNDTPFWRENKHLVLDAGMQEKVDMYRAGMPVNMPVADESTYYGNFEAEFRNYWTNGSFYCIFSGLDLVPDHVYPAQALRPGDAAGAREVFAGIADERDRLLGTLPTAYESLRELHGK

SEQ ID NO: 86024 - protein, 515 aa, Sphingomonas sp.
  misc_feature (1)..(515): tr|A0A0Q8XVK7|A0A0Q8XVK7_9SPHN Tryptophan halogenase OS =Sphingomonas sp. Root241 OX=1736501 GN=ASE13_10470 PE= 4 SV=1
MNSGHQQDIVILGGGAAGWIAAALLAKRLDPHRARITLVESEEIGIIGVGEATIPILAQCNALLGIDEFDFVRSTQGTFKLGIEFCDWGTVGNRHFHAFSDYGHPVEGVSTHHYWLRMRQSGEDRPIDDYSFAYAVAKNNNFVPGDPQNPRYHHAYHFDAGLYARYLRDVAIALGVQRIEGKMTHFDLDGESGDIAAIHLANGLKVPGDFFLDCSGFASELLGTALNTPFVDWSRWLLCNSAIAVPSKRTGAPTPFTRSTAHTGGWRWTIPLQHRSGNGMVYNSDLWSDDAAREALLGNIDGEPIAEPRLFRFTSGHRKHFWSRNCVGIGFASSFLEPLESTGIQLIVMGILKLLKYFPERTIDPVLRDEYNRLSTSEIERIRDFIIAHYYLSRRPEPLWSACRDMEIPDSLRHKLDVWNASGQIALGDSESYMEPSWLAILLGNGAVPARYNVSADLYPLEQIRTGMELRREEIIRSAQEVTSHQDFIDRHCKAPQTAPAIETAKVSGRTHFNE

SEQ ID NO: 86025 - protein, 511 aa, Sphingomonas sp.
  misc_feature (1)..(511): tr|A0A0Q8XMV4|A0A0Q8XMV4_9SPHN Tryptophan halogenase OS =Sphingomonas sp. Root241 OX=1736501 GN=ASE13_16285 PE= 4 SV=1
MTDRGRAERAIERVVIVGGGTAGWMAATALSAHLAGTGVKITLIESSDIGTIGVGEATIPTIRRFYAQLGMSDAEVMQACEATAKFGIRFVDWLRDGQSFVHPFGRYGQDLKGVDFHHYWLTARASGDAAPLGDYSLGALLAGSGHATLPAPNPGSQLGIFDWALHFDAALFAQHMRRFAEKQGVTRLDARITDVKLRANDGFIEALTLDSGVEVAGDLFVDCSGFRSLLLGETLGVAYEDWSHWLLCDGAFAVQSERAGPPPSCTTVTARTAGWQWRIPLRAREGNGMVFSSRFQTDDDARDELLAKIPGKPTMEPRRLRFTPGRRAVAWAKNCVALGLASGFLEPLESTSIALIETGIERLKALFPDKDFDPAVVAEYNEQSAEEIERVRDFLILHYKLNGRSDAFWQACRDMTVPDTLKRKLELWRARGAFARYRWEMFSPPSWLAIYAGFEALPDRFDPAVAAVDPAQLTRSLEAMRRSLAETVADTPTHQEFLEIMDGAAAKGRAA

SEQ ID NO: 86026 - protein, 518 aa, Stenotrophomonas panacihumi
  misc_feature (1)..(518): tr|A0A0R0AEB7|A0A0R0AEB7_9GAMM Tryptophan halogenase OS =Stenotrophomonas panacihumi OX=676599 GN=ARC20_00900 P E=4 SV=1
MTQSIRHVVILGGGSAGWLTAGVLAAEHGGPGADDLRITVIESPDVPIIGVGEGTWPTMRDTLRRIGVSEADFIRECEGAFKQGSQFVNWTDAGPNDTYYHPFHLPGGYDEADLIGGWRQHHPDAQFDHLVCAQPHLCDANKGPKQFATPEYASVANYAYHLDAAKLGGFLRKHCVARLNVRHVPDLVTEVLSHDNGDIAALRTREHGDIAGDLFIDCTGLRALLIGQHLGEPLLPQQHLLFNDRAIPTQVAYADPRAPIACQTISTAQKFGWIWDIGLQGRRGIGHVYSSAYGSEQDAHDALVRYIVETGGREQDITWVPRVRIEPGYRLRPWRNNCVAVGLSSGFLEPLEASSLVLVELAAAMIADQFPATRDTMDILAGRFNDTFRYRWERVVDFLKLHYVLSRRDDSDYWRDHRREESWPERLRDLLSLWRYQPPSRYDLYRIEEVFPWASYQYILYGMGFVPQGRVGTAHTAAIQRAERCFRQTAEQTARMLAALPGHRELIDHIRARGLPRV

SEQ ID NO: 86027 - protein, 518 aa, Sphingomonas sanguinis
  misc_feature (1)..(518): tr|A0A147IVA4|A0A147IVA4_9SPHN Tryptophan halogenase OS =Sphingomonas sanguinis OX=33051 GN=SB4_09390 PE=4 SV=1
MERPATAPQPRGSAGDPAAIGRIVILGGGTAGWMVAAALSRVLGRDGPSITLIESEEIGTVGVGEATIPPIQAFNALLGIDERAFVAATNGTFKLGIEFVDWRQTGHRYFHPFGTYGHDFGAIPFEAIWQRMKQQGRAEPLDAYALATLAARANRFTTPRPGNTPLGHIGYAYHFDAGLYARFLRSRAEAQGVVRHEGRVAQVERSAEPGRIEAIVMEDGTRIAGDLFLDCSGFRALLLGETLGVGFEDWGHWLPNDRAIAVPSQRTGPLTPYTRSTAHGAGWQWRIPLQHRTGNGIVYASTHLSDDEATARLLSGLDGAALAEQRMLRFRTGRRTRLWEGNCVALGLAGGFLEPLESTSIHLIQVGIARLLEMLPTRAFEAADRRRYNRLMAEEYEDIRDFIILHFHATERDDTPYWRGLRDMELPETLQDRLAIYRATGRIYREGEALFTKTSWLAVMDGQGLSPRGFDPVALGMPVDEAAARLAHIALVTRKSLEVMPDHDAFLRQHGYSMTDSA

SEQ ID NO: 86028 - protein, 505 aa, Sphingomonas sanguinis
  misc_feature (1)..(505): tr|A0A147IVR1|A0A147IVR1_9SPHN Tryptophan halogenase OS =Sphingomonas sanguinis OX=33051 GN=SB4_08635 PE=4 SV=1
MTKVTEDGVRVVIVGGGTAGWMAGAALTRLLSGQCSVRLIESEAIGVVGVGEATLPHIRAFNERLGIPEAEFMARTRATFKLGIEFRDWGRIGDSYIHPFGTFGRGTGAIDFHHYWARLLREGHDLPPLDALSYACALARDARFNHPDQTRDGLSSTFGYAYQFDALLFAPYLRGLAEEAGAVRTEGMVVDVERDGETGLIRSVTLADGERVEGDLFIDCSGFCSLLLGQTLEEPFEDWSKWLPTNRAVAMPCRTETAVTPYTSAIAMPAGWRWRIPLQHRTGNGYVYASDFISDADAARALEAAVEGEPLAEPRLLRFKAGRRRRSWVGNCVAIGLASGFLEPLESTSIYLVQQAITALIELFPGREIAASDRDEFNRVIDLEYDRIRDFLILHYHATTRDDSPFWNYVRTMPIPDSLAEKMELWRRRARVVKYREGVFLDASWIAVYLGQGIVPEGWDPRADVAGTPDLLRAVTELRAEIAADVGARPEHRAFLERYCPMVAA

SEQ ID NO: 86029 - protein, 505 aa, Sphingomonas sanguinis
  misc_feature (1)..(505): tr|A0A147J727|A0A147J727_9SPHN Tryptophan halogenase OS =Sphingomonas sanguinis OX=33051 GN=NS258_12085 PE=4 SV =1
MDKPVTRIVIVGGGTAGWLAACRIAAATMGSVTVTLIESPDVPTIGVGEGTWPTIRRTLERIGIGEAEVLLACDGSFKQGTCFDGWTTGVDDDRYYHPFVPPIDVDPADLPGDRPFAFTACAQPQVCVEDLAPRQRAMPDYGGALNYAYHLDAAKLATLLARHATTRLNVRHVRDHVVSVDRVESGDIGAVTTRQSGAIAGDLFLDCTGRRGLLIDETLGAELIDASSVLFNDRALAVQLPVTPDSPIASQTMATAHAAGWIWDIGLPTRRGIGCVYASAFMSDDQAEGILTDYCRRIALESPAPRRLSFRSAYRAQPWTANCLAIGQSAGFMEPLEASAIVMIELSLDALLEDFPVDRAVMPIQAQRFNALARYRWERIVDFLKLHYVLSQRDEPYWRAHRDPASIPDRLVEALVLWRHRAPSALDLPMQEELFPAASYRYILWGMGFPAPLPSPVRRAARPDLPNQLRQIDQRARALTASLPTNRAYLDALRAEQAPLAERTA

SEQ ID NO: 86030 - protein, 498 aa, Sphingomonas sanguinis
  misc_feature (1)..(498): tr|A0A147J1Z1|A0A147J1Z1_9SPHN Tryptophan halogenase OS =Sphingomonas sanguinis OX=33051 GN=SB4_03680 PE=4 SV=1
MTDKRIRRIVILGGGTAGWMTAAALSRALAGQGVAITLVESDAIGTIGVGEATIPTIHWFNQIIGLDERQFMAETQATVKLGIEFVGWNGEGSRYFHPFGTFGPPGDGAMFLHRLIRARADGDLAPTEAYSLTAQAARAGRFARPVADRRSLLSTLGYAYHFDAGLYARYLRGLAERAGVTRIEGVVASVEQDGESGFVRSLTLDGGQAVAGDLFIDCSGLRALLIGQTLGVGFDDWSHWLPCDRAWAAPSAAESDLTPYTRATAAEAGWRWRIPLQHRVGNGYVFSSRFQDEEAARASLIAAMDGPPLADPRLIRFTPGMRREAWRANVVAIGLSSGFLEPLESTSIHLIQSGIAKLLSLFPAADGSPLLARQFNRVFGQEMLDIRDFLILHYHATTGRDEPLWRERQAMAIPGTLAEKLGHFRSSGRIVLSSDELFRDASWFAVLDGQGERPGDHNPLIEVLGAEDNLRQLAALRAEIAKTAAAMPPLPGRRSASA

SEQ ID NO: 86031 - protein, 505 aa, Novosphingobium aromaticivorans
  misc_feature (1)..(505): tr|Q2G7X6|Q2G7X6_NOVAD Tryptophan halogenase OS=Novosph ingobium aromaticivorans (strain ATCC 700278 / DSM 1244 4 / CIP 105152 / NBRC 16084 / F199) OX=279238 GN=Saro_1 607 PE=4 SV=1
MKRPNPAVPALPRRIVIAGGGTAGWMTAAALARTLGKVAQVTLVESEQIGTIGVGESTIPPLVAYNRILGISEAEFMRATQATFKLGINFENWRVPGEAYFHSFGGTGKDHWSAGFQHFWMHGLARGHDEAYGEYCLELKAAQAGRFAHLPEDRMNYAYQLDSGLYARFLRQMAEADGTVRIEGKIGGVPLDPETGDIAALVLEDGQRIEGDLFIDCTGFRALLIEGALHVGYDDWTHWLPCDGAIAIQTSSVRAPVPYTRAIAHGSGWQWRIPLQHRQGNGIVYCSAYMDHEAALEMLLSTVEGEKLVRPNPIRFRTGVRRKQWHRNCVAVGLSGGFMEPLESTSIHLIQRAILRIVRMLPAGTISARDVAEFNDQQMLDMEQIRDFLILHYKATDRRDTPFWRHCASMEVPESLAHRIELFRETGRVFRRNEELFAENSWVQVMMGQGIVPQSYHPVAAKLRDEELAHLLQTLREQVDRTVAALPAHGDYIARYCGAEMPAAA

SEQ ID NO: 86032 - protein, 499 aa, Rickettsiales bacterium
  misc_feature (1)..(499): tr|A0A2E3I970|A0A2E3I970_9RICK Tryptophan halogenase OS =Rickettsiales bacterium OX=2026788 GN=CMP20_09585 PE=4 SV=1
MAQPFKIVILGGGTAGWMAANLFAHKWAGKLNDKSLRVTLVESPDIGIVGVGEGSTPTLKRFFSMLGIADGDWMPQCNATYKMNIAFEDFTASGIKRYSHPFISQLDTFTQRAFMVNARTRRLGLDTHTNPGDFLLNGVLAKQNKGPQTPDNFPFNIEYGYHFDSHLLGAFLQQHAIGLSVEHVQANVESIKQHPNGDIAELHCKEGMVINGDLFVDCSGFSSALMQKTLGVKFNSYKDNLFNDSAVVVPTPISEHIPVETTSTALSAGWCWKIPLTNRFGNGYVYSSDFIDSSQAERELKQQLNLSEDSDCRHLSMKVGALAQQWQNNCLGIGLSAGFIEPLEATALHLTQISIEQFILEFEEGGFTNRLQGQYNAKMQHRTERTRDYIVAHYKLNTRNDSEYWRANRNNMHLSESLLQILDVWYKRGDLEAEIKRQDLSTHFNAVSWNCLLAGYGAFPPLATKQPGSGDLYLEQKIESFLHGCALNFEDHRTNLHNH

SEQ ID NO: 86033 - protein, 513 aa, Sphingomonas sp.
  misc_feature (1)..(513): tr|A0A0Q8XSG2|A0A0Q8XSG2_9SPHN Tryptophan halogenase OS =Sphingomonas sp. Root241 OX=1736501 GN=ASE13_07770 PE= 4 SV=1
MRPIKNIVIVGGGTAGWLTAGIVAAKHRGRMAAGFTVTLIESPTTPIIGVGEGTWPTLRTTLPKIGVSETDFFRECDAAFKQGASFARWTTGALDDAYYHPLMLPQSFHQLNLVPHWLAGPVKGSFCDAVTPQGRICDAGLAPKTIATPEYDAVANYAYHLDAGKFAPFLQRHCCEKLGVRHVLADVRRVHLTEDGDIRSVETEQAGEIEGDLFVDCTGFRALLLGDALGVPFKDCGDVLFCDTALAVQVPYAREDSPIASHTTSTAQSAGWIWDIGLPTRRGTGHVFSSHHISDDEAERELRAYLGEAGKDLPVRKIRIRSGHRETFWKGNCVAVGLAAGFLEPLESSAIVLIELSAKLIAEQMPVCREVMDVVASRFNATTHYRWGRIVDFLKLHYVLTRRTDSDFWRDNVRPESIPDRLQELMLLWKYQPPWFHDEFDRVEEVFPPASYQYVLYGMGFRTEIEPSALAGEARLAERAMRENVTHTERLRVGLPRHRDLIYKVHEHGFQPV

SEQ ID NO: 86034 - protein, 511 aa, Sphingomonas sanguinis
  misc_feature (1)..(511): tr|A0A147JCF5|A0A147JCF5_9SPHN Tryptophan halogenase OS =Sphingomonas sanguinis OX=33051 GN=NS258_02080 PE=4 SV =1
MTGAAHSNSPIKTVTIVGGGTAGWMAAALLSRLLLGAYTIRLIESEEIGTIGVGEATIPAIRTFNGLAGIEEFEMVRATQATFKLGIEFRNWRAPGHSYIHGFGKIGQDLYWLHCHQFWLKEAARGRAKHFDHYALNTLAARMNRFTMPDPAHPNSPIADIDYAYHFDASLYARYLRTRAEKAGVERIEGRIVAANARASDGHLDHVVLADGRTVDGDLFIDCSGMRGLLIGEAMGVGYEDWSQWLLCDRALAVPSARGSGPLTPYTRSTAHGAGWQWRIPLQHRTGNGHVYSSRFVSDEEAVATLLANLDTPALGDPRPVRFRPGKRTRAWEKNVVALGLAGGFLEPLESTSIHLIQTGLLRLLALFPGRGFHAADIAEYNRQTDFEYRDVRDFIIAHYKVTLREDTPFWQYCRHMDVPDSLAERIELFRSSARFFMHGKAELFREESWVQVLLGQGLDAQYDPMVDMIPDAQTTAFLRDVEEVIAEVASSLPTHEAFIARHCQAPPLQG

SEQ ID NO: 86035 - protein, 307 aa, Sphingomonas sanguinis
  misc_feature (1)..(307): tr|A0A147IVV1|A0A147IVV1_9SPHN Tryptophan halogenase (F ragment) OS=Sphingomonas sanguinis OX=33051 GN=SB4_0864 0 PE=4 SV=1
MNATDRIAHVLVAGGGLTAWYAAAALKRRAPFLTVTLLATAPAADALADRIACTLPSLLGFQADLGIGEDDGVTRAGAGYRLGTRFIGWAEGLPDYVHAYGGYGHPIGSAAFHLHWVRAALDGEAAPFDSYAPAAHLARAGRFVPPTPNTPFAQHDYGLTLDLERHLAMVRAFARHVGVIERPGTIAETVVDARGFIGEVRLADGQRISADLYIDATGPAAHLRDAVDREWQDWHDWLPCDRVLLGTRASGEGAPVLTDVTAHAAGWRWSSGEQVGIAYSAAHMADADAAAMLGATPGEPIALRPGT

SEQ ID NO: 86036 - protein, 493 aa, Sphingomonas sanguinis
  misc_feature (1)..(493): tr|A0A147J6Y9|A0A147J6Y9_9SPHN Tryptophan halogenase OS =Sphingomonas sanguinis OX=33051 GN=NS258_12070 PE=4 SV =1
MSAPRRIVIAGGGTAGWMAAAALARTLGRAVSVTLVESDAIGTIGVGESTIPPIITFNRLLGINEAEFMAATQATFKLGIQFDGWKGPDDRYFHSFGLTGKDHWAAGFQHFWLDGVRRGHDEPYDEYCLELVAAREGRFAHLPDERMNYAYQLDSTLYGRFLRRMAEGDGATRIEGRIAQVDLNPDTGDIAALVLDDGRRVEGDLFLDCTGFRALLIERALHVGFDDWSHYLPCDAAVAVQTESVRPPVPYTRATAHEAGWQWRIPLQHRAGNGIVYCSRYMDHDAARTKLLDTIEGKVLTEPNMLRFQTGARRRQWHRNCIAVGLSGGFLEPLESTSIHLIQRAILRLIRLLPGGPISAHDVAEFNDQQMTDMLQIRDFLILHYKVHERRDSAFWRQCADMDVPDSLAHKIALFRETGRVFRRNDELFAENSWVQVMMGQGITPESHHPITARLSDEELERLLSTLRQNVATTVRSLPPHADYVARHCGTAA

SEQ ID NO: 86037 - protein, 506 aa, Sphingomonas sanguinis
  misc_feature (1)..(506): tr|A0A147IK28|A0A147IK28_9SPHN Uncharacterized protein OS=Sphingomonas sanguinis OX=33051 GN=SB4_17505 PE=4 SV =1
MAKQAVRRIVIAGGGAAGWMSAAVLAKVLKPQNCTIQLVESDDIGIIGVGEATIAGIHWLNNILGIEEDDFVRASQATFKLGIDFRDWTGAGRRYYHPFGRYGVPLGGVGFHHLWVKAQRLGLAASFEDYCMTSMAARLGRFDRPDRAPPGSPLKTLSYAYHLDAGRYAQYLRTLAVGMGVERIEGTIERVDQNPETGYITRLHTRRGDVVEGDLFLDCTGFHALLIQGVLQTGTIDLSNFLPCDRAWAVPCERTGDTIEPSTRCTARAAGWQWRIPLQHRTGNGHVFCNEFMSEDEAHDVLMRNLDGRPLGEAKLIKFKTGRTRQVWNKNVIAVGLSAGFLEPLEATTIHIILNSLNKIIGHFPRRTPDPLTVAEFNRQLDLQFDTIKDFLVLHYRLSEGRDEPLWRYFRQLTLPERLERMIESFRMTARIAPSEFDQFKEASWFSVMLGQGVVPEDHDPLADNIDDAALASHLARVRDNIRQIAERMPAHDAYIRANCATPVPA

SEQ ID NO: 86038 - protein, 518 aa, Sphingomonas sanguinis
  misc_feature (1)..(518): tr|A0A147I1N8|A0A147I1N8_9SPHN Tryptophan halogenase OS =Sphingomonas sanguinis OX=33051 GN=NS319_05860 PE=4 SV =1
MERPATAPQPRGPAGDPAAIGRIVILGGGTAGWMAAAALSRVLGRDGPSITLIESEEIGTVGVGEATIPPIQAFNALLGIDERAFVAATNGTFKLGIEFVDWRQTGHRYFHPFGTYGHDFGAIPFEAIWQRMKQQGRAEPLDAYALATLAARANRFTTPRPGNTPLGHIGYAYHFDAGLYARFLRGRAEAQGVVRHEGRVAQVERSAEPGQIEAIVMEDGTRIAGDLFLDCSGFRALLLGETLGVGFEDWGHWLPNDRAIAVPSQRTGPLTPYTRSTAHGAGWQWRIPLQHRTGNGIVYASTHLSDDEATARLLSGLDGAAPAEPRLLRFRTGRRTRLWEGNCVALGLAGGFLEPLESTSIHLIQVGIARLLEMLPTRAFEAADRRRYNRLMAEEYEDIRDFIILHFHATERDDTPYWRGLRDMELPETLQDRLAIYRATGRIYREGEALFTKTSWLAVMDGQGLSPRGFDPVALGMPVDEAAARLAHIALVTRKSLELMPDHDAFLRQHGYSMTDSA

SEQ ID NO: 86039 - protein, 508 aa, Sphingomonas sanguinis
  misc_feature (1)..(508): tr|A0A147HY19|A0A147HY19_9SPHN Tryptophan halogenase OS =Sphingomonas sanguinis OX=33051 GN=NS319_09085 PE=4 SV =1
MDAAPSADRIARRVVIVGGGTAGWMAAAALARFLPADHRITLIESDAIGTVGVGEATIPGIRLFNQMLGLDEAEFLRATNGSFKLCIRFEGWSGEGSGYLHAFGSIGRALGLVPFHHYWLRGGGAANPASLWGHSPSAQAAMSGRFAPDPGRPDLPSGLAWAYHFDASLYAALLRRHAEGTGVVRVEGRIASVARDMSGRIDHVVLDGGDAHAGDLFIDCTGFRALLIGETLAEPFDDWSELLPCDRALAVAGERAAPLPPYTRAIAHGAGWRWRIPLQHRTGNGLVYDSRHLSEDEAVDRLLTALNGEAMGEPRRLRFTTGRRRRAWVGNCVALGLAAGFLEPLESTSIHLIQSGIARLLEYWPGPTLQQVEIDAYNAETAAEWLAIRDFLILHYNANARTEPFWAERRAVPLPDSLAARIALFRANGRFRREGEELFAEPAWVQVMIGQGIIPTGHHALADTLSAHELDDFLNLTRRHAAQVAARLPTHDAFLAAHCAAPAPKVFA

SEQ ID NO: 86040 - protein, 503 aa, Massilia sp.
  misc_feature (1)..(503): tr|A0A1G6UIV1|A0A1G6UIV1_9BURK Tryptophan halogenase OS =Massilia sp. PDC64 OX=1881046 GN=SAMN05428966_104195 P E=4 SV=1
MENTHQQDRGRPIRRVVIAGGGTAGWMAAAALARTLGKVLDIKLVESDDIGTVGVGEATIPSLVHFHRLLDIGEQEFMAATQATFKLGISFEGWRARGEDYIHSFGMTGTDHWTAGFQHFWLKGRDRGLASDYGDYCLELVASQEKRFGHLPNQGINYAYHLDATRYARYLRRFSEHFGAQRIEAKIASVDTDPATGHITALVLDSGTRIEGDLFIDCTGFRSLLLGQTMGVEYEDWSQWLFNDSAIAVQTESTGPAVPLTRSMAHDWGWQWRIPLQHRTGNGIVFSSRYTDEATARATLLGNIEGKVLTEPRVIRFTPGQRRKVWAGNCIGLGLASGFLEPIESTSIHLIQRGIVRLLQTFPSHGIQQSDIDEFNAQAEEDIRTIRDFIILHYKVTNRRDTPYWHDAATMTVPDSLQHRIDLFRDGGRVFRAGNELFAENSWVQVMLGQGLTPERWHPSADLMGDDELRGFLDGIRNGVRRTVSQLPPHQQYVERYCPAGKP

SEQ ID NO: 86041 - protein, 513 aa, Octadecabacter sp.
  misc_feature (1)..(513): tr|A0A5B9ER09|A0A5B9ER09_9RHOB Tryptophan 7-halogenase OS=Octadecabacter sp. SW4 OX=2602067 GN=FTO60_04155 PE= 4 SV=1
MSGAPKHIAVVGGGTAGWLSALVLQKAAQSARQPISISVIESPDIPTVGVGEGSTSVFRQVLLDLGIDESEFLAETGATFKFGIHHQGWRADGGSYYGPIDDPNALVPHPDGLPANWLHQARVAGGKPLADAHLFTALMRGRKAPYARKNGRLIALSQYHYAYHFDQARLGRFLATKASGIAHIRAEVAQTKRNSASGDITDLVMTDGTAVAVDLVLDCTGFRRAIIGKMDAGWTSYGTFLPLNKAMPFWLDHAPDKDIPTHTNARALGAGWMWGIPVRDRMGCGYVFSDAHTTPDAAQAEIEAALGQPIDPRGVLSIDPGRLGRAWINNCIAIGLAQSFLEPLEATSIHGSLVQALMLTQISLDTVLGGAPDRARSEYNAATARQVDDFAQFINLHYTGGRRDTPFWRDMAASGISQQSRDRLAQWQSHPLTRADFAPFPGNLPHVEEQLFAPVLDGLGHLPKAPAKQLFANTPQHRAAARKTLDRLSREFRGAANMALGQRTYLEQLRATH

SEQ ID NO: 86042 - protein, 500 aa, Sphingomonas sp.
  misc_feature (1)..(500): tr|A0A0Q8XEH1|A0A0Q8XEH1_9SPHN Tryptophan halogenase OS =Sphingomonas sp. Root241 OX=1736501 GN=ASE13_16350 PE= 4 SV=1
MTDNRIRRIVIVGGGTAGWMAAATFARILGPEYASVTLIESDEIGIIGVGEATIPQMATFNRMLGVDENEFMRATQGSFKLGIQFVNWGRQGHTYFHPFGKYGVDMQGVSFHAYFLRLHQLGEAPDVDEWSLQAKAGQMGKFMRSIDAGRSPLSDIAYAFHFDAGLYARFLRGYAEERGVVRREGKIVDVKLRGEDGFVQSVVMEDGTEVEGDLFVDCSGFRGLIIEQALKAGFTDWSHWLPCDRAIAVPCESVDEWTPYTRSTAHKAGWQWRIPLQHRTGNGHVFCSKYMSDDEATAILLANLDGKPLADPRTVPFRTGHRNKLWIKNCVAMGLAGGFIEPLESTAIWLIQSGLSRFLTMFPDKHFNQADVDRYNRIMTTDYEEIRDFIILHYHATERQDSPFWDYCRTMEIPERLAEKMRVFRSHGRAFRENEELFNDTSWFAVMHGQLMGAQSFDPVAEVMSLEETRSRLAHIREAIANSADYMPKHRDFIRENCAA

SEQ ID NO: 86043 - protein, 518 aa, Alphaproteobacteria bacterium
  misc_feature (1)..(518): tr|A0A2N3DTU3|A0A2N3DTU3_9PROT Tryptophan halogenase OS =Alphaproteobacteria bacterium HGW-Alphaproteobacteria- 15 OX=2013661 GN=CVT76_00190 PE=4 SV=1
MSDSSRPIRRIIIVGGGSAGWICAARIAAQNAANSPDGLKVVLIESSNVPTIGVGEGTWPTMRATLRKIGLSETDFLRRCDAAFKQGGKFVGWTDGTSAEAYYHPLNAPQGAPQINLSGHWAQMHAHGGSEFADAVDFQAALCEAGLAPKAITTPEYAAVTNYAYHLDAGKFAQLLQEHAVTRLGVEHVIDDVVNVRRADNGDISAVLLKQKGEVVGDFFVDCTGFAALLIGQTLGVPFRDCSDILFADRALAMQVPYPAPDAPIACHTIVTAQDSGWVWDIGLQSRRGVGHVYSSRHATDDAAELALRRYIGPAADQLEARRIKIRAGHRETFWRNNCVAIGLSAGFLEPLEASALMLIEAATDFIAERMPANRAVMDTAAAQFNRAFTHHWDRIIEFLKLHYVLTKRTDTQFWRDNCDPASIPDDLQECLKLWRYQPPSPQDFPHQPEVFSWPSYQYVLHGMRFETDYAQSALMADSENARRWFAVAANLRDRTLSELPKHRDLLNRVREFGLQPV

SEQ ID NO: 86044 - protein, 505 aa, Sphingomonas sanguinis
  misc_feature (1)..(505): tr|A0A147HX29|A0A147HX29_9SPHN Tryptophan halogenase OS =Sphingomonas sanguinis OX=33051 GN=NS319_10515 PE=4 SV =1
MDKPVTRIVIVGGGTAGWLAACRIAAATMGSVTVTLIESSDVPTIGVGEGTWPTIRRTLERIGIGEAEVLLACDGSFKQGTCFDGWTTGADDDRYYHPFVPPIDVYPADLPGDRPFAFTACAQPQVCVEDLAPRQHAMPDYGGALNYAYHLDAAKLATLLARHATTRLNVRHVRDHVVSVDRVESGDIEAVTTRQSGAIAGDLFLDCTGRRGLLIDETLGAELIDASSVLFNDRALAVQLPVTPDSPIASQTMATAHAAGWIWDIGLPTRRGIGCVYASAFMSDDQAEGILTDYCRRIASESPTPRRLSFRSAYRAQPWTANCLAIGQSAGFMEPLEASAIVMIELSLDALLADFPVDRAVMPIQAQRFNALARYRWERIVDFLKLHYVLSQRDEPYWRAHRDPASIPDRLVEALVLWRHRAPSALDLPMQEELFPAASYRYILWGMGFPAPLPSPVRRAARPDLPNQLRQIDQRARALTASLPTNRAYLDALRAEQAPLAERTA

SEQ ID NO: 86045 - protein, 499 aa, Sphingomonas sp.
  misc_feature (1)..(499): tr|A0A0Q8XJT9|A0A0Q8XJT9_9SPHN Tryptophan halogenase OS =Sphingomonas sp. Root241 OX=1736501 GN=ASE13_07965 PE= 4 SV=1
MQQLKRILIVGGGSAGWMTAALLSQLFQGLYEITLVESEQIGTIGVGEATIPAIKKYNELLGLDENEFMSRTQGSFKLGIQFVDWWRRGHSYIHGFGVIGQDLGWLRCHHYWLKARAAGKASDFAAYSINTAAALANKFMRADPKLAESPIGHIAHAFHFDAGLYARFLRGYAEARGVRRREGKVANVALRSEDGFVESVTMDDGEVIAADLFVDCSGFRGLIIEEALETGYETWSQWLPCDRAMAVPCARTEPFTPYTRATARTAGWQWRIPLQHRTGNGHVYSSAYIDDAEAEAQLLANLDGAQLAEPNRIRFTTGKRRKTWNRNCVAIGLCSGFLEPLESTSLHLIQSAIIRMVRLLPDAGFDPATIAEFNRQTDFEYERIRDFIILHYKATERDDTPFWRYCRDMEVPDTLQRKIDLFAANGRVFREDDELFTEESWIQVFLGQGVIPRGYDPLVDIKSDVQVAQFLGNVENVIGKCVAVMPRHADYVAKTCPAA

SEQ ID NO: 86046 - protein, 504 aa, Sphingomonas sanguinis
  misc_feature (1)..(504): tr|A0A147HRR3|A0A147HRR3_9SPHN Tryptophan halogenase OS =Sphingomonas sanguinis OX=33051 GN=NS319_18315 PE=4 SV =1
MTTPSPDAIRSVVIVGGGTAGWMTAAALAHAMPRGLSITLVESDAIGTVGVGEATIPPVRLFNQTLGIDEAEFLRETKGSFKLGIEFIGWGRAGHRYFHPFGTHGKSFDLVAVHQHWLAAGGPDSGIAFDDLSMAWGAGKRGRFAQPMADPRSVASTFDYAYHFDAGLYARFLRRYAEARGVARVEGKIAGHALENTRGHVASVTLDDGRVLAGDLFVDCSGFRGLLIEEALGTGYEEWAHWLPCDRAVAVPCETGGDGLTPYTRSTAREAGWQWRIPLQHRTGNGYVYCSRHISDDQAAATLMANLDGQALGDPRFLRFTTGRRRLMWNRNVVAIGLSSGFMEPLESTSIHLIQAGIAKLLAYFPTQAFEPAGIVEYNRVAITEYERIRDFLILHYKLTERTDSALWQECAAMDIPDTLAMKIDHFRSAGRLVTRDMDLFGPASWAAVHIGQFNMPEGLDPLLAYGDPAQSRVFVAKLAGAIGQMAESMPTHAQWLKKIGATA

SEQ ID NO: 86047 - protein, 500 aa, Sphingomonadales bacterium
  misc_feature (1)..(500): tr|A0A1G3K4E2|A0A1G3K4E2_9SPHN Tryptophan halogenase OS =Sphingomonadales bacterium RIFCSPLOWO2_12_FULL_63_15 O X=1802170 GN=A3H25_09985 PE=4 SV=1
MSTLPPPRRIVVAGGGTAGWMTAAALARTLGPVAQVTLVESEQIGTIGVGESTIPPLVAYNRILGINEADFMRATQATFKLGINFENWRVPGESYFHSFGGTGKDHWSAGFQHFWMHGQAQGHDAPYGDYCLELKAAEAGRFAHLPDDRMNYAYQLDSGLYARFLRRMAEADGAQRIEGRIAKVELDSESGDIAALLLDGDRRIEGDLFIDCTGFRALLIEGALHVGYDDWTHWLPCDGAVAIQTSSVRPPVPYTRAIAHEAGWQWRIPLQHRQGNGIVYCSGFLDPDAALEKLLASVEGDKLVQPNPIRFRTGARRRQWHRNCVAVGLSGGFMEPLESTSIHLIQRAVLRILRMLPAGTVSPLDIAEFNDQQMTDMEQIRDFLILHYKATDRRDTPFWRHCAAMAVPDSLAHRMELFRQTGRVFRKNEELFAENSWVQVMMGQGITPQSHHPVASKLRPDELTHLLASLKDQVSRTVANLPDHAAYIARYCSAQEPVAA

SEQ ID NO: 86048 - protein, 487 aa, Sphingomonas sp.
  misc_feature (1)..(487): tr|A0A0Q8XL95|A0A0Q8XL95_9SPHN Tryptophan halogenase OS =Sphingomonas sp. Root241 OX=1736501 GN=ASE13_09425 PE= 4 SV=1
MTAAALARTFGQRLSITLLESDEIGTVGVGEATIPTIHWFNELIGLDEAAFLRATGATFKLGIEFVDWARPGQHYFHPFGQYGIPLPGVSFHHRWLKARAEGLDLPLSAFSLANRLALEGRFAKPVNHARSILSTLGYAYHFDASLYGQHLRGLAEANGVTRIEGKLERVEQHPETGFVTALGTSRGDRLEGELFIDCSGFRALLIEGVMQAGYDDWSHWLPCDRAVAVPCARVAATTSYTRATARPAGWQWRIPLQHRTGNGYVYGSRFVSDDEAAASLLANLDGEALAEPRFLRFTAGRRRRAWLGNVVAIGLSSGFLEPLESTSIHLIQSGIAKLLTLFPDRDCDPALARRFDALFAADMDNIRDFLILHYHAQDRQDPIWEQCRHMELPETLVEREAQYRRSGRVMVGSDELFREASWLAVLNGQGILAQDYNPLADTLDPATNRAQLEQVADLIARSAETLPLHDAVLAEIQGAAAGGRTAR

SEQ ID NO: 86049 - protein, 505 aa, Sphingomonadaceae bacterium
  misc_feature (1)..(505): tr|A0A419MYZ3|A0A419MYZ3_9SPHN Tryptophan 7-halogenase OS=Sphingomonadaceae bacterium KCTC 52944 OX=2339262 GN =D5I55_07830 PE=4 SV=1
MTPRPAPDSIVILGGGTAGWMAACLLAARWGGDRITLVESPEVGIIGVGEGSTPQLRAFFRTLGLDEADWMPRCNATYKNGIRFTGWSERPGFESYYHPFVTALDAQTQPVFTYNCLARRTGRDVWAHPDRFFLPAALSDRRLAPLPAESFPFDVSYGYHFDAHLVGDVLRDHALSRGVHHLQRHVEGVIRTESGDVAALVVRDDTDIPADFFVDCSGFGATIHQKALGVPFRSFADNLFNDSAVVMPTPCDATGLNPNTSATALSNGWAWNIPLTNRTGNGYVYASAFLSDDAAETELRRHLGTLDDPTPTRRIKMRVGRVEESWARNSLAVGLSQGFIEPLEATALHIVQTTVEQFLDAWDTGDRAGFNTAIGKRYDGIRDYIVAHYRMNQRTDTDYWRANAENQALSDNLKAMMTAWFRAQDMDAVIADLDIGGYYASLSWHCLFAGYGTFPPDARMTPPGEDITRYDMAQIDEFLRRCALNFQDHRTLLDGRAAAMTQGAA

SEQ ID NO: 86050 - protein, 548 aa, Verrucomicrobiaceae bacterium
  misc_feature (1)..(548): tr|A0A4Q3BIE9|A0A4Q3BIE9_9BACT Tryptophan 7-halogenase OS=Verrucomicrobiaceae bacterium OX=2026800 GN=EOP84_14 905 PE=4 SV=1
MNEIRRLSLKILRTLLNANHCVRKSRLTDPRSCEFLSPILPVMIKSILVVGAGSAGLIAAISLKRKLPQLTVRIVRSPEIAVIGVGEGTTPNFPKHVFDYLGISRKRFYELAEPTWKLGIRFLWGSRGRFDYTFDQQLDSHWTDLPMPNGYYCDEDFRCTSVPSALMWHGKAFPRQPNGCPDIQGWHAFHIENKKFVDVLEIVARENGVEITDGKVTGSDRLPEGGIAAVHLDDGRRLEADFFVDCSGFRSELLGKALGEPFNSFDRSLFCDRAVVGGWERTDEPILPYTTAEAMDSGWSWQIEHEHHVNRGYVFSSEFISEDEAVAEFLRKNPKAPKTPRIVKFRSGSYRNAWVENVVAIGNSGGFVEPLEATALMLVCSHSQTLLEILNRSHLNPTPTWRSLYNDLAAQGWTDIRDFLALHYKLNTALDTPFWRHCREETDVSNAAPLLEFYAENGPTGFCRYRLPRMENDFGVEGYLVMLVGNRVPYAAKHIPTDAERQVWERHRAEFNRIAQDGLDVKEALAYVRHPGWQWHGDVAPASSASTV

SEQ ID NO: 86051 - protein, 493 aa, Sphingomonas sanguinis
  misc_feature (1)..(493): tr|A0A147IKD3|A0A147IKD3_9SPHN Tryptophan halogenase OS =Sphingomonas sanguinis OX=33051 GN=SB4_17330 PE=4 SV=1
MSAPRRIVIAGGGTAGWMAAAALARTLGRAVSVTLVESDAIGTIGVGESTIPPIITFNRLLGINEAEFMAATQATFKLGIQFDGWKGPDDRYFHSFGLTGKDHWAAGFQHFWLDGVRRGHGAPYDEYCLELVAAREGRFAHLPDERMNYAYQLDSTLYGRFLRRMAEGDGATRIEGRIAQVDLNPDTGGIAALVLDDGRRVKGDLFLDCTGFRALLIERALHVGFDDWSHYLPCDAAVAVQTESVRPPVPYTRAIAHEAGWQWRIPLQHRAGNGIVYCSRYMDHDAARTKLLDTIEGKVLTEPNMLRFQTGARRKQWHRNCIAVGLSGGFLEPLESTSIHLIQRAILRLIRLLPGGPISAHDVAEFNDQQMTDMLQIRDFLILHYKVHERRDSAFWRQCADMDVPDSLAHKIALFRETGRVFRRNDELFAENSWVQVMMGQGITPESHHPITARLSDEELERLLSTLRQNVATTVRSLPPHADYVARHCGTAA

SEQ ID NO: 86052 - protein, 511 aa, Sphingomonas sanguinis
  misc_feature (1)..(511): tr|A0A147I467|A0A147I467_9SPHN Tryptophan halogenase OS =Sphingomonas sanguinis OX=33051 GN=NS319_03850 PE=4 SV =1
MTGAAHPNSPIKTVTIVGGGTAGWMAAALLSRLLLGAYTIRLIESEEIGTIGVGEATIPAIRTFNGLAGIDEFEMVRATQATFKLGIEFRNWRAPGHSYIHGFGKIGQDLYWLHCHQFWLKEAARGRAKHFDHYALNTLAARMNRFTMPDPAHPNSPIADIDYAYHFDASLYARYLRTRAEKAGVERIEGRIVAANRRASDGHLDHVVLADGRTVDGDLFIDCSGMRGLLIGEAMGVGYEDWSQWLLCDRALAVPSARGSGPLTPYTRSIAHGAGWQWRIPLQHRTGNGHVYSSRFVSDDEAAATLLANLDTPALGDPRSVRFRPGKRTRAWEKNVVALGLAGGFLEPLESTSIHLIQTGLLRLLALFPGRGFHAADMAEYNRQTDFEYRDVRDFIITHYKVTLREDTPFWQYMRHMDVPDSLAERIELFRSSARFFMHGKAELFREESWVQVLLGQGLDAQYDPMVDMIPDAQTTAFLSDVEEVIAEVASGLPTHEAFIARHCQAPPLQG

SEQ ID NO: 86053 - protein, 488 aa, Sphingomonas sanguinis
  misc_feature (1)..(488): tr|A0A147HV07|A0A147HV07_9SPHN Tryptophan halogenase OS =Sphingomonas sanguinis OX=33051 GN=NS319_12475 PE=4 SV =1
MSATDRIAHVLVAGGGLTAWYAAAALKRRAPFLTVTLLATAPAADALADRIACTLPSLLGFQADLGIGEDDGVTRAGAGYRLGTRFIGWAEGLPDYVHAYGGYGHAIGSAAFHLHWVRAALDGEAAPFDSYAPAAHLARAGRFVPPTPNTPFAQHDYGLTLDLERHLAMIRAFARHVGVIEKPGTIAETVVDTRGFIGEVRLADGRRISADLYIDATGPAAHLRDAVDREWQDWHDWLPCDRVLLGTQASGEGAPVLTDVTAHAAGWRWSSGEQVGIAYSAAHMADADAAAMLGTTPGEPIALRPGTRPRPWRGNCVAIGDAATQVEPLEWCNLHLALSAIDRLITMLPDRHMAEVEAADYNRQTLAEAERVRDFLAAHYRTARRAEPMWRTVTEATPPPGLAHTLAQFAERGRLPFYEEETFTRDSWAAILLGQGLMPRRVDPLVHFTPPEEARRAMSRMTDAIAAAIPHVPAHAEWRAAQMRRLAR

SEQ ID NO: 86054 - protein, 521 aa, Sphingomonas sanguinis
  misc_feature (1)..(521): tr|A0A147HZ71|A0A147HZ71_9SPHN Tryptophan halogenase OS =Sphingomonas sanguinis OX=33051 GN=NS319_08170 PE=4 SV =1
MTGRAERTDGPVRRVVVVGGGSAGWIAACRLAAQSRRTGGDVRVTLVESRNVPTVGVGEGTWPTMRNTLAKIGISETDFIRSCDAAFKQGARFVGWTDGTADDGYYHPLNPPAGATEIDLAPHWLHRSEMGASFADWVDYQAMLCDAGLAPKSIVAPEYAGHANYAYHLDAGKFATLLRDHGVGQLGVEHVLGDVVRVAVSDHGDIAHLELADGGTVAGDLFVDCTGFAALLIGGVYDVPFRRCGDVLFADRAIALQVPYAQPDDPITCHTVSTAQGSGWIWDIGLWTRRGVGHVYSSAHTSDDAAETALRAYVGPAAEGLSARRITIDAGHRTRFWQNNCVAVGLSAGFIEPLEASALMLIETAMDAIADRLPRTRAAMDVMARQFNATFTHHWMRIIEFLKLHYVLTKRTDSDFWRDNVAASSIPDGLAERLELWRHHSPGPQDFDHAREVFSWPSYQYVLHGMGFESHRPPVDPAAPDAVLAERFVGRTARAKDELRARAPVHRDLLRAIREHGLQRV

SEQ ID NO: 86055 - protein, 502 aa, Sphingopyxis sp.
  misc_feature (1)..(502): tr|A0A0W1DSP9|A0A0W1DSP9_9SPHN Tryptophan halogenase OS =Sphingopyxis sp. H050 OX=1759072 GN=ATE67_07410 PE=4 S V=1
MTEGGAPIRTVVIVGGGTAGWMAAAAAARFLNDGQRRIILVESDAIGTVGVGEATIPPIRDFNRMLGIDEAEFLRETQATFKLGIEFVDWGALGERYLHPFGDPGHNFEGIAFHQFWLKHRCDPRIRPFTDYFITGAAVREGGYAPQSGDPRSPLHQMAAAYHFDAALYAAFLRRRAEADGVERIEGRIEGVDRDAESGHVTSLRLGDGREVAGDFFIDCSGFVSLLLGREMGVGYRDWSQWLPCDRAMAVPSARVDPLIPATRATAHGFGWQWRIPLQHRTGNGIVYGSAYASDDEARATLLAHLDGEPLADPRPLRFTAGVRERLWEGNVVALGLAGGFIEPLESTSIHLIQTGINKLFWLFPDMRFSAVERDEYNRLMIDQYEYVRDFIVLHYKATARRDTPFWRDRTAMEIPDSLAQKIELFRTKGRIRRFDHDLFGIANWAAVMLGQNILPEGYDPLVDATDDARIIAAMERIASVFDQQARAMPSHADFIARLVAR

SEQ ID NO: 86056 - protein, 496 aa, Rickettsiales bacterium
  misc_feature (1)..(496): tr|A0A2E3I904|A0A2E3I904_9RICK Tryptophan halogenase OS =Rickettsiales bacterium OX=2026788 GN=CMP20_09580 PE=4 SV=1
MKQVIKNVVIVGGGTAGWLTAALLQKVVGTSINITLVESEAIGTVGVGEATIPPIRLVNQVLGINEAEFLRETKATIKLAIKFENWRTPNESYFHTFGSPGKSMAFCHFHHFVNRAKHLGHESTIWDYDLNYLCATQGKFAHIKAQDPVLDLPYAYHFDASLYAQFLRRYCQKLGAKRIEGMIESVQQHPSGDIAGVTLQDGQQIHGDLFVDCSGFRGLLIQQTLGVGYDDWTHLLPCDRAVAVPSERFDNTVPYTRAIAHKAGWQWRIPLQHRNGNGLVYCSSHMSDDEATHSLLNNLDSTPIGDPKVIHFKTGRRRKQWHKNVVAVGLASGFLEPLESTSIHLIQSAIVRLIHLFPHQGIDSAAVDEFNQQSELEYTQIRDFLVLHYHLTERDDSQFWRNMQSMDIPASLAHKMALFKQTGKLFREQNDLFLESSWLQVMVGQGIEPNDYHPIANNLYEPQLLNMLNKMREVKQEPLTSLPSHDEFLKHFCKVT

SEQ ID NO: 86057 - protein, 488 aa, Sphingomonas sanguinis
  misc_feature (1)..(488): tr|A0A147JDQ1|A0A147JDQ1_9SPHN Tryptophan halogenase OS =Sphingomonas sanguinis OX=33051 GN=NS258_00270 PE=4 SV =1
MSATDRIAHVLVAGGGLTAWYAAAALKRRAPFLTVTLLATAPAADALADRIACTLPSLLGFQADLGIGEDDGVTRAGAGYRLGTRFIGWAEGLPDYVHAYGGYGHAIGSAAFHLHWVRAARDGEAASFDSYAPAAHLARAGRFVPPTPNTPFAQHDYGLTLDLDRHLAMIRAFARHVGVIERPGTIAETVVDARGFIGEVRLADGQRISADLYIDATGPAAHLRDAVDREWQDWYDWLPCDRVLLGTQSSGEGAPVLTDVTAHVAGWRWSSGEQVGIAYSTSHMADADAAAMLGATPGEPIAIRPGTRPRPWRGNCVAIGDAATQVEPLEWCNLHLALSAIDRLITMLPDRHMAEVEAADYNRQTLAEAERVRDFLAAHYRTARRAEPMWRAVAQAAPPPGLAHTLAQFAERGRLPFYEEETFTRDSWAAILLGQGLMPRRVDPLVHFTPPEEARRAMSRMTDAIAAAIPHVPAHAEWRAAQMRRLAR

SEQ ID NO: 86058 - protein, 509 aa, Pseudomonas yamanorum
  misc_feature (1)..(509): tr|A0A143GEF6|A0A143GEF6_9PSED Tryptophan halogenase OS =Pseudomonas yamanorum OX=515393 GN=AK972_1426 PE=4 SV= 1
MLNLRNIRRVVIVGGGTAGWFAALSLRRVFAPNVEVRVIESPDIGIVGVGEGGLINLIDALTRNTIAVSDFMRETGAAFKLGFCYEGWRGGGEQDKFYHLFADPKVEELAWSEYGSYPLITALIHQNYGLDKGVLGYYRGYEAITENVSQAQMTELLVKGASGLAMSLHFDSYRVAEFLKQVAISRGVVHQQGKVESVTRDDQGLVKSLQVADVDGVRHSIDLELMIDASGFARLGVGKTKGAKWRSFKDYLLMDSAIPFHMPHPNKNPALVTRAIAMDAGWMWQIPLIERVGAGYVFSSAHLDPDRAVQEIEAKVGHAIEPIRTLCFEPGHFEQVWMGNVLALGLASGFVEPLEATSIGQMLEQLRNFERVLVEGQGVILDTVIEGFNAANAQCWSEIRDFLRMHYDCPRRDNEFWRDVAGSTLPASYQDFKASFALRTPRHIDVEGNSLHGWRAIFHMMNWLFVAQPLGLLSREAAQADLMALSEEKRRLLDAYMKKVRQAKSSKVS

SEQ ID NO: 86059 - protein, 512 aa, Sphingomonas sp.
  misc_feature (1)..(512): tr|A0A0Q8XE76|A0A0Q8XE76_9SPHN Tryptophan halogenase OS =Sphingomonas sp. Root241 OX=1736501 GN=ASE13_13160 PE= 4 SV=1
MIPPTTEAPITRLVIVGGGSAGWMTAAAVSRLVDAGVAVTLVESDEIGTVGVGEATIPPLLDFNAALGIDEDEFVAATQGTFKLGIEFVDWGKRGDKYIHPFGKYGRPMLGINFHQIWLRQHLLGGDADPGPVDDYAISIAAARRGRFAKPANNPEAVLSGLAYAYHFDAGLYARFLRGHAEARGVARIEGKIANVEQAPLDGYITAVVLEDGRRIEGDFFVDCSGFRALLLGQTLSVPYRSWQHWLPCDSALAVPSASVAPPTPYTRSSAERGGWRWRIPLQHRVGNGHVFSSAHTDEETALRRLLDGLDAPTIADPRLLRFTAGRREKLWEKNCVAIGLAGGFIEPLESTSIHLIQSGIFRLMSLFPDRGFSGIEIDEYNRWLIEEYEHIRDFIILHYHATERADSDFWNHCRTMDIPDSLAARIELWREKGRIFRAHNSLFTEESWIAVLLGQNIVPRAADPLVAMLPVGETVQFMNHMREIVARTAEAMPTHEDYIAMNCAMARQVAQ

SEQ ID NO: 86060 - protein, 498 aa, Sphingomonas sanguinis
  misc_feature (1)..(498): tr|A0A147HWZ4|A0A147HWZ4_9SPHN Tryptophan halogenase OS =Sphingomonas sanguinis OX=33051 GN=NS319_10415 PE=4 SV =1
MTDKRIRRIVILGGGTAGWMTAAALSRALAGQGVAITLVESDAIGTIGVGEATIPTIHWFNQIIGLDERQFMAETQATVKLGIEFVGWNGEGSRYFHPFGTFGPPGDGAMFLHRLIRARADGDLAPTEAYSLTAQAARAGRFARPVADRRSLLSTLGYAYHFDAGLYARYLRGLAERAGVTRIEGVVASVEQDGESGFVRSLTLDGGQAVAGDLFIDCSGLRALLIGQTLGVGFDDWSHWLPCDRAWAAPSAAESDLTPYTRATAAEAGWRWRIPLQHRVGNGYVFSSRFQDEEAARASLIAAMDGPPLADPRLIRFTPGMRREAWRANVVAIGLSSGFLEPLESTSIHLIQSGIAKLLSLFPAADGSPLLARQFNRVFGQEMLDIRDFLILHYHATTGRDEPLWRERQAMAIPDTLAEKLAHFRSSGRIVLSSDELFRDASWFAVLDGQGERSGDHNPLIEVVGAEDNLRQLAALRAEIAKTAAAMPPLPGRRSASA

SEQ ID NO: 86061 - protein, 493 aa, Sphingomonas sanguinis
  misc_feature (1)..(493): tr|A0A147HWX4|A0A147HWX4_9SPHN Tryptophan halogenase OS =Sphingomonas sanguinis OX=33051 GN=NS319_10500 PE=4 SV =1
MNAPRRIVIAGGGTAGWMAAAALARTLGRAVSVTLVESDAIGTIGVGESTIPPIITFNRLLGINEAEFMAATQATFKLGIQFDGWKGPDDRYFHSFGLTGKDHWAAGFQHFWLDGVRRGHDAPYDEYCLELVAAREGRFAHLPDERMNYAYQLDSTLYGRFLRRMAEGDGATRIEGRIAEVDLNPETGDIAALILDDGRRVDGDLFLDCTGFRALLIERALHVGFDDWSHYLPCDAAVAVQTESVRPPVPYTRAIAHEAGWQWRIPLQHRAGNGIVYCSRYMDHDAARTKLLDTVEGKVLTEPNMLRFQTGARRKQWHRNCIAVGLSGGFLEPLESTSIHLIQRAILRLIRLLPGGPISAHDVAEFNDQQMTDMLQIRDFLILHYKVHERRDSAFWRQCADMDVPDSLAHKIALFRETGRVFRRNDELFAENSWVQVMMGQGVTPESHHPITARLNDEELERLLSTLRQNVATTVRSLPPHADYVARHCGTAA

SEQ ID NO: 86062 - protein, 491 aa, Sphingomonas sp.
  misc_feature (1)..(491): tr|A0A0Q8XEB0|A0A0Q8XEB0_9SPHN Tryptophan halogenase OS =Sphingomonas sp. Root241 OX=1736501 GN=ASE13_15280 PE= 4 SV=1
MIIGGGTAGWMAASALGKMLPHACSVELIESAEIGIVGVGEATLPHLRAFIHTLGLDEAEFMTATHATYKLGIEFRDFGQPGDSYLHPFGDFGRPLNNVPFLQYWLRMRALGQGGEIFEYSMANVMAAAKRFAPPESDPASLLSRIGYAYQFDATRFGPYLRGFAEGQGVKRTEGRIVSVERDSETGDVAAVLLESGVRVEGDLFVDCSGFRSLLLGDALGEEWEDWSHWLPCDRAMALPCASPPGEIEPLTRATAMPAGWRWRIPLQHRVGNGYVYSSAHLSDDEASDAILGAVEGEALADPRVLRFRAGRRKRSWSHNVVAVGLASGFLEPLESTSIYLVQAAITQLLELFPIRGIEAADRDEFNRLIDYEYDRIRDFLILHYHASTRDDSEFWNYVRHMPIPDSLADKIELFRRAGRIQRYAHGLFFEPSWIAVLIGQGVMPEGWDQRIAAAPPQELGQALERLRGRIAVEVRALPGHRQTLERQKLL

SEQ ID NO: 86063 - protein, 517 aa, Sphingobium sp.; identical to SEQ ID NO: 84574
  misc_feature (1)..(517): tr|A0A0C5XSR1|A0A0C5XSR1_SPHYB Tryptophan halogenase OS =Sphingobium sp. (strain YBL2) OX=484429 GN=TZ53_09885 PE=4 SV=1

SEQ ID NO: 86064 - protein, 508 aa, Sphingomonas sanguinis
  misc_feature (1)..(508): tr|A0A147J1Y4|A0A147J1Y4_9SPHN Tryptophan halogenase OS =Sphingomonas sanguinis OX=33051 GN=SB4_02635 PE=4 SV=1
MDAAPSADRIARRVVIVGSGTAGWMAAAALARFLPADHRITLIESDAIGTVGVGEATIPGIRLFNQILGLDEAEFLRATNGSFKLGIRFEGWSSEGSGYLHAFGSIGRALGLVPFHHYWLRGGGAANPASLWGHSPSAQAAMAGRFAPDPGRPDLPSGLAWAYHFDASLYAALLRRHAETAGVVRVEGRIASVARDRGGRIDHVVLDGGDAHAGDLFIDCTGFRALLIGETLAEPFDDWSELLPCDRALAVAGERAAPLPPYTRAIAHGAGWRWRIPLQHRTGNGLVYDSLHLSDDEATDRLLTALNGEAMGEPRRLRFTTGRRCRAWVGNCVALGLAAGFLEPLESTSIHLIQSGIARLLEYWPGSTLQPVEIDAYNAETAAEWLAIRDFLILHYHANARTEPFWTERRAVPLPDSLAARIALFRANGRFRREGEELFAEPAWVQVMIGQGIIPTGHHALADTLTAHELDDFLNLTRRHAAQVAARLPTHDAFLAAHCAAPAPKVFA

SEQ ID NO: 86065 - protein, 513 aa, Devosia sp.
  misc_feature (1)..(513): tr|A0A0Q8IAI3|A0A0Q8IAI3_9RHIZ Uncharacterized protein OS=Devosia sp. Root685 OX=1736587 GN=ASD83_09000 PE=4 S V=1
MAKPAHFVVVGGGTAGWIAAFIIQDEARRRGFDFRISVVESSRIPTVGVGEATTAAFRVLLKHFGIDEFEFFRKTDASFKLGIRHEDWRRRGYTYYGPIDDPHQVVQAPAGAPSDYLNVYAVAAGRAVQEMHLFQPLLEEKKAPYALKADGSLIPLGPFHHAYHFDQALVGKFFASKSKGVEKVDALVAGVERDGESGDITALVLDDNSRLEGDFFIDATGFRKEIIVKALGAPWKSYAHELPVNRALPFWIDVKEGEELPNYTRAWAQSSGWMWQIPTRTRFGCGYVYSDEFSTPEQAKEEVERVLGHEIEVRSDIRFQIGRLEKAWIGNCVAVGLSSSFLEPLESTSIHGTIVQMMLFAQRFMDEPSKISQKARDDYNERVGRQVDDFRTFVNTHYVTERDDTPFWREVRANRIHPETKERLARWRLEMPRHEHFPNYLGGLPHIETQLHYPVLNGLGLLDQTLARREMDRDPKLRRFAQQAFESLVKEYRAAANQALGHREFLDIVQGMA

SEQ ID NO: 86066 - protein, 503 aa, Massilia sp.
  misc_feature (1)..(503): tr|A0A1G6KLD5|A0A1G6KLD5_9BURK Tryptophan halogenase OS =Massilia sp. PDC64 OX=1881046 GN=SAMN05428966_101530 P E=4 SV=1
MNAPLLNTIVIVGGGTAGWMAATALATALRGRYTIRLVESDDIGTVGVGEATIPMIQRFNTVAGIDEAEFMKATNGTFKLGIEFVNWGRQGERYMHGFGRVGQDLWMVGFEQYWHKMHALGRARPLGEYSITRMAANANKFMPARTDLGNSPLADIAYAYHFDASLYARHLRKLSESRGVERIEGRIVQVSQRAHDGFIDAVVLESGRRVEGDLFIDCSGFRGLLIEQTLQAGFEDWSHWLPCDRALAVPCESAAATTPYTRATAHGAGWQWRIPLQNRIGNGHVYCSRHISDDEAAATLLANLDGRPLADPRPIRFTTGMRKKAWVKNVVALGLASGFLEPLESTSIHMVQSGLQQLLDYFPDRGFSQVDIDAYNDLTRFHYERIRDFIILHYHANQRTDSDFWQACAHMAIPATLREKLDLYKSHGRIQRFNGELFTEVGWLQVLVGQNIHPDSYHPLVDVQSEEGIHDYMEGVADVIRQCVGFMPDHDRFIAEHCKAPRM

SEQ ID NO: 86067 - protein, 508 aa, Sphingomonas sanguinis
  misc_feature (1)..(508): tr|A0A147J9Y8|A0A147J9Y8_9SPHN Tryptophan halogenase OS =Sphingomonas sanguinis OX=33051 GN=NS258_06580 PE=4 SV =1
MDAAPSADRIARRVVIVGGGTAGWMAAAALARFLPADHRITLIESDAIGPVGVGEATIPGIRLFNQMLGLDEAEFLRATNGSFKLGIRFEGWSGEGSGYLHAFGSIGRALGLVPFHHYWLCGGGAANPASLWGHSPSAQAAMAGRFAPDPGRPDLPSGLAWAYHFDASLYAALLRLHAEGAGVVRVEGRIASVARDRGGRIDHVVLEGGDAHAGDLFIDCTGFRALLIGETLAEPFDDWSELLPCDRALAVAGERAAPLPPYTRAIAHGAGWRWRIPLQHRTGNGLVYDSLHLSDDEATDRLLTALNGEAMGEPRRLRFTTGRRCRAWVGNCVALGLAAGFLEPLESTSIHLIQSGIARLLEYWPGSTLQPVEIDAYNAETAAEWLAIRDFLILHYHANARSEPFWIERRAVPLPDSLAARIALFRANGRFRREGEELFAEPAWVQVMIGQGVIPTGHHALADALSAHELDDFLNLTRRHAAQVAARLPTHDAFLAAHCAAPAPKVFA

SEQ ID NO: 86068 - protein, 507 aa, Devosia sp.
  misc_feature (1)..(507): tr|A0A1M3KHZ8|A0A1M3KHZ8_9RHIZ Uncharacterized protein OS=Devosia sp. 66-22 OX=1895753 GN=BGO81_06805 PE=4 SV= 1
MIVGGGTAGWITAFIVQDAVRRLRLDASVTVVEPSRIPTVGVGEATTAAFYVFLKSFGIDEFEFFQQTGATFKLGIRHEDWRRKGFTYYGPIDDPHQVVAPPQGAPSDYLNVYAIAAGRPIEDMHMFGPLLRQWKAPYALKADGTPIRLGPFMHAYHFDQALVGRFLAGKSKGVTIADGVVAGVERDQVNGDIRTLVLDTGERVEGDFFFDCSGFHKRLIVKELNAPWISYAHELPVNRALPFWLDIKDGEEIPNYTRAWAQEAGWMWQIPTQTRFGCGYVYSDEFRTPEEAKLEVERVLGREIEVRSDIRFQIGRLEKAWIGNTVAVGLSSSFLEPLESTSIHGTIVQMMLFARRFLKAPQAMTDDDRADYNRRVGRQVDDFRTFVNTHYMTERDDTPFWREVREHRIHPETKERLARWQKEMPRMTHFPDDLDGLPHVQTQLHYPVLEGLGLLNQDTARAEMALDPKLRQFARDTYESLVREYRDAARQALGHAQYLQLVREMKL

SEQ ID NO: 86069 - protein, 502 aa, Sphingomonas sp.
  misc_feature (1)..(502): tr|A0A0Q8XLL7|A0A0Q8XLL7_9SPHN Tryptophan halogenase OS =Sphingomonas sp. Root241 OX=1736501 GN=ASE13_16345 PE= 4 SV=1
MTAPPIRSVVIIGGGTAGWMTAAALARMVQAGVQVTLVESDAIGTVGVGEATIPPIQTFNAMLGIDEKDFLSRTRGSMKLGIEFVDWNAPGHRYLHPFGEYGFDIEGVKFHQIWHRLHAAGQASALDDYSLCAVACRLCRYDAPARDPGSPLSRLVQAYHFDASLYARYLRDYAEVRGVVRREGKIIDVALRGEDGFIEAVTLEDGSRLGGDLFVDCSGFRGLLIEEALHTGYEDWTHWLPCDRALAVPTANTGPLAPYTRATARAAGWQWRIPLQHRTGNGYVYSSAHISDDEAAATLLANLEGEPLADPRPLRFVTGRRKLAWNRNCVAIGLSSGFLEPLESTSIHLIQAGISRLLALFPDSGWGDAERDTYNDFTRTQYEQVRDFVILHYKANARDEPLWRYVREMAVPESLTRRIELFRNRGRVFRREDELFAETSWIAVMLGQGITPQGWDPLADALDPGQLRQMLDRIRSTFRRTAEAMPAHADWLARHCPSRGTA

SEQ ID NO: 86070 - protein, 497 aa, Sphingomonas sp.
  misc_feature (1)..(497): tr|A0A0Q8XDQ1|A0A0Q8XDQ1_9SPHN Tryptophan halogenase OS =Sphingomonas sp. Root241 OX=1736501 GN=ASE13_18070 PE= 4 SV=1
MNEQVVKRVVIAGGGTAGWVAAAALVKQLGPLIDITLVESDEIGTVGVGESTIPTSRSFHELLGINEQAFMRATQATFKLGIAFENWGQIGDRYIHSFGEIGTRSTWMADFHHFWLEAREQGFGGSLADYCFELQASEAGKFAKAEGLPINYAYHLDATLYARFLRGLAEPAGVKRVEGKIARVLQHPETGFITALVLESGVNIEGDLFLDCTGFRALLIEKTLQTGYEDWTRYLATNSAFAVQTRSVGPAIPLTRAIAHEAGWRWRIPLQHRVGNGIVFCSEFMSDEDARAKLLNDIDGDPLIEPRLIRYQTGARRKVWNKNCVALGLASGFIEPLESTSIHLVKVAVTRLIQEFPFGGCHEAIANRFNDQSRHEIEGIRDFITLHYHLTQRDDSPFWDRCRTMEIPDSLAQRMALFRDDAHAYQDGNDLFRVDSWVQVLLGQGLAPTSYHRLAKMMDPDELRTALGTLKANIDKGVARMPSHQEFLAQYCPAGDP

SEQ ID NO: 86071 - protein, 511 aa, Sphingomonas sanguinis
  misc_feature (1)..(511): tr|A0A147IYD5|A0A147IYD5_9SPHN Tryptophan halogenase OS =Sphingomonas sanguinis OX=33051 GN=SB4_06595 PE=4 SV=1
MTGAAHPNSPIKTVTIVGGGTAGWMAAALLSRLLLGAYTIRLIESEEIGTIGVGEATIPAIRTFNGLAGIDEFEMVRATQATFKLGIEFRNWRAPGHSYIHGFGKIGQDLYWLHCHQFWLKEAARGRAKHFDHYALNTLAARMNRFTMPDPAHPNSPIADIDYAYHFDASLYARYLRMRAEKAGVERIEGRIVAANRRASDGHLDHVVLADGRTVDGDLFIDCSGMRGLLIGEAMGVGYEDWSQWLLCDRALAVPSARGSGPLTPYTRSTAHGAGWQWRIPLQHRTGNGHVYSSRFVSDDEATATLLANLDTPALGDPRPVRFRPGKRTRAWEKNVVALGLAGGLLEPLESTSIHLIQTGLLRLLALFPGRGFHAADMAEYNRQTDFEYRDVRDFIIAHYKVTLREDTPFWQYMRHMDVPDSLAERIELFRSSARFFMHGKAELFREESWVQVLLGQGLDAQYDPMVDMIPDAQTTAFLSDVEEVIAEVASSLPTHETFIARHCQAPPLQG

SEQ ID NO: 86072 - protein, 536 aa, Sphingomonas sp.
  misc_feature (1)..(536): tr|A0A0Q8XU59|A0A0Q8XU59_9SPHN Tryptophan halogenase OS =Sphingomonas sp. Root241 OX=1736501 GN=ASE13_00205 PE= 4 SV=1
MTAAALIRFLGPGSSVTLVESEEIGTVGVGEATIPQIRMFNAGLGVDENAFIAATQATFKLAIEFVGWTKGGRYMHAFGDVGRPNGGVAFQHSWLRGMAEGVARPLAEYSLNNAAALANRMQRGPAHTAAMLPEMPYAFHFDAGLYARFLRSYAEQAGVVRHEGRIVEVLRDSGTGDVTALRLERTYDGLNRPSSVRAEPVEALPSTGASQADSRPSTSSGRTVGVASAQAEAAPDDSPEIAGDLFIDCTGFRGLLIADALGVGYEDWSHWLPCDRALAVPSARAGDFTSYTRATAHAAGWQWRIPLQHRTGNGIVYSSDALSDDEAAAQLLANLDGPALADPRPLRFMPGKRRAFWQANVIAVGLASGFLEPLESTSIHMIQSAVERILKLLPGRCIGEAQRAEYNRQADREYDRIRDFLILHYAANDRDEPFWRARRETPLPESLAHKIALWRASGQIVREESDLFSEVAWLQVLVGQGIAAEGHHPLADRPGSAELAEYLDLLAKLTAREVAQMPDHAAFIRQHCAAHEEIAA

SEQ ID NO: 86073 - protein, 488 aa, Sphingomonas sp.
  misc_feature (1)..(488): tr|A0A0Q8XEI6|A0A0Q8XEI6_9SPHN Tryptophan halogenase OS =Sphingomonas sp. Root241 OX=1736501 GN=ASE13_18005 PE= 4 SV=1
MAAAALSTALKPHQCRIVLVESEEIGTVGVGEATIPPIQLFNKLLGVDECEFVRETQGTFKLGIEFVGWLREGERYFHPFGRYGDDFGLTPFHQQWLRARTLGNATPLDAWSLNHQAAYRGRFEIPTPQSGRVFSTFSWAYHFDASLYARYLRGLAESRGVERIEGKIAEVVLRPENGFVERLTLADGRGLEADLFLDCTGFRGLITEALDTGYEDWTRWLPCDRALAVPCARIADPEPFTRSTARPAGWQWRIPLQHRTGNGQVYCSGAISDDAVHASLMANLDGAPEAEPRQLRFTTGRRRRAWNRNCIALGLASGFLEPLESTSIHLIQTGISRLLSWFPDRNFDPLLATEYNRLVDAEMESIRDFLVLHYQANQRDEPFWRQCRAMAIPDTLAAKIEMFRANGRLIERQHELFHPPSWLAVLLGQGVHPATHDPLADTIAPQELAAILGGMRQVIDQAVDRMPTHQQFIEHHCRAAARPIPLAS

SEQ ID NO: 86074 - protein, 609 aa, Fischerella thermalis
  misc_feature (1)..(609): tr|A0A2N6LUZ7|A0A2N6LUZ7_9CYAN Tryptophan halogenase OS =Fischerella thermalis CCMEE 5205 OX=2019671 GN=CEN40_2 5840 PE=4 SV=1
MTTHNTQSQVYDVVIMGAGIGGVCQARHLLLNIPNIKIALVDPRPEERTDRDMKVGESTVEISTLMICKELGLYDYMIENHPPKFGLNFHWAKEAGKTENTEDYYHIWTVKQPPLASVLINRPKFERDLLRMNQQMGAEFYNGRVVDVDLTPGDELNTVHVKQGDRYLELKTKHVIDSAGRKFLIGRKTDNLITGPENLYGINNGSVWMRVRNVDRTIFHSGYDPYVCTCSHYYAANHWMGHGHWVWMLPTDTQNMELSIGLLYHHDIISPHSVNTKEKFYAFLEANHNVVYRLLKSGEEVDFHHWPRIAHKSKQMYSQDNWYIIGDAAAIFDPFYSQGLTMMSFQIESVTEIIHAKLAGEANAREKCALYNKFALNMIDRTNVLVSRHEKQIGDASIMTWRMYLENIWWFKMLIPMFVGKWHLDLDFLKNVVAKPGRLYVVQIMNAVYEHLDELVERKANIGFLHTHIADQLPFGFTMSNDFDNFLHLTKYEPQRANIYVSIQWSHFFVALWYLKFLWKAYGLKGVLSPQNLKHVFALFKAFAEAAWDHLIFRIKTKNIPGNSIIANIRKEFKNYRAPAKLEPWLEEVTEASNGNVTTQSRELVKAEI

SEQ ID NO: 86075 - protein, 510 aa, Sphingomonas sp.
  misc_feature (1)..(510): tr|A0A0Q8XC81|A0A0Q8XC81_9SPHN Tryptophan halogenase OS =Sphingomonas sp. Root241 OX=1736501 GN=ASE13_16290 PE= 4 SV=1
MRAPDALRKICIVGGGTAGWIAAAVMAHHFKGKLFEIELVESDDIGTIGVGESTIPPFMELIAKLDINEQDFVRATQASFKLGIEFEDWHRKGESYFHPFGAIGQQVELSEFYQCWLKARQGGQPFELQDFAPATAMARTGKFMLPFKAQKTPIGGAAYALHVDAKRVAQFLRGHAEDRGVKRIEGIVSDVRLDDRGFVDTLVLKDGREVGADFFIDCSGFRALLIEKALGVGYQDWSEWLFCDRAIAAQTRNVGPPRPYTLAQAQDFGWRWRIPLQHRTGNGHVFCSEFLSDDDATRILLDQIEGEIVAGPMVVPFKTGVRKQIWHKNVLSLGLASGFIEPLESTAIHLVYRGMDFFFRYLPDRNCDPRLAAEYNRRMTADYIEIRDFIVLHYCATERDDTPFWRKCRDMILPDSLQARIELFRTNGALREGLDELFRAASWHSVLEGMGIHPATYHPLVDRIDEAWLYEAMEKVRAQLRQVVETLPTHQEFIDAHCRADAVDLGKPAR

SEQ ID NO: 86076 - protein, 536 aa, Sphingomonas sanguinis
  misc_feature (1)..(536): tr|A0A147J298|A0A147J298_9SPHN Tryptophan halogenase OS =Sphingomonas sanguinis OX=33051 GN=SB4_02440 PE=4 SV=1
MTTPSPDAIRSVVIVGGGTAGWMAAAAFARLLNNGYTQVTLVESEEIGTVGVGEATIPPIITFNQMLGLDENDFLAKTAGTFKLGIEFVDWGDKGERYFHPFGRHGQDLQGVHFHQLWLRERSRRALPDIAEWSMSAMAARSGKFGRAKPDARSPIRELFYAFHFDASLYARYLRGYAERGGVTRIEGRIDAVNLRPEDGYVEAVTLADGRRIEGDLFIDCSGFRGLLIEEALETGYDSYAQWLPCDRAVAAPCALPNPAEPDPFTRATAREAGWQWRIPLQHRMGNGLVYCSEYLEADAAEAQLLASLEGELLGDPRHLRFTAGRRRESWNRNVVALGLSSGFLEPLESTSIHLVQAAIQRLIALFPDKRFDPAERTEFNRQMRDLYEDVRDFIILHYKATRRSDTPFWDRVRTMDVPDSLARKMALWSGKGRLFREGYDLFSNPSWVAVSLGQGIVPQSWEPAADALDEDLVAQALEQLRVGYADTAARMPSHGDFLRMTAPSPLAPALAPGRLADGGFDFARTPSGGGKAPLL

SEQ ID NO: 86077 - protein, 499 aa, Alteromonas sp.
  misc_feature (1)..(499): tr|A0A3N5YCQ7|A0A3N5YCQ7_9ALTE Tryptophan 7-halogenase OS=Alteromonas sp. U0105 OX=2259342 GN=DRW07_06020 PE=4 SV=1
MTEKKLVQKVIIAGGGTAGWMAAATLAATIGKRLQITLIESDDIPTVGVGEATVPSLLTIHQLLKIREDDFLRAVNGTYKLGIMFENWTKLNHKYFHSFGKSGLSCWAAGFHHFWVRANEQKMAKDYAAYSLESVAAEKGKFAHIKDPQLNYAYHLDSAAYGQFLRSIAQQHGTTRIEGKIDRVNVHSQSGHIESLTLASGQVVDGDLFIDCTGFRSLLLGQALKVGYNDWSDVLPANAAYAVQTESHRPAVPFTRSIALDAGWRWQIPLQHRVGNGVVFSTEFKSEQSALDDLLQGIDGTPLTDPRLIRFTTGQRKEFWHKNCVSVGLSSGFIEPLESTSIHLIQQAIIWLISLFPTEGVDENLVNRFNQQMRVETETIRDFIVLHYHLQQRDDHEFWRYLRNMKVSDRLQQIMDLFANNGTIVEEQDDLFAENSWVQVMMGQGLTPKQYHPIVDMMSDRDLNTFMRQQESQIQQQLANLPMHTQFIQYLLQAQTRAN

SEQ ID NO: 86078 - protein, 498 aa, Erythrobacter nanhaisediminis
  misc_feature (1)..(498): tr|A0A1I5NPC4|A0A1I5NPC4_9SPHN Tryptophan halogenase OS =Erythrobacter nanhaisediminis OX=604088 GN=SAMN0448806 0_1999 PE=4 SV=1
MSTGSAPRVVVLGGGSAGWITACLLHHEWAARGGSVTVVESPAIGIIGVGEGSTPQLKAFFDHLGIEEAEWMAACDATYKLGIRFTGWSEREGCESYFHPFPGPVDLHSEPGFVKNCGLRRRGIDLPAHPDDWFLAAHLAKSCRGPVPEANFPFPQSYGYHFDAHKLGAFLRDWAVPRGVTHRPLKVEDVELDQSGDIAALLCEDGERIEGDLFVDCSGFAALLAQQKLGANFLPFAENLFNDRAVVMPTSHAGPIVPQTESIAMSAGWRWSIPLTSRVGNGYVYSSRHISDDNAAAELASALGVAADKAQPRFLKMKVGRLENSWVRNCLATGLSQGFIEPLEATALHIVIATALDFAKAYESGGFTDAHRETFNQRIAARYEGIRDYIVAHYRMNQRTDTDYWRENATNQSLSDNLKAMMTAWFTHGSIEEVNAKAYGPAAPYAPMSWHALFAGYGTFPPPAKMQEPPPGLDVADREATGKMLAACALNFPEYAPV

SEQ ID NO: 86079 - protein, 166 aa, Bacillus thuringiensis
  misc_feature (1)..(166): tr|A0A0K0SI14|A0A0K0SI14_BACT3 Tryptophan 2-halogenase OS=Bacillus thuringiensis subsp. indiana OX=180850 GN=c mdE PE=4 SV=1
MVTPISKNRISVGLVINEERLREEQKNATNDEIFEAYLQLFPRVQKRLTSAKPIGKMRVESNFCYYADSLTGPDYLLVGDSGCFVDPMFSGGVFLAMATGMKAGKTLDQILNKQNSQQQLLQHYENFYNTGYDTYLRFLYWFYESNCDFYKALNSIPTEHREGISQ

SEQ ID NO: 86080 - protein, 514 aa, Sphingomonadales bacterium
  misc_feature (1)..(514): tr|A0A1G3K4B3|A0A1G3K4B3_9SPHN Tryptophan halogenase OS =Sphingomonadales bacterium RIFCSPLOWO2_12_FULL_63_15 O X=1802170 GN=A3H25_09915 PE=4 SV=1
MVHPVRNIVIVGGGTAGWLTAGIIAARHRTRIGQGFSVTLVESPNTPIIGVGEGTWPTLRTTLSRMGVSESDFFRECDAAFKQGARFDRWTTGAVDDGYYHPLMLPQNFGQVNLAPHWLASNQGESFCDSVSAQGRICDDGLAPKTIATAEYDALANYAYHLDAGKFAPFIQRHCCETLSVRHVLADVQQVLMHENGDIRAIQTAQAGEIEGDLFVDCTGFKALLIEGAMKVPFKDCNDVLFCDTALAMQVPYERPDSPMASHTISTAQTSGWIWDIGIQTRRGVGHVFSSSHISDEEAERELRAYIGPAADGLNARKIKIRSGHRETFWKGNCVAVGLAAGFLEPLEASAIVLIELSAKIIAEQMPACREVMDIISSRFNATTHYRWGRIIDFLKLHYVLTKRTDSDFWRDNVRDETIPDRLKELLLLWRYQSPWFHDEFDRVEEVFPAASYQYVLYGMGYHTEVDPASLSRDYRLADRARRENAALTDKLCAGLPRHRDLINKIVAHGLPPV

SEQ ID NO: 86081 - protein, 497 aa, Pelagimonas varians
  misc_feature (1)..(497): tr|A0A238L734|A0A238L734_9RHOB Flavin-dependent tryptop han halogenase RebH OS=Pelagimonas varians OX=696760 GN =rebH_3 PE=4 SV=1
MGKFKRVLVVGGGSAGWITAAYLDAVLNGIGKARDPVVSISLVESAKIGRIGVGEATIPSIRLTLQRIGISEADVMTATEATFKHGIRFCDWNGPGHSYFHPFDRRQAGRFDPTGVNWMLSDRSVPFSDLVSVQPRLALSDRAPKSADMPDYEGELGYAYHLNAEALADLLARVATGRGVEHIEGKITGVALRGTLGHVDHVVLEDGRKLGADLFIDCSGFAAVLIEKALKTPFRDDSKWLPCDRAVTMQIPYQDGETARPYTTATAMASGWRWEIGLKSRRGTGYVYSSAYCSDSEAEEALRKENGEADLPVRILQFPVGRRVQAWVGNVVAIGLSAGFIEPLESTGLYLVEKAVLHLSENFPFGGVENAEPLRSRFNELTAREYDELLPFVALHYVIAQRSDTPFWQDAKSEERIPDRLRTLLKLWECKPPSASDFDFWDGCFFAENYEYILYGLGWHPANVRASTQMQPPRRSQVVEQALEQMLKNLPLHKDAL

SEQ ID NO: 86082 - protein, 499 aa, Sphingopyxis sp.
  misc_feature (1)..(499): tr|A0A0W1DX10|A0A0W1DX10_9SPHN Tryptophan halogenase OS =Sphingopyxis sp. H050 OX=1759072 GN=ATE67_01330 PE=4 S V=1
MSEAKPVRRVVIAGGGTSGWMMAAAIARTMGKTVDLTLVESEQIGTIGVGESTIPPLVNFNRILGIPEPEFMRAAQATFKLGILFDNWKYDGHSYFHSFGLSGKDHWSAGFQHFWLHARAKGYPHSYDDYCLELVAGLQGKFAHLPEDRMNYAYHVDATLYGRFLRKLAEADGAKRVEGKIQKVELDGESGNIAALLLDGDRRVEGDMFVDCTGFRGLLIDGALHAGFEDWSHWLPNDSAIAVQSDHLGPPMPYTQAIAHDAGWQWRIPLQHRMGAGIVYASGYLSRDEALNRLMSSVGTPRIEPFDIKFKGGVRRKQWYRNCVAVGLAGGFVEPLEATTVHLIQRAVLRFIRLMPNGRVSERDAIEFNEQQRQDIEQIRDFVILHYKATERRDSPFWRHVANMPVPDSLQQKIELFRETGRTFRKNEELFAENSWVQVMMGQGVDPQSYHPIAEKLSDDELERLMASLRESVTRTAATLPSHQDYVAQYCGAAEPKAA

SEQ ID NO: 86083 - protein, 538 aa, Burkholderia sp.
  misc_feature (1)..(538): tr|U2FKI4|U2FKI4_9BURK Tryptophan halogenase PrnA OS=Bu rkholderia sp. AU4i OX=1335308 GN=L810_8678 PE=4 SV=1
MSNPIKNIVIVGGGTAGWMAASYLVRALQQHTSITLVESAAIPRIGVGEATIPSLQKVFFDFLGIPEREWMPQVNGAFKAAIKFVNWRKSPEHARDDHFYHLFGTVPNCDGVPLTHYWMRKREQGFQQPMEYACYPQPGALDAKLAPCLSDGTRQMSHAWHFDAHLVADFLKRWAIERGVKQVIDEVEQVHLNERGHIASLSTKEGRTLEADLFIDCSGMRGLLINQALKEPFIDMSDYLLCDSAVASAVPNADARVGVEPYTSAIAMNSGWTWKIPMLGRFGSGYVFSSKFTSRDQATADFLNLWGLSDKQPLNQIKFRVGRNGRAWVNNCVAIGLSSCFLEPLESTGIYFIYAALYQLVKHFPDTSFDPRLADAFNAEIVHMFDDCRDFVQAHYFTSSRDDTPFWLANRHDLRLSDAIKEKVQRYKAGLPLTTTSFDDSTYYETFDYEFRNFWLNGNYYCIFAGLGLLPDRSLPLLQHRPESIDKAEAMFARIRREAERLRTSLPTNYDYLRSLRDGGAGLSRSQPGSTLAAPEIL

SEQ ID NO: 86084 - protein, 516 aa, Alteromonas sp.
  misc_feature (1)..(516): tr|A0A3N5YEI2|A0A3N5YEI2_9ALTE Tryptophan 7-halogenase OS=Alteromonas sp. U0105 OX=2259342 GN=DRW07_01720 PE=4 SV=1
MQDNSIKSIVIVGGGTAGWMTAAALANLLKDTKITLIESDQIGTVGVGEATLPHLRFFIQRLGIDEHAFMRATNATYKMGIEFINWGEIGDAYIHPFGDFGHPIKGIDFHHYYVKLHQQGLNKPIGQYSLPVMASKAKKFAYPSTDEKSILSTYSYAFHMDAGLFSNFLRDYSETRGVTRFEGMVTRVNQCNESGFIKSVTLNDETEFDADFFIDCSGFKGLLIEQCLKTGYDDWRHWLPCDRAIAIPTQATSAPLPYTKATARNAGWQWRIPLQNRVGNGHIYSSPYMNDDTALETLLANIDGKPISEPNFLRFTTGKRKKAWSKNCVAIGLSAGFLEPLESTSIHLIQLGIMKLLDFFPDRNCDEIRVNEYNRMMQLEFERLRDFLVLHYHATQRSDSAFWNYVRTMPLPAGLDHKIKLFKERGRVVQYSEGLFLKASWLAVYFGQGIIPTHYDWQLDTIPTEHIVKQLDDIESDINSAVHQMPSHADSIAQHCALAKSWRTPPPRASFSLYGG

SEQ ID NO: 86085 - protein, 503 aa, Oleiagrimonas soli
  misc_feature (1)..(503): tr|A0A099CZB1|A0A099CZB1_9GAMM Tryptophan halogenase OS =Oleiagrimonas soli OX=1543381 GN=LF63_0100955 PE=4 SV= 1
MNDPRIQKIVIVGGGTAGWMAAAAFAKLLGRAYDVRLIESEEIGTIGVGEATVPHLKLFNNLLRIDEIEFVKKTRATFKLGIQFNDWGRIGDSYIHGFGKIGTELGLLPFHQYWIKAHREGIAGELGDYSINTLAAPRGKFMPSATDVPPNSPLADIAYAYHFDAGRYAQFLRAFAEEFGARRTEGKITQTHLRESDGFVEAVTLESGERIEGDLFIDCSGFRGLLIEQALQTGYEDWTHWLPCDRAIAVASERTGPPPPFTRATARTAGWQWRIPLQHRMGNGYVYSSQYQSQDEATSILLGHLEGKPLAEPRHLRFTTGMRRKFWNRNVVALGLAGGFMEPLESTSIHLIQSGISRLLNLFPQRDFDPVLMERYNAQMTFEFERIRDFLILHYYLTERTDTPFWNYCRTMQIPESLQENIRLFEDSGRFFRNAEEMFAEPSWVQVMIGQRLMPRSHHPLVDEVPQDYLKQFIGNVGQVIDQCVGAMPMHQAFIDRHCAATE

SEQ ID NO: 86086 - protein, 500 aa, Sphingomonas sp.
  misc_feature (1)..(500): tr|A0A4R2YFS8|A0A4R2YFS8_9SPHN Tryptophan halogenase OS =Sphingomonas sp. JUb134 OX=2485112 GN=EDF69_103158 PE= 4 SV=1
MIGGKRMRRIVVAGGGTAGWMAAAAIARTMGRAVEVTLVESDAIGTVGVGESTIPPLINFNRLLGIDEAAFMAATQATFKLGIQFENWMLPGHRYFHSFGFTGKDHWSAGFQHFWLYGRTRGHDAPYDAYCVELIAALEGKFGHLPGDRANYAYQLDATLYARFLRTMAEGDGARRVEGKIAQVELDGESGDIAALVLESGTRVGGDLFLDCTGFRALLIEQTLHTGYDDWTHWLPCDSAIAVQTDNVGPPVPYTRAIAHDAGWQWRIPLQHRTGNGLVYCSRYLGRDAALERLLGNLEGAVRTEPNHLRFTTGVRRRQWVRNCVAIGLAGGFAEPLESTSIHLIQRAVLRLIRMLPLSAVSPRDVAEFNEQQLQDMTQVRDFLILHYKATERRDSAFWRHCADMEIPDSLTQKIELFRETGRVFRKNEELFAENSWVQVMMGQGIEPRAWHPIAEKLRDEELARLLTTLRENVARTVAAMPRHADYVASYCGAAREQAA

SEQ ID NO: 86087 - protein, 413 aa, Salinispora arenicola
  misc_feature (1)..(413): tr|A8LZN8|A8LZN8_SALAI Tryptophan halogenase OS=Salinis pora arenicola (strain CNS-205) OX=391037 GN=Sare_2031 PE=4 SV=1
MRQPVAEYDVIVVGGGPAGACTAGLLALEGHRILLLEREKFPRYHVGESLITGVVPTLTALGLLDRMAELRFQVKYGGSLLWGENQTEPWSFRFREIRGGRYEYAWQVRRAEFDAMLLDRARELGVHVVEGATVRDALTDGDRLAGVRYQLKGESGSVPARATMVVDASGQHRWLGRRFGLVDWYDDLRNVAVWSYWQGALRYPGEHEGDLLTESCRQGWLWYAPLSPELTGIGYVTTSDRLVASGLTPEQLLERHIAESSEVSWLTAGAKRVDIYRAARDWSYTCQQFSGPGWVLVGDAAAFIDPLLSAGVTLAMRAASSVAKAVHETLTAPDKERHVMKDYEDRYRDFLGSLLELVRFFYDGAHGKEELHLRAQAIVDPDRSLPPKLSFVSLLSGLVRGDESLGADAVDEY

SEQ ID NO: 86088 - protein, 495 aa, Verrucomicrobiaceae bacterium
  misc_feature (1)..(495): tr|A0A4Q2YR72|A0A4Q2YR72_9BACT Uncharacterized protein (Fragment) OS=Verrucomicrobiaceae bacterium OX=2026800 GN=EOP85_14890 PE=4 SV=1
VIVVGSGSAGLIAALSFKRKVPLLDVSIVRSPEIGVIGVGEGTTPNFPTYLFDELGISRKRFYELAGPTWKLGVRFLWGPRGRFDYSFSPQLDSQWTDLPKPHGFYCEDQFANNNLAAALMRQDKVFCRQQNGCPDIQPWHAFHIENVKFVEVLEQIAREIGVNIIDGKVVGADRGDGGISAVHLEDGRRMEADFFVDASGFRSELLGQALEEPYTSFDKTLFCDRAVVGGWERGPDEPILPYTTAEQMDAGWSWRIDHEHHVNRGYVYSSQAISDEDAAEEFIRKNPKVPKSPRVVKFRSGCYKRLWVDNVVAIGNAGGFVEPLEATALMIVCSHCKTMVDFLLHSSLEPTPSIRNLYNDLVAATWSDIRDFLGLHYKSNSAMDTPFWKHCQNDTDLSGIGALLEFYEENGPTGFCRYRMPTSQSDFGIEGYFTILTGNKVPHRKPHYPTEKEVAQWKAHCKAFEQEARTGMGVKEALDYVRHPGWRWFGEKTG

SEQ ID NO: 86089 - protein, 510 aa, Massilia sp.
  misc_feature (1)..(510): tr|A0A1G6UJR5|A0A1G6UJR5_9BURK 2-polyprenyl-6-methoxyph enol hydroxylase OS=Massilia sp. PDC64 OX=1881046 GN=SA MN05428966_104198 PE=4 SV=1
MSKPIEHVVVVGGGSAGWLAAAVLAAEHPRLAVTLVESPGVPPIGVGEGTWPSMRETLQRIGVSETAFFRECDAAFKQGSRFDRWVDGSDSDIYFHPFSLPQGYGEANLVAAWQRAHRDVPFADLVSYQPHLCLQGRAPKQPQTPEFAGVANYGYHLDAGKFGVFLQKHCTDKLRVRHVLAHVVDILSTEDGDIAALRTREAGLVEGDLFIDCTGMASLLLGRHYGVPLVSQRDVLFNDRALAVQVPYPAPDTPIASQTTSTAQPHGWIWDIGLPTRRGVGYVYSSAHAEDDAAERTLRAYLASTGIEGDIPAPRRIAFDPGYRARFWERNVVAIGLSAGFIEPLEASALALVELSAAWLADDLPATRAQMDTISARFNEAFTYRWERIIDFLKLHYVLSKRTDTGYWLDHRAPHTQSPRLRELLALWRTRTPSRRDFPRIEEIFPSASWQYILYGMGFRPELTARASDLPERADHYFREAARLTARMLPQLPANREMLHHIRQYGMPPG

SEQ ID NO: 86090 - protein, 502 aa, Asticcacaulis sp.
  misc_feature (1)..(502): tr|V4Q0K6|V4Q0K6_9CAUL Tryptophan halogenase OS=Asticca caulis sp. AC460 OX=1282360 GN=ABAC460_07270 PE=4 SV=1
MMIRKLVVVGGGTAGWMAAAALSRTFGSAGYSITLIESDEIGTVGVGEATIPPIIEFNQMLGIDENDFLKAVNGTFKLGIRFINWSALGSDYLHPFGVYGVDMNGLNFNHHLMRYRKAGGNADFGLFNPQTVASRQNRFGRMQEINPQAPRVNYAFHFDAALYARYLRAYCEKLGTIRQEGRITKVEQNPETGDVTAVVLENGKVITGDLFIDCSGFRGLLIEQTLKSGYEDWSKWLPCNRAAAVPCDKAGPVTPYTTSTAREAGWQWRIPLQHRTGNGYVFSSEYMSEDEASSLLMQRLDGKAQADPRIIRFVTGKRKQQWNRNVVAMGLASGFLEPLESTSIWLVQEAITMLLRYFPRDGITQNQRDCFNREMLGAYDNVKDFLIAHYKVTAREDTPFWAYVKHMDIPDSLAFRLESFAEHNQPLVRNHELFKDASWFAVLVGQGMEPKSYNPMADVMPQDEFRWRMQRVREGTAGLAGMMPQHEAYLAKACPSPQRVTV

SEQ ID NO: 86091 - protein, 503 aa, Asticcacaulis biprosthecum
  misc_feature (1)..(503): tr|F4QHY6|F4QHY6_9CAUL Tryptophan halogenase PrnA OS=As ticcacaulis biprosthecum C19 OX=715226 GN=ABI_01270 PE= 4 SV=1
MQSPDPIRSIVIVGGGTAGWMAAAAFARNLGRHLSITLVESEDIGTVGVGEATIPPIKLFNAMLGLDEAEFMRETRATYKLGIRFHDWRHLGQDYFHPFGVYGLKPELGHFLQFWLRMQAQGHDIGPVSDYSLCTLAALQGRMGRQSDDGAMATFGSAYHFDAGLYARYLRRYSQQLGVIRVEGLIADVQQHPESGNVQSVRLKDGRGIAGDLFIDCSGFRGLLIEQTLGTGYDDWSHWLPCDRAMAMPCAHGGAQIQPYTSSTAREGGWQWHIPLQHRVGNGYVYSSRFVDDDTAEATLRANLEGEPLAEPNRLRFQTGRRKKFWNKNVVALGLASGFIEPLESTSIHLIQSGINKLLLHFPDRSFAPANIEAYNRRQHLDYERIRDFIILHYHATARDDSGLWRYTRTMEIPDSLAHKIEVFRERGAFAHAAEEMFTPTSWMAVMMGQGIIPQSHDPLVAYEDIATLRDGFARMKDHLKQLADTLPTQHAYLKQNGMLAIS

SEQ ID NO: 86092 - protein, 497 aa, Asticcacaulis sp.
  misc_feature (1)..(497): tr|V4P6Y6|V4P6Y6_9CAUL Uncharacterized protein OS=Astic cacaulis sp. AC460 OX=1282360 GN=ABAC460_12475 PE=4 SV= 1
MDTAKRRQVVIVGGGTAGWMSAALLAKITQGRLGDITLVESEEIGTIGVGEATIPAIKRFNRLLDVQERDFVRQTQASFKLGIEFVDWGKLGARYFHPFGPIGNPIGRTDFHHFLTRRRLAGEVEDFETYSLNCVAAKQNRFVVAPQDDSLLSTLAYAYHFDASLYAAYLRRYAEAKGVQRVEGRIKHVAQNSETGFIETLTLDSGQTIAGDFFIDCSGLSGLLIEKTLHSGFEDWSALLPCNSAAFVPSEKTDPITPYTRSTARTAGWQWRIPLQHRTGNGHVFCSDFMNDDEAAATLLRHLDGKALADPKFVRFKTGRRKLSWNRNVVAIGLSGGFLEPLESTSIHLIQSGLVKLLDFWPGETIDPLLAEQYNRAMANQYNWIRDFIILHYKASQRDDSEFWRYCRDMAVPDSLTYRLDHFRSSSRIVLTPGELFQPPSWLAVMLGQHIEPEGYDPLADIADAEKVAMQFNRIRTAVSQVAQTIPSHQAYLDSLG

SEQ ID NO: 86093 - protein, 492 aa, Rickettsiales bacterium
  misc_feature (1)..(492): tr|A0A2E3ID23|A0A2E3ID23_9RICK Tryptophan halogenase OS =Rickettsiales bacterium OX=2026788 GN=CMP20_17010 PE=4 SV=1
MQKDSIKHIVIAGGGTAGWMTAAALGKLFGANIKVTLIESDAIPTVGVGEATIPTLHLFHDLLKIKESEFMAATNATFKLGIKFEDWYQRNQSYIHSFGRFDHGCWAAGFQHFWLRGRQLDIASEIGDYCPEHLACRMGKFATAPKQERNHAFHLDAGLYAKFLRNFAEQYGVRRIEGKIDNVNLNHTNGFIQSLSLESGQRVEGQLFIDCTGFRGLLIEQALHTGYEDWSHWLPCDSAIAVQTELNESNEPYTRSIAHHAGWQWQIPLQTRMGNGMVFCSKYISDDEAKTQLLANIQGKTLNPPRVLKFKTGVRRKLWNKNCVAIGLAGGFIEPLESTSIHLIQQSIIRLMQSLPTKKMEAALRDRFNASMREEIDNIRDFIILHYHATARKDSAFWRYCKDMPIPDSLQARMDQFAQSGHVYQGNGELFGEASWLQVMLGQGITPKAYHPIVDLMPEQELAKFLASVKQQTERRVNQLPNHLDFIRHYCQ

SEQ ID NO: 86094 - protein, 505 aa, Asticcacaulis sp.
  misc_feature (1)..(505): tr|V4PLP8|V4PLP8_9CAUL Tryptophan halogenase OS=Asticca caulis sp. AC460 OX=1282360 GN=ABAC460_16085 PE=4 SV=1
MTAIETIVIVGGGTAGWMAAAALSRLRSGRPVNIVLVESEEIGTVGVGEATIPPFQDFNRLLEVDEQEMMAAVQGTFKLGIQFVNWGKLGDSYIHPFGNYGYQIDGVSFHHIWHRYRMAGDKRPIQVFNIETMAAHFGRFARTEDYKHDDLPPINYAYHIDAGRYARYLRGYAEKRGVVRIEGKVADVGLNAETGFVESLTLNNGETLKGDFFIDCSGFRGLLIEQALKTGYDDWSHYLPCNRAVALPCLREDGSGPLPYTRATAHTAGWQWQVPLQHRNGNGHVYCSSFMEDDEAHDILVRNLAGKPGAAPNFLRFVTGRRKKFWNKNVVALGLASGFMEPLESTSIHLINTGINKLISLISLDGVTQAQEDAFNRLTGKEYERIRDFLVLHYKSTVRDDSPFWNHCRTMDVPQSLTEKMALFQQNGQIFREDDELFTETSWAAVMMGQGVTMKGHNAMADTLNDAKTRKEMDGIEKSIQHVVQHMPSHGDYLKKYCPATPSGN

SEQ ID NO: 86095 - protein, 510 aa, Rickettsiales bacterium
  misc_feature (1)..(510): tr|A0A2E3I4V5|A0A2E3I4V5_9RICK Tryptophan halogenase OS =Rickettsiales bacterium OX=2026788 GN=CMP20_02000 PE=4 SV=1
MARLVLNNEKKQSTQNGQKLQRVQKVVIAGGGTAGWMAAASLSKLLGKSLDVTLVESDEIGTVGVGEATIPPIRTLHKLLNIDEQGFMRATNSTFKLGIEFNNWGQKDDSYIHSFGVTGKECWAGEFHHFWLRGKELGIDIPFGDYCYELQASKQGKFAFSANAPMNFAYHLDATLYAKFLRDFCTDSVTRIEGKIQQVNKHQESGFIQSLTLESGQIVEGDFFIDCTGFKGLLIEEALHTGYEDWSHWLPCDSAVAVQTQANSDPLPYTRATAHEFGWQWRIPLQSRVGNGMVFCSRYTSDEQAKATLLANLDGFPINEPRVIKFKTGRRRKGWNKNCVALGLASGFVEPLESTSIHLIMTGIVRLMRLFPFDGVRQSTIDEYNEKLTSELHSIRDFIVLHYKVTTRDDSPFWQHCQSMEVPASLAHKIRLFKETGRVFLDDGDIFRVDSWTQVMLGQGLAPEQYHRIVNEMNKDELTRFLAGMRSAIEQRVAQLPSHQQFIQRYCKAS

SEQ ID NO: 86096 - protein, 479 aa, Asticcacaulis sp.
  misc_feature (1)..(479): tr|V4PNU2|V4PNU2_9CAUL Tryptophan halogenase OS=Asticca caulis sp. AC460 OX=1282360 GN=ABAC460_14480 PE=4 SV=1
MFMIKSIVIAGGGTAGWMTAAALARVFGPSLNITLVESDEIGTIGVGEATIPAIARFNTMLRLDEDAFLRETQGTFKLGIEFRGWRERGHSYMHSFGAVGRDLAYLPFHHYWYQDRMQGGDAGELGDYDLNHAAAYAGRFARADDLVHAFHFDAGLYAAFLRRYAEAGGVTRIEGRIADVTVDGDIRSLRLADGREIAGDFFIDCTGFRALLIEGALKTGYEDWRHWLPCDRALAVPSARTGALLPYTRATAQVAGWTWRIPLQHRTGNGHVYCSAHTSDDEAHAALMGQLDGEALADPRPIRFTTGRRKKLWHRNCLAIGLSAGFIEPLESTSIHLIQSAIERFIMLFPRGPNHDRLAEDFNNSSIMEMENIRDFIILHYHVNGRYDETFWNSCRNMTVPDSLHHRIELFRETAALHIPTADIFRLPSWLQVLHGQGVEPQAVHPFTERVARDDRARFLRGQRHDCRERLKHLPSLAG

SEQ ID NO: 86097 - protein, 504 aa, Brevundimonas sp.
  misc_feature (1)..(504): tr|A0A0Q5UY05|A0A0Q5UY05_9CAUL Tryptophan halogenase OS =Brevundimonas sp. Leaf363 OX=1736353 GN=ASG17_12210 PE =4 SV=1
MSDDQSIRSVVIVGGGTAGWMMAAALVQHFRNAPVRITVVESSDIGTIGVGEATIPTIRRFYAQLGLGDAELMAATEATCKLGIRFQDWSGPGSDFIHPFGLYGQDLNGIGFHHYWRKAHQAGDPAPLADYSLGASLARAGRFTLPSRNPPSTLSVFDWALHLDAGLFAQRLRRYAEEGGCTRIDARIGQVRLREDGFVAALELEGGRTVEGDLFIDCSGFRGLVIAEALKTPYEDWSRWLPCDAAYAVQSTLPDGDPQPFTRVTARSAGWQWGIPLRHRAGNGLVFSSRYQSDEGAVAELMPHLMGEPLMEPRRIGFKPGRRAQAWFKNCVSVGLSSGFLEPLESTSIALIETAIERLKGLFPDKRFDPAVIDEFNEQSAEEMERVRDFVILHYKLNQRTDTAFWRDCREMEIPETLQRKIALWRARGQFVRYRWEMFHPASWLAIYDGFDVWPDRVDPAVEALDPEQLKRSLEAMRRAVAEAVSQTPTHAQFLSAVGRQAAA

SEQ ID NO: 86098 - protein, 509 aa, Oleiagrimonas soli
  misc_feature (1)..(509): tr|A0A099CT63|A0A099CT63_9GAMM Tryptophan halogenase OS =Oleiagrimonas soli OX=1543381 GN=LF63_0113170 PE=4 SV= 1
MNASPIRRVVILGGGTAGWISAALLGRAFGSRLAIRLIESDAIGTVGVGEATIPQIQHINRFLGLDEREVLKASQGTYKLGIQFNDWGRVGDSYLHAFGDIGLPLGLIPFQHYWLRDRQERSAAASQGAAELWAYSINARACHAGRMARMERIGDTPLTGLRHAYHLDAGLYARFLRAQCDPTVVQRIEGKVVDVALREDDGFIQSLLLESGERIEGDLFIDCSGFRGLLIEETLHAGYDDWKHWLPCDRAMAVASTRVAPMRPYTQASARAAGWQWRIPLQHRSGNGHVYSSDFISDDEATATLLSHLEGEAMGEPRPLRFQTGCRRRFWHRNCIAIGLAAGFMEPLESTGIHLIQSAVSRLISLFPDSAFDAAMIDAYNRQTRFEYERIRDFLILHYRATERRDTPFWRHCAQIEPPESLRRKLDVFRASAQLFRDGEELFTDVGWLQVLIGQHVQPQRHHPLANAVTPAQLDEFLTHIRTLLDRAIDSMPSHDAFIERHCKAPPLP

SEQ ID NO: 86099 - protein, 501 aa, Asticcacaulis sp.
  misc_feature (1)..(501): tr|V4P627|V4P627_9CAUL Tryptophan halogenase OS=Asticca caulis sp. AC460 OX=1282360 GN=ABAC460_12945 PE=4 SV=1
MTSYLKKIVILGGGSAGWMTAAALSSQLDPKFVSVTLVESDQIGTIGVGEATIPEIINFNRHLGIREDEFMKATHATFKLGIEFVDWGRKGDAYIHPFGGHGVDMNGYEFHQYWLRSRADGNAYPIDAYSMSAVASRQSRFDLPGTTNSPRSHLRYAYHFDATLYARYLRSYAEARGVRRVEGKVEDILQAPESGDITALRLDTGETIDGELFFDCTGFSALLIGKTLGVGYHDWSHWLPCDTAQAVPCAHAGPLLPYTRSTARTAGWQWRIPTQTRTGNGHIYSSAFMEDDEATAILLANLDGEAMASPRKIRFKAGHRHAFWKNNCVAIGLSAGFLEPLESTSIYLIQEGISRFIALFPDASLPEVVRKEYNQHMQTEFEQVRDFIILHYNATERDDTPFWNYCRNMSIPDSLSHKIDLFRTAGRTYAYREELFGRPSWIAVFLGQGIMPRSFDPVIAMLPSDAVRDSLDSMRQAMHAEAGRMPTHAAFLQSYCPAVGA

SEQ ID NO: 86100 - protein, 501 aa, Verrucomicrobiaceae bacterium
  misc_feature (1)..(501): tr|A0A4Q2YJI9|A0A4Q2YJI9_9BACT Tryptophan 7-halogenase OS=Verrucomicrobiaceae bacterium OX=2026800 GN=EOP86_04 070 PE=4 SV=1
MVMNISRKIEKVVVLGGGSAGLIAALTVKKMLPELKVEVVHSVELGVIGVGEGTTAAFPRHFFEYLKMDPLGFYLGAEPVWKMGIRFDWGPQPQGFYYSFQHEYKSRWPEMSRNTGFYCTEQTRWLGITSACMAHNKVFPRKPDGSPHFHKGHAFHIENIKLIGWLTTECRQAGVEFTEGKVSRVERGAEGVEFLELEDGRGIVGDLFVDASGFRSELLGRTMGEEYISFEKSLFCDRAVIAGWPRTTEPVQPYTVAETMDAGWCWRIDHEHWINRGYVYSSRFISDEDALAEFRRKNPKIANEPRVVRFKSGRYKRQWVGNVVGIGNAVGFVEPLEATALQVICVESSTLADTLKDSLCEPTPSLIDLYNRYNSRQWDDIRDFLSIHYAFNRRLDTPFWRACQEETDIAGAAEIVRFYQENGPSLVADAVLFDPTNSFGLEGYLALLVGQGVPHGKPWSPPPAEAKVWRDRLAAYGQHGARAYSAEECLSLIRAGKIKFS

SEQ ID NO: 86101 - protein, 500 aa, Nostoc calcicola
  misc_feature (1)..(500): tr|A0A1U7HHA3|A0A1U7HHA3_9NOSO Uncharacterized protein OS=Nostoc calcicola FACHB-389 OX=1357508 GN=FACHB389_30 835 PE=4 SV=1
MEKTIHNVVVFGGGSAGFLSALALKVKMPALNVVVVHSTTIPIIGVGEATTAWIPWFLHKYLELNREQFYEETQPIWKLGIKFIWGDSSQSHFNYPFVTHLADKLSVLSKSTAYYCLDSTTESSLYSLLMEQCKSPCFRRENGDFVVDERFGYHIENVSFVSYLERRATEIDIKIIDRPVVNIEVAENGYIRQLKFDDGTMLAGDLFVDCSGFRSALLGEILQEPFCSFASSLFCDSAVTGTWMRDDAINPFTTAQTMQSGWCWQIDLPDKVNRGYVYSSAFINDDDALQEMKRHNPLMSDRHSIVRFKSGRHQRFWVNNVVAVGNASGFVEPLESTGLHMIGETIKCVCDVLIDSDQQPTPALINLANRAIAQKWDDIRDFLSIHFKFNHRVESEFWQHCWHQTDIGDAEAIVDFFQSNGPSSLGQILLRPNSVFGYNGYLNLLMGQQVATKYQSHNDILDLDRWRQIQNYFTKQCANALSIHEAIQVVKERKCQWLTS

SEQ ID NO: 86102 - protein, 512 aa, Brevundimonas sp.
  misc_feature (1)..(512): tr|A0A0Q5UYP8|A0A0Q5UYP8_9CAUL Tryptophan halogenase OS =Brevundimonas sp. Leaf363 OX=1736353 GN=ASG17_12205 PE =4 SV=1
MEAKAPNALRKVCVVGGGTAGWVAAALMAEHFKGKLFEIELVESDDIGTIGVGESTVPPFLQLLAKLGVNEQEFIRETQASFKLGIEFKDWLEKGQSYFHPFGTIGLPIDLSDFYQVWLKAKLAGYDRPLQDFAPASVMAREGKFTLPFKAQRTPLAGASYALHVDAKRVAQFLRRFAEARGVTRTEGMVSEVQTRADGFVEQLVLKDGRTVEADFFIDCSGFRALLIGKTLDVGYEDWSHWLLCDRAIAVQTENVGPPPPYTLAHAQDYGWRWRIPLQHRAGNGYVFSSQYLSDDEATATLMAQVEGKPVVDPMVVPFRTGVRDRIWDKNVLALGLAGGFIEPLESTAIHLIYRGMDFFFRFLPDRDCAPELATEYNRRMRADYEEIRDFIILHYCVTRRTDTPFWDACRTMTVSESLQRKIDLFRINGTVAEGLDELFRDPNWQSVLDGMGVVPRTYHPLVDRIPFGRATDGLDEAVANLERMVAGLPDHQSFIAQHCAAERPTAPVVAA

SEQ ID NO: 86103 - protein, 513 aa, Novosphingobium aromaticivorans
  misc_feature (1)..(513): tr|Q2G7X9|Q2G7X9_NOVAD Tryptophan halogenase OS=Novosph ingobium aromaticivorans (strain ATCC 700278 / DSM 1244 4 / CIP 105152 / NBRC 16084 / F199) OX=279238 GN=Saro_1 604 PE=4 SV=1
MDEGEVRRIVIVGGGTAGWLSACFLAAELRSRRVDVSITLIEAPDIPTIGVGEGTWPTMRGTLRAIGIAEDNFLAACDASFKQGSVFSGWVTGEPGDRYQHPFTPPPAGALDDIVAAWAGRGDQPFASAMTAQAAVIDRDLAPRQPNMPFYAGALNYAYHLDAGKFAALLSSRATGHLGVTHVRDRVRNTVADDRGHLLAVELASGDRVEGDLFIDCSGHAALLIGGACGVPFIDRSDVLLNDRALAAQVSVQPGTPVASATVATAHRAGWLWDIGLPGRRGIGCVYSSRFLSDDDALAVLRAYVSANVPGADPAAVEPRRIAFPTGHRERFWHGNCIAIGLSAGFLEPLEASAIVMIELSLRALAENFPRQRQAMPFLAGRFNDLFRYRWDRVIEFLKLHYLLSKRQEPYWQAQRDPAAVPQRLAELVALWRHQPPSAWDFPQVDEIFSAESHAYILYGMGFPPPASTARDPLAARALDDVAQRTRALCAALPTNRSYLSSLMPAQGAAALP

SEQ ID NO: 86104 - protein, 425 aa, Caballeronia humi
  misc_feature (1)..(425): tr|A0A158JEN6|A0A158JEN6_9BURK Tryptophan halogenase OS =Caballeronia humi OX=326474 GN=AWB65_06496 PE=4 SV=1
MRTNFDALIVGAGPAGSTAAILLALAGWSVALVEKQSFPRRKVCGECISPSALPLLSALGIEHELTHAAGPNLQRFALMRGPDTVVSDFPQAPDSAYRWSRALGRETLDTLLAEHARELGVQLFQPCSLVGIVGGPGAWRCDVRDLNVFATSTLRARVAIAAHGSWEALPSDPPRRQRRPSDLLAFKANFTGASLEEGLLPVLSFDGGYGGMVVTERDVTTVAGCLRRDKLDVLRRGKLGASAGECFEAMLRQQCAGAGEVLDKASRQGPWIGAGPIYPGIRLSAEDGLFRIGNAAGEAHPIIGEGISMAVQSAWLLCMQLLGEDASPDRLSRGRTWQRLVARRYEREWRRQFVPRIRLACAFAHASMHPRGSALLLALAKRWPGFLPSGSRWAGKIRCAIHPADVARLAQHHFAHVALWPTSIP

SEQ ID NO: 86105 - protein, 588 aa, Micromonospora kangleipakensis
  misc_feature (1)..(588): tr|A0A4Q8B976|A0A4Q8B976_9ACTN Tryptophan halogenase OS =Micromonospora kangleipakensis OX=1077942 GN=EV384_272 1 PE=4 SV=1
MYGNMGGFGGPSTRTQLDTLVESLTESDADAVRDWLGGANGQGMPGVLNPRALTQHHEAVASDRRRPADDDPQGVRSVGVIGGGTAGFMAALALKAKRPWLDVTLVQSKEIPIIGVGEATVTYMVMFLHHYLGIDANELYRKVMPTWKLGIKFDWGPADDEPFMATFDWHHHSIGGLGALDATGSVNGFTLQSLMMMADRSAVYEVDGRPVSLMKYLPFAYHLDNGRFVGYLTELAEQRGIKHVEARLADVVLSGEEWVDHLTTTDGRELEFDFYVDCTGFRSMLLGKTLGTPFHSYSDTLFTNSAVTGNMPHDGVLKPYTSATTMQAGWTWNIPTPESDHIGYVYSTDHLSDEQAADEVQERFPTVDGLRQVRFRSGRHDKAWRGNVYAIGNSYAFVEPLESTGLLMSALSIQAMVATLPTSWSETPARDVVNLGLGQRWDAIRWFLGIHYKFNTKLDTPFWKDVQERCDVSGFKPLLDLYANGAPLTRRDPFLLDLALGAAPTFFGLAGIDNLLLGQKVPATLLERTETNDDWWQRRKAADALVAKAMTQADALKAFAEHPELNKQLLEDFDSWAGRHIAPYIGMN

SEQ ID NO: 86106 - protein, 520 aa, Rickettsiales bacterium
  misc_feature (1)..(520): tr|A0A2E3I505|A0A2E3I505_9RICK Tryptophan halogenase OS =Rickettsiales bacterium OX=2026788 GN=CMP20_02005 PE=4 SV=1
MSNRSIKNIVIVGGGSAGWLTAGIIAAEHQCGLQQSKINVTLIESPDVNIIGVGEGTWPSMRNSLQRMGISETEFIRHCGAAFKQGSKFVGWKNGTDNDFYYHPFVIPSGYGKANQYSAWKTYASEHPFADVVCAQSHICQAGLAPKQNATPEYAGVLNYGYHLDAGKFGQLIQQHCVAKLGVRHIQDHVEGVISQDNGDIKALQTRQNGELAGDLFIDCTGARSLLLGQHFNVPFIDKSDVLFNNSAMALHVPYTNDDEPIVSATVSTAQEAGWVWDIGLQDRRGVGYTYSSKHADDEQAQRTLKAYVAQSIGPERANALEARKINFEPGHRSHFWHKNCVAVGLSAGFLEPLEASALALVELSATAIAENMPVTTEHMHIIRDNFNQRFLLHWENIVEFLKLHYVLSERNEPYWQQMRAPESISPRLKALLTQWRFQPPNRSDFVQNEIMFPSASYQYVLYGMGFETLNDVSSREFDTPQSAVKHLQENQQHVRKLMAGLKSNRQLLEHVKHYGFQKV

SEQ ID NO: 86107 - protein, 503 aa, Massilia sp.
  misc_feature (1)..(503): tr|A0A1G6KMJ7|A0A1G6KMJ7_9BURK Tryptophan halogenase OS =Massilia sp. PDC64 OX=1881046 GN=SAMN05428966_101528 P E=4 SV=1
MTQQTPLQDIVIVGGGTAGWMAAAALARLLQGRFAIRLVESDEISTVGVGESTIPMIRLFNDVLGINEDEFVRETKATFKLGIEFKDWSRPGERYMHGFGRFGQDVHTVEFFQYWLKAHQAGFAPDLEHYSINRMGARAGKFMRPPPEAPNSPLADIVYAFHLDAGLYARYLRTYAEARGVRRTEGKVVEVRQRADDGFIEAVVLASGEVVAGDLFLDCTGFRGLLIEQTLHAGFEDWSHWLPCDRAWAVPCALSGDLLPYTIAHARPAGWQWRIGLQHRTGNGHVFSSRHMSEDEAAAILLQNLDGEALAEPKLLRFTAGRRRKAWHRNVVAIGLSSGFLEPLESTSIHLIQSALSRLLAFFPDKGFHQADIDEFNRQGDFEIERIRDFLILHYHATTRADTRFWNHVRTMDIPDTLRRKIDLFKAHGRVVRENEELFTPVGWQQVLHGQGVRAGGYHPLVDLMDEPTLRDFLANTERVIGRCVDVMPAHKDFVAAVTGAKR

SEQ ID NO: 86108 - protein, 503 aa, Brevundimonas nasdae
  misc_feature (1)..(503): tr|A0A0B4CHA1|A0A0B4CHA1_9CAUL Tryptophan halogenase OS =Brevundimonas nasdae OX=172043 GN=RM53_14910 PE=4 SV=1
MTPAPLKRILIVGGGTAGWMAAAALAHVTRGTVKVELVESEVIGTVGVGEATIPPILLFNQLLGIDENEFVRATQATYKLGIQFNDWFQKGRSYFHPFGTYGTRIDAASFHQYWLRLNKAGLDDDLDAYSVTTMAARMGRFTRPDTDPRGAGSQMTYAFHFDAGLYARFLRQRAEANGVVRHEGKIADVRLRDGDGFIQSVRLDDGRELEADFFIDCSGFRGLLIEGALKTGYEDWTHWLPADRAVAMPCTRVGDPTPYTQSTALEAGWRWRIPLQHRTGNGYVYCSPYISDDEAQAKLRASLDGEAMAEPNFLRFTTGRRKKTWNKNCLALGLASGFLEPLESTSIHLVQSGISKLLLHFPDTGFAQADIDNYNRMMRLETERIRDFIILHYHATARDDSPLWRHVRAMPIPETLQQKMDQFRSRGRIFRYEDELFQETSWIAVLLGQGVIPERHDPITETIPLEQVQQWLQKMKAMIQQGVARMPTHEAFIAANCKAPPIN

SEQ ID NO: 86109 - protein, 496 aa, Pseudoalteromonas sp.
  misc_feature (1)..(496): tr|A0A1Y5JVA4|A0A1Y5JVA4_9GAMM Tryptophan halogenase OS =Pseudoalteromonas sp. A601 OX=1967839 GN=B5G52_21300 P E=4 SV=1
MTHNKQIKNVVIAGGGTAGWMAGAALCKLLGKNITVTLIESDEIATVGVGEATIPPIRTFHKLLGINEQAFMKATQASFKLGISFENWGQKETDYIHSFGMTGKECWAGEFHHFWLHSLSLGLESEFGQYCYELQAAKQGKFAFNQQNPINYAFHMDATRYALFLRDFSEGLGVKRLEGKITSVNKSPHNGYIESVSLEGDSTITGDFFIDCTGFKGLLIEQALHTGYEDWSHLLPCDSAIAVQTKAISNDILPYTRAIAHDAGWQWQIPLQQRVGNGLVYCSRYLADADAKQLLLNNIQGETLTEPKVIKFKTGRRRKGWNKNCLALGLASGFVEPLESTSIHLIMSGIIRFMRLFPFNGITEQAINEYNKQLKSEIENIRDFIVLHYKVTDRTDSEFWQHCQSMEVPDTLAHKISLFKQTGRVFLDDGDIFRVDSWVQVMLGQGIMPKQHHLIASLMSDDELTRFLNSIKQQISQRVSQLPSHQAFLQQYCPAE

SEQ ID NO: 86110 - protein, 499 aa, Pseudoalteromonas sp.
  misc_feature (1)..(499): tr|A0A1Y5JU17|A0A1Y5JU17_9GAMM Tryptophan halogenase OS =Pseudoalteromonas sp. A601 OX=1967839 GN=B5G52_15900 P E=4 SV=1
MQNKKIKNVVIAGGGTAGWITAALLNKVLGKVVNITLVESEQIGTVGVGEASIPPILHLNAALGIPENEFIKATQATIKLGIEFENWQKQNHKYMHAFGDIGKDFPFCEFYHFWLRAKQQGTASDFWDFSLNYQAAKQHKFAHLRHIPNTQLTGLNYGYHFDATLYGEFLKELTISRGVKRIEGKIAHVKQCEESGFVRALALDDGQSISGDLFIDCTGLRALLIEQTLNTGFEDWSHWLACDSAIAVQTKSAVDPVPYTRSIAHDAGWQWQIPLQYRVGNGLVFSSRHMTDEQARQQLLDNLPGEPITEPRVIRFKTGRRRKQWHKNVVSVGLSSGFLEPLESTSIHLIQTAAIRLIKLFPHNGIDETLIDTFNQQSQTEIERIRDFIILHYKLTERSDSAFWRQCKQMSIPDTLQKKIDLFKATGKIVRQDDELFAEVAWQQVMIGQGLEAEDFHPLANALNDEQLAELFTNLKTLIDGTVNQLPTHNEFLHRMKSN

SEQ ID NO: 86111 - protein, 483 aa, Asticcacaulis biprosthecum
  misc_feature (1)..(483): tr|F4QIC8|F4QIC8_9CAUL Tryptophan halogenase PrnA OS=As ticcacaulis biprosthecum C19 OX=715226 GN=ABI_01970 PE= 4 SV=1
MAAACLARNLGTRNHTIEVIESPDIGTVGVGEATIPMINLFNKILGVSPTDMVRETEATFKLGIEFVDWGGLGRSYIHPFGTYGADMGGISFIHYFLRQSLLNGTWTPEIYNLETAAARAGKFGVLPNNDPSRPSLNHAYHFDAALYADFLRRYSLKRGVVRHEAAVTQVHQDAETGFVTALDLKDGGQVEGDFFIDCSGFRGLLIEQTLKAGYEDWSHWLPCNRAWAVPCERVETPLPYTRSTALEAGWQWRIPLQHRTGNGYVFCDGFIDEDQAADKLMGWLDGKPLADPRKLSFVTGHRRKMWSKNVVALGLASGFLEPLESTSIHLVQSALAKLMAFFPRDGFDPDVEDHFNTVMCGEYANVRDFLIAHYKVTDREDTPFWAYCKHMSVPDSLTQRLAIFERGGMYVEPPYELFREASWFAVLTGQGIRPRSWHPVADMMTDAELTHHTAQIRDLVASTAARLPPHETFIRHCQQRQAS

SEQ ID NO: 86112 - protein, 492 aa, Asticcacaulis sp.
  misc_feature (1)..(492): tr|V4PQ05|V4PQ05_9CAUL Tryptophan halogenase OS=Asticca caulis sp. AC460 OX=1282360 GN=ABAC460_12955 PE=4 SV=1
MAASALAHEFKRLPISITLVESDEIGTVGVGEATLPHIRNFNTALNIDEVTFMKATEATFKLGIEFCNWGRIGDRYIHPFGDYGEPIDGIAFYQHWLRLQKLGLASHLDDYAFPTSIAEANRFRHPSNDRTRIESTFGYAYQFDATRYAAFLRQFAEARGVVRRQGKVVDTRLDAETGHVASMTLDSGEVVAADLYVDCSGFRGLLIEQALKTGYDDWSQWLPCNRALAVPCESRGSLTPFTRATALEAGWQWRIPLQHRTGNGYVYCSSFISDEDAAHRLLGNLDAPTLADPRQLYFTTGRRKAFWNRNVVAIGLAAGFLEPLESTSIHLIQEGITELLHIFPDKRFLQSDIDEYNRRMGVNFERVRDFLLLHYVATQRDDTEMWRHFRNLKLPDSLEEKIQIWLTRGQLIRYEFGVFLPPSWIAVMTGQNLLPRNYDPRVNRMVQDALIQSSEDLRQRVKAAVSATPDHKDYIRQMGAASDTGPLVAQVG

SEQ ID NO: 86113 - protein, 501 aa, Sphingomonas sp.
  misc_feature (1)..(501): tr|A0A4V2TIB8|A0A4V2TIB8_9SPHN Tryptophan halogenase OS =Sphingomonas sp. JUb134 OX=2485112 GN=EDF69_1202 PE=4 SV=1
MTPTDVPQRRRVVIAGGGTSGWLAAAALAQQLGALLDITLVESEEIGTIGVGESTIPTARAFHRLIGLDEQRFMSETGATFKLGIAFEDWAQKGDRYIHAFGETGQSTWMGAFHHFWLQARDQGFGGDFGEYCLELQAADAGRFGIGAKVPELSYAYHLDAGRYARHLRGIAEQAGVRRVEGMIERVEQQGDGADITALVLRSGQRIEGDLFLDCTGFRALLIGQALGSPFEDWGHWLPTDRAVAVQTRAVEPARPYTRAIAHRAGWRWRIPLQHRVGNGFVYDNRHLSDDEARAQLLRDIEGEIVAEPRLIRFRAGRRAEAWRGNCVALGLAGGFVEPLESTAIHLVMIAITRLLQLFPFAGDCAAAARRFNAQAAAELDGIRDFIILHYVLTERDDTPFWRDMRAMEIPESLRDRIALFRDGGIAYQDGADLFRVDSWAQVMIGQRSLPHHHHRMGEIMGAPRLRQVLADMKARVAQQVLLLPPHATFLQDYCPAEDAA

SEQ ID NO: 86114 - protein, 491 aa, Massilia sp.
  misc_feature (1)..(491): tr|A0A1G7LGI0|A0A1G7LGI0_9BURK Tryptophan halogenase OS =Massilia sp. PDC64 OX=1881046 GN=SAMN05428966_11647 PE =4 SV=1
MTYERIVVLGGGTAGWMAATALATGMKGSTVELVESEEIGTVGVGEATFPSIRNYHQILGIPEADFLRATNGTYKLGIRFRDWRVKGEDYYHTFGDFGMLSGPESLWGQYRRHPRAHLPTFGEQCLPTVMAMNDRFCAPGKDAANFNYAYHFDATLYARFLRDVGVKRGVRRTEGKVVEVARRPDGGVASLRLDDGRVVKADLFVDCSGFSSLLLGRTLGEPFVDFSHWLPVDRAWAVPSARVGDNLTPYTRATALDAGWAWRIPLQDRTGYGHVFSSRFIDEDKAREQLLQQLDGEALAEPRLLRFTTGHRAKFWSHNVVGIGLATGFLEPLESTSIYLVQAGVGRLMTLLQGGGPVAPHLVDAYNMGLTRQFERIRDFILMHYCLTARRDTPFWQYMAAADLPETLAYKLHAWRETGILHQYDEEGFDGHSWLAIHAGMQNWPVRSDPTLKLIPEAQSLEWVRERASQLAAAVATVPTHQAFLDKVLGR

SEQ ID NO: 86115 - protein, 521 aa, Xanthomonas axonopodis
  misc_feature (1)..(521): tr|A0A3G2WDM5|A0A3G2WDM5_9XANT Tryptophan 7-halogenase OS=Xanthomonas axonopodis pv. commiphoreae OX=1101443 G N=Xcom_16225 PE=4 SV=1
MPDTTPSDPQQRPVRRVVIAGGGTAGWMAAAALSKLLGRHLQITLVESDEIGTVGVGEATIPSLVTFHRLLEIDEAAFMAATQATIKLGIAFEHWRDVDQHYIHSFGHAGTDHWSAGFQHFWLKGCQRGVARDFGDYCLELRAAQEGRFAHLPNGGMNYAYHLDAGLYARFLRRFSEGFGVTRIEGRIGQVETDAQSGFLTALTLQDGTRVEGDLFLDCTGFAGLLIGKTLGVGSDDWSRWLFADSALAVQTESVGPPVTYTRSRADQAGWMWRIPLQHRVGNGLVYSSRYMDQDGARAVLERNLTGRALTEPRRLRFTPNQRHRVWEKNCVALGLASGFLEPLESTNIHLIQRGIIRLLQTFPQIINAADIAEYNRQAAQEITHIRDFVILHYHATDRRDTPFWRDCAAMDIPDSLRHRVELFRQSGRVFHQANELFAENSWVQVMLGQGVVPQQHHPVADLMGDAELGRFLETIRARVEAALVRLPAHADFLQRYCPAPPLPEPAARVPAPPVMATPAG

SEQ ID NO: 86116 - protein, 507 aa, Asticcacaulis biprosthecum
  misc_feature (1)..(507): tr|F4QGH6|F4QGH6_9CAUL Tryptophan halogenase PrnA OS=As ticcacaulis biprosthecum C19 OX=715226 GN=ABI_20980 PE= 4 SV=1
MPNPIENIVIVGGGTAGWMAAAMLAKLIVAKAPKPPTVTLIESDDISTVGVGEATIPAIKKYMSLLGINEADFLKFTQGTFKLGIEFVDWERLGESYIHGFGKIGQDLGWMRPHQYWLKMRNSGKVSPRFDDYAINPTACRHNRFNKRNGDDRKTPLNDIGYAYHFDAGLMAQYLRRIAEPLGVKRVEGTIVDVRLKAENGHVKSVALKDGQVVGGDFFIDCSGFRSLLIGGALGVGYESWSQWLPCDRALAVPCASVTPTTPYTRSTARTAGWQWRIPLQHRIGNGHVYSSRFTSDDEAARVLMDNLDGKALADPRPIRFETGKRKKLWEKNVLAVGLSGGFIEPLESTSIHLIQTTVLRLLNLFPDKDFDPATAAEYNAQADFEIERIRDFVIAHYKLTSRDDSEMWRYCRDMAVPDTLARKLDGFAASGRVFKENEELFAEDSWIQVLMGQGLMPRGYDPIVDNYPEETIIAYLNNISGVVAKCVAAMPTHDQFVAAYCAAEMP

SEQ ID NO: 86117 - protein, 508 aa, Sphingomonas sp.
  misc_feature (1)..(508): tr|A0A4R2Y0P5|A0A4R2Y0P5_9SPHN Tryptophan halogenase OS =Sphingomonas sp. JUb134 OX=2485112 GN=EDF69_11235 PE=4 SV=1
MNPIRSIVIVGGGTAGWMAAAFLARQLDHLRVSITVVESSAIGTVGVGEATVPAIGDFFAAVGLSDAEVLRETEGTIKYGIRFDGWKAPGHRFFHPFGLYGTPARGVAFHHYWLKLRQAGDPTPLGAYSLATQLAEQGRFLAPAQKPANDLGVFDFAVHFDASKFATLLRHRAVAAGVVHLDGRIDRVERDGETGHVAAVLLEDGRRIGGDLWIDCSGFRSLLLGEALEVPYVDWRRWLPVDRAIAIPCRPRDAAQEPFTVATARRAGWQWRIPLRHRIGNGHVYCSDFLDDGSAETMLLEQLEGEPLGQPNRLRFTTGHRARFWERNVVGLGLASGFLEPLESTSISLIQTGLERLVRFLPDRACDPRLAAIYNYQSVLEFERLRDFLLLHYWANGRHGEPFWDRMRAMPPTEGLQLKLDTWRASGEFVRREWETFQDPSWLSLYAGFEDLPEHSSPLADRFSIAELTDTFARMRAAIAATVAQAEPHAAFLARTVGGDGGGRAAAR

SEQ ID NO: 86118 - protein, 500 aa, Verrucomicrobiaceae bacterium
  misc_feature (1)..(500): tr|A0A4Q3AT09|A0A4Q3AT09_9BACT Tryptophan 7-halogenase OS=Verrucomicrobiaceae bacterium OX=2026800 GN=EOP83_01 510 PE=4 SV=1
MIKEVLVLGGGSAGFIAALSIKRKIPQLKVLVVRSPAIGVIGVGESTTPNFPRHLFEYLGISRKRFYALAQPTWKLGIRFLWGARGSFDYTFNLQLDSHYTDMEKPIGFYCDDDFRDASLPGALMRRDMAFPRQQNGAPDVHPWHAFHIENKKFIEILEIVAKEEGVEVTDGKVTGSERGEEGIAAVHLEDGRRLTADLFIDASGFRSELLGKTLEEPFESFDKSLFCKKAVIGGWERGPDEPILPYTTAETMDAGWSWRIDHEHLINRGYVYCPDFISDDQAADEFQKKNPKAKVEPRIVNFRSGFYKRQWVGNVVGFGNAGGFVEPLESTAIMILCSHIQTLVDFLKHSDLQPTPTMRNLYNELTANTWNDIRQFLSLHYKFNGKLDTPFWKTAREETDVSGVQDFIDFYQENGPTGFCRYRLPRTENDFGLEGFLVMMVGNQVPYNKRHNASPQDVQIWKRRKEEFGREAARGIRSEEALAYVKHPGWEWHGDAAKS

SEQ ID NO: 86119 - protein, 501 aa, Asticcacaulis biprosthecum
  misc_feature (1)..(501): tr|F4QJF0|F4QJF0_9CAUL Tryptophan halogenase PrnA OS=As ticcacaulis biprosthecum C19 OX=715226 GN=ABI_15730 PE= 4 SV=1
MDRHIRNIVIAGGGSAGWMAAAALSNALQRNCTITLIESEEIGTVGVGEATIPPIVRFNKTLGIDEAEFVRATQGSFKLGIQFVNWGRLNHAYFHPFGSFGRDFDMAGVFHYWQAAFEAGQAGGLDDYCMAWSAAKRNRFAPPSADPRHVLSTYDYAYHFDAGLYAAMLRTYAQAKGVKRLEGRIVAVGQNAETGFVETLTLDDGRSVAGELFIDCSGFRGLLIEGALKTGYQDWTHWLPCDRALAVPCTSSADFTPYTRSTAHQAGWQWRIPLQHRTGNGHVYASQYISDEDAAAVLIANLDGAPLADPRPLRFTTGRRNHFWNKNVVAIGLSSGFMEPLESTSLYLIQSGIAKLLILFPDRDFDPVLVDEFNRLTRTEFERIRDFIVLHYKLTQRDDSPLWRYCAAMDIPDSLRETIALFRRYGKIAHRELDLFGDPSWLAVHIGQMNFPERNDPLLAYREADGAAWLTKFRSVIEGAAETLPDHGEFIARAGMKAAGR

SEQ ID NO: 86120 - protein, 507 aa, Massilia sp.
  misc_feature (1)..(507): tr|A0A1G6Q9Z5|A0A1G6Q9Z5_9BURK Tryptophan halogenase OS =Massilia sp. PDC64 OX=1881046 GN=SAMN05428966_102572 P E=4 SV=1
MQQNPIRKIVIVGGGTAGWMAAAPLALRMGRRCDIVLVESPDIGTIGVGEATLPTIRFYNAALQLDHADFIKKTQASFKLGIEFKDWGHVGNRFFHGFGDFGPALNGIQPHHYWLRLARTFDRMPAMENWSMASVMARENKFTMPNDTQPGVTDAYSFGYHFDAGLYAAYLRDYALARGAKRVEGTITSVDQHPETGFVTAVRLADGRTLDADLFIDCSGFRGLLIEGALQAGYEDWSEHLPCNSALAVPCARVEPLTPYTRSTAKGAGWLWRIPLQHRTGNGHVYSNAFTTDDKARQDLLDGLDGAALDEPRQLRFVTGKRKKSWVKNVVAIGLSAGFVEPLESTSISLIETAVGTLIEQFPDRDFRPELADEFNRIIGSRYESIRDFIVMHYKLTKRDDTEFWRYCANMRIPDSLAHQIELFRETGRVAILDRDSFLLPSFVSMLVGLGVEPKRYDPFVDDVDMRQLHGHFAGLRDLIAQTVAKMPSHSAYLEKNAKAPMVGKAA

SEQ ID NO: 86121 - protein, 534 aa, Sphingomonas sp.
  misc_feature (1)..(534): tr|A0A4R2XR15|A0A4R2XR15_9SPHN Tryptophan halogenase OS =Sphingomonas sp. JUb134 OX=2485112 GN=EDF69_12030 PE=4 SV=1
MNEHMIRNVVIVGGGTAGWMAAAAFSRFLNNGVTRITLIESEEIGTVGVGEATIPPLLNFNRMLGINENDFIRETGGTYKLGIEFDGWGDIGERYFHPFGAHGHDLGGIHFHQLYLRERKRRVMQDISAWSMSAVAAQAGKFARPAEGAQSAVKELLYAFHFDASLYARFLRRYAEAGGVQRIEGKIVEVALRPEDGHVAAVKLENGQAVEGDLFIDCSGFRGLLIEEALETGYEDWSQWLPCNRAVAVPSSYSGDPDPFTRATARGAGWQWRIPLQQRMGNGLVYCSDFMTAEAAERELLANLEGEPLAEPRHLSFVTGRRKLGWNRNVVALGLSSGFVEPLESTSIHLVQAGITRLISLFPDRRFNPVERDEYNRQMRDLYKDVRDFVILHYKATRRRDTPFWERCRTMDVPESLQRKIDLFRAKGRVFRDGAELFATTSWVAVCLGQHIVPEEHEPAADALDEDKVAAALEEMRQGYLRVAAQLPTHAEFLRHTGASLANTPAPPQPAEVPGEPNFSFASETPFNFSANPL

SEQ ID NO: 86122 - protein, 498 aa, Verrucomicrobiaceae bacterium
  misc_feature (1)..(498): tr|A0A4Q3C392|A0A4Q3C392_9BACT Uncharacterized protein OS=Verrucomicrobiaceae bacterium OX=2026800 GN=EOP84_03 220 PE=4 SV=1
MIKNVLVVGSGSAGLIAALSFKRKIPQLHVSIVRSPEIGVIGVGEGTTPNFPTYLFDELGISRKRFYQLAGPTWKLGVRFLWGPRGRFDYSFSPQLDSQWTDLPKPHGFYCDDEFANNNLAAALMRQDKVFGRQQNGCPDIQPWHAFHIENVKFVEVLEQIAREIGVDIIDGKVVDADLGPAGITAVHLEDGRRMEADFFVDASGFRSELLGRKLQEPYTDFGKTLFCDRAVVGGWERTDEPILPYTTAEAMDAGWSWRIDHEHHVNRGYVYSSQAISDDQAAEEFLRKNPKVPQSPRVVKFRSGCYKRLWVDNVAAIGNAGGFVEPLEATALMIVCSHCKTLVDFLNHSSLEPTDSIRNLYNDLVANTWADIRDFLGLHYRSNSAMDTPFWKHCQEDTDLSGIAELLDFYEENGPTGFCRYRMPTSQSDFGIEGYFTILVGNQVPYRKRHQAAEKERAVWNSHCKTFASEAKTGLTVKEALDYVRHPGWRWHGERNN

SEQ ID NO: 86123 - protein, 502 aa, Brevundimonas sp.
  misc_feature (1)..(502): tr|A0A0Q5UYY0|A0A0Q5UYY0_9CAUL Tryptophan halogenase OS =Brevundimonas sp. Leaf363 OX=1736353 GN=ASG17_12280 PE =4 SV=1
MAQPLEVVIVGGGTAGWMTAAALTSVVRPEFRSVRLIESDQIGTVGVGEATLPQMKDFNDWIGVIESEMMRETNATFKLAIEFRDWGFKGSSYLHPFGAHGQPISGVAFHQHWLRAAQAGPTPDIEDYSYAIVAARRNRFEFPVEDKAAINSTYAYAYHFDAGLYAAYLRRFAEARGLERTEGKIVSVQRKPENGHIASVTLESGEVVTGDLFIDCSGFKGLLIGETMESPFEDWTKWLPCDRAMAVPCARSNDFTPYTRSTAREAGWQWRIPLQQRTGNGYVYSSAFISDDEAARTLMDNLDGEALAEPRPIRFKAGRRTASWTGNCVAIGLASGFLEPLESTSIYLVQIAINNLVQLWPRKAMDPVLIKEFNRLVDNEYDRVRDFLILHYHANTREDAELWRYTREMSVPDSLQDKIDRFRHRGDIPFYRSGLFAPPSWVSVMFGQGLKPEGHDRLTERLKLEDVQQRLETLRRKISDRVDAMPTHEQFVRDYCGVKEAA

SEQ ID NO: 86124 - protein, 504 aa, Thalassomonas viridans
  misc_feature (1)..(504): tr|A0A0D8DI57|A0A0D8DI57_9GAMM Tryptophan halogenase OS =Thalassomonas viridans OX=137584 GN=SG34_02600 PE=4 SV =1
MSDNQAKSIVIVGGGTAGWMAANLMAKSWQHLDFDIRLIESPDIGIIGVGEGSTPQLKGFMDFLGIEESDWMPKCNATYKNGIEFVDWSTKPGFSSYFHPFPAQTDDYSAPGFFHNSFVRRKGIDVEGHPDHFFLATYLAKHKLAPTPEFHFPFETNYGYHFDSALLGKFLSEKAAAFGVSHSRGTVAEVKLHLNGDIQSVITDAGETIAGDIFIDCTGFSSLLLQKHLNVLFKSFGNNLFNDAAVVLPTEQREQIGSQTVSTALKHGWAWEIPLTNRNGNGYVYSSAYASADDAETELRAKLGLLDADVQARHLKMKVGRVEQHWHKNCVAVGLSQGFIEPLEATALHLVQETIQGFIDNYQKGNFSHQYQGEFNASVNARFEAVRDYIVGHYRINSRTDSQYWLDNANNNQLSPSLVAILQCWMRGDNLSDELDRQKIDHYYPSISWHCLLAGYGLYPDQAQLVPGNAQANKYNMEQIADFISRCGLNFKPHRERLTALSPA

SEQ ID NO: 86125 - protein, 587 aa, Microcystis aeruginosa
  misc_feature (1)..(587): tr|L7EBH9|L7EBH9_MICAE Tryptophan halogenase family pro tein OS=Microcystis aeruginosa TAIHU98 OX=1134457 GN=O5 3_984 PE=4 SV=1
MNTTQALHYDVVIMGAGFAGLCQARHLMLNIPNIRVALIDPRPENRPDTDLKIGESTVEIAALLICKELGLHDYMIENHPPKAGLNFHWPKNPAETDSIDDYYHVWINRQPPIPTFQINRAKFERDLLKMNKEMGAIFYNGRVVDVDLTEGDQLKTVTVKLEDTTIEITAKHIVDAAGRRFIIGKKTDNLIFGSDQLLGVNNGSAWVRIKDVDRTIFHSGYHPAGTTVSHYYATNHYFGPGHWLWMIPIDRDSKELSLGVIHHHDVIPAATINTQEKFTAFLKANHTVLYKLLQNSELVDFHYLPRVAHKSKVMFSHDNWYVVGDSACIFDAFYSLGTTMIAIAVESITEIIRAKLANEANAEEKRAVYNDFNLAFSDSVNTFMQEHQKQLGHASIMSWRIYFEYMWWFGVLVPMYIGKWHLDPAFLKQFTGPFRTFLNGLFVDVYQDCNKLVERGVNMGLMDAIRADQLIGSYYTFKHFEDFLENSKLEPQRCNIFTSMKNTFFYVAIWYAMFQWKGFGWRGLLKPRNLAHFSYLLAQSGLSALGEMRHNFLTRSLPDNSEIEEMRQEFKEYRYQGKLQPWSAELS

SEQ ID NO: 86126 - protein, 513 aa, Pseudoalteromonas sp.
  misc_feature (1)..(513): tr|A0A1Y5JMZ1|A0A1Y5JMZ1_9GAMM Tryptophan halogenase OS =Pseudoalteromonas sp. A601 OX=1967839 GN=B5G52_21295 P E=4 SV=1
MNKTIQHIVVLGGGSAGWLSAGLLAAEHPDKKITLIESANIAISGVGEGTWPSMRNTLKRIGIKEVDFLRHCDASFKQGSKFINWRNLTAGENYYHPFMTPSGYLDTDLHAYWQQHAASQKYADAVNMQSFVCQAALAPKQLNTPEYAAVTNYGYHLDAGKFATFLNQHCVNNLGVEHIIDDVTSVHNDLDGYIEYLQTSHHGNLCADLFIDCSGSHARLIGEHYNTPLMTQDHILFNNSAIAAHLPYTKQQQDIASATLSTAQQFGWIWDIGLPSRRGIGYTYSSQYCDEQTAIDTLKQYAAKSIGHDAAAQLQTRTLHFTPGYRAQFWVKNCLAIGMSQGFIEPLEASALAMVELSLNMLSEQMPQSREHMALLATRFNSRFNYRWQRVIDFLKLHYVLSERNDSPYWQDIKAPSSAPTRLKELLNLWQYQTPSRFDLIENEEVFPSASYQYVLYGMGFKTQIANSNNAFNNPEVGQYFYQHNRKKIAKYLHGLPSNRALLNQLLSNKADT

SEQ ID NO: 86127 - protein, 497 aa, Rickettsiales bacterium
  misc_feature (1)..(497): tr|A0A2E3I8E5|A0A2E3I8E5_9RICK Tryptophan halogenase OS =Rickettsiales bacterium OX=2026788 GN=CMP20_08500 PE=4 SV=1
MDKQPIKRVVIAGGGTAGWMAAAAFSKLLGKNLTVSLIESDDIPTVGVGEATIPTLHIFHRLLGINEQEFMAATNATFKLGIKFENWKAQGEDYIHSFGFLGQGCWAAGFQHFWLKGKQKGLVTQIGDYVPEHLACREGRFAVLANQEQNHAYHLDAGLYAQFLRKMAEQHGCKRIEGNIQAANLNEESGDISSLSLASGEIVEGDLFIDCTGFRALLIEQALHTGFEDWSHWLPCDSAVAVQTTAQPNPVPYTRSIARDAGWQWRIPLQNRTGNGLVFCSKYMSDEQAKAALLANVEGETLNEPRVIKYKTGTRRKHWNKNCVAVGLSSGFIEPLESTGIHLFQRAIVRLMLMFPSNGIEQADVDEFNTQSRADVEDIKDFIILHYHQTERTDTPFWRYCKSMPIPDTLTHRMELFAGTGKVFKKAEELFGETSWIQVMLGQGIMPKQYHPIVDMMSDDELQRFLENIKNNVKRKVSNWPDVNDFIRHYCQTKIAN

SEQ ID NO: 86128 - protein, 537 aa, Rickettsiales bacterium
  misc_feature (1)..(537): tr|A0A2E3IBF9|A0A2E3IBF9_9RICK Tryptophan halogenase OS =Rickettsiales bacterium OX=2026788 GN=CMP20_13640 PE=4 SV=1
MTFNEQLNREKYVQLNSQVKDIVIVGGGTAGWLTAGLLASRLSSRVQSGELNITLCESPDVPTIGVGEGSWPTLRSTLQTIGVTETDFIRQCNVSFKQGSRFINWQHEIPSQYDHPFDVPQQASQGAEAQRWLSTQSQVPFSQAYCLQTELANNNLAPKLITTPEFTGFANYGYHLNAALFAEFLREHCIQHLQVKHVLSNVKQVEQDENGDITCLHLAVPSQNNSNHPDHINGDLFVDCTGFRALLLGDTLGVCNTQVDDVLFANNAIATQLPYVEHNSPIASFTESTAQDNGWIWDIGLPNRRGIGYVYSDRYCDEQDAHHTLVKFLQKTQQNTDTLSYKQIHFTPGYKQQFWKKNCVAIGLSAGFIEPLEASALVLVEMSANMLAEQLPNTRSCMEVIAKRFNQTFTYRWQRIIDFLKLHYVLSQRSSAFWQDNRAQSSVPDSLKELLALWQHKVPDINDFPARDEVFQAASYQFVLYGTGFKSQLLSTPDKNLLEAAEQQFLSIQGYTSQLTNKTLSNRDLLSKIYRYGLQKR

SEQ ID NO: 86129 - protein, 504 aa, Novosphingobium aromaticivorans
  misc_feature (1)..(504): tr|Q2G744|Q2G744_NOVAD Tryptophan halogenase OS=Novosph ingobium aromaticivorans (strain ATCC 700278 / DSM 1244 4 / CIP 105152 / NBRC 16084 / F199) OX=279238 GN=Saro_1 889 PE=4 SV=1
MPPSNKRRIVIAGGGTAGWMTAAALARFAMPHWQVTLVESEEIGTIGVGEATIPMVRLFNRSLGIDERQFLRETHGTWKLGIAFEGWGGFDERYIHGFGLTGRSLGVLPFHHYWLRGRAMGAAGPLGDYVLNAVACEEGRFAHIDRPEGSALPPMPYAYHFDASLYAAFLRRYAEERGVLRIEGRIQSAARDCSTGDIASLKLADGHEVEGDLFIDCSGFRSLLLGQEMGVEYVDWSHWLRCDRAVAVPCERAGPLVHYTRSIAQPAGWCWRIPLQHRTGNGHVFCSDAMGEDEATARLLGRLDGRQLAEPRTIRFKAGRRETFWKNNVVAVGLSSGFIEPLESTSIHLIQTAISRIIDFLPNGPVQAADRDAYNRLSVFEIERIRDFVILHYVANGRHGEPFWDSLRAMEIPETLAKRIAMFRASGRIVREHEELFDVPGWVQVMVGQGIMPERWHPLADQLDRTNLSAFLETVSEAYRKDVARMPLHADYLEHVCGKVAAHA

SEQ ID NO: 86130 - protein, 506 aa, Massilia sp.
  misc_feature (1)..(506): tr|A0A1G6S6W6|A0A1G6S6W6_9BURK Tryptophan halogenase OS =Massilia sp. PDC64 OX=1881046 GN=SAMN05428966_103273 P E=4 SV=1
MVKDRWIAKVVILGGGTAGWMTAAALSHTFGRAVEVVLVESDAIGTVGVGEATIPPIRTFHQMIGIDEAEFIRATGATFKLGIEFRGWLNESSTYFHPFGAYGVERDIGYFFQYWLRLKEKGQVSDFSEFSLCTLAARNNVFAPASERPGDPLQHLQSAYHFDAGRYVTYLKGVCLARGVSHKIGDMLAAERDSENGHVTGLKLKSGELVSGDLFIDCSGMRAMLLGQALGVDYEDWSRWLPMNRACAVPCEQKLALTPYTISTARPFGWQWRIPLQHRVGNGVVYSNEFTTDEAAERSLLDGLEGEPLALINRIRFTAGRRKTPWCKNVVAIGLASGFLEPLESTSIHFIQSSIQRLIRYFPDAGFAPVCAQAFNKEATREIENVRDFLILHYHATERDDSELWRYVKAMQIPDSLQERIELFRERGQLNLAAEELFQSTSWHAVLLGQGIRPRTYMPTMALQDDAMLANAYGNLERNFKKIVSRLPDHAAYIKEHRLTSTMENR

SEQ ID NO: 86131 - protein, 472 aa, Verrucomicrobiaceae bacterium
  misc_feature (1)..(472): tr|A0A4Q2Z9I7|A0A4Q2Z9I7_9BACT Uncharacterized protein (Fragment) OS=Verrucomicrobiaceae bacterium OX=2026800 GN=EOP83_27240 PE=4 SV=1
MIQNLLVLGAGSAGLISAISLKKKIPQLNVRVVRSKSIGVIGVGEATTPNFPRHLFEYLGIPRKRFYEIARPTWKLGIKFLWGERGSFDYTFNLQLDTKWSDLRHPTGFYCDEDFNNVSLPGALMNQNKAFPRQENGAPDIHEWHAFHIENKLFVSVLEQVAREYGIEFTDGDLESVEKGPGGIAAIHLKDGQRLEADFFIDASGFRSELMGKALEEPFISFNKSLFCDRAVVGGWDRAPGEAILPYTVAETMDAGWCWRIDHEKVIHRGYVYCSQAISDDAAAEEFLRKNPKNTEELRIVKFRSGCYQRQWVDNVVVLGNSGGFVEPLESTGLMMLCSHTQTLVDFLLHTNLNPTDSMRDLYNDLTVNGWKDVRDFLAIHYKFNGKLDTPFWKQTRAECDVSGVAELIKFYQENGPTGFCRYRLPNTQTDFGLEGFLIMFVGNKVPYKNRYTPTPQEAQIWQQRKAGFVQE

SEQ ID NO: 86132 - protein, 504 aa, Rickettsiales bacterium
  misc_feature (1)..(504): tr|A0A2E3M878|A0A2E3M878_9RICK Tryptophan 7-halogenase OS=Rickettsiales bacterium OX=2026788 GN=CMP19_13090 PE =4 SV=1
MMSSDSDNSNTSGAKTSPVKRVVIAGGGTAGWMAATALSKLLGKSLSITLVESKDIGIVGVGEATIPPIRTFHKLLGIDEKAFMRATNATFKLGIEFENWREQNHSYIHSFGVTGRECWAGEFHHFWLRAKDLGFGGDFGDYCTELKAAKEGKFAYGERMPMNFAYHFDAVAYGRFLKELAVEAGVTHIEGDIQHVSKCSHTGCISSIKLSDGQEIAGDLFIDCTGFKGLLIEKTLHTGYENWSHWLPCDSALAVQTASTGAPIPYTKSVAHTAGWRWKIPLQNRVGNGLVYCSNYMSDDEAKDTLLSAIEGETLNEPRIIRFTPGKRRLGWNKNCVALGLASGFIEPLESTSIHLIMTGIVRLMRLFPFDGITQSTVDEYNNKYNSEMAAILDFIVMHYKVTNRKDSPFWEHCNSMDIPPSLTHKINLFKQTGRVFLDDGDIFRVDSWTQVMMGQGVVPEQYHRVADEMSETELERFLAGLKQQVDKQVSALPYHQDFLKKYL

SEQ ID NO: 86133 - protein, 506 aa, Xanthomonas axonopodis
  misc_feature (1)..(506): tr|A0A3G2W7M3|A0A3G2W7M3_9XANT Tryptophan 7-halogenase OS=Xanthomonas axonopodis pv. commiphoreae OX=1101443 G N=Xcom_01375 PE=4 SV=1
MIPAPLRNIVIVGGGTAGWMAAAAFARVLGPTFKVQLIESDQLGTVGVGEATVPHIKAFNNLLGIDEAEFVRQTQGSFKLGIEFVDWQRPGTAYMHGFGTQIGHPLGLLPFHQYWIKQHARGRAQPLGAYTLNTVAAARGKFMTSAGDVPANSPLANIAYAYHFDATQYAHFLRRYSQQRGVTRIEGLVEQVQLHPESGHVQSLQLASGQTVHGDLFIDCSGFRGLLIEEALHTGYHDFTHWLPCDRALAVPCEKVGPPTPYTRSTARAAGWQWRIPLQHRTGNGYVYCSAHISDDEAAATLLANLDGKPLADPRPLRFTTGRRKQCWNRNVVALGLASGFLEPLESTSIHLIQSGISKLLELFPREGISPVLVQRYNDRLAFEFDRIRDFLLLHYHATERDDSAFWRHCRHMPITPELQTTLDLFRDSGRFYRNAEEMFAEISWVQVLVGQGILPQGYHPLVDQVPDRDAEGFLASVAQTISHCVDVMPSHQQFIDRYCKAAALP

SEQ ID NO: 86134 - protein, 485 aa, Xanthomonadales bacterium
  misc_feature (1)..(485): tr|A0A2H0HQV8|A0A2H0HQV8_9GAMM Tryptophan halogenase (F ragment) OS=Xanthomonadales bacterium CG17_big_fil_post _rev_8_21_14_2_50_64_11 OX=1974109 GN=COW59_09895 PE=4 SV=1
MSNSRIRSVVIVGGGTAGWMAAAILAKAMGQQLSIRLIESEEIGIVGVGEATIPQIRLVNTFLGVDENAVLRASQGTFKLGIEFNDWRRVGDSYLHAFGETGMPLGPLPFHQYWLRSQQAGGNSRLWDYSLNTAAAEGRRFGRMDKVGDTPVGGIRYAYHFDAGLYGQFLRRYAEQRGVRRSEGKVLDVQLRAADGFIESVQMASGERIEGDLFLDCSGFRALLIEGALKAGFDDWSGWLPCNRAVTVPSVRAEPMRPFTQSNARPAGWQWRIPLQHRTGNGHVYCSEFMSEDEASALLLANLEGEALGEPRALRFTSGIRNKVWHRNCVALGLASGFVEPLESTAIHLVQSCINRLLTLFPDRHCSVALSDEFNRQTRYEYESVRDFLVLHYKATERDDTPFWRHCARLQLPERAARKVALFRASGQIVRENEELFTEGSWLQVMLGQGIVPARYHPSADAISAEQLDGFLHGIRGTVAQAAAT

SEQ ID NO: 86135 - protein, 510 aa, Asticcacaulis biprosthecum
  misc_feature (1)..(510): tr|F4QN16|F4QN16_9CAUL Tryptophan halogenase PrnA OS=As ticcacaulis biprosthecum C19 OX=715226 GN=ABI_30240 PE= 4 SV=1
MTQPVPLKVVIIGGGTSGYMTAAGLVALVGSAVASVRLIESDDIGTVGVGEATLPQIKEFNDALGINEAEFMRETKASFKLAIEFRDWGRIGNSYLHPFGAFGQPVRGVEFQHLWARARKMGMTTPLEAYSYAIVTARQLRFDFPSDNRQSLKSTFSYAYHFDAGLYAAYLRRFGEARGLVRTEGKVTSAAQAPDSGRITSVTLESGEVVEGDLFIDCSGFIGLLIGREMKAEWESWTPWLPCDRALAVPCERAGDFTPYTRSTALEAGWQWRIPLQHRTGNGYVYASSFISDDEAAARLLGNLDGAALADPRPLRFSAGRRKKSWTRNCIGIGLASGFLEPLESTSIYLVQIAVMNLIALFPTRAWNPGLATEFNRLMDIEYERVRDFLILHYHANSRDEPLWTHMREMTVPDSLTARIEQFRHRGHLVRYRDGLFNPASWLAVLTGQDIVPEGYDRLADSLDEDTIRTKLEEISERIAVNVDIMPTHADFIRDYCYIPPVRESEGVPA

SEQ ID NO: 86136 - protein, 520 aa, Asticcacaulis sp.
  misc_feature (1)..(520): tr|V4RBR5|V4RBR5_9CAUL Tryptophan halogenase OS=Asticca caulis sp. AC460 OX=1282360 GN=ABAC460_13895 PE=4 SV=1
MTSPRRVLIAGGGTAGWLTAAYLARVLGHGKPTCPQITLIESPEIGTIGVGEGSFATIRTTLQTLGLDEETFLREATATFKQGIRFADWEKKDSWYFHPFDPPYPVEGAGLLPYWLLQDEATRLPFAQAVALQKKVAETQRAPKRLYENRFGGALNYAYHFDAGKFAKLLSRHAISMGVTHLQGRINDVKLAQDGSIAGVVTDSHGELNADLYVDCTGFAAVLIGKALGSPYKSVRKQLLTDRAIACQVPYARPDAPIESYTVSTGHEAGWTWDIGLDVRRGVGYVYSSDHTSDERAEEVLRNYVGPTATDFSTRVIRFDTGYREQQWIKNCVAIGLSGGFFEPLEATGIMLIEVAIGMLTEYFPHAGPIDANATIFNRLMTLRNEKLVNFLKLHYCISKRPESFWRENCDPATIPDELNELLAMWQHRMPSRFDVLDDIDTFAYFNYQYILYGMNFATDLSAQRDSHPKIAEAKAIFDKVALIGDQAARDLPTHRALIDQVYNHGYAEPPAQRFMSVKR

SEQ ID NO: 86137 - protein, 502 aa, Brevundimonas sp.
  misc_feature (1)..(502): tr|A0A0Q5UZS2|A0A0Q5UZS2_9CAUL Tryptophan halogenase OS =Brevundimonas sp. Leaf363 OX=1736353 GN=ASG17_13060 PE =4 SV=1
MRPLKRILIVGGGSAGWMAAALLSKLFRGLYEITLIESDAIGIIGVGEATIPAIKKYNELLDLDENEFMQRTQGTFKLGIQFNDWDRLGDSYIHGFGVIGRDLGWLRAHHYWLQANQRGAAPDFADMSINTAAALENRFMRAEPKMAESPLGHIGHAFHFDAALYVRYLRGRAEAAGVTRLEGKVEGVALDPEDGFVRSVTLESGQVVEADLFIDCSGFRGLITEQALKTGYEDWSRWLPCDRAIALPCPRVEPMTPYTRATARPAGWQWRIPLQHRTGNGHVYSSQYMDDAEAERILVENLDGPPLAEPNRIRFVTGKRKKVWNRNCVALGLASGFLEPLESTSIHLVQSILIRLIRLLPDAGFDEATTAEFNRQTDFEYERIRDFIILHYKATRRDDTAFWRYCRDMEVPETLQRKMDLWMANGRIFREDEELFAEESWIQVFLGQGMVPRGYDPMVGLRPDAEVDAFLGNITGVIRKCVDRMPDHAAYVQKVCPAGPPN

SEQ ID NO: 86138 - protein, 501 aa, Novosphingobium aromaticivorans
  misc_feature (1)..(501): tr|Q2G751|Q2G751_NOVAD Tryptophan halogenase OS=Novosph ingobium aromaticivorans (strain ATCC 700278 / DSM 1244 4 / CIP 105152 / NBRC 16084 / F199) OX=279238 GN=Saro_1 882 PE=4 SV=1
MATSDRTIRSVAIVGGGTAGWMTAAALAQALRHNCRITLVESDDIGTVGVGEATIPPIRTFNETLQIDEREFVRKTQGTFKLGIEFVDWARVGNRYFHPFGPHGRAFDMVNLHHYWLRARAEGETAPLDEHSMAWALARENRFAPPMPDQRNVLSTFDFAYHFDAGLYARFLREYAEARGVVRIEGKIGSVQQNGETGFVTGVTLEDGRAVEAELFVDCSGFRGLLIEGALQAGYEDWTHWLPCDRAMAVPCENAYPLTPYTRSTAREAGWQWRIPLQHRTGNGYVFCSQFLSEDEAAEKLLSRLDGKALADPRPLRFVTGRRKKFWDRNVIAIGLSSGFMEPLESTSIHLIQAGISKLLALFPDRGFDPIVIDEYNRIAVSEFERIRDFIILHYKLTERDDAELWRYCAAMDIPDTLKTKIEHFRSFGRLVQRDADLFGPPSWLAVHIGQLNFPERTDPLADYRGIDGREWLAKLRAAMHHAAMQQPTHEQFIAANCAAA

SEQ ID NO: 86139 - protein, 494 aa, Sphingomonas sp.
  misc_feature (1)..(494): tr|A0A4R2XLQ9|A0A4R2XLQ9_9SPHN Tryptophan halogenase OS =Sphingomonas sp. JUb134 OX=2485112 GN=EDF69_1301 PE=4 SV=1
MDAQGDAAAAIEHVVIVGGGTAGWMAAAAAARFLNDGRRRITLVESNAIGTVGVGEATIPPILTFNRRLGIDEAEFLRETGGTFKLGIEFVGWRDGKDRYFHPFGTHGRPIEGLAFHQIWLKFRDAAGVGRLDDYSLPTLAAAAERFAHPVADERSPLSGLAYAYHFDAGRYAALLRRHAEAGGVHRIEGRITRVERDPSGSAVAAVVLSDSRRVAGDLFIDCSGFRSLLLGDAMETPFESWAHWLPCDRAIAVPGGALRPRPLATRATAHDAGWRWRIPLQHRTGNGIVYASAFLSDDAAERQLIDALDTSAMGEPRPLRFTAGRRVQQWTGNVVALGLAGGFLEPLESTSIHLIQEGISKLFALFPDRGDCSVERVTFNRFMAASYEAVRDFIILHYHANARTGEFWRHLREMPVPDTLAEKIALFRRKGRVFRYDDELFAVPSWVSVMLGQGIVPVGYDPLVDALDERRTTDALVMMRQVNEAAVAQMRVA

SEQ ID NO: 86140 - protein, 521 aa, Thalassomonas viridans
  misc_feature (1)..(521): tr|A0A0D8D2B0|A0A0D8D2B0_9GAMM Tryptophan halogenase OS =Thalassomonas viridans OX=137584 GN=SG34_26620 PE=4 SV =1
MEKYGSDDIHHIVIVGGGTAGWLMAARLAAKYQTPAHSPAQTPVSITLVESPSVKPVGVGEGTWPGMRSTLKAIGIRESDFMRECDASFKQGSQFIGWLNGENTDSYYHPFTLPQGYEDVDMMRFFQQSQTPGPFAGAVCSQSAVCQQELAPKQITTPEYAGVVNYGYHLNAGKFAYLLKRHCLANFTVRHVLDEVVKVNGAENGDIASVSTENHGDISGDLFIDCTGFACLLLGDFYQVPFIGQNHILFADTALAVQVPYPAADSPVASVTRSTATRAGWIWDIGLTNRRGIGHVYSSRYCSESQAEQALASYLGEEFGGAEIRKIPIKSGYRSHAWEKNCLAVGLSAGFLEPLEASAIVQIELAADWLCMQLPAKRSGMDIIAKRYNREFNYRWQRIIDFLKLHYLLSRRCDSDFWLDNRRPDSVPDSLQELMSLWSYHYPTKNEFSRSHEIFSLYSYQYILAGMGFKCESAYALTVAENGIGRQHVQNSRELTEKYLRHLPGHRELLEQVARFGFKSV

SEQ ID NO: 86141 - protein, 513 aa, Devosia sp.
  misc_feature (1)..(513): tr|A0A1E4AH73|A0A1E4AH73_9RHIZ Uncharacterized protein OS=Devosia sp. SCN 66-27 OX=1660097 GN=ABS47_13085 PE=4 SV=1
MAGQPHFVIVGGGTAGWIAAFIIQDSIKRLKLDARLSVVESSKIPTVGVGEATTAAFHVFLTHFGIDIFEFFRKTEATYKLGIRHEDWRRKGYTYYGPIDDPHAVARPPAGAPSDYLNVYAVSVNEPVQDMHLFGPLLKQKKAPWAQKADGSLIPLGPFLPAYHFDQSLVGKFLKEKSSGVEIVDNVLTGVERHGETGDVTALVFEDGQKLEGDFFIDATGFRKRLIVGEMQAPWISYQHELPVNRALPFWLPVEPGEEIANYTRAWAQEAGWMWQIPTQYRYGCGYVYSDEFRTPDEAHAEVERVLGRKIEVRGDIQFKIGRLEKAWINNVVAVGLSSSFLEPLESTSIHGTIVQMMMFAGQYLRDPAKMGQPLRDDYNRRVGRQVDDFRTFVNTHYMTERDDTPFWREVRANRIHPETRQRLERWKVEMPRREHFADYLFGLPHVETQLHYPVLDGLGLLDPAVAKAEMARDPKLRKFARETHAGLVKEYRQAAAKALGHAAFLEVVRGMG

SEQ ID NO: 86142 - protein, 505 aa, Xanthomonas axonopodis
  misc_feature (1)..(505): tr|A0A3G2W547|A0A3G2W547_9XANT Tryptophan 7-halogenase OS=Xanthomonas axonopodis pv. commiphoreae OX=1101443 G N=Xcom_07695 PE=4 SV=1
MTQAQIRKVVIAGGGTAGWIAACALSHQFRNLLDITLVESEQIGTVGVGESTVPPIRTFHRFLQIDEQEFLRAVAGTFKLSISFEHWRRQGERYIHPFGITGQSTLVCAFHHLWLESQRRGMAGSFGDYCLETVASRVDRFALHGEPAVNYAYHLDAALYAKFLRARSEACGVKRVEGRIQQVTVQPHSGDVASLVLEDGHVIEGDLFIDCSGFRGLLIEQTLHTGYEDWSHWLPCDRAVAVQTEALGPPVPYTRAIAHEAGWRWHIPLQHRVGNGLVFSSKHLSDDEAHAKLLRDVAAPAVKEPWMVPFRTGRRLKAWNKNVVSLGLASGFIEPLESTSIHLTISAVVRLLALFPAEGIAPSQVQLFNDVSRAEMEHVRDFVTLHYHATQRDEPLWQQCRQMELPESLALRLRAWRERAHAWQGADELFRVDSWTHVLMGQGIAPEQHHPLTRAFSDHDLRRLLDGIAQPIQHAVQQMPSQQDFIERYCKAGEQVWGMRSPVPA

SEQ ID NO: 86143 - protein, 513 aa, Asticcacaulis biprosthecum
  misc_feature (1)..(513): tr|F4QTE5|F4QTE5_9CAUL Tryptophan halogenase family pro tein OS=Asticcacaulis biprosthecum C19 OX=715226 GN=ABI _44420 PE=4 SV=1
MQDLRIRKVVIVGGGTAGWMAAAGMSKLLPANQVAFRVVESEAIGTVGVGEATIPHILYFNRLLGIDENEFVRKTNATFKTGIEFVNWGRLGQSYIHPFGPYGAPMDGIHFHHFWLRYAAMGKAPPLERYSLMIQAARAAKFQRPDPSKVNTALSLIAYAFHFDASLYARLMREHAEARGVTRTEGRITNVVQDPHSGHVQNVVLETGEVIEGDLFIDCSGFRGLLIEQTLKAGYDDWSHYLPCDRAVARACEKVADPIPYTRATAKASGWQWRIPLQSRTGNGHVYSSAHISDDAALDSLNADLDGAPLTEPNFLRFTAGIRKSPWTKNVVSLGLASGFLEPLESTSIHLIQTAIARLMTNFPDKTFNQPDIDYYNRRTRLEYEQVRDFIILHYNATARDDSPFWNYCRTMEIPQTLADRLAIYRENARQYRHDNELFNEVSWLAVMQGQNIEPKRYHPIADMISEEELVRRMTHFEDDVTRSLATMPGHQAFIDQHCRSAGGCIKSASQNV

SEQ ID NO: 86144 - protein, 530 aa, Asticcacaulis biprosthecum
  misc_feature (1)..(530): tr|F4QN13|F4QN13_9CAUL Tryptophan halogenase PrnA OS=As ticcacaulis biprosthecum C19 OX=715226 GN=ABI_30210 PE= 4 SV=1
MDTAVSKGRSVLIVGGGSAGWLTAAYMAKVMGNRPDGVSITLMESPEIGIIGVGEGTFPTIRDTLRVIGIEEAQFMRECDATFKQGIRFDDWEFTPEDGHHSHYLHPFEPPHVGRENINLVPYWLLHNPAQRPPLAEAVTFQKRVTDARLGPKRLHHDNYTGPLNYAYHFDASKFAAILARRAKELGVQHLSGMLSDVVLNDEGAIDHIVSSEHGPLKADIYVDCTGFRSELLGKALKVPFHPIDDMLLTDRAVACQVPYATADGPLESYTISTAQEAGWTWDIGLPSRRGVGYVYSSRHSSDERAEEVLHAYVRRALPDARDIPTRRIRFEAGYRTAHWVKNCVAIGLSAGFLEPLESTGMVLIESAINKLVEFFPHTGAIDASAAMFNDQMIRRYDTIIDFIKLHYCLTRRTEPFWRDNTLPASLSPRLRNLLDLWKHRPPSRYDFILDYESFAFFSYQYILYGMNFETDLSPAAGAFPRTDEANQVFARLRSYGDQACRDLIPHRSLIRAVYDGGFIRTGPVPAMQR

SEQ ID NO: 86145 - protein, 508 aa, Asticcacaulis biprosthecum
  misc_feature (1)..(508): tr|F4QP46|F4QP46_9CAUL Tryptophan halogenase OS=Asticca caulis biprosthecum C19 OX=715226 GN=ABI_25180 PE=4 SV= 1
MDDPRLQSIIVAGGGTAGWMAAASLVRKFGSNRHTRITVVESSQIGTIGVGEATVPAIRPWLESLKINEIDFIKRCNATFKLAIGFDGWAGEGSHFFHPFAEHGLPMSGVPFQHLWTRMHQAGKASSIDAYCLGSQLASNNRFALPRKDERGELLFNYAYHFDAALVAAYLKSWSMTHGVRHIDARIDTVEQNSETGDVTGLVLEGGRVLTGDFFIDCTGFQGLLIEKTLKTGYDTWSQWLPCDRAVAIPCESRQEPAPYTRSMACEAGWQWRIPLQHRVGNGYVYCSDYLSDDRAMTDLMRNLEGPAIAEPRLIPFVTGMRRNIWTRNVFALGLASGFLEPLESTSIYLVQTSIQSLINNFPTRRDNPHLRDEVNRRNREHQEHLRDFIILHYALNKRVGQPFWDRCRAMSLPDSLAAQIELFRHTGRIQAGANDFFRYSSWLAMFAGFGVVPEYYHPSADDIALADLEREFEGMKGGIDTAVEGALSHQDFIARNCAAARMAEAVQ

SEQ ID NO: 86146 - protein, 489 aa, Acinetobacter sp.
  misc_feature (1)..(489): tr|U7GX95|U7GX95_9GAMM Uncharacterized protein OS=Acine tobacter sp. COS3 OX=1397525 GN=Q674_12185 PE=4 SV=1
MNRVVVVGGGTAGWFAALQLRQLFSPSVEVMVISAPEIPIVGVGEGGVLNLLSVLHDLNIDLKDFIEQTGSTLKLGFRYERWRTGKQEDYYYHLFPLPTPDFAWNEFGFNPYLSGLFNHGIDISRYMASYQFSEDRKPFHEVLQILLDGKNNFGASLHFDTFRVGQYLKEIALSRGIIHVEQRVHDFELNPQTEYVTAIQLLDQKIQCDFVVDASGFSRLLIGKKYQSGWHSFADTLPMNRALPFHLQHQDKIELVTRATAMSSGWVWQIPLQERIGAGYVYHDQFITDEQAQQEVEQWLGVKISPAQPIAFEAGFYEKVWMKNVVAIGLASGFIEPLEATSIGQMLSQLQLMISFIQENHGVISQQNIDFYNRQNSQYWKGICDFIRMHYDTGRKDTPFWQYMLTVPQSQSYQELKKCWEHRTPRDIDFVEHSMGGMSMFSAASWFAVGAGVGVIKPEATSAELYALSTEKKQKLAKYLQQIKQQLFL

SEQ ID NO: 86147 - protein, 507 aa, Pseudoalteromonas sp.
  misc_feature (1)..(507): tr|A0A1Y5JQ28|A0A1Y5JQ28_9GAMM Tryptophan halogenase OS =Pseudoalteromonas sp. A601 OX=1967839 GN=B5G52_19400 P E=4 SV=1
MMIKNIAIVGGGTAGWLTANHLGQVLLEQGVSITLIESPNIPTIGVGEGTVPSMRQSLKKFGIRESDFIRECDVTFKQSIKFVNWLDKKKHGENYYHHLFDSPVLFGDELTAGWLGSEQNESYADYVSKQTFCCDKMLAPKTITTPEYIGINGYAYHFDAKKFALFLSKHAIKHFAIQHLLADISDIKVDCDGYITHLETADNESIAFDFVIDCSGFSAAIIGDKLGVEFLDRSDLLLTDTALTLQVPTCSSDAIPPYTIATAHQAGWIWDIALTQRRGIGLVYSSKHMSDEQAHKKLHHYLGNQFTDLVPRKIPMKVGRRKLFWHKNCVAIGLSQGFVEPLEATAILLADFSASLLAKRFPRTHADISLLNDAYNKKVSYVWDQTFDFIKMHYCISDRKDSAFWLENKAPDSQSEKLQNNLARWQRFSPIREDFDSKFDLFDFDNYLYVLNGMKLGDNKLKQTPVLMKKVSEQKKRQQYRVKQLLSELPDHRELINKIKEFGLQKQ

SEQ ID NO: 86148 - protein, 500 aa, Asticcacaulis sp.
  misc_feature (1)..(500): tr|V4PX52|V4PX52_9CAUL Tryptophan halogenase OS=Asticca caulis sp. AC460 OX=1282360 GN=ABAC460_10365 PE=4 SV=1
MDRHIRNIVIAGGGSAGWMAAAALSNALQKDCSITLIESEEIGTVGVGEATIPPILRFNKTLGIDEAEFVRATQGSFKLGIQFVNWGKLNHSYFHPFGSFGRDFDMAGVYHHWQAAFEAGQAGGLDDYCMAWSAAKRNRFAPPSGDPRHVLSTYDYAYHFDAGLYAAMLRRYAEAKGVKRLEGKIVDVGLNGETGFVETLTLDDGRSIAGELFIDCSGFRGLLIEGALKTGYQDWTHWLPCDRALAVPTTSSADFTPYTRSTAHQAGWQWRIPLQHRTGNGHVYASQYISDEDAAAVLMGHLDGEPLADPRPLRFTTGRRNRFWNRNVVAIGLSSGFMEPLESTSLYLIQSGIAKLLTLFPDRDFDPVLVDEFNRLTRVEFERIRDFIVLHYKLTQRDDSALWRYCAAMDIPDSLRETIEMFRRYGKIVHRELDLFGDPSWLAVHIGQMNFPQRNDPLLAYREADGVAWLAKFRSVIEAAAEGLPGHGEFIARAGMMAAR

SEQ ID NO: 86149 - protein, 385 aa, Prochlorococcus sp.
  misc_feature (1)..(385): tr|A0A0A2CSY6|A0A0A2CSY6_9PROC Putative tryptophan halo genase OS=Prochlorococcus sp. MIT 0701 OX=1499502 GN=EV 12_0096 PE=4 SV=1
MFHTSTIPTTGVGEGGGPWLKQWLDEEGISRELMQRDVKATTKQGILFVDWGQQPKQILHAFTPKGQAHSYHFDAKRLSKILLDGLELDIRNQVVEIVESEKKNKELIHTKESGIEAFDYIIDCRGIPSAHHSDQEENCSPLIASGALLQTCEPLQSVHEDLNNFQTTNAIARPHGWIFLIPLQSRTSIGYIHDSHITNTEAVKQDLKMYLAASNLTPISPTRNIQFKTHISTQFLKNRIYKLGNRAAFIEPLEATAIESTILHCKLITAHIAKRKRNQPTTKEEVEMENNFNRVILNNMERIALFVSWHYSQGSIYDTPYWCKAKANHEILKENRVHPIIARDFDKWIEKGLQRQPRKVPSQGRDNMFFAWSEQSFAAIANILS

SEQ ID NO: 86150 - protein, 497 aa, Asticcacaulis sp.
  misc_feature (1)..(497): tr|V4PJJ7|V4PJJ7_9CAUL Uncharacterized protein OS=Astic cacaulis sp. AC460 OX=1282360 GN=ABAC460_18965 PE=4 SV= 1
MDGQVIKKVVIAGGGTAGWCVAAALSKMLGTLLDITLVESTEIGIVGVGEATIPTIKTFHQLLGIDERDFMRSTNAAIKLGISFDNWTRINDHYFHSFGTVGKASWMTPFHHIWMHAREQGIAGDLGDYCLELQAGEAGKFEVAERSRLNYAYHFDTNLYGPFMRRISQPHVNRIEGKITGVNQDAETGFVTAIVMESGQVIDGDLFIDCTGFRGILIEQTLKTGYEDWSHWLANDSAWAAQTPTVGQIMPYTSAIAHDAGWRWKIPLQSRVGNGLVYSSKHLSDDAAHQRFLDLIDAPPLTEPNLIKFRTGRRLKIWNKNVIAFGLASGFIEPLESTNIHLMQSCATRLVQLFPFSGIHESMVNHFNELTRNEVALIRDFVIMHYKLTERDDSQFWRDRRDMEVPETLAARLAMYRDAGHAYQAPDEVFRVDSWMQVTTGQRLYPKGYHHVGQMIPRDDLEQALKNMKADIDRKVAQMPKHEDFIRQYSAEAAPVG

SEQ ID NO: 86151 - protein, 520 aa, Asticcacaulis biprosthecum
  misc_feature (1)..(520): tr|F4QN15|F4QN15_9CAUL Tryptophan halogenase family pro tein OS=Asticcacaulis biprosthecum C19 OX=715226 GN=ABI _30230 PE=4 SV=1
MSPEMTPDLMPDPIHDLIHDLAQPIRKLVIVGRDAAAWLAANALVRALGHALTVEVVELPSLLRPSDVYASQPALSSLHGMLGLRESDLLSAVRGVYSLGQSFANFSRSRPAFFHPYGVHGAMINGRAFAQVWLKARQGGMRVDFEDFSLNTAAAKQGRFFLPNSHTDNLGPCDFATHLKAVPYVQALKRVALSLGVSVRPARHIEARIDPVSGDVTAVVLSDGSEAVGDLFIDATGTASLLLGEARKVGFDSWQPWLRFDRTVTVSADALAVIPAYSQVRALEQGCLHLAPVRDATSLTFAFAGGLMTDDDALQTAAIVTGLRLRQDAVADDLHCGRRQAVWDGNVIALGEAAAVFDPIDNLGLHAVHQGLANLISLFPLDTTQVPERAEYNRRMASHFDRLRDFQIAHYKLNQNTDMEVWDALRTMPVPDELAYKIELFRTRGIIAQYDDETFETDNWLSIFFGHGLMPDSYDPLVDALPEDQLIQTFQRMLGVIKTEVAAMKPHAAYLEAGKTRTHA

SEQ ID NO: 86152 - protein, 510 aa, Sphingomonas sp.
  misc_feature (1)..(510): tr|A0A4R2XTE1|A0A4R2XTE1_9SPHN Tryptophan halogenase OS =Sphingomonas sp. JUb134 OX=2485112 GN=EDF69_12029 PE=4 SV=1
MRPDAIRRVVIVGGGTAGWMAAAAITRVLGEMPGLSIELVESEEIGTVGVGEATIPQIVLFNKMLGIDEAEFVRETRATYKLGIEFVDWLRPGHRYVHPFGFYGLDMKGIEFHHFWLKGRELGDPTPLDAYSLGIVGGLQGRFAHPRPDQPSSPLSKLGYAFQFDAGLYARFLRRLAEANGATRTEGRIVDVERDGETGHVAAVVLQSGARIEGDLFLDCSGFRGLLIEGAMAAGFEDWTQWLPCDRAVAVPCANGGDRQPLTRSTARGAGWQWRIPLQHRIGNGYVYSSVHLSDDEAAATLLANLDGAPLADPRLLRFTAGHRRRAWVGNVVALGLAGGFLEPLESTSIHLVQSAIARLLTYWPTRRFDQLEIDRFNAAHVSDYLEIRDFLVLHYKATERDDTPFWDYCRALEPPPGLASKLAIFGANGRIFREGNELFTETSWLSVMVGQGVEAGGYHPAADLLSDAETLTRLEHIRQVIADTASLLPHQDDHLRQIGCDPRPSLVVA

SEQ ID NO: 86153 - protein, 514 aa, Sphingobium ummariense
  misc_feature (1)..(514): tr|T0IYV7|T0IYV7_9SPHN Tryptophan halogenase OS=Sphingo bium ummariense RL-3 OX=1346791 GN=M529_01310 PE=4 SV=1
MTHPVRHIVIVGGGTAGWLTAGVIAAKHKSRMPGGFTVTLVESPNTPIIGVGEGTWPTLRTTLSRMGVSETAFFRECDASFKQGARFARWTTGEADDAYYHPLVLPQSFGQVNLAPHWLARNDDLSFCDAVCAQGKICDDGLAPKTMATAEFDALANYAYHLDAGKFAGFLQRHCCETLGVRHILADVEQVVLKEDGDIASLTTAQAGTIEGDLFVDCTGFRALLIGEAMGVPFRECSDVLFCDTALAMQVPYGDPDDPIASQTISTAQSAGWIWDIGLPTRRGIGHVYSSNHISDEEAERELRAYIGPAAEKLSARKIKIHAGHRETFWKRNCVAVGLAAGFLEPLEASAIVLIELSAKLIAEQMPARREVMDIVASRFNATTHYRWGRIIDFLKLHYVLTKRTDSDFWRDNVRPETIPDRLQELMQLWRYQSPWFHDEFDRVEEVFPPASYQYVLYGMGFRTEVEPEALGGDARLAERAMRENAAQTEKLRAGLPKHRDLINRIVERGLQPV

SEQ ID NO: 86154 - protein, 514 aa, Sphingomonas sanguinis
  misc_feature (1)..(514): tr|A0A147I3T3|A0A147I3T3_9SPHN Tryptophan halogenase OS =Sphingomonas sanguinis OX=33051 GN=NS319_04200 PE=4 SV =1
MVQPVQHIVIVGGGTAGWLTAGVIAARHQGRRPHSFTVTLVESPNVPIIGVGEGTWPTLRATLKNMGVSETAFFRECDASFKQGARFNRWTTGAAEDGYYHPLMLPQSFGQVNLASHWLAGEGDASFCDAVTPQGRICDAGLAPKTIATPEYEALANYAYHLDAGKFADFLRRHCCEQLGVRHVLADVEEALLAESGDIRAVRTAQAGEVTGDLFVDCTGFRSLLLGEAMGVPFRPLNDVLFCDTALAIQVPYDDPEAPIASHTISTAQSSGWIWDIGLPTRRGVGHVFSSSHIGRDEAERELRAYLGEAGRDLPVRELKIRAGHRARFWERNCVAVGLAAGFLEPLEASAIVLIELSAKLIAEQMPACREVMDTVARRFNDTTLYRWGRIVDFLKLHYALTQRTDSDFWRDNSRPETMPGRLRDLMELWRYQVPWMHDEFDRVEEVFPSASYQYVLYGMGQRTEIAPGSLAAETIAAQRAWRENEVQTGRLLAGLPRHRDLIRKIVERGLPTI

SEQ ID NO: 86155 - protein, 101 aa, Sphingomonas sanguinis
  misc_feature (1)..(101): tr|A0A147J424|A0A147J424_9SPHN Tryptophan halogenase (F ragment) OS=Sphingomonas sanguinis OX=33051 GN=NS258_18 170 PE=4 SV=1
IGRDEPLWRERQAMAIPDTLAEKLAHFRSSGRIVLSSDELFRDASWFAVLDGQGERPGDHNPLIEFVGAEDNLRQLAMLRAEIAKTAAAMPPLLGRRSAST

SEQ ID NO: 86156 - protein, 284 aa, Alphaproteobacteria bacterium
  misc_feature (1)..(284): tr|A0A2N3CRW8|A0A2N3CRW8_9PROT Tryptophan halogenase (F ragment) OS=Alphaproteobacteria bacterium HGW-Alphaprot eobacteria-15 OX=2013661 GN=CVT76_11170 PE=4 SV=1
MQIQRIIIVGGGTAGWMAAAALSRIKAGRPVEITLIESEAIGTVGVGEATIPPFVGFNDLLGVNEAEMLAAVGGTFKLGIQFENWNRIGDSYIHPFGAYGYTMGGISFHHVWHRMANAGDKRPIQVFNLETMAAYFGKFPRTQDFARDDLPPVNYAYHLDATRYAAFLRRFAEARGVVRQEGRIADVALDGETGFVTTVTLDDGQQFAGDLFIDCSGFRGLLIEQALQTGYDDWSHYLPCNRAVALPCQREDGSPPPPFTRATAHRAGWQWQVPLQHRNGNGHV

SEQ ID NO: 86157 - protein, 536 aa, Sphingomonas sanguinis
  misc_feature (1)..(536): tr|A0A147JDF2|A0A147JDF2_9SPHN Tryptophan halogenase OS =Sphingomonas sanguinis OX=33051 GN=NS258_00275 PE=4 SV =1
MTPNHDQMIRRVVIVGGGTAGWMAAAAFARLLNNGYTQVTLVESEEIGTVGVGEATIPPIITFNQMLGLDENDFLAKTAGTFKLGIEFVDWGDKGERYFHPFGRHGQDLQGVHFHQLWLRERSRRALPDIAEWSMSAMAARSGKFGRAKPDARSPIRELFYAFHFDASLYARYLRGYAERGGVTRIEGRIDAVNLRPEDGYVEAVTLADGRRIEGDLFIDCSGFRGLLIEEALGTGYESYAQWLPCDRAVAAPCALPNPAEPDPFTRATARDAGWQWRIPLQHRMGNGLVYCSEYLDADAAEAQLLASLEGELLGDPRHLRFTAGRRRESWNRNVVALGLSSGFLEPLESTSIHLVQAAIQRLIALFPDKRFDPAERTEFNRQMRDLYEDVRDFIILHYKATRRSDTPFWNQVRTMEVPESLARKMDLWAGKGRLFREGYDLFSNPSWVAVSLGQGIVPQSWEPAADALDEDLVAQALEQMRVGYADTAARMPSHGDFLRMTAPSPLAPALAPGRPADGGFDFARTPSGGGKAPLL

SEQ ID NO: 86158 - protein, 510 aa, Sphingomonas sp.
  misc_feature (1)..(510): tr|A0A0Q8X7P2|A0A0Q8X7P2_9SPHN Tryptophan halogenase OS =Sphingomonas sp. Root241 OX=1736501 GN=ASE13_17610 PE= 4 SV=1
MPDKRGIIVVGGGTAGWLTAAYLARFFEGRIAITLLESPEIGIIGVGEGAFPTIRSTLQFLGIDETHFIRAASATFKQGIRFDDWLHAPGPDGARHHYLHPFEAPFYTEGGSLVPYWLLQGEATRPPFAEAVTIQNRVAEARRAPKKAGEGDYAGPLNYAYHFDARRLAEVLEARAAELGVRHLRGLLTGVELAEDGSIACVRTDAHGALEADLYVDCSGFRAELIGKALGSPFKSVKHQLFTDRALACKIPYDRPDAPLESFTVATAHAAGWTWDIGLEGARGIGCVYSSAHMSDEEAAEVLRGYIGHDDYKARIIPFEPGYREAQWVKNCVAVGLSGGFLEPLESTGVVLIEAAVAMIAELYPHNGPADAPAARFNRLIAGRYANIVNFLKLHYCLSRRQEPFWRDNADPASIPEALRELLDQWRWRPPSRFDFLLDLESFAFFNYQYVLYGMEFRTDLASGRGDFPNVAAAEKLFARIRAFSEQATKDLPGHRALIREINAGASLGA

SEQ ID NO: 86159 - protein, 505 aa, Sphingomonas sanguinis
  misc_feature (1)..(505): tr|A0A147HV24|A0A147HV24_9SPHN Tryptophan halogenase OS =Sphingomonas sanguinis OX=33051 GN=NS319_12470 PE=4 SV =1
MTKVTEDGVRVVIVGGGTAGWMAGAALTRLLSGQCSVRLIESEAIGVVGVGEATLPHIRAFNERLGIPEAEFMARTRATFKLGIEFRDWGRIGDSYIHPFGTFGRGTGAIDFHHYWARLLREGHDLPPLDALSYACALARDARFDHPDQTRGGLSSTFGYAYQFDALLFAPYLRGMAEEAGAVRTEGMVVDVERDGETGLIRSVTLADGERVEGDLFIDCSGFRSLLLGQTLEEPFEDWSKWLPTDRAVAMPCRTETAVTPYTSAIAMPAGWRWRIPLQHRTGNGYVYASDFISDADAARALEAAVEGEPLAEPRLLRFKAGRRRRSWVGNCVAVGLASGFLEPLESTSIYLVQQAITALIELFPGREIAASDRDEFNRVIDLEYDRIRDFLILHYHATTRDDSPFWNYVRTMPIPDSLAEKMELWRRRARVVKYREGVFLDASWIAVYLGQGIVPEGWDPRADVAGTPDLLRAVTDLRAEIAADVGARPEHRAFLERYCPMVAA

SEQ ID NO: 86160 - protein, 520 aa, Sphingomonas sp.
  misc_feature (1)..(520): tr|A0A0Q8XFN8|A0A0Q8XFN8_9SPHN Tryptophan halogenase OS =Sphingomonas sp. Root241 OX=1736501 GN=ASE13_13165 PE= 4 SV=1
MVSEGRRILVVGGGTAGWITAGYLARMLGADRPGGIAITLVESHDIGILGVGEGTFPTIRRTLARIGIDEAELVRRCGATFKQGAKFVHWRHAPGTPGRDHYLHAFQETDDRDGPELLPYWLLGLAGDANWDEVNTPQKRAADAHRAPKLPSHPDFVGPLNYAFHFDAVSLAVLLREQGIANGVTHLVDTVQEVLLGEDGAIAGVRCAERGVLTADLYIDCTGFRAELIGKALGQPWKSCRDVLFCDGAVAIQVPYARPDDPIASYTISTAQQAGWIWDIGLEARRGIGHVYSSAHGDADEAERVLRDHIGPAGAKLEARRFRFDAGYREVNWVKNCVAVGLSSGFFEPLEATGIVFSEIAAGVIANLFPWAGDFETSARQFNDNMRRRYERTLDFIKLHYCLSERRDSQFWCDNVDPASVPDSLKELLDRWRFRPPNEMDIDRNVDIFTESSWQYVLYGMGWKTDLSAKAGVFRFEEEAKAAFATIRQQGEFAIRQLPSNRELVRFAQRSGFGQGANAA

SEQ ID NO: 86161 - protein, 503 aa, Brevundimonas sp.
  misc_feature (1)..(503): tr|A0A0Q5VBG0|A0A0Q5VBG0_9CAUL Tryptophan halogenase OS =Brevundimonas sp. Leaf363 OX=1736353 GN=ASG17_13600 PE =4 SV=1
MAEPIKSVLVVGGGTAGWMAAAALNSALGPHCKVRLVESDEIGIVGVGEATVPTVRDFNNLIRLNEPEFMRETRATLKLGIEFVDWGRKGTAYFHPFGTFGGGATLGEFAQTWLTLNQRGLNGDVTDWSICAQAAQRGRVGARQADPRSPYLNLYTAFHFDAGLYALYLRKVCEARGVERIEGKIVEVVQRPEDGFVSGVKLADERVLEADLFIDCTGFRGLLIEGAMKAGFEDWSHWLPMNRAVAMPCAPVSGITPYTRSTAMDAGWRWRIPLQHRTGNGHVYCSDHTDDETALNQLVEGLDGEAMADPRVIKFQTGKRKAFWAKNVCALGLATGFIEPLESTSIHLIHVGIAKMLQHFPDRDFSPVNIDIYNRRMEREVQQVRDFVILHYHASERDDSEFWRRVRDMPIPDTLAERVGAFRDRGMIYQVAADEYFSMASWMAVMVGQGIQPRMANPLYGFQNLERATEGFERVRTTFAQAAEALPTHEAFLKAENLWKTAS

SEQ ID NO: 86162 - protein, 503 aa, Sphingomonas sp.
  misc_feature (1)..(503): tr|A0A0Q8X8D4|A0A0Q8X8D4_9SPHN Tryptophan halogenase OS =Sphingomonas sp. Root241 OX=1736501 GN=ASE13_18000 PE= 4 SV=1
MSDQAIRSIIIVGGGTAGWISAAVLSRFLDPARCSITLIESEEIGTIGVGEATVPLMQHLNGLLGIDEREFVKATQGSFKLGIAFRDWGTIGNTHFHGFGDYGDAIEGIAPHHHWLKLRGEGDATPIDDYSLPYAMARRGRFAPPSADPASQTSFYRYAFHFDALLYARFLRNYCEQRSVRRIEGRVVDTELEGETGRIAAVVTADGQRHAADLFVDCSGFRGLLIEEALGTGYEDWRHWLPCDSAVVAPSALMGPPTPYTISTAREAGWQWRIPLQHRMGNGYVYSTRFTDDERARDLFTANVEGKLLADPRVLRFTTGRRRKFWNGNCVAIGLAGGFMEPLESTSIQLIQTAIARLVEYFPDRNWDPRIADEYNRLTTNEFERIRDFLILHYSLTRRDDAPLWDYCRAMEMPDTLRHKIEVFKATGRVPLLSEESYQEPSWVAIFAGNGFLPDRYDPLVDRLDPERLRAGLAHRRRLLAKAAETMPPHELFIQRCCLAEAA

SEQ ID NO: 86163 - protein, 503 aa, Stenotrophomonas panacihumi
  misc_feature (1)..(503): tr|A0A0R0ANB6|A0A0R0ANB6_9GAMM Tryptophan halogenase OS =Stenotrophomonas panacihumi OX=676599 GN=ARC20_00885 P E=4 SV=1
MTRDALDLPATPVRRVVIAGGGTAGWMAAAAISKILGRQLEITLVESEQIGTVGVGEATIPPLVTFHRLMEIDEREFMAATQGAIKLGILFENWRDIGHRYFHSFGTTGRDHWTAGFQHFWLRGRERGLASDYADYNVESVAARERRFAHLPKMGMNYAYHFDASLYGKFMRQIAEQHGTRRVEGKIADVLLHEDTGCIRSLRLESGDVIEGDLFIDCTGFRALLIDKALGVGFEDWSHWLFNDSAQAVQTAAVEDAAPYTSAIAEEAGWQWRIPLQRRVGNGIVYSSRHMDDGRAREIFEGSLRGEQTSRMLQIRFRPGRREHSWYRNCIALGLAGSFIEPLESTTIHLIQRGITRLMQCFPKVLTAVDIEEYNRQMAEELVHVRDFVVLHYALTDRRDTAYWRACHEMTLPPSLQHRIDLFRETGIVFHQPNELFAENSWIQVMMGQGNMPKQHHPTADLMGDEELARFLNAAREHAARTAAQLPSHQAYLDRWCPATTQR

SEQ ID NO: 86164 - protein, 521 aa, Sphingomonas sanguinis
  misc_feature (1)..(521): tr|A0A147J800|A0A147J800_9SPHN Tryptophan halogenase OS =Sphingomonas sanguinis OX=33051 GN=NS258_10805 PE=4 SV =1
MTGRAERTDGPVRRVVVVGGGSAGWIAACRLAAQSRRTGGDVRVTLVESRNVPTVGVGEGTWPTMRNTLAKIGISETDFIRSCDAAFKQGARFVGWTDGTADDGYYHPLNPPAGATEIDLAPHWLHRSEMGASFADWVDYQAMLCDAGLAPKSIVAPEYAGHANYAYHLDAGKFATLLRDHGVGQLGVEHVLGDVVRVAVSDHGDIAHLELADGGTVAGDLFVDCTGFAALLIGGVYDVPFRRCGDVLFADRAIALQVPYAQPDDPITCHTVSTAQGSGWIWDIGLWTRRGVGHVYSSAHTSDDAAEAALRAYVGPAAEGLSARRITIDAGHRTRFWQNNCVAVGLSAGFIEPLEASALMLIETAMDAIADRLPRTRAAMDVMARQFNATFTHHWMRIIEFLKLHYVLTKRTDTDFWRDNVAASSIPDGLAERLELWRHHSPGPQDFDHAREVFSWPSYQYVLHGMGFESHRPPVDPAAPDAALAERFVARTARAKGELRARAPIHRDLLRAIREHGLQRV

SEQ ID NO: 86165 - protein, 560 aa, Bartonella apis
  misc_feature (1)..(560): tr|A0A1R0FAC5|A0A1R0FAC5_9RHIZ Tryptophan halogenase OS =Bartonella apis OX=1686310 GN=PEB0149_013690 PE=4 SV=1
MLDLGQAKKIAVIGGGLTGWFAALMLRRVFSPKVDIVVFEDPKRPHYSGGEGGLANFVVNLQRASIDIDEFVHNTDATFKMGNVYRGWRNGGQNDIYYQLFPSPDDHVEEIDFSYRGVWPYLATRIATKTPLHTLFPGFSLIEAGSSQVEANAVFKLRRSGIQPTFHFSVGKLVTLLKNAGVSRQISFRNQRVADLVIASNGDVTSLKLDSGEEVPVDFVIDASGFERISAGKKYKSEWRSFSGSLLENSILSFSVPNGRKNPSFVSEAAALGAGYLWQVPLAGHVSAQYVFSSQYITATRVRDELQSYLGSAISPTGITTFNPGNFKKIWANNVVALGVASGFISPLETPSLGFMLQQLGELERTFLACRGIIGEQTIEAFNQANDKSFSEIADFLRLHYDGGRSDYTFWCDAGLAKRSASLEAMEACFHKRLPRIIDIDGYNTGWPPLYHLMNWIFVAAPLAIVSVEGAMSELNNMPPQIRQRMEQYARELMRMRTPVTQSQQRQGLKREGASGQGFSLDQNSSSRGASYGTGKNNGQVSDKPGSFQEEEGSLRATHR

SEQ ID NO: 86166 - protein, 416 aa, Flavobacterium anhuiense
  misc_feature (1)..(416): tr|A0A444W238|A0A444W238_9FLAO Tryptophan halogenase OS =Flavobacterium anhuiense OX=459526 GN=NU08_0705 PE=4 S V=1
MTKEFVDVLVIGAGPSGCVSASYLFKNNVKVKVVEKTKFPRLVVGESLIPRVMDHFAEAELFDALDAMNFEKKLGARFIRGEEICNFDFSVKFGEGWDWTWQVPRADFDNTMAQEIIRKGIDLEFETEVLEVSFEGKNSKTIVKDKDGNLKEIHAKFIIDSSGYGRVLPRLLDLDTPSKLDPHSSIFTHVKDINREEGVEGTQISFDILETEVWLWVIPFSNGNTSLGVVGPTDFINSLSENKDNAEALRNAIQKSDYYIKRFAGTEFLFEPVKLENYSRAVKRMYGDGFALTGNSSEFLDPVFSSGVAFATESGMLAAKLYLKESQGIPVDWEVEFTQYMKRGIAVFTTYVQEWYTGNLQTLFFHQPENPEVKEKICAVLAGYVWNEENSFVKKHDHVIANMAYLLNMQKEQSPE

SEQ ID NO: 86167 - protein, 444 aa, Caulobacterales bacterium
  misc_feature (1)..(444): tr|A0A1F8I8G1|A0A1F8I8G1_9PROT Tryptophan halogenase (F ragment) OS=Caulobacterales bacterium GWE1_67_11 OX=179 7583 GN=A2093_01600 PE=4 SV=1
RDFIQKTQASFKLGIQFEDWTQKGESYFHPFGAVGVPVDISDFYPVWLKARMNGYDRPLMDFAAAARMASQGRFMLPFKAQRTPIGGASYAVHVDAKRVARYLRDFAEARGVKRTEGIVEDVMTRPDGFVSGLKLKSGQTVEADFFIDCTGFRALLIGKTLGVGYTDWSEWLMCDRAIAVQTENVGPPTPYTLAQAQDCGWRWRIPLQHRTGNGHVFCSRYMSDDEATARLLAQVEGRPVVNPMVVPFKTGVREKIWDKNVLSLGLASGFIEPLESTAIHLIYRGMDFLFRLMPDLDCDPNLAAEYNRRMTVDYEEIRDFIILHYALTRRDDTAFWRQCRDMVLPEGLQHKLEVFRANGSLVEALDPLFRNVSWYAVMDGMGVRPRSYPPLVDRIDSTGLTDEMDRAANILNAFVADLPTHQAFIDTHCPAPSVDLPAPLAVPA

SEQ ID NO: 86168 - protein, 501 aa, Asticcacaulis excentricus
  misc_feature (1)..(501): tr|E8RVA6|E8RVA6_ASTEC Tryptophan halogenase OS=Asticca caulis excentricus (strain ATCC 15261 / DSM 4724 / VKM B-1370 / CB 48) OX=573065 GN=Astex_3619 PE=4 SV=1
MSQKIRHVVIAGGGTAGWMTAAWFARLLKDDVDTITLVESEEISTIGVGEATTPYIRVFNQVLDIDEHAFLKSTYGTYKLGIEFVDWGAINNRYVHPFGPFGREFGALPFHSVWLRHALSDRNASLDAYNLQALAAKAGKFMPPAGANSPLAEISYAYHFDASHYAAFLRQMSEAEGVRRVEGRIEHVDLDERGFISGLRLNGERLIEGDLFIDCTGFRSLLLGEALGVGFEDWSRWLPCDRALAVPSRSTEPPVPYTRSTAHSAGWRWRIPLQHRVGNGSVFCSQFMDEETARENLLANLDGEPLAEPRAIRFQTGRRQKFWEKNCVAIGLSSGFLEPLESTSIMLIQNGIARLQYLFPDRDFHQADIDTYNADLTREYEEVRDFLILHYYVGSRCDSDFWRYCRDMSVPDALTQRLNLFRSRGRIPQERGEQFRTGNWLAVMWGQGLRPAAPDPLVLSIPEERSETWLRQTRDVIAACRDRMPPHEDYIRHFCAATISA

SEQ ID NO: 86169 - protein, 505 aa, Asticcacaulis excentricus
  misc_feature (1)..(505): tr|E8RV31|E8RV31_ASTEC Tryptophan halogenase OS=Asticca caulis excentricus (strain ATCC 15261 / DSM 4724 / VKM B-1370 / CB 48) OX=573065 GN=Astex_2586 PE=4 SV=1
MNVKGMYRLVIVGGGTAGWMAAAALRRSFSALPYTVTLIESDEIGTVGVGEATIPPMIQFNDMLGLDENAFLKAVNGTFKLGIRFKDWSAPGSDYFHPFGVYGVDMGGLNFNHYWMRYQKAGGSADFGLFNPQTLAARANRFGRMKEINPNVPAVNYAFHFDASLYARYLRDVCVQRGVVRKEGRITEVQQDPDNGDVTAVVLASGERIEGDLFIDCSGFRGLLIEQTLKSGYEDWSKWLPCNRAVAVPCDKVDPLTPYTTSTAREAGWQWRIPLQHRTGNGYVFCDSYLSEETASDLLMQRLDGQAQAEPRVIRFQTGHRKQMWNHNVIAMGLASGFLEPLESTSIWLVQEAIATLQLYFPRGGITDTARACFNRAMLDAYTNVKDFLIAHYKVTTREDTPFWSYCKHMDIPDSLQFRLDSFRENNQPLVRPQDLFKEASWFAVLAGQGLMPQSYHPGADVMPDDEFRWRIQKVREGTTGLVNMMPGHEAYIAKTCASPHFVSA

SEQ ID NO: 86170 - protein, 506 aa, Xanthomonas campestris
  misc_feature (1)..(506): tr|Q8P3D8|Q8P3D8_XANCP Tryptophan halogenase OS=Xanthom onas campestris pv. campestris (strain ATCC 33913 / DSM 3586 / NCPPB 528 / LMG 568 / P 25) OX=190485 GN=prnA P E=4 SV=1
MIPAPLRNIVIVGGGTAGWMAAAAFARVLGPSFNVQLIESEQLGTIGVGEATVPHIKAFNNLLGIDEAEFVRQTQGSFKLGIEFIDWQRPGTSYIHGFGTQIGHPLGLLPFHQYWIKQQRRGKAQPLGAYTLNTVAATRGKFMTSAGDVPANSPLANIAYAYHFDASQYARFLRGYAEQRGVTRLEGLIEQVQLDAHTGHVQSVQLASGQVVSGDLFIDCSGFRGLLIEEALHTGYHDFTHWLPCDRALAVPCEKVGPPTPYTRSTARAAGWQWRIPLQHRTGNGYVYSSAHVSDDEAAATLLANLDGTPLADPRPLRFTTGRRKQFWNRNVVALGLASGFLEPLESTSIHLIQSGISKLLELFPRESISPVLVQRYNDRLAFEFDRIRDFLVLHYHATERDNSAFWRHCRTQPITPELQATLDLFRDSGRFYRNAEEMFAEISWVQVMVGQGILPQGYHPLVDQVPDTDAEGFLASVAQTISHCVDVMPTHQQFIDRYCRADRVR

SEQ ID NO: 86171 - protein, 631 aa, Bartonella apis
  misc_feature (1)..(631): tr|A0A1U9MDD0|A0A1U9MDD0_9RHIZ Tryptophan halogenase OS =Bartonella apis OX=1686310 GN=BBC0178_018370 PE=4 SV=1
MIPIDGGSTSPSFPKPSSGLQKSLYSVERKSAGCQTREKIAIIGGGLSGWLSALMLRRVFSANVDIAVFEDPNLPCFKGGEGGLHHFIAMVRRLNIDLQHFVHTTKPTFKMGNVFRGWRNGSASDIFYNLHPGMNDHLEELDFSLYGFWPYLATAIASGVPLETIFPAFALIEQKANQIEATAVFNTHRSGVEPTLHFDCRLVVDYLKKIGMERKIRTFARKVVDFGISPDGHVDALKLSGGDIFNVDFVIDASGLRHLLVGQKLNGKWHSFSDSLLTNSAIDFRLANSGAKVDLVSEYFATPAGYICRIPLSDHYSGIHVFSNNHTDWLRAKREVELLFRSPVAARPVITFDPGNFEKTWMGNAIAIGVSSGYLGPLQASATETTIHQIARLERILLECNGVIGEHIIEDYNKSNNGAFKANADFLRMHFDGGRRDTAFWRDAASARRSSHYQQMLACFAERLPRVIDFENYGAGFPPLYHVLDWLFIASSLGIVSKAAALNELEGLPPNIRDKMERYGRDILVRGNVQSDLGAQSDLGAQSELPLQNGLGAEGELSPQNGLGAQSKLSAQKNLPPVSGHSFGQEPLHEGEEIKEAGQNWQRGGYQFQFANHARFSQARTEQDKGGVHAG

SEQ ID NO: 86172 - protein, 497 aa, Rhodospirillaceae bacterium
  misc_feature (1)..(497): tr|A0A2E3ZK50|A0A2E3ZK50_9PROT Tryptophan halogenase OS =Rhodospirillaceae bacterium OX=1898112 GN=CMM37_00975 PE=4 SV=1
  misc_feature (246)..(246): Xaa can be any naturally occurring amino acid
  misc_feature (256)..(256): Xaa can be any naturally occurring amino acid
  misc_feature (261)..(261): Xaa can be any naturally occurring amino acid
  misc_feature (408)..(408): Xaa can be any naturally occurring amino acid
  misc_feature (417)..(417): Xaa can be any naturally occurring amino acid
  misc_feature (421)..(421): Xaa can be any naturally occurring amino acid
  misc_feature (473)..(473): Xaa can be any naturally occurring amino acid
MKNIVILGGGTAGWMAANLLQKKWQQRGIKITVVESPDIGIIGVGEGSTPLLKEFFDSLDISESEWMSQCNATYKNGISFNDWSTVTGYESYFHPFPCSLDFATFGLLYKYTELRRKGLDVLAHPNRFSLMAGLTERKLAPLPEKNFPFHFQYGYHFDSVLIGKFLRGKAKESGVSHIEATVENVEQETDGSIKSLRLNTGEILSGDFFVDCSGFASILLQKTLKVPFLSFSENLFNDSAVAVPTXIEAEVPAETXSTALXNGWAWKIPLTNRFGNGYVFSSNYCSQDEAETELRTHLGILDSEVEARHLKMKVGRVQESWAKNCLAVGLSQGFIEPLEATALQFVYSTVEQFSQALEEGNFTNQYRGEFNTRMNANFEGIRDYIVLHYKTNSRNDSQYWIDNRDNQXISDNLRAMXECWXAIEDMQEALTRLNIGSYYSQRSWTCLLAGVGVFPKQENLVIPDKEKAGKAMXDLKYVDDFINGCSMNFKSHSKLLF

SEQ ID NO: 86173 - protein, 583 aa, Bartonella apis
  misc_feature (1)..(583): tr|A0A1U9MK37|A0A1U9MK37_9RHIZ Tryptophan halogenase OS =Bartonella apis OX=1686310 GN=BBC0122_019690 PE=4 SV=1
MESDLRAGRIFPVAALNLRWRQKLLDLRHAKRIAVAGGGLTGWLAALMLRRVFSPNVEIVVLEDPDNPAYSGGEGGSGNFIASLERASIDIDEFVRETDATFKIGNAYHGWRADNANDIFYELFPAPDEHVEEVDFSFRGVWPFLATRIATGTPLHTLFPGFSLVATGASQVEANAVFNLRRSGIKPTFHFNVGKFLKLLKKIALSRQISSRSRKVVEFVKSESGDVVALKLVGGAEISADFIIDATGFERLGAEKAYKSVWRSFSSQLPEDRYLSFKIPEERKNPSLVSAAVALANGYLWQVPLRDHVFVHYVFSGKSGTETQIRQALQSYFGFAVTAGVISTYEAGNFKTVWNNNVVSLGVASGFISPLESSSFAHMLQQLGELERTFIACQGIIGAHTIGAFNEANDRSFGEIADFQRMHFDGGRSDSAFWREAGQAKRSPNYEAMKACFSERLPRIIDIAGYNSGWSPLFHLMNWLFVAAPLGIISAGAAIRDLNYLPPRIMERMQQYGAELMRINAANAKPQWKDSGNIEPREQQGFAAYRNYSTVPAGEFGVKPDRQFSESSGTIETAEGNLRATHG

SEQ ID NO: 86174 - protein, 494 aa, Sphingomonas sp.
  misc_feature (1)..(494): tr|A0A0Q4IZ01|A0A0Q4IZ01_9SPHN Tryptophan halogenase OS =Sphingomonas sp. Leaf230 OX=1735694 GN=ASE82_04915 PE= 4 SV=1
MTDALRSVTIVGGGTAGWMAAVAFGRLLGPAGTRVTLIESDDIPTVGVGEATIPPIRTFHAMLGIDEDAFLRATGGSYKLGIRFEGWTRPGESYVHPFGQIGTDIAGVPFAAQWLRARQAGLAAPLGAYSLEARAAETRRFSRPIANGDSPLSRIGYAYHFDAGHYAAFLRAQAEAYGVVRHEGLVERVERGPAGIAAVHLADGSRIAGDLFLDCSGFRALLIEGAMEAGWTDWSEWLPCDRAVAVPSVADAAPLPLTRAIAERAGWRWRIPLQHRTGNGHVFSSRHMSEDEATATLLAGLHGEALAEPRVIRFATGHRNRFWSGNCIALGLAAGFMEPLESTSIHLVQSGLQHLLRMLPAGRPAAATVERYNRIMTAEFVRIRDFLVAHYHLNDRTERFWLDRAAAAIPEGLAEKLALFHAGGRIFREADELFNETSWLAVLTGQNAPVSGYDPICDAIPIETAANRLAQIERVVATSLTHMPSHAHALARLA

SEQ ID NO: 86175 - protein, 490 aa, Rhodobiaceae bacterium
  misc_feature (1)..(490): tr|A0A2E6U413|A0A2E6U413_9RHIZ Tryptophan halogenase OS =Rhodobiaceae bacterium OX=2026785 GN=CML95_08190 PE=4 SV=1
MRKIVIAGGGTAGWMTAVAFANTMGETVDLTLVESDAIGTIGVGEATIPPMITFNNLMKIDEAEFMRETQATFKLAIAFEGWKERNHRYIHPFGQAGHDHWTCGFQHFWLNGKDRGHHEDYSLYSLESTAADNFKFGHLPDKRISYAYHLDSGRYARYLRRISEANGAKRIEGKIHSVELNNENGYIDHLVLEDGQRVEGDFFVDCTGFRALLIGDALGVGFEDWSHWLPNDSAIAVQTESIHPPAPYTRSLAHEAGWQWRIPLQHRMGNGIVYCSKYMDQEKALQTLLESVEGETLTEPNFIRFQTGARAKHWEKNCVAVGLSSGFMEPLESTSIHLIQRNVIRLLHMLPNDEICQNDVDEFNKQAEIDMEQIKDFLILHYVANNREGEPFWDYVREMAIPESLRHRIDLFRKTGRIFRHNDELFAENSWVQVMMGQGIVPESYHPITTKMRDEEVSHFLKTLKDSVAATVDNLPSHSDYIAKYCPAEK

SEQ ID NO: 86176 - protein, 504 aa, Sphingomonas sp.
  misc_feature (1)..(504): tr|A0A0Q4JC06|A0A0Q4JC06_9SPHN Tryptophan halogenase OS =Sphingomonas sp. Leaf230 OX=1735694 GN=ASE82_04430 PE= 4 SV=1
MANHPLRIVIAGGGTAGWMAAATFARFLETGYEIDLIESDDIGTVGVGEATIPQIHLFNDALGLDEDAFLRATGGTFKLGIEFVDWFKPGHRYMHAFGDVGRDVGLLPFHQYWLRARSLGLAGDLGAYSLNTHAALAERMQRGPARTARTLPSMPYAYHFDAALYARYLRRYSETRGVNRIEGKIVRVTRDGESGDVAGLVLENGTTVAADLYIDCTGFRGLLIEEALGTGYEDWTHWLPCDRAISVPSARSEKFTPYTRSTAHAAGWQWRIPLQHRTGNGVVFSSAHMSEDEATATLLAGLDTPAMAHPRTIAFRTGRRKRMWNRNVVALGLAAGFMEPLESTSIHLIQSAISRLLKLLPGRVIADADRTEFNRQSDFEYERIRDFIILHYKATARDDTPFWRQCRDMAIPDTLAAKIDLWRGNGHIVREHEELFTEVGWLQVLAGQGIMPAGHHPLADAISTSDLGEFMDTIDKLNAREAGQMQDHAAFVAQHCASPAGLGA

SEQ ID NO: 86177 - protein, 521 aa, Asticcacaulis excentricus
  misc_feature (1)..(521): tr|E8RTM7|E8RTM7_ASTEC Tryptophan halogenase OS=Asticca caulis excentricus (strain ATCC 15261 / DSM 4724 / VKM B-1370 / CB 48) OX=573065 GN=Astex_3213 PE=4 SV=1
MAKRPYSSKFGNRFMNSVQQQDIVILGGGAAGWIAAGLLARKTDRRQTRITVVESEEIGIIGVGEATVPVLAHCNALLGIDEYDFIRRTQGTFKLGIEFCDWGVVGNRHFHAFSDYGHQVEGVSTHHYWLRLRQAGEAHPIDDYSFAYAVAKNNRFAPGDPQNARYHYAYHFDAALYARYLREVATGLGVQRIEGRMTHVDLDSESGHITAIHLADGRKVPGDLFLDCTGFASELLGKALNTPFVDWSHWLLCNSAMAVPAMRTGAALPFTRSTAHAGGWRWTIPLQHRSGHGMVYNSDLWSDEAARDALLGAIDGEPLAEPRVFRFTSGHRKAFWNRNCIGIGFASSFLEPLESTGLQLIVMGVLKLLQFFPEKTINPVLRDEYNRISTREIERIRDFIIAHYYLSRRPEPLWAACRDIEIPDSLRHKLEVWNASGQVSLGDLESYMEPSWLAILLGNGAVPARHAVAADLHPLEQIKKGMDLRREEIRRSAQTVMSHQEFIDRHCKAASERPQAEAGTA

SEQ ID NO: 86178 - protein, 505 aa, Xanthomonas axonopodis
  misc_feature (1)..(505): tr|A0A1T1P5Z0|A0A1T1P5Z0_9XANT Tryptophan halogenase OS =Xanthomonas axonopodis pv. melhusii OX=487834 GN=Xmlh_ 01615 PE=4 SV=1
MTQAQIRKVVIAGGGTAGWIAACALSHQFRNLLDITLIESEQIGTVGVGESTVPPIRTFHRFLQIDEQEFLRAVAGTFKLSISFEHWRRHGERYIHPFGITGQSTLVCAFHHLWLESQRRGMPGSFGDYCLETVASRVDRFALHGEPAVNYAYHLDAALYAKFLRARSEACGVKRVEGRIQQVTVQPHSGDVASLVLEDGQTIEGDLFIDCSGFRGLLIEQTLHTGYEDWSHWLPCDRAVAVQTEALGPPVPYTRAIAHEAGWRWHIPLQHRVGNGLVFSSKHLSDDQAHAKLLRDVAAPAVKEPWMVPFRTGRRLKAWNKNVVSLGLASGFIEPLESTSIHLTISAVVRLLPLFPAEGIAPSQVQLFNDVSRAEMEHVRDFVTLHYHATQRDEPLWQQCRQMELPESLALRLRAWRERAHAWQGADELFRVDSWTHVLMGQGIAPEQHHPLTRAFSDHDLRRLLDGIAQPIQHAVQQMPSQQDFIERYCKAGEQVWGMRSPVPA

SEQ ID NO: 86179 - protein, 503 aa, Brevundimonas sp.
  misc_feature (1)..(503): tr|A0A4P8Q9N0|A0A4P8Q9N0_9CAUL Tryptophan 7-halogenase OS=Brevundimonas sp. SGAir0440 OX=2579977 GN=E7T10_0894 0 PE=4 SV=1
MTPAPLKRILIVGGGTAGWMAAAALAHVTRGTVKVELVESEVIGTVGVGEATIPPILLFNQLLGIDENEFVRATQATYKLGIQFNDWFQKGHSYFHPFGTYGTRIDAASFHQYWLRLNKAGLDDDLNAYSVTTMAARMGRFTRPDTDPRGAASQMTYAFHFDAGLYARFLRQRAEANGVVRHEGKIADVRLRDGDGFIQSVRLDDGRELEADFFIDCSGFRGLLIEGALKTGYEDWTHWLPADRAVAMPCTRVGDPTPYTQSTALEAGWRWRIPLQHRTGNGYVYCSPYISDDAAQARLRASLDGEAMAEPNFLRFTTGRRKKTWNKNCLALGLASGFLEPLESTSIHLVQSGISKLLLHFPDTGFAQADIDNYNRMMRLETERIRDFIILHYHATARDDSPLWRHARAMPIPETLKQKMDQFRSRGRIFRYEDELFQETSWIAVLLGQGVIPERHDPITETIPLEQVQQWLQKMKAMIQQGVARMPTHEAFIAANCKAPPVN

SEQ ID NO: 86180 - protein, 510 aa, Asticcacaulis excentricus
  misc_feature (1)..(510): tr|E8RS89|E8RS89_ASTEC Tryptophan halogenase OS=Asticca caulis excentricus (strain ATCC 15261 / DSM 4724 / VKM B-1370 / CB 48) OX=573065 GN=Astex_2721 PE=4 SV=1
MQDLPRKQPGFRKIVIVGGGTAGWMTAALLARLTEGKLGQIHLIESEDIGTIGVGEATIPPIQDFNRLLGIDETTFLRETKATFKLGIEFRNWHQRDDSYIHPFGVIGAQIGRAAFHHYYTRAALSGDTTPFEAYSLASVAARQGRFAPAPRHDTGVHSTLGYAYHFDAGLFAQFLRRYAEARGVVRHEGRIAQVNQRAEDGFITGVQTEMGDILDGDLFLDCSGMHALLLQKTLDTGFEEWSHWLPANRAWAVPCANVSAPLPYTRATAHSAGWQWRIPLQHRTGNGHVFSADFMSEDEARRILLDNLDAPTLAEPRLIRFRTGRARQFWHKNVVAIGLSGGFLEPLESTSIHLIHSGLIKFMDLFPDPDFNPLLAQQYNQAVGMDYDTIRDFLIAHYKLTKRDDSEFWRYCREMSIPASLQYKLDQFSESGRVIMSRGDLFQIPSWLAVLFGQGLRPKRYDPLADLIEPQDLSAILRQMQGTITDYANTMPPQARYIEKLGLTIVAGE

SEQ ID NO: 86181 - protein, 498 aa, Brevundimonas sp.
  misc_feature (1)..(498): tr|A0A4P8QBI2|A0A4P8QBI2_9CAUL Tryptophan 7-halogenase OS=Brevundimonas sp. SGAir0440 OX=2579977 GN=E7T10_1305 0 PE=4 SV=1
MIIDRIVIVGGGTAGWMAAAALAHSFEGAGKTVILVESEAIGIIGVGEATIPEILKFNARLGIDEADFLRETKATFKLGIEFDGWRREGERYFHPFGAFGLDMEGIAFHHFWLKACAEGRSEPLETYSMAWQAARRGRFVHPQGGPQSPLSSLGYAYHFDAALYAGFLRRFAEGLGVVRHEGRVVEVQQAADGDIAGVKLDDGRIVEGDFFIDCTGFVGLLIEQALKSGYEDWSSWLPCDSAVAVPCEREEPLSPYTRSTAREAGWQWRIPLQHRVGNGYVYSSAHLSHQAAEDALMSRLEGKALAEPRRLRFTTGRRKDCWKRNCVAVGLSSGFLEPLESTSIHLIQSAITKLITLFPSRKDSEGLRREFNALMEEEFVTVRDFLILHYKITQREGAFWQQVRDMPIPDRLVAKIALFEETGRIVRRDHDIFSESSWLAVAVGQGLTPHGRHPISDVISRDANLSRLAAIRDSIWRTADALPTHEDVLATTMNRKAF

SEQ ID NO: 86182 - protein, 506 aa, Xanthomonas axonopodis
  misc_feature (1)..(506): tr|A0A1T1NSL2|A0A1T1NSL2_9XANT Tryptophan halogenase OS =Xanthomonas axonopodis pv. melhusii OX=487834 GN=Xmlh_ 19590 PE=4 SV=1
MIPAPLRNIVIVGGGTAGWMAAAAFARVLGPTFKVQLIESEQLGTVGVGEATVPHIKAFNNLLGIDEAEFVRQTQGSFKLGIEFVDWQRPGSTYMHGFGTQIGHPLGLLPFHQYWIKQHARGKAQPLGAYTLNTVAAARGKFMTSAGDVPANSPLANIAYAYHFDATQYAHFLRRYSQQRGVTRIEGLVEQVQLHPESGHVQSLQLASGQVVHGDLFIDCSGFGGLLIEQALHTGYHDFTHWLPCDRALAVPCEKVGPPAPYTRSTARAAGWQWRIPLQHRTGNGYVYCSAHISDDEAAATLLANLDGKPLADPRSLRFTTGRRKQCWNRNVVALGLASGFLEPLESTSIHLIQSGISKLLELFPREGISPVLVQRYNDRLAFEFDRIRDFLLLHYHATERDDSAFWRHCRHMPITPELQATLDLFRDSGRFYRNAEEMFAEISWVQVLVGQGILPQGYHPLVDQVPDRDAEGFLASVAQTIGHCVDVMPTHQQFIDRYCKAAAPR

SEQ ID NO: 86183 - protein, 509 aa, Sphingobium amiense
  misc_feature (1)..(509): tr|A0A494W2D1|A0A494W2D1_9SPHN Tryptophan 7-halogenase OS=Sphingobium amiense OX=135719 GN=SAMIE_1002480 PE=4 SV=1
MATVEGHQIRDIVIVGGGTAGWMMAAAASRVLADGRRRIRLIESDAIGAIGVGEATIPPIIGFNDLLGIDEDAFLSATKGSFKLGIQFENWGAVGERYFHPFGRTGRDFEGIPFHQLWHWLRDEEGVGPLEDYSMCAVAARHGRFAAPSADPRSPLSNLSYAYHFDAALYAAFLRAYAEERGVERIEGRILGAELDGESGNVAAVRMEGDRRVAGDLFIDCSGFRSLLLGEALGVRFIDWSHWLPCDRAIAVPTESEPAIAPYTRSRAHGAGWQWRIPLQHRTGNGHVFASAFMGEEEAQRILLDNLDTAATAEPRLIRFRTGVRERLWHRNVVALGLAGGFLEPLESTSIHLIQTGISKLLALFPDRRWADVERDEYNRLMTSGYGAIRDFIVAHYHVTRRADTPFWTYVRTMDIPDTLARRLALYRLKGRIFRYDDELFTVGSWSAVLNGQGLPPADVDPLTAALDGEALAGAMRKMRQVHENMAVRLPPHRRAIEQGQKMRSAQPV

SEQ ID NO: 86184 - protein, 69 aa, Bifidobacterium adolescentis
  misc_feature (1)..(69): tr|A0A1X2Z168|A0A1X2Z168_BIFAD Tryptophan halogenase OS =Bifidobacterium adolescentis OX=1680 GN=B0487_1053 PE= 4 SV=1
MSDYRDGYVQAICEIGAIAYERAAKARYREGLAYEAGEYEKESFWHAVAVTAEMFYDYCQERLNKEDAE

SEQ ID NO: 86185 - protein, 531 aa, Streptomyces sp.
  misc_feature (1)..(531): tr|A0A365ZHX8|A0A365ZHX8_9ACTN Tryptophan halogenase OS =Streptomyces sp. PT12 OX=1510197 GN=DEH69_12900 PE=4 S V=1
MDRRIKKIVILGGGTAGWMSAAYLARALGDTVRITVLEAPSIPKIGVGEATIPNLQRVFFDHLGLSEEEWMPECNAAYKVAVKFVNWRTPGEGQAAARTIDGRPDHFYHPFGLLPEHDGVPLSHYWVHNRHSGVTDEPFDYACFPGVALMDALKAPRDRDGRPVTWYAWHFDAHLVADFLRRHATSKLGVVHVEDEMTEPRLDARGFVTALATRSGALLDADLFIDCSGFRGLLINKALHEPFIDMNDHLLCNSAVAYALPNDDEAVGVEPYTSAIAMRAGWTWKIPMLGRFGTGYVYSDAFSTRDRATEDFCRLWGLDPDAYADKFNHVRFRVGRNRRAWVNNVVGIGLASCFLEPLESSGIYFIYAALYNLVKHFPDKGFDQVFTDRFNAEIEWMFDDTRDFIQAHFALAPRDDTPFWRANKELRLPDQIREKIAMYRAGLPINRPFSTEGEYYGNFDVEFRNFWTNGSYYSIFAGLGLVPDHPLPTLMHRQDSVEGAQHLFARVKEEQRELVDSLPSNYAHLRRLHGK

SEQ ID NO: 86186 - protein, 494 aa, Pseudoalteromonas sp.
  misc_feature (1)..(494): tr|G7F6N9|G7F6N9_9GAMM FADH2 O2-dependent halogenase I OS=Pseudoalteromonas sp. BSi20429 OX=1097676 GN=prnA PE =4 SV=1
MNQNAIKKIVIAGGGTAGWMCSAAMAKLLGKNIEVCLVESDLIPTVGVGESTIPTLHIFHDLLKISESEFMAATNATFKLGISFEGWKQNQQSYFHSFGYVGQGCWAAGFQHFWLKGMQQGVAADIGDYCTEHVASRLGKFAVVPNQDRNHAYQLDAGLYAKFLRNFAQQNGAKRIEGMISKVNLEPTNGFIKSLTLGDGQIIEGDLFIDCTGFKGLLIEQALHTGYEDWSHWLPCDSAVAVQTELVSPIVPYTRAMAHKCGWQWQIPLQSRRGNGLVFCSKYMSDDEAKTALLNNVEGKPINEPRVIKYRTGTRRKHWNKNCVAIGLASGFIEPLESTSIHLIQQSIIRLMQNMPTKAIESCYQDDFNNKMRFEAENIRDFIVLHYHVTQRTDSDFWRYCKNMPIPESLAKRIELFKQSGHVYKAEQELFGEASWLQVMLGQGLVPRNYHPIVDSMSDDELKRFLESIKNNVAKKANSLPSHIDFINHYCNAK

SEQ ID NO: 86187 - protein, 447 aa, Streptomyces sp.
  misc_feature (1)..(447): tr|A0A0N0ADP1|A0A0N0ADP1_9ACTN Tryptophan halogenase OS =Streptomyces sp. NRRL B-3648 OX=1519493 GN=ADL04_12680 PE=4 SV=1
MSNNSADVVVIGGGPSGAVSAYTLAKEGHSVVLLEREENPRFHIGESLLPYMMGLFDRIGIREAVESGGYVPKFGGEFIDPTETKFFSGVFRADFAKQGEGRYDRAFQVQRARFDRMLVEEAGKAGAEVHYGAVVGDLLMEGDRMVGVRYTKDGEEHEVRAQYVVDASGRAGRIAHKFGLRKTLEKLRMVAVFRHYDGLDEQHNLGVEGDIQVGAHADGWVWAIPLSKDVISVGTVMPRDVFRASTPEKVFEEHLARVPRITARLTGTRPIMDLKVETDYCYHTDTVTGPGWVMVGDAGCFGDPMFSGGVLVASATAVRAAENLSRALKNPEDADRLIAEYENFFKTGYDTYIRLIHAFYDGELVAVAADAGRTTDRDTLERYLIRLIGGDFWSEHNAVAQEMRRRTEWDTFEPFQRVFGCPSYPHLDEQDRKERAESRVRRVTAGQ

SEQ ID NO: 86188 - protein, 499 aa, Sphingomonas sp.
  misc_feature (1)..(499): tr|A0A0Q4FXR6|A0A0Q4FXR6_9SPHN Tryptophan halogenase OS =Sphingomonas sp. Leaf17 OX=1735683 GN=ASE75_02655 PE=4 SV=1
MTEPRIRPSIRRVVIAGGGTAGWMAAAAIARTMGGTIELTLVESDAIGTIGVGESTIPPMMTFNRLLGINEAEFMRETQATFKLGILFEGWKDVGDRYFHSFGVTGKDHWSAGFQHFWLHGLTRGHHQPYDDYCLELRAALQGKFAHLPDDRMNYAYQLDSTRYARFLRRMAEADGTRRIEGRIARVELDGESGDIAALELESGARIEGDLFLDCTGFRALLIEGALHAGFDDWSHYLPCDSAIAIQTESVKPALPYTRAIAHDAGWQWRIPLQHRGGNGIVYCSRYLDRDAALDRLLGTIEGRTLTEPNMIRFVTGARRQQWHRNCVAIGLSGGFMEPLESTSIHLIQRAVLRLLRLFPSGAVSPRDVAEFNDQQHTDMLQIRDFLILHYKATDRRDSPFWRQCAAMPVPASLEQKIELFRETGRVFRKNEELFAENSWVQVMLGQGIVPDRYHPIATKLPDAELARFLGQLRDGTNATVASLPEHAAYVARYCAAAA

SEQ ID NO: 86189 - protein, 486 aa, Flavobacteriales bacterium
  misc_feature (1)..(486): tr|A0A1Z9D5D0|A0A1Z9D5D0_9FLAO Uncharacterized protein OS=Flavobacteriales bacterium TMED113 OX=1986662 GN=CBC 73_05590 PE=4 SV=1
MKKVNKLVIVGGGTAGWITASWFSRRWGSKIDVTIIDKYQPERVGVGEATLLSFPSVMQKMGFRVEDWVKRIDATFKAGILFPGWGREDKVIWHPFGFTSIGDNKVPMYDIWSNYQSKYDVKEISPLYRTAMGNKIELDYIKDTYAYQIDCGKLVTFLHDNCNKICNYIQSDVKTVVKVDDDVEKIILEDGSEIKADLFIDCTGWNQLLIGKEDNVDLSDRLFIDSALAARVKYENPDKEMHPYTDCQAMEHGWRWRIPTRSRIGTGYCFNKNITSPDEVAKQFSEHWNGRIKPEDMRLLDWKPQMIDKFWKGNVVSIGLSAGFIEPLESTGLAMMIRGCEYLEESLYGCIYNPVFEPDIYNIRMKASFETAVDYVNMHYSYSERKGKFWDYVRLSHEKSGMQILMENQILDPNNETLQTDKISSFFGGTNWHIWLLQLMPEITKKTYWYPDTVDILSRFEKYIQTLDNNVKEATPQKILLKEWYG

SEQ ID NO: 86190 - protein, 127 aa, Streptomyces sp.
  misc_feature (1)..(127): tr|A0A429TYM1|A0A429TYM1_9ACTN Tryptophan halogenase (F ragment) OS=Streptomyces sp. WAC04770 OX=2487423 GN=EF9 08_38555 PE=4 SV=1
EYNRLTDVQMEQVRDFVILHYHANARREGDLWRRAREMAIPETLARKLALFRNRGRFFRTEDELFAESSWIAVLLGQGVIPAGWDPLADGLDEDKLALSFERIHEMFARAARAMPRHEEWLARNAPA

SEQ ID NO: 86191 - protein, 503 aa, Shewanella baltica
  misc_feature (1)..(503): tr|A9L4Z9|A9L4Z9_SHEB9 Tryptophan halogenase OS=Shewane lla baltica (strain OS195) OX=399599 GN=Sbal195_1209 PE =4 SV=1
MTTAIKRVVIAGGGTAGWMAAAALTKLMGKHLEIVLVESDEIGTVGVGEATIPTLHIFHRLLGLKEQEVMAATNATFKLGISFENWQDINKNYLHSFGFLGKDCWACGFQHFWLKGKQLGMVSEIGDYCAEHLAARQGRFAVLPNQDYNHAYHMDASLYAKYLRKMAEQHGIHRIEGKIKQVLQHHDSGNIKAIVLENDETIEGDLFIDCTGFRALLIEQTLNTGFEDWSHYLPCDSAIAVQTQSVGAPIPYTRSIARDSGWQWRIPLQNRTGNGLVFCSKFISDEDATELLLANLEGEPLNKPRVIKFKTGTRRLHWHKNCVAVGLSGGFLEPLESTSIHLIQRSIIRLMQLFPSAGIVQSDIDEFNQQTKLEMDNIRDFIILHYKATEREDSRFWRYCKNMDIPASLKHRIEMFADSGKVYKYGSELFGESSWIQVMMGQGIMPKHYHPIVDVMEEPELEAFLNNIKSTVKRKVESLPAHIDFIQHYCPAEVLANTKPMAM

SEQ ID NO: 86192 - protein, 543 aa, Shewanella baltica
  misc_feature (1)..(543): tr|A9L502|A9L502_SHEB9 Tryptophan halogenase OS=Shewane lla baltica (strain OS195) OX=399599 GN=Sbal195_1212 PE =4 SV=1
MQQATHTAINNIVIVGGGTAGWLTAALLAAEHNVDKGQLAHSPKLNITLIESPDVATIGVGEGTWPSMRNTLDKIGISETEFIRQCDASFKQGSRFIHWQHDDTEHTKPFDSNQYLHPFSLPHGHQELDLCPFWLPHSDKVSFAQAVSNQDALTQLGLAPKTIATPEYHFQNNYGYHLDAGKFSQLLMLHCTEKLGVKYIRDHVTQVHSHANGDIESLATKKHGVILGDMFVDCSGTKSLLLGEHFNVPFHSQKAVLFNDSALAIQVPYAEENSPIASCTLSTAQPNGWIWDIGLPTRKGMGYVYSSAHCSDDEAEQTLRAYLTNDTSTNPQSASSNALDSRKQECRKLNINPGYHAKCWQNNCIAIGMAAGFIEPLEASALALVEWTANTLATQLPTHRGVMDTIAQRVNERYERHWQQIIDFLKLHYVVSRREVDGYWRDHREAASIPERLQQQLDLWRYQAPSSHDISYKEPLFPAASFQYVLYGMGFNTTLPTHIKPSQQQVAQRLFSENQQKVHALSQSLPSNRDLLNKVRQFGFPKI

SEQ ID NO: 86193 - protein, 492 aa, Colwellia sp.
  misc_feature (1)..(492): tr|A0A396U051|A0A396U051_9GAMM Tryptophan 7-halogenase OS=Colwellia sp. RSH04 OX=2305464 GN=D1094_14535 PE=4 S V=1
MKKIQRVIIAGGGTAGWMAAAAFSKLLGKNLQITLIESDNIGTVGVGEATIPPIKTFHKLLGINEQEFMRETHATFKLGIGFEHWNKLNDNYIHSFGMTGKECWAGEFHHFWLHGKSKGVHAPFGDYCFELQAAKANKFALNQNVPINYAYHLDATLYAQYLRKFSEQLGVQRVEGKITNVSKQDATGDIASLTLDSGAEIEGDFFIDCTGFRGLLIEQALHTGYEDWSHWLPADSAVAVQTSSVNEPIPYTRSIARESGWQWKIPLQNRVGNGLVYCSKFLSDEQAKAQLLSNIEGETITEPKVIKFKTGRRRKGWNKNCVALGLSSGFIEPLESTSIHLIMSGIIRLLRLFPFDGIEQSAIDEYNSKLDSELNAVKDFIILHYKATSRTDSEFWHHCQRLEIPDSLTHKMNLFKSTGRVFLDDGDIFRVDSWTQVMLGQGILPNQYHRIADIMNDKELENFLSGLRQSISNAVEQLPSHAHFIDQYCRSR

SEQ ID NO: 86194 - protein, 498 aa, Pseudoalteromonas sp.
  misc_feature (1)..(498): tr|A0A4Q6JEB2|A0A4Q6JEB2_9GAMM Tryptophan 7-halogenase OS=Pseudoalteromonas sp. MEBiC 03485 OX=2571103 GN=EVU9 2_11495 PE=4 SV=1
MESKKITKVVIAGGGTAGWITAALLNKVLGKVLDITLIESAEIGTVGVGEASIPPILHLNGALGISEKEFIKATGATIKLGIEFENWRSQGHSYMHAFGEIGKDFPFCEFYHFWLKANQTQNAPDFWDFSLNYQAAKAHKFSHLSHIPNTQLAGLHYAYHFDATRYGEFLKELAQSRGVKRIEGKIESINQCHQSGYISSLLMQNGKQIDGDLFIDCTGLRALLIEETLNTGFEDWSHWLPCDSAVAMQSESATDAIPYTRSIAKDSGWQWQIPLQHRVGNGLVYSSRFLSDESAKQQLLDNLPAKPLTEPRIIKFKTGRRLKQWHKNVVSVGLSSGFLEPLESTSIHLIQSAAIRLIKFFPHQGIKQSLVDEFNKQSKTEFERIRDFIILHYKLTERDDTAFWRFCKGMDIPSSLKKKIELFKTSGKLVREDDELFAEVAWQQVMIGQGLIADDHHPLTDALSDEQLNELFSNLKTLINNTVEQLPSHSQFLEKVQN

SEQ ID NO: 86195 - protein, 527 aa, Paucibacter sp.
  misc_feature (1)..(527): tr|A0A3N7CHP7|A0A3N7CHP7_9BURK Tryptophan halogenase OS =Paucibacter sp. KBW04 OX=2153361 GN=DBR47_00440 PE=4 S V=1
MRSGVTSCAAGRGAELTMSGQPPAHIVIVGGGTAGWMAANLLARRWGGPQRPRCKISVLESAEIGIIGVGEGSTPFLRQFFQLLGVAEHEWMPACNATYKSGIRFPDWSTVPGYESYVHPFFNEQDRVTGTEFFLNACLRRRGAAADANPQDFFIAAALARACKAPVLPPDPQGRPQLQTDYAYHFDAALLGQFLRRHALSLGVVHKVDTVLGVQLAENGDIASLQLQGGAQLAGDFFIDCSGFKGLLINEALGEPFISYKDNLFNDRAIALPTALNPAADIPSETVSRALRHGWAWQIPLSSRYGNGYVYASDFVSDEEAELELRRLLGPAAEHSEARRLKMRVGRVERHWRNNCLALGLSQGFIEPLEATALMLIQLSLFNFMELFERAGFGRQQQGLFNQRINKMFEGVRDYVVAHYHLNTRRDSDYWRANRAHHHISNRLASILEVWDGGGDFEAELSRHGDALMYLRPSWYCLLAGMGRFPAELRPLDRPRLSGAQARAATEALVREQFPSHRQQLVALAEA

SEQ ID NO: 86196 - protein, 499 aa, Shewanella baltica
  misc_feature (1)..(499): tr|A9KUG1|A9KUG1_SHEB9 Tryptophan halogenase OS=Shewane lla baltica (strain OS195) OX=399599 GN=Sbal195_1436 PE =4 SV=1
MKVKQAIRKIIILGGGTAGWMAAAALANNPVFAAIELCLVESDNIGTIGVGEGSTPHLKRFMDNLGISEKDWMEQCHASYKTGIDFINWNGDGQQYFHPFYFQMDVKPAEVFFINANARRRGHGNAVKPDAFFSSGVLAKHNLSPRPNKTLPCANEYGYHFDATELANYLKDYACQRGVRQIIADVVEVSTSPNQQIETLILANGERLSADFFIDASGFSAKLIHKALGVPFQSFAEELLNDSAVTVPALMDSTQTQQAKYHTRATALSAGWLWQIPLTHRLGNGYVYSSRHLSANAAAKELLHSVNLPESTQVRFLKLRVGVSDKAWHNNVLAIGLAQSFIEPLEATSIMMTQFTLERFMSLFERYQLNKQAETLSRQTLNQAVMQLVLGIKDYIQAHYVTSQRSEPYWMAARKVAISQRLTQLLKAWYQGEDFDLLLYQYDQQLAYFRPSWYALLAGMDYRDPKLKRPFEPISADITAQAISYCQTLVEQYFQPKHS

SEQ ID NO: 86197 - protein, 526 aa, Sphingomonas sp.
  misc_feature (1)..(526): tr|A0A0Q4FRM3|A0A0Q4FRM3_9SPHN Tryptophan halogenase OS =Sphingomonas sp. Leaf17 OX=1735683 GN=ASE75_02640 PE=4 SV=1
MTTDTGDRPVQHIVVVGGGTAGWLSACLIAARADPRVRRPITVTLVESPDVATIGVGEGTWPTMRGTLERIGISETAFLLACDGAFKQGSRFDGWRTGAADDRYFHPFTAPIEGDPRDIVAAWADQPTHDGAGFAHRVGAQADMCARDLAPRQRAMPDYAGTLNYAYHLDAGKLAALLMRQATETLGVRHVRDHVVGIDTTGDGDIAAVRTRDNGAIAGDLFLDCTGQPALLIGGHYGVGTVDRGGELFNDRALAVQIPVAPDSAIASQTNATAHAAGWIWDIGLPTRRGVGCVYSSAHCSDDAAADTLARYCRRVAPDMAVPSFRQLTFQSRHRQRFWERNCLAIGLSAGFLEPLEASAIVLIELSLEALLDNFPVTRAAMDIHAARFNTLFRYRWDRIVEFLKLHYVLSRRKEPYWRDHRDPASIPDRLAELLRLWQHQPPSRADFPMIDEIFPAASYQYVLYGMGFSPPTSGPIASGSRTRAQILLGQMEQRKRQLAAGLPTNRAYLDALRRESGMPVLEPVA

SEQ ID NO: 86198 - protein, 454 aa, Pseudoalteromonas sp.
  misc_feature (1)..(454): tr|A0A4Q6JFP9|A0A4Q6JFP9_9GAMM Multifunctional fusion p rotein OS=Pseudoalteromonas sp. MEBiC 03485 OX=2571103 GN=trpF PE=3 SV=1
MANVLDKIVADKRIELEQRKAQRPLESFIEDVVPTKRDFEAALAATGTQFILECKKASPSKGLIREPFNLDEITSVYKKYATCMSVLTDEKYFQGSYQYLEYVRSQVEQPLICKDFFIDEYQVYLARLSGGDAILLMLSVLDDEQYLALHKVADSLNMSVLTEVSNEQEVSRALALNASLIGINNRDLRDLSTDLATTERLRQLIPNDKVVISESGIYTHKDVKRLAPLCDGFLIGSSLMAERDLEAACRKVILGENKVCGLTRSQDAMAAYASGAVYGGLIFYPKSPRYVDIDCAKQVTQSAPLAYVGVFVNAPVEQVVDYAQSLKLAAVQLHGDENSEYIQTLRKQLPLGCEIWKAQAVKGELPKPLEGVDRHLYDTYSKSQKGGTGETFDWSVLETATVPFMLAGGLNPENIHAALYRGANGLDLNSGVEASAGKKCQTKLQNAFSHIRNY

SEQ ID NO: 86199 - protein, 415 aa, Burkholderia multivorans
  misc_feature (1)..(415): tr|B9BIX1|B9BIX1_9BURK Tryptophan halogenase OS=Burkhol deria multivorans CGD2 OX=513052 GN=BURMUCGD2_5027 PE=4 SV=1
MNEMKSNSVDVAIIGAGPSGAVAAALLRKCGRSVLVLERQHFPRFSIGESLLPQSMCYLEEAGMLQAVVEAGFQFKNGAYFVHRDRTSSFDFREKFSDGWGTAYQVERATFDDLLIRCAASQGADVRFGHTVRAFEPGDMPRLDVVDEAGSEYAVEASFVLDASGFGRVLPRLLGLEAPTGLPTRAAIFSHVQDGLPAGSTDRDKICIAVHPDRRDVWFWMIPLTNGRSSVGCVADAAFLDVPEAQQESLLRELLQSEPTLARLVGSKPFVMPVRRIAGYASNVASLHGRGYALLGNAGEFLDPIFSSGVTIAMRSAHLAVAALERQLRGETVDWARDYDLALRKGIDTFRAFVERWYSGVLQDIVFHEDKASDVKRMVCSILAGYAWDEANPFVREPARGLDLLAEICRSNAAR

SEQ ID NO: 86200 - protein, 513 aa, Pseudoalteromonas sp.
  misc_feature (1)..(513): tr|A0A4Q6J994|A0A4Q6J994_9GAMM Tryptophan 7-halogenase OS=Pseudoalteromonas sp. MEBiC 03485 OX=2571103 GN=EVU9 2_00430 PE=4 SV=1
MQQNEVKKVVILGGGTAGWLSAGLIAAQPHLTHNAHITLIESPDIATIGVGEGTWPTMRQTLKTIGISESEFIQRCDASFKQGSRFDSWCDDEGDAHYYHPFSLPVAYQQLNIAPYWFANKDAVSFSHAVASQTYLCDHHKAPKNHLHSAYQGEANYGYHLDAGKFAMLLQQHCTTKLKVEHIVSHVESINSDEDGYISSLQTHDHGAITGDIFIDCSGTHAKLLHQHYGIELIEQQDVLFNDRAVAVQVPYLNPQQEILSYTKATAQDAGWIWDIGLQSRRGLGMVYSSRFASSEDAKHALSQYIAKTQPGTEQSELTFREISFNPGYRRRFWYKNCLAIGMSAGFIEPLEASALVMVELGLNNLLANFPTHRAAMPTLAKRFDEQCHYRWQRIIEFLKLHYVLSKRTSPYWQAHKEANSIPAQLQENLALWQYQSPWLNDFDRTQEVFSAASYQYVLYGMKQLPQFPVLAMPTAIIEHFSANQQQAKRGLQQLPTNRELLNHIQQFGIQPI

SEQ ID NO: 86201 - protein, 495 aa, Pseudoalteromonas sp.
  misc_feature (1)..(495): tr|A0A4Q6J8H6|A0A4Q6J8H6_9GAMM Tryptophan 7-halogenase OS=Pseudoalteromonas sp. MEBiC 03485 OX=2571103 GN=EVU9 2_19700 PE=4 SV=1
MRQQQIKQVVIAGGGTAGWMTAAALAKLLNKDIKICLIESDDIGTVGVGEATIPPIRTFHKLLGIDEQEFMRATQATFKLGISFENWHQPNSDYIHSFGMTGKECWAGEFHHFWLHWQKMGNTDDFADYCYELQAAKQGKFGISPQNPINYAFHMDASRYATFLRAFSENLGVKRIEGKIERVNKHSDNGFIKSLSLDNNTEIAGDFFIDCTGFKGILIEQALHTGFEDWSHLLPCDSAVAVQTKGTSDPLPYTRSIAHQSGWQWQIPLQNRVGNGLVYCSRYLNDHDATKLLLDNLIGDTLTEPKIIKFKTGRRRKGWNKNCLALGLASGFLEPLESTSIHLIMTGIIRFMRLYPFAGVTQQAIDEYNKQLKSELESIRDFIVLHYKVTDRQDSEFWRHCQAMEIPESLAHKIALFKETGRVFLDDGDIFRVDSWVQVMLGQGVKPKQYHYVASLMNDQELSRFMQGIKQQIAHRLAQLPTHKEFINKYCRIDD

SEQ ID NO: 86202 - protein, 504 aa, Colwellia sp.
  misc_feature (1)..(504): tr|A0A396U4V8|A0A396U4V8_9GAMM Tryptophan 7-halogenase OS=Colwellia sp. RSH04 OX=2305464 GN=D1094_00890 PE=4 S V=1
MKIKKIAIVGAGTAGWLAANHLGSELQHEDIQITVIESDKVPTIGVGEGTVPYIMKGLERFGISEAELLISCDATFKQGIKFVNWMKPEQEKEHFYYHPFDSPYPAGFDISRHMSNLETSRPFDDVGIQARICELGLAPKRKSSAEYQGDLAYAYHFDAAKFAKLLANNAIKKFNVNHVIATILGAKKDSAGNITHLLTDEDSELAFDFYIDCSGFSSVLIEKELSVPFVKKDKELLTDTVLVQQVPISESEALNPYTTATAHKAGWVWDIPLTTRRGTGFVYSSQHMSETEAKACYAKYLGVNEKDFSPRKIPMDIGYRESFWQKNCVALGLAQGFLEPLEATSILLSDFSAEMLAKNFPRTFSDIDCSYQYYNKVVTYAWERTVDFIKLHYCLSDRDDSEFWQQNSDKDALSAELKQRLNKFKLRPPLQSDFFSRFDLFNEKNFLYVLYGMNFNTQKAITSEKEQRHSEQLLEQNDQLVKQAANILLNHKEWLMALKAAMSE

SEQ ID NO: 86203 - protein, 484 aa, Sphingomonas sp.
  misc_feature (1)..(484): tr|A0A0Q4G2W0|A0A0Q4G2W0_9SPHN Tryptophan halogenase OS =Sphingomonas sp. Leaf17 OX=1735683 GN=ASE75_01060 PE=4 SV=1
MAAAALAALLPGRASVHLIESEEIGIVGVGEATLPHLRAFNERLGLDESAFMAATRATYKLGIEFRDWGRIGDSYIHPFGTFGRDIDGIAFHQFWSRMAAQGRAAPLEAYSLPVVAARMAKFAPHDDPDAAVPGFGYAYQFDATLFGPYLRRFSEDRGVTRTEGRVVDVTQDAQSGDVTALTLADGTIVTGDLFIDCSGFRSLLLGGTMAEPFQDWSHWLPCDRAIAAPCGGVGPLAPYTTAAAMPAGWRWRIPLQHRVGNGYVYSSAHVDDGAAEDSLVQAMESAPIVSPRKLRFRAGRRARSWVGNVLGVGLAGGFLEPLESTSIYLVQLAVQTLIELFPTPGEPVVSVDRDAFNRKVDLEYDRIRDFLILHYHATTRDDSPFWDHVRTMTIPDTLAAKMELFRRRGRIVQYGEGLFLEPSWVAVYLGQRVAQQGIDQRAMAIPADQLAAAMDRLARETQAFAQSMPDHAAYIARRGASMAA

SEQ ID NO: 86204 - protein, 520 aa, Arenicella xantha
  misc_feature (1)..(520): tr|A0A395JIW6|A0A395JIW6_9GAMM Tryptophan halogenase OS =Arenicella xantha OX=644221 GN=DFR28_10566 PE=4 SV=1
MQRSVRNIVIVGGGTAGWLTAGILASHYSDDPDTGLTISLVESPDVATIGVGEGTWPSMRTTLQKIGISETEFMRACDVSLKQGSRFNSWVTGANDYYYHPFSMPQGYSEFNLVPFWQTVREQVSFTDAVSPQGQLADRGLAPKQISTPEYAFQVNYGYHLDAGKFAEFLRRHCTEKLGVKHISDHVQTVHTHPNGDINGVHTSQHGLVTGDLFVDCTGFNGLLIDKHYEIPFNSVADTLFNDRALAVHVPYQRDNEPIASATLSTAQSAGWIWDIGLPSRRGVGHVYSSEFTSDEAAEVELRQYLEALVGRRQAHELTVRKIQFKPGHRASFWHRNCVAIGLSAGFVEPLEASALVLVEYAANMLAEQLPANRDVMDITAKRFNHKFAYRWQQIIEFLKLHYVLNQRDDAAYWQAHRHQDSVPDSLREKLKVWRHQAPWHLDTPHIDELFPSASYQYVLYGMGFVTYPQSLEARNASQQLAQANQLLHDNAKRTASLLNAMPNNRELINKVAEFGFQKI

SEQ ID NO: 86205 - protein, 503 aa, Massilia sp.
  misc_feature (1)..(503): tr|A0A354J0Z9|A0A354J0Z9_9BURK Tryptophan halogenase OS =Massilia sp. OX=1882437 GN=DDZ22_21160 PE=4 SV=1
MQNLPIKDIVIVGGGTAGWMTAAALSTILNGRYNIRLVESDEIGIVGVGEATIPMIQRFNRVLGIDEAEFMRATQGSFKLGVEFVNWGRKGERYMHGFGRLGQDLATVPFEQYWLKMRALGKAAPLEEYSIARMAAKAGRFMPARHDVPNSPLADIAYAYHFDASLYARYLRKLSESRGVTRVEGKIVRATQRPGDGYIDAVELENGARIGGDLFIDCSGFRGLLIEQTLQTGYEDWSGWLPADRALAVPCESVKTMTPFTRATAHQSGWQWRIPLQHRTGNGHVYCSRYISDDEAAATLLANLDAPALADPRLIKFQTGMRKQAWNRNVVAVGLAGGFLEPIESTSIHLIQSAIARLIEFFPDRGFQEVERAEFNRQSRFEYERIRDFIVLHYHLNQRTDSPYWLACANMAIPDTLRQKMDLYRARGKVVRVDNELFSEVGWIQVLEGQNMPVNAYNPLVDVQSEADIADYLDSVRGVIAKCVSVMPTHEEYIARHCAAPKM

SEQ ID NO: 86206 - protein, 507 aa, Lysobacter soli
  misc_feature (1)..(507): tr|A0A3D8VEC1|A0A3D8VEC1_9GAMM Tryptophan 7-halogenase OS=Lysobacter soli OX=453783 GN=DX912_09040 PE=4 SV=1
MSETDIRTRPIRRVVIAGGGTAGWMAAAALSRTLGKVLDITLVESEEIGTVGVGEATIPTLVTFHRLLEINEQEYMSAVKGTIKLGISFENWLDKGHRYIHSFGVSGKDHWSAGFQHFWLRGQKLGIASGYEDYCVELKAALQDKFAHLPRGGINYAYHMDASLYARYLRTLSQGHGARRVEGKIVEVVKDEASGFVTAVKLADGSMLEGDLFIDCTGFRALLIGQALGVGFTDWSHWLFNDSALATQTTAVRDAVPYTRAIAGSAGWQWRIPLQHRMGNGIVYSSRFMSDDEARHDFLSSIEGEVIKDPWPIRFKPGQRQKSWEKNVVALGLAGSFIEPLESTTIHLIQRGIVHLLRMFPQVIAQPDIDQYNAQLDSELAHVRDFVVMHYKLTNRRDTPYWQAVQDMEMPATLKHRIDLFRETGKVFRSSEELFAENSWIQVMMGQGVMPQQYHPTADVMSEPDLRRFLDDIRAHVDNTVRQLPPHQAYIDQYCPGVRAPEPAAAG

SEQ ID NO: 86207 - protein, 505 aa, Caulobacter sp.
  misc_feature (1)..(505): tr|A0A2T9K3R4|A0A2T9K3R4_9CAUL Tryptophan halogenase OS =Caulobacter sp. 774 OX=2172652 GN=DDF67_09345 PE=4 SV= 1
MSDQRVRSVVIVGGGTAGWMTAAALARTLSGQDLKIALVESEAIGTVGVGEATIPPILTFNAMLGIDERAFMRATKASFKLGIEFVDWGALGETYHHPFGTFGLDIEGIRFHQVWRKFKQAAGPIGDYNLTEAAARRWRFALPDPDPAKVMSSLKYAYHFDAGLYARFLRGFSEQRGVVRIEGRIGQVAQNGETGFVEAVVLEDGRRVEGDFFVDCSGFRGLVIGQALKVPYQDWSRWLPNNRAVAIPCELGGDGLTPFTRATAREGGWQWRIPLQHRIGNGYVYSSHHVDDQRALDTLLANLDGAPTDEPNLLRFTPGRRERAWEKNVCSIGLSAGFIEPLESTSIHMIQAGITKLLALFPGGGVDPLEIDEYNRLTAEQVDRIRDFVILHFHATRRDDTDYWRYLSSMTVPDSLARRMELFARRGRWFPSEYDLFHESNWLAVLLGQGIVPEEWDPLVDSLPEGEARQRLFQLSALIARTAEAMPSHAEFVARYCGAVQGVAA

SEQ ID NO: 86208 - protein, 521 aa, Sphingomonas sp.
  misc_feature (1)..(521): tr|A0A4D7CBU4|A0A4D7CBU4_9SPHN Tryptophan 7-halogenase OS=Sphingomonas sp. W1-2-3 OX=2567938 GN=E6W36_05135 PE =4 SV=1
MAEQRIRRVVIAGGGTAGWLAAAALSRQLGQMLDLTLVESEEIGTVGVGEATIPTIRAFHAILGLDEREFMRETLATFKLGISFENWAREGDRYIHSFGEVGRSTWMGDFQHFWLEARAQGIADPIGDYCLEHAAAEKGCFAIPSEGEISYAFHLDAGRYARYLRRRAEADGLRRVEGRIVDVERDGQTGDIAALRLDNGARVAGDLFLDCTGFRSLLIAQTLGVGYEDWTHWLPADRALAVQTATTAPAPPYTRAIAHDAGWRWRIPLQHRDGNGLVYSSRHLSDDAARERLLAAVEGETLIEPRLIRFQTGRRDRVWERNCIALSFASGFVEPLESTTIHLTMIGLSRLMQVFPFAGIQPSIVQRYNEQARNELERVRDFIVLHYHLNERPDPFWRACRETPPPESLQERIALFREAALAYQAGDDLFRVSSWLQVMLGQRLEPQAYHHMARIMGPERLAQALGNMRRAIADIVETMPAHQDFLNQYVQAPQPEPRRLHLPAAHSYRSANAWSHSLKRT

SEQ ID NO: 86209 - protein, 506 aa, Lysobacter soli
  misc_feature (1)..(506): tr|A0A3D8VA29|A0A3D8VA29_9GAMM Tryptophan 7-halogenase OS=Lysobacter soli OX=453783 GN=DX912_14490 PE=4 SV=1
MEKGRIRRVVIAGGGTAGWLAAAALTHQFRDLLDVVLIESEQIGTVGVGESTVPPIRNFHRFLQIDEQEFLREVAGTFKLAISFENWRRHGERYIHPFGITGQGTLVAAFHHFWLESLQRGMDSKLGDFCLETQAALADRFALPAQPQVNYAYHLDAGLYARFLRKRSEAFGLKRIEGKIREVRQNGESGFVEALVLEDDQVIEGDLFIDCTGFRGLLIEQTLKSGYEDWHQWLPCDRAVAVQTESTGGPVPYTRAIAHDAGWRWHIPLQHRVGTGWVYSSQHMSDDEATARLLKDAAATPIRDPWRVPFRSGRRLKAWNKNVVSLGLASGFIEPLESTSLHLSMTSIIRLIEAFPFDGIPESLTEIYNDTGRREMEHVRDFIILHYHANQRDEPMWKQCREMEIPDSLSIRLRAWRDRAHAWQGANELFRVDSWTHVMLGQGLEPQQHHPLTRALPDDQMRRFLDQIRKPIDEAVAKFPTQQEFIDRYCKAAPEVWGARRPAVQA

SEQ ID NO: 86210 - protein, 496 aa, Arenicella xantha
  misc_feature (1)..(496): tr|A0A395JG77|A0A395JG77_9GAMM Tryptophan halogenase OS =Arenicella xantha OX=644221 GN=DFR28_10569 PE=4 SV=1
MEHKKINKVIVAGGGTAGWMAAASLAKLLGKTLDISLIESDDIPTVGVGEATIPTMLTLHELLGINEREFVAEVNGTFKLGISFENWRDVDQDYIHSFGFTGKDCWAAGFQHFWLKGQQLGIAKDFGEYCGELIAARQNKFAVTPKNGLNYAYHIDAGRYAAYLRKLAEQHGAKRIEGKIVEVGLNSDSGDIESLTLASGQVVEGDLFIDCSGFRGLLIEQALHTGYDDWSHWLPCDSAIAVQTESLAAPIPYTRSIARGAGWQWRIPLQSRVGNGLVFCSRYLSDDDAKQLLLDNLEGAPINEPRVIKFRTGTRRKHWNKNCIALGLSSGFIEPLESTSIHLIQRGITRLMQMFPYDGIRKPDVAEFNAQMDAEIVNIRDFIILHYHVTNRDDTPFWRFCRAMDIPDTLRHRIELFKQTGRVFKGPNELFGENSWTQVMLGQGLLPEQYHPIVNMMSDDELSAFLRGIDQTVTNQVRQLPSHQQFIDHYCKSSAG

SEQ ID NO: 86211 - protein, 521 aa, Duganella sp.
  misc_feature (1)..(521): tr|A0A3E1S878|A0A3E1S878_9BURK Tryptophan 7-halogenase OS=Duganella sp. BJB480 OX=1871181 GN=D0T24_21820 PE=4 SV=1
MKTTAIKHVLIVGGGTAGWLTAAFLARTLGAGADPDSVRITLVESKEIGIIGVGEGTFPSIRGTLAAIGIDEARFIRECSATFKQGIKFTDWVRAPGAPGNDHYFHPFSLPSQRPGGPELLPYWLQGAAAPGAGFAAAATMQKRVADAAHGPKRFNDADFMGPLNYAYHFDAGKFAALLGTHARSLGVRHVLATVERVELDEQGAIGAVHTTEAGALTADLYIDCTGFRAALIGEALGTPFRNIQDTLFVDRALAMQVPYATPDAPIPSYTIATAHEAGWTWDIGLQQRRGIGYVYSSRHTDDARAEQVLRRYIGPASDGLDPRQLKLNVGYREQHWVKNCVAVGLSGGFLEPLESSGIGLIETAAYLVGYLFPHDGDLAPVARVYNEMMKARYERIVDFVKLHYCLTQRRDNAFWTDNTDPASIPESLRDKLAMWRKRAPHRMDFVVDLEMYPPSSWQYVLYGMEYATAQYANARTLPRFDEARREFQMIEQMSHRAVADLPTHRALVEHFLQRGERKFA

SEQ ID NO: 86212 - protein, 516 aa, Massilia sp.
  misc_feature (1)..(516): tr|A0A353HYR7|A0A353HYR7_9BURK Tryptophan halogenase OS =Massilia sp. OX=1882437 GN=DDX04_19420 PE=4 SV=1
MASSTIRHVVIVGGGSAGWLTAGLIAAEHRAASPDGLRVTLIESPDVAPIGVGEGTWPSMRDTLRRIGVSESDFLRECDAAFKQGSLFARWSTGQDNDYYFHPFSLPQGYGDASLVERWQQAHAQVPFADLASYQPHLCMAGRAPKQAATPEFAAVANYGYHLDAGKFGVFLKKHCLERLGVHYVPDHVLGIASHENGDIAALRTQSHGLLAGDLFVDCTGMRSLLLGQHYGVPFLSQQHVLFNDTALAVQVPYASEDMPIASQTTSTAQQAGWIWDIGLPTRRGVGHVYSSAHTTDEEAERALRAYVVASGGPRDCPAPRKIGFQPGYRERFWHRNCVAVGLSSGFIEPLEASALAMVELSAAMICDEMPVTREHMDVVARRFNDTFRYRWERVIDFLKLHYVLSRREDSAYWLHNRAPESIPERLRELLSLWRYRAPMRGDFPRIEEVFPTASWQYVLYGMGWRNDAGATRRADGALADAFFREAADLTRRMLPALPANRELLAHIRAYGLPRT

SEQ ID NO: 86213 - protein, 499 aa, Pseudoalteromonas phenolica
  misc_feature (1)..(499): tr|A0A4Q7IL91|A0A4Q7IL91_9GAMM Tryptophan halogenase OS =Pseudoalteromonas phenolica OX=161398 GN=C1E23_12735 P E=4 SV=1
MQKKINDVVIVGGGTAGWMTANLLAKVLSKSINVTLLESDDISTVGVGEATIPPIMQFNQAIGVNEHAFMQASKATIKLGIQFENWLRPEHNYMHAFGSIGKNFPFCDFHHFWLKQQNKNDQVNNLTYWDFSLNYQAAKHSKFQKLKHLPNTNLPGIAYAYHFDAGLYAKFLTEHGKQQGVNHLIGTVKQVNQNHETGFIESLLLDDDTQLSGDLFIDCTGMHALLIEKTLSTGYEDWSHWLPCDRAMAVPSENAETVVPYTRSIAHHVGWQWQIPLQHRTGNGLVYSSKHMSDEEAKQTLLGNMPGKPLSDPRIIKFRTGRRRKVWNKNVISIGLSSGFLEPLESTNIHLVQSVATRLLKFFPHNGISQTLVDEFNRLCKAEVEGIRDFIILHYKLNARTDSAFWRQCQQMDIPDTLNTKIELFKQTGKVHCEPNDLFTEIAWQQVMLGQGITPTDTHPLVDGLSDEQIEDMMESLRTLVDKTVANMPTHQDFLMQFK

SEQ ID NO: 86214 - protein, 499 aa, Duganella sp.
  misc_feature (1)..(499): tr|A0A3E1SEH8|A0A3E1SEH8_9BURK Tryptophan 7-halogenase OS=Duganella sp. BJB480 OX=1871181 GN=D0T24_06775 PE=4 SV=1
MADKAIRKIVIVGGGTAGWMTAAPLALKLGRACDIVLVESPEIGTVGVGEATLPTIRYFNQALGLDLSDFVAKTKATFKLGIEFKDWGHLGNRFFHGFGDFGPDIEGRSSYLYWQRLAREIHDMPPYEDWSVAAVMARNHRFTPPSGDQPSASNAYSYAYHFDAGLYAAYLRDYAVARGVARIEGYIDEVEQHPQTGNIAAVKLRDGRRVEGDLFIDCSGFRGLLIEGVYQAGYDDWSAMLPCNSAQAVPCASVERFTPYTVSAAKSAGWTWRIPLQHRTGNGHVYCDGFTSDAEASRVLLDGLDGRALDEPRQLRFTTGRRRKMWIKNCVAIGLSGGFLEPLESTSINMIENAAGWLLELFPDRDFRPELADEFNRRAASRYESVRDFIVLHYKLTKRTDSEFWRYCADMAIPDTLTHQIELFRETGRMVIYDKEGFSASSHIAILAGLGVAPRADDALIHLMDMRKLHAHYYQLRQVIAQTVNAMPGHTHYLRQLAG

SEQ ID NO: 86215 - protein, 499 aa, Pseudoalteromonas phenolica
  misc_feature (1)..(499): tr|A0A0S2K7E4|A0A0S2K7E4_9GAMM Tryptophan halogenase OS =Pseudoalteromonas phenolica OX=161398 GN=PP2015_3630 P E=4 SV=1
MQNKINNVVIVGGGTAGWMTANLLARVLGKSINVTLLESEDIPTVGVGEATIPPIMQFNQAIGVNELDFMQASKATIKLGIQFENWLKPNHHYMHAFGSIGKNFPFCDFNHFWLKQQNKNDQVDNLTYWDFSLNYQAAKHNKFQKLKHLPNTNLPGIAYAYHFDAGLYAKFLTEHGKQQGVKHVIGTVKQVNQNHETGFIEGLLLDNDTQLSGDLFIDCTGMHALLIEKTLSTGYDDWSHWLPCDRAMAVPSENAETVVPYTRSIAHHVGWQWQIPLQHRTGNGLVYSSKHMSDEEAKQTLLGNLPGKPLNDPRIIKFRTGRRRKIWNKNVISIGLSSGFLEPLESTNIHLVQSVATRLLKFFPHNGISQTLVDEFNRLCKTEVEGIRDFIILHYKLNARTDSPFWRLCQQMDVPDTLKTKIELFKQTGKVHCEPNDLFTEIAWQQVMLGQGVTPADIHPLVDGLSDEQIKDMMESLRTLVDKTVENMPTHQDFLSSLT

SEQ ID NO: 86216 - protein, 507 aa, Duganella sp.
  misc_feature (1)..(507): tr|A0A3E1S519|A0A3E1S519_9BURK Tryptophan 7-halogenase OS=Duganella sp. BJB480 OX=1871181 GN=D0T24_22725 PE=4 SV=1
MVRRIVIVGGGSAGWLTAGLIAADHQGSSLHITLIESPDIAPIGVGEGTWPSMRDTLRRIGVSESDFFRECDASFKQGSRFNRWVTGADNDYYFHPFVLPQGYDEVNLPEQWLAQHPDIPFADLVSYQPHLCVNGRAPKQVVTPEFSSVANYGYHLDAGKFGVFLRKHCLEKLGVHYVPDNVAGVASHDNGDIAALHTQAHGALEGDLFIDCTGMQSLLLGKHYQVPFLSQKHVLYNDTALAVQVPYPDDNYPIASQTSSTAQSAGWIWDIGLPTRRGVGHVYSSAHIGGEQAEAELRRYISDTGGPQDIPPPRKLSFNPGYRERFWHRNCVAIGLSAGFIEPLEASALALAEMSAAMVSDELPATRAAMDIVAARFNEAFTYRWERVIDFLKLHYVLSQRRDSDYWRDNTASVPERLGDLLTLWRHRAPSRNDFNRIEEVFPWASYQYVLYGMGFRSEFTNPQPRQAALADGYFREAAELTHKMLGGLPDNRTLINHIKRHGLQKI

SEQ ID NO: 86217 - protein, 503 aa, Alteromonas mediterranea
  misc_feature (1)..(503): tr|S5AL77|S5AL77_9ALTE Putative tryptophan halogenase O S=Alteromonas mediterranea 615 OX=1300253 GN=I633_20160 PE=4 SV=1
MAYGWRIAAQHQCATRKDIKVTLVESPNVPIIGVGEGTWPTMRSTLIALGISETTFIKECDATFKQGAKFAKWTTGEESDFYYHPLMLPQGFSQTNLGPYWQTVAPELNESFSHAVCVQEAICEAGCAPKSIRHAEFAGTANYAYHLDAGKFTAFLTKHCTEKLGVHHVLADVNRVESFDNGDIKALHTEQGVIVEGDLFVDCTGFKSMLLGEHYKVPFIPCDDVLFIDRALAVHVPYDTPQSPIASHTISTAQDAGWIWDIGLQSRRGVGHVYSSRHQSKDDAYARLDTYVRQTSSLNGIDDINVKDITIQSGHRQRFWQNNCVAVGLAAGFLEPLEASALVLVELSASMIAEQLPANRAVMAIVAKRFNDTFSYRWQRIIDFLKLHYMLSKREDSAFWRDNRDSHTIPDSLKELLALWQYHPPSDKDFTSNNEVFPAASYQYVLYGMGFTSQLGTHQQWVNADFAKQQLMQNRKARSMAVEKLPKHRELINKIHQFGLQAV

SEQ ID NO: 86218 - protein, 518 aa, Pseudoalteromonas phenolica
  misc_feature (1)..(518): tr|A0A4Q7ILL2|A0A4Q7ILL2_9GAMM Tryptophan 7-halogenase OS=Pseudoalteromonas phenolica OX=161398 GN=C1E23_15605 PE=4 SV=1
MSAIRQVVIVGGGTAGWISAALLAKKLNTINPGSVQITLVESPDIPIMGVGEGTWPTIRKTLAEIGIAEDEFIRECDASFKQGAEFVNWYQNPDEIGKHSYFHPLNATFHAAYDFNLAPYWLLDQSEHKLPYDMATASQSYISQQGLAPKLITTPQYDAILNYSYHLNAAKFADLLTKHAVKLGVKHIKANVQNVALDTAGFIKQVDTDSAGSINGDLFIDCSGSKALLLNGALDVKWKSISDYIFNDTALAIQVPYEDESAPIASNTIATAHQHGWTWDIGLQNRRGVGYVYSSNHTSDENAYDTLLQYLGLQDTDLNIRKIPLNLGYREKFWHKNCVAVGMSAAFIEPLEASAIFLIEAAVNMIAEQFPHHRDNLSFVEKQFNDTFTLRWKKSVDFIKLHYCISKRKDTQYWIDNTSEASIPKSLQEKLAFWRHNVPSKFDFDYAFEPFVLDSYLFVLYGLEFETDLSLKQSCYLHKQEAAKKMHEVQKFNQQLASGLSTNRDLIDKILKNGLSKI

SEQ ID NO: 86219 - protein, 516 aa, Novosphingobium sp.
  misc_feature (1)..(516): tr|A0A2T6M738|A0A2T6M738_9SPHN Tryptophan halogenase OS =Novosphingobium sp. GV027 OX=2135689 GN=C8K10_104399 P E=4 SV=1
MSGTSPRAIRSVCIVGGGSAGWLTAGLIAARHGRDLAVTLVESVSRGTIGVGEGTWPTMRNTLRKIGLAETDFMRACHASFKQGAKFARWRTGAADDFYYHPLVLPEGFPDLDLAPYWNSAEQGIGNGGPSFSDAVCFQEYLCEQGLAPKLMTSPDYAGIANYAYHLDAVKLGELLATHCTGKLGVNHIDDEIVGVTRRDDGDIAAVIGRDSGAIAADLFVDCTGFSSRLLGEALEVPFIDRSDVLFIDRALAVQLPVEEDSPIASHTISTAQKHGWIWDIGLPTRRGIGYVYSSRHAGADRAEEELAAYVGPGFAKLTPREIPIRSGHRAQFWKNNVVAVGLAAGFLEPLEASALVLIELSADYIATSMPATRQAMDFVARRFNSMTRYRWDRIIEFLKLHYVLSERSDTAFWRDNRDPATIPQDLQDQLELWRDTPPGEHDFASAHEMFPAASYQYVLYGMGFRTRPRAGQLAQRDMADDAFARTAAMKRKLGQMMPTNRALLDKLAQHRFPPL

SEQ ID NO: 86220 - protein, 524 aa, Shewanella frigidimarina
  misc_feature (1)..(524): tr|A0A106BXB7|A0A106BXB7_SHEFR Tryptophan halogenase OS =Shewanella frigidimarina OX=56812 GN=AWJ07_08245 PE=4 SV=1
MQKPITEIIIVGGGTAGWITAGLLAAEHNVDKGVLAHSPKLNITLIESPDVATIGVGEGTWPSMRSTLSKIGIDENDFIRQCDASFKQGSRFINWCADPQSKVTDSYLHPFSLPHGHQELDLCPYWLPHAEQVSFAEAVCSQQVLTQLGLAPKSIATAQYHFQNNYGYHLNAAKFSQLLTEHCTQKLGVTHIRDHVSQIINNQYGDIEKLITKQNGEISGQLFIDCTGAKSLLLGEHLQVPFLCQKSVLFNDRALAIQVPYSDANSPIASCTHSTAQSNGWIWDIGLPTRKGVGYVYSSSHTNDIDAQQTLFNYLGVDGAAADKLEPRQLTINPGYRAKCWQNNCIAIGMAAGFIEPLEASALALIEWTASTLAQQLPPNRMVMDTIATRVNERYQLHWQQIIDFLKLHYVISRREVDGYWRDHRESNSIPDSLQAMLELWRYQTPSQQDISYKEALFPAASFQYVLYGMGFNTQLPTHVKPSMQQLAQRLFNDNQQRTQALSKNLPTNRELLDKVAQYGFPKL

SEQ ID NO: 86221 - protein, 499 aa, Novosphingobium sp.
  misc_feature (1)..(499): tr|A0A2T6M1X7|A0A2T6M1X7_9SPHN Tryptophan halogenase OS =Novosphingobium sp. GV027 OX=2135689 GN=C8K10_10726 PE =4 SV=1
MTDRPLRIVVAGGGTAGWMTAAALARTLGPVAIVTLVESEAIGTVGVGESTIPPLVAYNRLLNIAEADFMRATSATFKLGIAFENWKAPGESYFHSFGGTGRDHWSAGFQHFWLHGLSRGHAAPYGDYCLELMAAQAGRFAHLPDGRMNYAYQLDSGRYAAFLRRLAEGDGATRIEGRIARVELDGDSGEIAALHLDGDRRVDGDLFVDCTGFRALLIEGALHAGFDDWTHWLPCDRAIAVQTASVRPPVPYTRAIAHDAGWQWRIPLQHRQGNGIVWCSRYLDEDQALDRLLSSVEGQVLTEPNRIRFTTGARRRQWVKNCVAVGLSGGFMEPLESTSIHLIQRAVLRLLRLLPVAARPDPADIAEFNEQQWADMVQIRDFLILHYKATERRDSPFWRHCAGMEVPESLSHRMDLFARTGRVFRKNEELFAENSWVQVMMGQGITPAAYHPVAAKLRDDELERLLASLRREVADTVQGLPGHAAYVDHYCGARTGAAA

SEQ ID NO: 86222 - protein, 515 aa, Novosphingobium sp.
  misc_feature (1)..(515): tr|A0A2T6MCZ0|A0A2T6MCZ0_9SPHN Tryptophan halogenase OS =Novosphingobium sp. GV027 OX=2135689 GN=C8K10_101342 P E=4 SV=1
MPHDTAPSHIRSIVIAGGGTAGWMVAAALSRTIAPHRCRITLVESETIGTIGVGEATIPPIQTFNQVIGLDEAAFLQATKGTFKLGIEFAGWRAREHRYFHPFGRQGNDFGGTQFHQHWLRAQALGDDTPLGAFSLNEQAAYAGKMRQPDGDPRSVYSTFSYAYHFDATLYGQHLRALAEERGVERREGLIQEVVLDGECGRIASLRLDDGGMLDGDLFIDCTGLRSLLLGEALGVPFEDWTHFLPCNRALAVPTDCVDLMRPYTRSTAHEAGWQWRIPLQHRMGNGMVYSAEHWSDDQAHAALMANLDGQPLADPRLIRFTTGRRVQSWAKNCVAIGLSAGFLEPLESTSIHLVQIAVAKLLNWFPDMGFDPMTMAEFNRQIANEYDRIRDFLVLHYHANEREGEPFWDQCRTGAIPDSLAEKIAMFRRSGRLLSRETDLFQDASWLAVLLGQGVMPQAHDPLTESLRPLELDQMLRGMRDLIGRAAQAMPSQADHLARIGGTIANAQREAALG

SEQ ID NO: 86223 - protein, 423 aa, Pedosphaera parvula
  misc_feature (1)..(423): tr|B9XK92|B9XK92_PEDPL Tryptophan halogenase OS=Pedosph aera parvula (strain Ellin514) OX=320771 GN=Cflav_PD255 1 PE=4 SV=1
MSENYDAILIGGGPAGSCAAAILAEYGHRVLIIERAKFPRYHIGESLIPFTFAPLERIGMIPKMKASHFVKKYSVTFVQPDGRRSQPFYFFNRYDRETVAQTWQVLRSEFDQMLLDNAREKGAEVREETNVNRLLVEGGKVVGVEATDKSGRTYEVRAPITLDCTGKEAFTANRFNWRMRDPYLNKIAVWTYYRGSKREADIDEGATTVAYVPEKGWFWHIPQHDDMVSVGIVAEGKYLTRGGVKSARDIFNREVDENQWIKDHLLSGESTGEYFITSEYSRHSQHCAAPGLLLLGDALAFLDPVFSSGVMLALKSGHLAGEAVHAGLVEGDLSPARFTEYGTTIRQGVENMRKLVYAFYDPKFSFREVIKKHPEAAGQITDCLSGDVNKDFSELWGWIREFVPLPEDLPYGEPLSEAVDWKG

SEQ ID NO: 86224 - protein, 454 aa, Streptomyces varsoviensis
  misc_feature (1)..(454): tr|A0A0L8QRN5|A0A0L8QRN5_9ACTN Tryptophan halogenase OS =Streptomyces varsoviensis OX=67373 GN=ADK38_13125 PE=4 SV=1
MPRTTRRTTDPEYDVIVVGGGPGGSTVATLTAMRGARVLLLEKERFPRYQIGESLLPATVHGIGKLLGVLPELEAARFTTKRGGTFRWGKSPEPWTFAFAVSSRFPGPTSTAYQVERMRFDQILLDNARRKGVEVRERCPVVDVLEADGRVGGVRFADPDGVRRGRIHGRTGGRRVYSEFFKNIALFGYFEGGRRLPEPNSGNILCAAFESGWFWYIPLTDQLTSVGAVLHRDALERVQGDREQALARLIEECPLIAEYLADARRVTTGPYGEIRVRKDYSYCQERFWRPGMVLVGDAACFIDPVFSSGVHLSTYSALLAARSINTVLSGGPGSPDETRCFEEFEARYRDEFGRFHDFLMSFYDMRQDSDSYFWTARRITHATGSPLEAFVELVGGGASDEGALFDSPFVDATLEAGAKVQVQAALGESFDDEPIRENGLVPSLDGMRWTDPGS

SEQ ID NO: 86225 - protein, 515 aa, Shewanella frigidimarina
  misc_feature (1)..(515): tr|A0A106BZ61|A0A106BZ61_SHEFR Tryptophan halogenase OS =Shewanella frigidimarina OX=56812 GN=AWJ07_18490 PE=4 SV=1
MNQPIKHIVILGGGTAGWITAGTIAAHLLKNADSGFSVTLIESANIPPIGVGEGTWPTMRRTLKKMGIRETDFIKQCNVSFKQGAKFVNWVEDNDEYYHPLMLPKHPEQIDIIQQSLHVNPQFTFADLVTPQGIICEQGLAPKNITTPEFDAIANYAYHLDAGKFSEFLKQHAITQLNVNHIVDDVTKVNSHLNADIASLVTRNNGNISGDLFIDCSGTHSILLGEHYQVPFISCKDVLFNDRAIAVQVPYDEINEPITSHTISTAQTCGWIWDIGLENRRGVGHVFASDYINDEDATEQLKRYLRPRVKDVDALTFRTIPFNPGHRHHFWHRNCVAVGLSAGFLEPLEASALLLVEISASMIAEQLPACREVMDITAKRFNETFLYRWQRIIDFLKLHYILSKRTDSQFWINHRNPDTIPESLQNLMTLWRYQPPSDDDFIHAVEVFPAASYQYILYGMGFYTQESHLGVSKQKQQQTIVGVENNKMLTHKMLSMLPSNRELINQIKQYGLQKI

SEQ ID NO: 86226 - protein, 533 aa, Streptomyces sp.
  misc_feature (1)..(533): tr|A0A1C4LYS3|A0A1C4LYS3_9ACTN Tryptophan halogenase OS =Streptomyces sp. SolWspMP-sol7th OX=1839776 GN=GA01152 46_106079 PE=4 SV=1
MPETDNRIRKVVILGGGTAGWMTASYLGKALQGTVDIQVLEAPAIPRIGVGEATVPNLHRVLFDYLGIPEEEWMRECNASFKMAVKFVNWRTPGRGEPDSRTRPDGKPDHFYHPFGILPDHDNTPLSHYWFKNKYEGVTDKAFDYSCFREPPVMDAKKSPKWMDGESSTRYAWHFDAALVADFLRRFATDKQGVEHIQDEMVRAEQDERGYVTALHTKSGRVLDADLFVDCSGFRGLLINKALGEPFIDMSDHLMCDRAVATAVPHDDDANGIEPYTSAIAMSSGWAWKIPMLGRFGSGYVYSSRFTTQEEATREFCELWNLDPETTKFNHVRFRVGRNRRAWVNNVVSIGLSSCFLEPLESTGIYFITAAIHQLAKHFPDRTFPQALVDSFNEEIEVMFDDTRDFIQAHFYYAPRDDSEFWRAQKTLKLPENIQRKIAAYKAGLPINSPITDESTYYGNFEAEFRNFWTNGSYYCVFAGLGLEPDAPLPALAHKPESVAGAQPLFTKVAQEQRHLLDTLPSAHDYLRRLHAK

SEQ ID NO: 86227 - protein, 520 aa, Cellvibrionaceae bacterium
  misc_feature (1)..(520): tr|A0A2E2XDW5|A0A2E2XDW5_9GAMM Tryptophan halogenase OS =Cellvibrionaceae bacterium OX=2026723 GN=CL693_03575 P E=4 SV=1
MTHAIKKIVIAGGGTAGWITAGLLARHYHPLSNSGISIVVIESAEVPIVGVGEGTWPTMRRTLQKIGIPESDLIRHCHATFKQGSQFHNWKSERQPHQYTHPFNAPLQAQPELSGYWCQDPTSVFADSLDVQRQLGQQGLAPKHGDMPEYAGLLNYGYHLDAGVIAELIKQHCVNKLQVQHRIGTITQVYRSDNGDIDSLELEPALNTETEHAASNSVSGDLFIDCTGFSALLIGKTLGVKLKPQDHTLFADRALAVQVPNPQKDSPISCFTQATAQQAGWIWDIGLSHRRGVGYVYSSNHSNREQAEQALANYVGKQYAQLSVRELNINSGYRKQFWQGNCVAVGLSAGFIEPLEASALMLIELSANMICERLPATRAAMTTVAKQFNQSFNTRWEGIVDFLKLHYVLSERESDFWRDNRQPNSISDRLQELLKLWQHHVPSGYDFDTRNEVFSWASYQYVLYGMDFQTNVIAERLVHRSIYEKTQQARQKKMVTLQQQLPNHRQLLESIVERSHSVDS

SEQ ID NO: 86228 - protein, 502 aa, Photorhabdus thracensis
  misc_feature (1)..(502): tr|A0A0F7LR25|A0A0F7LR25_9GAMM Tryptophan halogenase OS =Photorhabdus thracensis OX=230089 GN=VY86_05165 PE=4 S V=1
MTAAYLSKAFAQNVDITVLESKRVKKIGVGEATFSTVRHYFDYLGLDESEWLAKCAGSYKLGIRFENWDGQDNHFYHPFERWETVKGFPISEWWLRKSTTNQGFDYATFLTPHLCEAKRSPRRLDGSLFAQSSDKSLGQSTLAEQRAQFPYAYHFDADEVANFLKRYAMNRGVSHIEDDVTHVEIDENGNIGHLETKIRGKLKADLYIDCTGFKGLLINQALNEPFVSFSDVLKNNRAVALRVSREDTRDIEPYTTARTMSNGWRWTIPLYKRNGYGYVYCDEYQSPEEAEAELRRSIPYENADCAANHIRMRIGRSNRSWVKNCVAIGLSSAFVEPLESTGIFFIQHGIEQLVRFFPRSSSNELLIEEYNTRVNRVVDGVKEFLLLHFSLAQRNDTLYWKEWKNIELPKELLKKIMLAKDHLLDKETIYPFYHGFEEYSWNTMILGLSSGSLTSKPALSLMIPDKADEILLQHHVKAKKMVSGLPTCHEYLQYLHNSEDRN

SEQ ID NO: 86229 - protein, 501 aa, Alteromonas mediterranea
  misc_feature (1)..(501): tr|S5AIS2|S5AIS2_9ALTE Tryptophan halogenase OS=Alterom onas mediterranea 615 OX=1300253 GN=I633_21345 PE=4 SV= 1
MTALGLDSSNNQTPIKNVVIAGGGTAGWMAATALSRLLGKSVSVTLVESKDIGIVGVGEATIPPIRTFHKLLGIDEKAFMRATQATFKLGIEFENWREVNHSYIHSFGITGRECWAGEFHHFWLRAQDYGFGGDFGDYCPELIAAKQNKFATSDAMPLNFAYHFDAVAYGRFLKSLACDAGVTHREGDIEKVTVCPNTGNIQALHLTNGESIGGDFFIDCTGFKGLLIEQALHTGYDDWSHYLFCDRAVAMQTELTSPPVPYTKSVAHKAGWRWQIPLQERMGNGLVYCSRFMSDQEAIDTLKSQVSSTPINELRVIRFTPGKRRRGWNKNCVALGLSSGFIEPLESTSIHLIMTGLIRLMRLFPFDGITQSAVDEYNNKFDSEMSAILDFIVMHYKVTQREDSPFWQQCQRMDIPDSLKHKLALFAESGRVFLDDGDIFRVDSWTQVLMGQGMKPQQYHRVADEMSEQSLKQFLAGLKQQVDNHIAKLPAHEVFLTQYLG

SEQ ID NO: 86230 - protein, 505 aa, Caulobacter sp.
  misc_feature (1)..(505): tr|A0A2T9K1E8|A0A2T9K1E8_9CAUL Tryptophan halogenase OS =Caulobacter sp. 774 OX=2172652 GN=DDF67_11755 PE=4 SV= 1
MSRPVRTVVVAGAGAPLWLATLALRKAFGAGGLAVLAVETAPPTPGLSHAGLPAMGNLHQLLGLSEVELSRRCGAVPSLGQRFAGFSGDGSAFLHPYDTHGHAVDYVDFVHHWVLARKRGLKTALEDFSLGAAAAKQGRIVEGDDPGRLSSPGAGLHVDAAAYATLLRQRALVDGVTVEQGALADIERSGERIDAVVLESGARIAGDLFVDVGDGALIGQMPGAAFESWARWLPFDRVLPLAGQRLKTLPAYAHIEAVEGGWIGLYPLQDRTAGLAVYDSRTADAGLMARRAEGVSPLGWRQGEAQALRPGMQTRPWIGNCVALGAAAIALDPSDAAPMHAFQAGLSHLVSLFPADAGGGAEAPEARAYGAALAAQGRGLRDFQAMHYNLNRRAGAPWEAVRESEPPAELAYRLRLFGARGVVPAREDEAFQPANWAACLIGHGLIPQAHDPLAEGVAEAEQIQIFQNILGRIAADVGRMRPLEARLASLASRPAASAPAPLRFT

SEQ ID NO: 86231 - protein, 507 aa, Duganella sp.
  misc_feature (1)..(507): tr|A0A3E1S644|A0A3E1S644_9BURK Tryptophan 7-halogenase OS=Duganella sp. BJB480 OX=1871181 GN=D0T24_21370 PE=4 SV=1
MVKGRWISKVVILGGGTAGWMTAAALSHTFGRAVEIVLVESDAIGTVGVGEATIPPIRMFHQMIGVNEAEFMRATGATFKLGIEFRGWLKEGSKYFHPFGSYGVERDIGYFFQYWLRLKDKGQVPDFSEFSLCTLAARSNVFAPPSEQPGDPLQHLQSAYHFDAGRYAKYLKGLCLERGVSHKIGDMLTAERDAENGHVTSLKLKSGELLSGDLFIDCSGMRAMLIGQELGVEYEDWSRWLPMNRACAVPCELKSALTPYTISTARPFGWQWRIPLQHRVGNGVVYSSEFGTDEAAERCLLDGLEGTPLAPVNRLKFTAGRRRTPWHKNVVSIGLASGFLEPLESTSIHLIQSSIQRLIRYFPDAGFSPLCAQAFNKDAMREIEDVRDFLILHYHATEREDSELWRYVKAMRIPDSLRERIELFRERGQLNLAAEELFPSTSWHAVLLGQGIRPRTYMPTMALQDDAVLAAAYSKLERNFKQIVSRLSDHAAYIKENKLTSEMETRL

SEQ ID NO: 86232 - protein, 503 aa, Pseudoalteromonas sp.
  misc_feature (1)..(503): tr|A0A4Q6JG10|A0A4Q6JG10_9GAMM Tryptophan 7-halogenase OS=Pseudoalteromonas sp. MEBiC 03485 OX=2571103 GN=EVU9 2_14990 PE=4 SV=1
MIKKIAIVGGGTAGWLAANHLGHALLQSGIEITLIESPNIASIGVGEGTVPSMRNSLQKFGISESDFINECDVTFKQSIKFVNWLDKHKHGANFYHHLFDHPHIFGEQLTQQWLAEGSGNDYAEFVSKQHACCENNLAPKTIATPQYAGVNGYAYHFDAKKFAAFLGSHATQHFAVKHLFAEIKDVTCDEHGFITHLIDSEGTALQFDFIIDCSGFSAAFIGQKLGVGFVDKSDSLLTDTAITLQVPTQSDDEIPPYTIATAHQAGWIWDIALTERRGVGFVYSSKYMSDEQAHEKLHRYLGNKFEHLTPRKIPMKVGHREKMWHKNCVAVGLSQGFVEPLEATAILIADFSAGLLAKRFPRTRDDINLVADDYNQHVNYVWQQTFDFIKMHYCISDRTDSAFWRDNKKTDQLSEKLKSNLARWQRFTPVREDFASKFDLFDLENYLYVLFGMHYVPARQQTKQSDNQQVAEFKQQRIKQLLNELPEHRELLDKIKKFGLQKY

SEQ ID NO: 86233 - protein, 533 aa, Streptomyces sp.
  misc_feature (1)..(533): tr|A0A429TSB5|A0A429TSB5_9ACTN Tryptophan 7-halogenase OS=Streptomyces sp. WAC04770 OX=2487423 GN=EF908_40985 PE=4 SV=1
MTSTDTRLQKVVILGGGTAGWMTAAYLGKALQGTVDITVLEAPAIPRIGVGEATVPNLQRSFFDYLGIAEDEWMRECNASFKMAVRFVNWRTGGQGEATARELPGGGPDHFYHPFGLLPDYDQTPLSHYWYKRKFEGRTTEPFDYACFREPPVMDAMKAPRWLDGRPATRYAWHFDAQLVADFLRRFATEKQGVNHVQDEMVRVEQDARGHVTTLHTKGGLALDADLFVDCSGFRGLLINKALAEPFIDMSDHLMCDSAVATAVPHDDATHGVEPYTSSIAMSSGWAWKIPMLGRFGTGYVYSSKFTDQDTATAEFANMWGLDPERTQFNHIRFRVGRNRRAWVNNVVSIGLSSCFLEPLESTGIYFITAAIYQLAKHFPDKTFNQGLVDSFNREIELMFDDTRDFIQAHFYYAPRNDTPFWRAQKELVLPENIQQKISAYKAGLPINSPITDESTYYGNFEAEFRNFWTNGSYYCIFAGLGLEPDTPLPTLAHRPDSVAGAEPLFDTVKRQQQNLLETLPSTYDYLRQLHGA

SEQ ID NO: 86234 - protein, 538 aa, Burkholderia sp.
  misc_feature (1)..(538): tr|A0A228Q3C2|A0A228Q3C2_9BURK Tryptophan halogenase OS =Burkholderia sp. HI2761 OX=2015360 GN=CFB46_31375 PE=4 SV=1
MTNPIKNIVIVGGGTAGWMSASYLVRALQQQANITLVESAAIPRIGVGEATIPSLQKVFFDFLGIPEREWMPQVNGAFKSAIRFVNWRKSPDRSRDDHFYHLFGNVPNCDGVPLTHYWLRKREQGFQQPMEYACYPQTEALDGKLAPCLADGTRQMSHAWHFDAHLVADFLKRWATERGVTRVVDEVEQVHLNERGYISSLSTKEGRTLEADLFIDCSGMRGLLINQALKEPFIDMSDYLLCDSAVASSVPADDARVGIEPYTSAIAMNSGWTWKIPMLGRFGSGYVFSSKFTSRDQATADFLRLWGLSDAQPLNQIKFRVGRNRRAWVNNCVAIGLSSCFLEPLESTGIYFIYAALYQLVKHFPDTSFDPRLTDAFNAEIVHMFDDCRDFVQAHYFTASRDDTPFWRANRNDLRLSDAIKEKVERYKAGLPLTTTSFDDSTYYETFDYEFKNFWLNGNYYCIFAGLGLLPDRSLPLLQHRPESIDKAEAMFARIQREAERLRTSLPTNHDYLRSLRERDAGLSRSEPGPTLATPEIL

SEQ ID NO: 86235 - protein, 499 aa, Shewanella baltica
  misc_feature (1)..(499): tr|A9L0H3|A9L0H3_SHEB9 Tryptophan halogenase OS=Shewane lla baltica (strain OS195) OX=399599 GN=Sbal195_2084 PE =4 SV=1
MNKIKDIVIVGGGSSGWMTAAMLARLFKSTLNITLIESEDIGTVGVGEATIPPLQIFNNVLGISEADFINATQATFKLGIQFENWGKPDEAYMHAFGNIGKDIGFTQFHHYWLSTSPKEVNSFWDYSVNYQAAKHNKFQVLQQIPNSPLAGLTHAYHFDAALYAQFLRRFSEQLGVKRIEGQITAVELTPNGDIESVTLGSGQTVKADFFIDCSGFAALLIEKALKVGFDSYQHWLPCDSAYAVPCEKTPAIVPYTRSIAHDTGWQWRIPLQHRTGNGLVYCSRYISDNAAKQLLLSNLDGKPLAEPKKINFTTGRRIKQWHKNCVAIGLSSGFLEPLESTSLHLVQSAIIRLSKLFPHQGIAQANVDEFNRQSQLEFEQIRDFIILHYHLNQREDAQVNGFWHQCRTMVLPESLQQKIALFRATGTVFRHQDELFTEAAWIQVMLGQGIRPLDFNPLAATIQPQALSEFLLNMRTIIDNTVTKLPTHDQYLAHLSTHK

SEQ ID NO: 86236 - protein, 500 aa, Sphingomonas sp.
  misc_feature (1)..(500): tr|A0A0Q4FIL0|A0A0Q4FIL0_9SPHN Tryptophan halogenase OS =Sphingomonas sp. Leaf17 OX=1735683 GN=ASE75_07420 PE=4 SV=1
MTETANRTIVIVGGGTAGWMAAAMLARFLEAGWTIRLVESDAIGTVGVGEATIPQIRLFNAALGIDEGDFLRATKGTIKLGIEFAGWTTPNARYMHGFGAVGRPLGLIGFHQYWLRANAKAKVQPFGDYAPNITAAYAGRHAPARGPTPLPYAYHFDAGLYAGYLRTLAEARGVKRTEGRVVAVDRDAATGDITAVTLDDQRRVAGDLFVDCTGFRALLLGRTLDVGFDDWSYWLPCDRAMAVPCARVADPVPYTRATARAAGWQWRIPLQHRTGNGLVYASAFLSDDEAAATLLGNLDGAALGDPRPIRFTAGKRRAFWSHNCIAIGLASGFLEPLESTSIHLVQTAIARLLQNLPGPGTNDAARHAYNRQTHREYDRIRDFLILHYHANRRDEPMWRAARAMALPKDLTAKLALWRERAQVSREDDELFTEAGWTQVLIGQDILPDAWHPLADQVASDDLSVFLNTAATMAARVATSLPAHADLLRALAAAPNRSLPA

SEQ ID NO: 86237 - protein, 514 aa, Colwellia sp.
  misc_feature (1)..(514): tr|A0A396TXL0|A0A396TXL0_9GAMM Tryptophan 7-halogenase OS=Colwellia sp. RSH04 OX=2305464 GN=D1094_14530 PE=4 S V=1
MDKVIKKIVIVGGGSAGWITAGTIAAQYAKQPNSLFEITLIESPQVSSIGVGEGTWPSIRNTLERIGINESAFLQCCDASFKQGSKFIGWNNGRKDDYYYHPFMTPKGYGHVDLYSHWQTYHKEQAFADAINIQSHVCQAGLAPKQLSTPDYAAVTNYGYHLDAKKFAALLKEHCINTLGVKHLYDHIDSIESDNTGDIHKLQTKEHGCIHGDLFVDCTGHLSLLLGKHFEIPLINKENILFNNSALAVQVPYESLNENIASATLSTAQEAGWIWDIGLTSRRGVGYTYSDKYITDEKAEQALRRYLKCSISDELSQSLAVKKISFTPGYREKFWHKNCVAIGMSSGFIEPLEASALAMIELSSSMLGEELPTTRAHMDIIAKRYNKRFTYRWERVIEFLKLHYVLSQRTDSNYWLDNKKDSSIPERLKSLLSLWQYQSPSRYDFIQNEEIFPSASYQYILYGMGFKTQQRVTPSSRQNTPALAKLFDEVKTQQAQYLAALPANRTLLSQLSSK

SEQ ID NO: 86238 - protein, 111 aa, Deinococcus metallilatus
  misc_feature (1)..(111): tr|A0A4Q0W0G8|A0A4Q0W0G8_9DEIO Tryptophan halogenase (F ragment) OS=Deinococcus metallilatus OX=1211322 GN=ERJ7 3_20095 PE=4 SV=1
HYKATERTDSPFWNYCRTMEIPEPLAHRMRLFESHGRVHREGNELFTKISWLQVMHGQRIRPRSYHPLVDLLPEDEIQEYLEEVERVIATCVDVMPSHAQFIAENCAAGRG

SEQ ID NO: 86239 - protein, 508 aa, Duganella sp.
  misc_feature (1)..(508): tr|A0A3E1S754|A0A3E1S754_9BURK Tryptophan 7-halogenase OS=Duganella sp. BJB480 OX=1871181 GN=D0T24_22740 PE=4 SV=1
MHPTIRDPNTHRPVRRVVIAGGGTAGWMAAAGIAKVLGKRLDITLIESDEIGTVGVGEATIPTLINFHNLLEINEQEFMAETQATFKLGISFESWRNVREDYIHSFGMTGTDHWTAGFQHFWHKGVERGLAGDYGDYCLELKASLENRFAHLPDNGMNYAYHLDASRYAKYLRRLSEPRGVKRVEGKIVRYTKHEDNGDVRSLVLESGQEIEGDLFIDCTGFRGLLIGEAMQEPMEDWSQWLFCDRAIAVQTESVGDAVPLTRSMAHQAGWQWRIPLQHRVGNGIVYSSRHLDDDAAMKQLLSNVEGKTLVTPRVIKFKPCQRQQTWKGNVVAMGLASGFLEPIESTSIHLIQRAVVRLMQTFPTDGISQADIAEYNQQCNSEIEHIRDFIILHYHVNNRTDSPFWTEAREMSIPASLRHRIDLFRETGRVFRVPNELFAENSWIQVMLGQGIMPRSHHQTADLMGDEELRHFLGGIKSRVDRIVVQLPTHQAYVERYCGRAEASRAA

SEQ ID NO: 86240 - protein, 491 aa, Novosphingobium sp.
  misc_feature (1)..(491): tr|A0A2T6MCD7|A0A2T6MCD7_9SPHN Tryptophan halogenase OS =Novosphingobium sp. GV027 OX=2135689 GN=C8K10_101156 P E=4 SV=1
MSGAPIASIAILGGGTAGWMTAAALSKALAPQGVAIALIESDAIGTIGVGEATIPTIHWFNQLIGLDEAAFMQATGATWKLGIEFRGWQGDGSAYFHPFGTYGLPGDAQMLPHRLIRAWNGGHAVEIEQLSLTTQLARAGVFARSSGDPRSLLSTLGHAYHFDAGLYAAFLRRMAEERGVRRHEGRVTAIDRDGETGFIRALTTERGEHVAADLFIDCSGLTGLLIEGQMAAGFEDWSHWLPCDSAWAAPTAADPAAPLFTTATAAAAGWRWRIPLQHRVGNGYVFSSRFETADAARDSLIAAIGTPTADPRLIRFTPGRRRRAWIGNVVAIGLASGFLEPLESTSIHLIQTGIGKLLSLFPRQDCAPLLAEQYNRVFAHEMEDVRDFLVLHYHFTQGRNEPLWQHCQATALPESLAYKVEQFTSSGRLMLRGEELFRDASWFAVMTGQGLRAGDHNPMLDGMSETENLRHLDAVKAAVAKSAAQLRAGRA

SEQ ID NO: 86241 - protein, 507 aa, Shewanella baltica
  misc_feature (1)..(507): tr|A9L4W3|A9L4W3_SHEB9 Tryptophan halogenase OS=Shewane lla baltica (strain OS195) OX=399599 GN=Sbal195_1172 PE =4 SV=1
MTIKTIAIVGGGTSGWLAANHIGRVLKDNPELSITLIESPAIPIIGVGEGTVPSIRKSLSSFGISESEFINSCDVTFKQSIKFVNWLDRTKHGNNNFYHHLFDMPSLFGEDLTPYWLINPKEHFADLVSSQHAVCEENKAPKFITTPEYSGVTGYAYHLNAAKFAMLLAKNATERFNVEHVHATVNDVSFGIDGSIHSLLTDKGELTFDFYIDCSGFESIFLAKRFDVPFIDKSQQLFVNTALVTQVPTQNFEKIPPFTIATAHKAGWIWDIALTQRRGTGFVYSNDHMSNAEAEDKFDQYLGGKLAELTPRKIPMKVGYRQQFWVKNCVALGLAQGFLEPIEATSILLTDFSARFLAERFPSDKDDIDYLAKRFNETVSQAWERVVEFAKLHYCLSDRSDSAFWRDNRSDKTIPEGLKQRLKMWRNFIPIAEDFPSKFEVFNRENYLYVLYGMKYFTRPTYSNAEVDKRVVQHLAKMKLLKSKMISELPEHRELLDKIRLYGLQSI

SEQ ID NO: 86242 - protein, 504 aa, Brevundimonas abyssalis
  misc_feature (1)..(504): tr|U3ASV6|U3ASV6_9CAUL Tryptophan halogenase OS=Brevund imonas abyssalis TAR-001 OX=1391729 GN=MBEBAB_0053 PE=4 SV=1
MTDTTDHRIRKIVIVGGGTAGWMTAAAMAKLLGRDFADITLVESDDIGIVGVGEATIPQIGIYNRMLGLDEDEFVRKTQGSFKLGIQFVDWGRKGHTYFHPFGPFGVDMEGVSFHAYWQRLHLAGDPHRLEDYSLQAVAAAENRFMRAIDAGRSPLSRIAYAFHFDAGLYARFLRGFAEERGVVRREGKIVDVEQRAEDGFIQAVKLESGERIEGELFIDCSGFRGLLIEQTLKTGYEDWTRWLPCDRAAAVPCESVPTFTPYTRSTARDAGWQWRIPLQHRTGNGYVYSSDHISDDQAAETLLANLDGKPLADPRFLRFVTGRRKQAWVKNVVAIGLSSGFIEPLESTSIHLIQSGVAKLMQMFPDKRFEPADRERFNRMTQVETEQVRDFIILHYHLTERDDTPFWDRCRTMDVPDSLKEKYRLFEGYGRIFRENDELFNDTSWMAVMVGQGLKARGYDPVADVLSLDETRARLAEIRRVMRTSADYMPLQTEFIRNNCAAG

SEQ ID NO: 86243 - protein, 503 aa, Massilia sp.
  misc_feature (1)..(503): tr|A0A350CU70|A0A350CU70_9BURK Tryptophan halogenase OS =Massilia sp. OX=1882437 GN=DCX52_16040 PE=4 SV=1
MQQANREHVEKRPIRRVVIAGGGTAGWMVAACIGKSLGKRLDIKLVESDEIGTVGVGEATIPTLINFHHLLEINEQEFMAATNATFKLGISFEGWRDRNQDYIHSFGATGSDHWTAGFQHFWHKGRERGLAGDYGDYCLEHRAAQEHRFAHLPKHGMNYAFHLDAGAYARFLRRFSERYGVQRIEAKIVEVAKDEASGDIRAIKLDSGTELEGDLFVDCTGFRALLIGQAMGVEYEDWSHWLFNDSAVALQTASTGPAVPYTRSIARESGWQWRIPLQHRVGNGHVFSSRFIDDAAAIDTLQRNVQGEHLTQPRVIRFKPGQRRQVWAGNCVAIGLSSGFLEPIESTSIHLIQRGVVRLMQMFPTHGISQSDIDEYNRQAANEIAHIRDFIVLHYKVTNRRDTPYWRACAELAVPASLQHRIDLFRATGRVFRAPNELFAENSWIQVMLGQGIMPEQHHQSADLMGDAELKGFLDSISGAIERTVAQLPPHAAYVRQYCGTTR

SEQ ID NO: 86244 - protein, 506 aa, Marinimicrobium sp.
  misc_feature (1)..(506): tr|A0A2D8WGX3|A0A2D8WGX3_9GAMM Tryptophan halogenase OS =Marinimicrobium sp. OX=2024837 GN=CMG77_00675 PE=4 SV= 1
MTMDNRVRKVMIVGGGTAGWMAAAAMAKVLKNQYCDIQLVESDSIGTVGVGEATIPQIQLFNQMLGLDENEFIRRTQGTFKLGIQFVNWGHIGERYLHAFGEVGKDMEGVQFYHYWLKLFQAGEAPNIDAYTLNCQAVEQGRFMRPVDAGNSPLSRIAYAFHFDAARYAMFLRDYAMERGVRRREGKIERVSLRPGDGFIESITLDDGETLEADLFIDCSGFRGLLIEQALKTGYEEWSRWLPCDRAVAVPCAKVAEPVPYTRSTAHSAGWQWRIPLQHRTGNGHVYCSQFISDDEAADTLLKNLDGEPLADPKFIRFTTGKRLKFWNKNCVALGLASGFMEPLESTSIHLVQSGIAKLMSLFPNRNFDQEDIDEYNRQVDFEYTRIRDFLIAHYHVTQRDDSEFWNYCRTMDVPDTLKQKMNHYRKNGRIFRTNEELFNETSWLEVMHGQGLKAEGYHPIVDTLSKDEIARRLESIRNVINKSVEYMPKHSEFIAKHCAAPANTE

SEQ ID NO: 86245 - protein, 504 aa, Caulobacter sp.
  misc_feature (1)..(504): tr|A0A2T9JUJ5|A0A2T9JUJ5_9CAUL Tryptophan halogenase OS =Caulobacter sp. 774 OX=2172652 GN=DDF67_14110 PE=4 SV= 1
MVDQRIRKVVVVGGGSAGWMTAAAFSRLLVSDAVSVEVVESEAIGTVGVGEATIPTIRNFNEKLGLDEVEFIRATQASFKLGIDFRDWGRVGHRYFHGFGDFGADHAAVQAHQLWGRLRTLGETGGLEDWSLPTAAAMLNRFIPPSPDPRSPLHDYAYAYHFDAGLYAAFLRRYAEAQGVTRTEGKIVDVAVRGQDGFVEAVVLEDGRRVEGDLFVDCSGFRALLIEGTLKAGFEDWSRWLPCDRALAVPCRTGGDGLTPYTRSTAREAGWQWRIPLQHRTGNGYVYSSAFVDDERAARTLMENLDGEALDDPRPLRFLAGRRRKFWDRNVVAVGLSGGFLEPLESTSIALIQNGIARLLEFFPDRRCDPLLADEFNRVSAQEYERIRDFIILHYCINQRDEPMWRQVREVELPDSLQAKIALYKARGHVAILEGDGFARPSWISIYNGLGVVPEAYDPLADRIPEAELRRLMEHRRALIRHTAQSMPTQAAFIARHCAAAPLG

SEQ ID NO: 86246 - protein, 499 aa, Massilia sp.
  misc_feature (1)..(499): tr|A0A354IQR4|A0A354IQR4_9BURK Tryptophan halogenase OS =Massilia sp. OX=1882437 GN=DDZ22_02180 PE=4 SV=1
METHVNNKPVRRVVIAGGGTAGWMVAACLSKSLGKRLDIKLVESDEIGTVGVGEATIPTLQNFHHLLEINEQEFMAATHATFKLGISFENWRDVHQDYIHSFGNTGIDHWTAGFQHFWHKGRERGLAGDYGDYCLEHRAAQLNRFAHLPKQIINYAYHMDAGAYARFLRRFSEHYGVQRVEAKIVDVVKDAQANTIRSIRLDSGTELEGDLFIDCSGFRALLIGGALGVEYEDWSHWLFNDSAAALQTASSGEAVPYTRSIAREAGWQWRIPLQHRVGNGHVFSSRFIDDEAAIATLNRHVTGEPLMQPRVIRFQPGQRKQVWVGNCVAIGLASGFLEPIESTSIHLIQRGIVRLMQMFPSTGIRASDVAEYNRQAADEIAHIRDFIVLHYKVTNRRDTPYWRACAEMDVPASLQHRIDLFRETGRVFRAPNELFAENSWIQVMLGQGIMPDGHHQTADLMGDAELKGFLDNISGTVNRTVAQLPPHETYVRQYCGVAK

SEQ ID NO: 86247 - protein, 509 aa, Caulobacter sp.
  misc_feature (1)..(509): tr|A0A2T9K1I3|A0A2T9K1I3_9CAUL Tryptophan halogenase OS =Caulobacter sp. 774 OX=2172652 GN=DDF67_11750 PE=4 SV= 1
MSGPIRNIVVVGGGTAGWMTAAALAQTVGTQRYSITLVESEQIGTVGVGEATIPMILLFNKVLGLDEDVFIRETNATFKLGIEFVDWRRLGHRYFHPFGLYGADMDGVGFQHFWLRWARQSGDWDHGAFNAETLAAASGRFMRTPPAPNLPKINYAFQFDAALYAAFLRRYAEARGAVRVEGRIATVERDGESGHVSRLVLDDGRTIAGDFFVDCSGFRGLLIEETLGAGYDDWSRWLPCNRAAAVPCERAGELTPYTRATAREAGWQWRIPLQHRSGNGYVFSDAFIGEDEAVRLLGERLDGAALADAKVLKFTAGRRRRSWIGNVLAIGLSSGFLEPLESTSIHLVQAAIAKLLTLFPKAGLDPWVVDKFNREMALEYEQVRDFIIAHYKVTERDDTEFWRWCQAMVPPDSLNQRLEVFRARGEVLVDQRELFKETNWFAILAGQGLMPNDYHAVADNISPEELSLRLGRIRAAIQERAASLPPHGVYLEKAGLLGLAARAATSASV

SEQ ID NO: 86248 - protein, 501 aa, Caulobacter sp.
  misc_feature (1)..(501): tr|A0A2T9JSS5|A0A2T9JSS5_9CAUL Tryptophan halogenase OS =Caulobacter sp. 774 OX=2172652 GN=DDF67_15435 PE=4 SV= 1
MDRAIGSIAILGGGTAGWMAAAALAQVLRGTQTTITLVESAEIPTVGVGEATIPPIVDFLRLLEIDQGQFMAATEGSFKLGIRFDDWRAVGERYWHPFGAFGPSVDRRPFHHIWHRLRSAGDDPRVEAYSLAAALGDASRMAFADGRGQGPLGGMRHALHFDAGLVARFLRTYSEERGVRRLERRVEGATLKADGFVEALVLDGGERLAADLFIDCSGFRGVLIEGALKTGYEDWSAFLPCDRAVAGLTVRDANPPPFTQAAARPAGWRWRIPLRHRTGNGYVYSSAHVSDDEALADLEREAGKLLTEPRVLKFTGGRRKAFWSRNVVALGLASGFIEPLESTSIHFVTSGLLKLLDHFPDKDFDGANIADYNAALIAEYEAARDFIVLHYQPTRREEPFWRERAAATLPPDLAERLALYRGTGRIPHRPTELFTELSWFYVLEGMGVRPAAYDPLVDLSNLSQVREGLAGWRRRVAEIVQAAPLHDTALDQIAGRRRPAA

SEQ ID NO: 86249 - protein, 501 aa, Marinimicrobium sp.
  misc_feature (1)..(501): tr|A0A2D8WIV4|A0A2D8WIV4_9GAMM Tryptophan halogenase OS =Marinimicrobium sp. OX=2024837 GN=CMG77_04275 PE=4 SV= 1
MTDSIKRIVIAGGGTAGWMAAGLLSQTLGKNLDIKLVESDDIPTVGVGEATIPPLMTFHKMLDIDEREFLAEVNGTFKLGISFENWREKDHKYIHSFGYAGKDCWACSFLHFWLAGKAKGIDYPYGDYCAELLASHKNKFAVLPNGRMNYAYHMDAGRYAAFLRRRSEKLGVERVEGKIEKVNLNPDNGEIQSLTLASGKQVDGDFFIDCTGFRGLLIEQSLNAGFEDWSHWLPCDRALAVQTESVGEPIPYTRSIAHDAGWQWRIPLQNRVGNGLVYSSRYMSDEQARETLLGNLEGEPITDPKPIQFRTGTRRKHWVKNCLALGLASGFLEPLESTSIHLIQRSLVRFVQLFPASGQMVQSDIDEFNQQTKLEVERIRDFIILHYKVTERDDTPFWRYCKNMEIPAPLRQRIDLFSDSARVFKIENELFGEESWIQVMMGQGITPKAYHPMAGVMTEKELADFLKKLRQSTEQLVAKLPSHQAFIDYYCKMPMAQAANG

SEQ ID NO: 86250 - protein, 504 aa, Sphingomonas sp.
  misc_feature (1)..(504): tr|A0A5E7YXS3|A0A5E7YXS3_9SPHN Tryptophan halogenase OS =Sphingomonas sp. EC-SD391 OX=2038398 GN=SPHINGO391_410 065 PE=4 SV=1
MANHPLRIVIAGGGTAGWMAAATFARFLETGYEIDLIESDAIGTVGVGEATIPQIHLFNDALGLDEDAFLRATGGTFKLGIEFVDWFKPGHRYLHAFGDVGRDVGLLPFHQYWLRARSLGLAGDLGAYSLNTHAALANRMQRGPARTARTLPSMPYAYHFDAALYARYLRRYSETRGVNRIEGKIVRVTRDGDSGDVSGLVLENGTTVAADLYIDCTGFRGLLIEEALGTGYEDWTHWLPCDRAIAVPSARGEKFTPYTRSTAHAAGWQWRIPLQHRTGNGVVYSSAHMSEDEATATLLRGLDTPAMADPRTITFRTGRRKRMWNHNVVALGLAAGFMEPLESTSIHLIQSAVARLLKLLPGRVIADADRTEFNRQIDFEYERIRDFIILHYKATTRDDTPFWRQCRDTAVPDTLAAKIDLWRGNGHIVREREELFTEVGWLQVLAGQGIVPDGHHPLADAISTADLSEFMETIDKLNAREANQMQDHAAFVAQHCAAAPSLAA

SEQ ID NO: 86251 - protein, 550 aa, Streptomyces sp.
  misc_feature (1)..(550): tr|A0A077JCX4|A0A077JCX4_9ACTN Tryptophan 6-halogenase OS=Streptomyces sp. Sp080513GE-23 OX=630397 GN=fmoD PE= 4 SV=1
MTEVTMGEPIRNIVILGGGTAGWMAASYLGKALSGQAAISVVEAPAIPRIGVGEATVPNLQRVFFDYLGLPEEEWMSKCNAGFKMAVKFINWRTPGPGEPVSRQDADGSDHFYHPFGLLPSPDGVPLSHYWTRKQLSGATSEPFDYASFVEPPLMDAKRSPRFLDGTRCTNYAWHFDAALVAAFLRDFATVKQGVRHIEGTVSDVRADSRGYIESVTLESGEVIGGDLFVDCSGLRGLLINKTLGEPFIDMSDHLLNNSAVATQVPHDDEANGIEPYTSSIAMPAGWTWKIPMPGRFGTGYVYCDKFADKDEAARDLCGLWGLDPEKVPLNHIKFRVGRNRRAWVGNCVSIGLSSCFVEPLESTGIYFITASLHQLVKHFPERDVDPVLRDRFNREIVDMFDDTRDFLQAHFSLSPRTDTPFWRATKELTLADQIKEKIEMYRSGVPVNPPVTDEGTYYGNFEAEFRNFWTNGSYYSVFAGLGVRPRSSLPILSYRPDSVAAAERAFADVKARQRQLLSELPSAYEYLSSLHQADQPRHAPAETPRRRQV

SEQ ID NO: 86252 - protein, 508 aa, Sphingomonas sp.
  misc_feature (1)..(508): tr|A0A5E7ZC17|A0A5E7ZC17_9SPHN Tryptophan halogenase OS =Sphingomonas sp. EC-SD391 OX=2038398 GN=SPHINGO391_440 280 PE=4 SV=1
MTDPNPGPIRKVVIVGGGTAGWMAAAAAARYLDDGQRQIILIESDAIGTVGVGEATIPPILGFNALIGVDEREFLRATGATFKLGIEFVGWDTGDDRYMHAFGGHGRDIQGLAFHQLWLKLRDRPGIGGIDAYAPSAVAAYLNRFGLPTGPQTAPLAYAYHFDAGLYAAFLRRRAEAGGVTRIEGRITRVDRDPDTGHVRAVRLDDGRSVDGDLFIDCSGFRSLLLGETMGVPFEDWSHWLPCDRAVAVPTKPSAPLLPYTRATARTAGWQWRIPLQHRTGNGHVYSSAHISDDEATAVLLANLDSRPTAEPRQLRFKAGRRTSMWQGNVVALGLAGGFLEPLESTSIHLIQTGISKLFALFPDRGFSAVERDEYNRLMGDAYTSVRDFIILHYHATRRDGSAFWRHVRTMPIPDSLTRKLALFREKGRVFRYDDELFGISSWVQVLLGQNVIPVGHDPIVDALDADRVADAIRQIRAATIRGAQSLPNHADFVAHHGPFDRKNEFAK

SEQ ID NO: 86253 - protein, 531 aa, Streptomyces sp.
  misc_feature (1)..(531): tr|A0A4V6RPP6|A0A4V6RPP6_9ACTN Tryptophan 7-halogenase OS=Streptomyces sp. A1499 OX=2563104 GN=E7X58_02185 PE= 4 SV=1
MDQRVKEIVILGGGTAGWMSAAYLAKKLGETVRVTVLEAPSIPRIGVGEATVPNLQRVFFDQLGLSEEEWMPECNAAYKVAVKFINWCTPGKGEARAREIDGRPDHFHHPFGLLPEHEGLPLSHYWVYNRKHGVTGKPFDYACFPGVAIMDALKAPRDHAGEPVTRYAWHFDAHLVADFLRRHATEKQNVTHVQDEMVEARRDGRGFVTALRTKSGAVIEGDLFIDCSGFRGLLINQAMEEPFVDMSDHLLCDRAVAYALPNDDEANGVEPYTSAIAMESGWTWKIPMLGRFGTGYVYSDAFAGQDRATTDFCRMWGLDPDEVGDRLNHVRFRVGRNRRAWVKNVVSVGLASCFLEPLESTGIYFITAALHHLAKHFPDQRFDAVLADRFNAEIEAMFDDTRDFIQAHFALSPRTDTPFWKANKDLHLPEGIKEKVAMYRAGLPINQPASTEGAYYDNFDVEFRNFWTNGSYYCVFAGLGLEPDHPLPALMHHPDAAEGAQHLFDRVAEEQRKLADTLPSNHEYLRRLHGA

SEQ ID NO: 86254 - protein, 484 aa, Kordiimonadales bacterium
  misc_feature (1)..(484): tr|A0A5A7N711|A0A5A7N711_9PROT Tryptophan halogenase OS =Kordiimonadales bacterium JCM 17846 OX=1236968 GN=JCM1 7846_08320 PE=4 SV=1
MLAKALGQQIRIRLVESDAIGTIGVGEATIPQIRNLNHYLGLDEHEMIRQTKGSFKLGIEFSDWGRIGDRYMHAFGDIGQSLGLSPFHHYWLRATQSGHPHSLWAYSLNQQAAIQNRFGPLERLGDSRLTGLRYAFHLDAGLYAAMLRSYSEARGVERLEGRVVDVKQHSGDGFIQSVLLENGTEIEADLFIDCSGFRGLLIEDALKTGYEDWSHWLPCNRAAAVPSETPTDASGKPLMRPYTQSMARPAGWQWRIPLQHRVGNGHVYCSAHLSDDEACALLLANLEGPALTEPRLLQFKTGRRKKAWNRNCVALGLAGGFMEPLESTSIHMIQTGISRLVSMFPDKNCDPALAAHYNEATRFEYERIRDFLILHYKATQRQDTAFWRACAEMPIPQSLQQKIELFEASARLYREADELFTEIGWLQVLLGQSITPRAYHPLADAISDAQLAEFLDHIRLLINRGVASLPNHHSFISRISANFN

SEQ ID NO: 86255 - protein, 506 aa, Luteimonas sp.
  misc_feature (1)..(506): tr|A0A5D4XQJ8|A0A5D4XQJ8_9GAMM Tryptophan 7-halogenase OS=Luteimonas sp. XBU10 OX=1132694 GN=FZO89_11480 PE=4 SV=1
MRTTDVDTSDDDRPRTPVRRVVIAGGGTAGWMAAAGISKLLGKTLEIILVESEEIGTVGVGEATIPTLVTFHRALDIAEQEFMSAVQGTIKLGISFENWLERGHRYIHSFGVNGKDHWSAGFQHFWLRGRAGGLASGYEDYCVELQAALQDRFGHLPRNGINYAYHMDASHYARFLRRFSEANGVKRVEGKIVEVGVGDDGDICNLRLEDGTDIRGDFFVDCTGFRALLIGKALNVGYEDWSHWLFNDSALATQTTAVRDAVPYTRAIAGTAGWQWRIPLQHRVGNGIVYASRYITDDEARHEFLSSLEGEIIKDPWPVRFRPGRRMKCWHRNCVALGLAGSFIEPLESTTIHLIQRGIMHLLQLFPQVVTPAAIAQYNAQLAEELVHVRDFVVMHYHLTHRRDTPYWRAIAQMDIPGTLQHRIDLFRETGSVFHVPGELFGANSWIQVMMGQGVMPERYHPTADAMSEDGLGRFLDDIRTNVLSTAGTLPPHMDYMRSYAPAGKP

SEQ ID NO: 86256 - protein, 511 aa, Streptomyces sp.
  misc_feature (1)..(511): tr|A0A2R3ZQ00|A0A2R3ZQ00_9ACTN Tryptophan halogenase OS =Streptomyces sp. FXJ1.235 OX=1454112 GN=myeP PE=4 SV=1
MTASYLGKALQGEVDITLLEAPAIPRIGVGEATVPNLHSAFFDFLGIPEHEWMREVNASFKAGIKFVNWRTPGRGVSDPRPLGAETDYFYHHFAHLPEHDGVPLPQYWYLKKRRGDEIGAFDRACFPETAVLDAKKGPWKADGTPAMDYAWHFDAALVADFLRRFATQKQGVRHVQGELAEVIQDERGFVTALRTKDDELLKGDLFVDCSGFRGLLINKAMGEPFVDMGDKLLCDSAVATAVPHDDEANGVEPFTSAIAMSNGWTWKIPMLTRFGTGYVFSSKFTTREDATREFSEMWGLDPENTEFNQVSFRVGRNRRAWVRNVVGIGLSSCFVEPLESTGIYFIYTAIAQLAKHFPDKRFDPTLIKRFNREIESMFDFTVDFIQTHFAFSPRTDTEFWRANKKLPLGDDLREKVELYRAGLPVNPYGSGEQVLHGTSETSNKNFWNNTNYWCMLAGLGHLPEHVLPALRYKPASVAGAEAVFADVPRRAAERLDELPSTYDILRTLHGK

SEQ ID NO: 86257 - protein, 538 aa, Pseudomonas chlororaphis
  misc_feature (1)..(538): tr|Q9RPG8|Q9RPG8_9PSED Tryptophan halogenase OS=Pseudom onas chlororaphis subsp. aureofaciens OX=587851 GN=prnA PE=4 SV=1
MNKPIKNIVIVGGGTAGWMAASYLVRALQQQANITLIESEAIPRIGVGEATIPSLQKVFFDFLGIPEREWMPQVNGAFKAAIKFVNWRKSPGSSRDDHFYHLFGNVPNCDGVPLTHYWLRKREQGFQQPMEYACYPQAGALDGKLAPCLPDGTRQMSHAWHFDAHLVADFLKRWAVERGVKRVVDEVVDVHLNERGYISSLFTKEGRTLEADLFIDCSGMRGLLINQALKEPFIDMSDYLLCDSAVASAVPNDDAREGVEPYTSAIAMNSGWTWKIPMLGRFGSGYVFSSKFTSRDQATADFLNLWGLSDNQPLNQIKFRVGRNKRAWVNNCVSIGLSSCFLEPLESTGIYFIYAALYQLVKHFPDTSFDPRLSDAFNAEIVYMFDDCRDFVQAHYFTASREDTPFWLANRHDLRLSDAIKEKVQRYKAGLPLTTTSFDDSTYYETFDYEFKNFWLNGNYYCIFAGLGMLPDRSLPLLQHRPESIEKAEAMFASIRRETERLRTSLPTNYDYLRSLRDGDTGLSHSSSGPNVEAQETL

SEQ ID NO: 86258 - protein, 493 aa, Rheinheimera sp.
  misc_feature (1)..(493): tr|A0A0M0M9P3|A0A0M0M9P3_9GAMM Tryptophan halogenase OS =Rheinheimera sp. KL1 OX=1635005 GN=WH43_01570 PE=4 SV= 1
MQQVKKVVVAGGGTAGWVAAAALSKRLQGLIEVVLIESEEIGTVGVGESTVPPVQLFHNLLGIDEQEFMKATDATFKLAISFENWGQTGDQYFHPFGVTGKGSFLTDFQHYYLHGLTLGVDAPFGDYCYELQAAKQHKFGKTDKSNINYAYHLDAGRYARFLRKFSEDLGAVRIEGKIAQVQQHVNGDIRSLVLESGQEITGDLFIDCTGFRALLIEQTLNTGYDHWDHWLPCNKAVVVQTEPGPNIHPYTRAIAHDSGWQWKIPLQHRGGNGLVYASDYLSDEKAKQRLLDGLQAPALFEPRVLSYQTGRRKKLWNKNCVAIGLSSGFIEPLESTSIFLFMSGIIRLLRLFPFNGVTPALMDEYNQQSITEVEKIRDFIILHYHQTERSDSPFWDYCRTMPIPDTLAHRIELFKESAHAFQTGDEMFRLESWSHVMLGQRLKPNSYHQLVAALNQGELSRHLHSIRETINAAVDRLPSHRDFLRQYCPSTIS

SEQ ID NO: 86259 - protein, 536 aa, Serratia plymuthica; identical to SEQ ID NO: 85849
  misc_feature (1)..(536): tr|G0ZGJ1|G0ZGJ1_SERPL PrnA OS=Serratia plymuthica OX=8 2996 GN=prnA PE=4 SV=1

SEQ ID NO: 86260 - protein, 416 aa, Streptomyces iakyrus
  misc_feature (1)..(416): tr|K8ESR5|K8ESR5_9ACTN Kynureninase OS=Streptomyces iak yrus OX=68219 GN=actG13 PE=3 SV=1
MSRFDGTREEAERYDRADPLGFLRDRFVHAEPDLLYLDGNSLGRLPADTPDFVADVIRDGWGRGLIRSWHDWIDWNRRIGDRLAEHVLGASPGEVVLSDSTTVNLYKLAWAALDHAPGRRALVVDADDFPTNRYVAQGLARQRGLDLRLVHSDPDLGLDPERLRAALDDQVALVVLSYVAYRSGALADMAAVNALAQEAGALVLWDLSHAAGAVPVRLTEDGADLAVGCTYKYLNGGPGSPAFLYKGGPPQPIQGWFGQRDQFAMAADFDPVETVDRFLTGTPPMLSTAALVPALALVEEAGVDRLRAKGRLLGELAVDLAARWLAPLGFRLASPEDPDRRGSHVTLWHPDAWRICRALAEDAGVICDYREPYRLRIGPSPAYTRFTDVWDALDRTRRLVESARHTRLPREKARIT

SEQ ID NO: 86261 - protein, 542 aa, Luteimonas sp.
  misc_feature (1)..(542): tr|A0A5D4XS90|A0A5D4XS90_9GAMM Tryptophan 7-halogenase OS=Luteimonas sp. XBU10 OX=1132694 GN=FZO89_11515 PE=4 SV=1
MEKNRIRKVVIAGGGTAGWVAACALTHQFRDLLDITLVESEQVGTVGVGESTIPTIRTFHKLLQIDEREFLSAVAGSYKLAISFENWIRPGSHYFHPFGTTGVNTWSADFHQFWLESRRRGLQSELGDYCLETAAARQDRFALFNTGQNAQQWSMRWTQAATMERKDVSYAYHFDAGLYAAFMRIRCEGSGLKRIEGKIAQVRQDPDSGFVQALVLEDGQVIEGDLFIDCTGARAVLSEQALHTGYEDWNHWLPSNRAVALQTEADGPAVPYTRAIAHEAGWHWKISLQHRIGCGIVFSDAHMSDDEATARLLAENPAKPLRDPWIIPFRTGRRRKSWNKNVVALGLASGFIEPLESTSIHLTLSAVTRLVQFFPFEGISQAAVDRYNQVSRQELEHVRDFVVLHYHLNQRDEPLWRQCREMELPPGLAERIQVFRETGYAWQGEDELFRLDSWTHCMLGQGVVPQNHHPLTRALSDADLKRLLDGVRKPIDAAVAAMPSHQQFLDSYCKAPASAWEQMYARARQHERVTGKVAGVGGDLTR

SEQ ID NO: 86262 - protein, 519 aa, Luteimonas sp.
  misc_feature (1)..(519): tr|A0A5D4XGC8|A0A5D4XGC8_9GAMM Tryptophan 7-halogenase OS=Luteimonas sp. XBU10 OX=1132694 GN=FZO89_15660 PE=4 SV=1
MSASAVRDIVVVGGGTAGWMAAAAFVRVLGESCSVRLVESEAIGTVGVGEATVPHIKAFNNLLQIDEADFVRNTQGTFKLGIQFVDWLREGTTYVHGFGTEIGRNLGLLPFHHYWTKAYQRGRARSIGCYSLNTLAAERGRFMVSADDAPAGSPLSNIAYAYHFDAALYARYLRAYAERRGARRTEGLVREVLLDSGSGHVTALRLESGEEIGGDLFIDCSGFRGLLIGEALGTSYEDFSHWLPCDRAWAVPSGNVGSPTPYTRSTARAAGWQWRIPLQNRTGNGYVYCSRHVSDDEAAATLLANLDGPALGDPRPLRFNTGRRSSCWQRNVIALGLSSGFMEPLESTSIHLIQSGISKLLEMFPREGFNPVLARKYNARLAFEFDRIRDFLVLHYYANRRDEPFWKECRHIAITPELREKLELFQDSGQVYRNGEEMFGDVSWIEVMLGQGVMPAGYHPLVDLVPEADVFRFVEGVGKTISNCVDVMPTHQQFIDRFCLAPADSRTRTGAAGSAAVRP

SEQ ID NO: 86263 - protein, 505 aa, Xanthomonas euvesicatoria; identical to SEQ ID NO: 86142
  misc_feature (1)..(505): tr|A0A4U0TGL1|A0A4U0TGL1_XANEU Tryptophan halogenase OS =Xanthomonas euvesicatoria pv. citrumelonis OX=189396 G N=TP41_05510 PE=4 SV=1

SEQ ID NO: 86264 - protein, 502 aa, Sphingomonas sp.
  misc_feature (1)..(502): tr|A0A5E8AAD2|A0A5E8AAD2_9SPHN Tryptophan halogenase OS =Sphingomonas sp. EC-SD391 OX=2038398 GN=SPHINGO391_500 130 PE=4 SV=1
MKRVQRLVILGGGTAGWMTAAAMSATFGDLVNISILESDAIGTIGVGEATIPTIHWFNQLIGLDEEAFVAATKASFKLGIEFVDWARPGTRYFHPFGRYGVDLGPVPFHQHWLRAKADGLDRPLSVYSLAAQLAAAGRFAKPVDDPRSILSTLGYAYHFDAGLYARHLRQLAEKRGVVRHEGLLRDIERDPETGFVTALTSDRGERLEGDLFIDCSGFRALLIGETMGARFQDWSHWLPCDRAVAVPCARIAATTPFTRSTLRPAGWQWRIPLQHRTGNGYVYASSFVSDDEAVATLLSNLDGEALADPRMLRFTAGFRREAWRGNVVAIGLSSGFLEPLESTSIHLIQSGIAKLITLFPDADCDPVLARQFNTLFARDMDGIRDFLILHYHATQGHDAPLWQHTRHMTPPPTLVDKIAQYTRAGRLMLSADELFREASWLAVLEGQGVGALGHAPLADTLDAATNRRQLNQIETVIARATPTLPLHDAAIAALVAPQVAGR

SEQ ID NO: 86265 - protein, 509 aa, Sphingomonas sp.
  misc_feature (1)..(509): tr|A0A5E7YXT1|A0A5E7YXT1_9SPHN Tryptophan halogenase OS =Sphingomonas sp. EC-SD391 OX=2038398 GN=SPHINGO391_410 063 PE=4 SV=1
MIDGLGQHIVILGGGTAGWMTACLIAHRWRARGMRVTLVESPEIGIVGVGEGSTPQLKHFFDTLGIAEDVWMPACDATYKLGIGFEGWSDRAGYERYFHPFPTALDGHTASQFFYNARALRTGRDVEAHPDRFLLPARLAAAHCAPQPAASFPFEVSYGYHFDAYKVGAFLATHATETLGVDHLQRRIASVERTPTGQITALIDTDGGRISGDFFVDASGFRSTIFAALDVPFVSYADALFNDRAVVMPTAHAPGAPIPSQTRATALSAGWAWHIPLTRRNGNGYVYSSRHLTEAQAEAELRAHVGAEAGEARHLKMRVGRVRDSWSHNALAVGLAQGFLEPLEATALHLVIATVEAFLDGVDAGGATDAVRSAFNTRIAARYDGVRDYIVAHYRLNQRHDDPTGYWAQARGIEILSDDLKMLMSAWFTGVDMVAAIDHAGLARYYSAISWHCLFAGYGTFPEPARLIPPGADIDPVAMTRIDDFLTRCAMNFGSHASRLRTADLKDFA

SEQ ID NO: 86266 - protein, 506 aa, Kordiimonadales bacterium
  misc_feature (1)..(506): tr|A0A5A7NGN4|A0A5A7NGN4_9PROT Tryptophan halogenase OS =Kordiimonadales bacterium JCM 17843 OX=1236965 GN=JCM1 7843_09550 PE=4 SV=1
MTTAQISADPVTRIVIIGGGTAGWMAASVLSKALAGRVSIQLIESDAIGTVGVGEATIPQIRLINHYLGLDENAFLKHCKGTFKLGVQFNNWGRIGDSYMHAFGDLGLPLGPLSFPHYWLRAQQEGVGGDLWNYSLNYQTAMQGRFSRLEKVGTSHLGGIKYAFHFDAGLYARYLRAGCEKRGVSRTEGRIVKTNLRGTDGFIESVTLESGATIAGDLFVDCSGFRGLLIEQALKTGYEDWSHWLPCNRAVTVASEPTGPMRPYTQATARQSGWQWRIPLQHRVGNGHVYSAAHISDDEAAHQLLQNLESPALSDPKTLRFKTGRRQQAWNRNCVALGLAAGFMEPLESTSIHLIQSGISRLVSLFPDRHFDPSLIDHYNRQTQFEYERVRDFLILHFKATQRRDTAFWQTCANMDIPHSLQEKIDLFSTTGRIIREGEELFTEMGWIQVFTGQHIKAQRHHPLADNITQSQLTEFLGNIEKLITHTVPSLPRHADFITHNCRAAA

SEQ ID NO: 86267 - protein, 304 aa, Sphingomonas sp.
  misc_feature (1)..(304): tr|A0A520GVG1|A0A520GVG1_SPHSX Tryptophan 7-halogenase (Fragment) OS=Sphingomonas sp. OX=28214 GN=EOP68_25725 PE=4 SV=1
MNEHTIRDVVIVGGGTAGWMAAAALSRFLDNGYTRITLVESDEIGTVGVGEATIPPIITFNQMLGINENDFLRETGATFKLGIEFVDWGGLNERYFHPFGFHGRDLQGVHFHQLYLRERQRRVMPDISSWSMSAVAASRGKYGRAAEGAQSPIKELLYAFHFDAGLYAQFLRRYAERRGVRRMEGRVVDVAQRADGHVEAVTLESGETIGGELFIDCSGFRGLLIEETLAAGYDDWREHLPCDRALAVPGERTAPLHPYTRATARAAGWQWRIPLQHRTGNGLVYASSHLSEDEAAATLLATLD

SEQ ID NO: 86268 - protein, 99 aa, Streptomyces sp.
  misc_feature (1)..(99): tr|A0A4U0SIZ1|A0A4U0SIZ1_9ACTN Tryptophan 7-halogenase OS=Streptomyces sp. NEAU-C40 OX=2571141 GN=FCI23_22275 PE=4 SV=1
MILTGTHRQVTAPSQIQHGRPIPCLRGMVLARRSTFEFVLRERTEARAGVRTVRGARVVGLITAPDDPCRVIGVHTADGRTWTADLVVDASGRRTDLSD

SEQ ID NO: 86269 - protein, 345 aa, Variovorax sp.
  misc_feature (1)..(345): tr|A0A520FXC8|A0A520FXC8_9BURK Tryptophan 7-halogenase (Fragment) OS=Variovorax sp. OX=1871043 GN=EOP73_31600 PE=4 SV=1
FGLTGKDHWTAGFQHFWLAAQRRGPARVPHGPYGDYCLELCAALNGRFGHLPRQVINYAYHLDASRYAVYLRGLSEGWGVQRIEGRIATVLQHAGGDIRALKLADGSEVEGDLFIDCTGFRSLLLGQALGVGFEDWSHWLPCDSAVAVQTASVGAPVPYTRSIAHPFGWQWRIPLQQRVGNGLVFSSAHLGDDEAKAFLLGHVQGEALTARRVLKFKPGQREVTWRRNVVAIGLASGFLEPLESTSIHLIQRGITRLMQCFPAGGIQQSDIDEYNRQVRDEIEHIRDFIVLHYHATNRRDAPLWRHCAEMAPPPSLAHRLQLFRDTARVFKAPHELFGENSWVQV

SEQ ID NO: 86270 - protein, 649 aa, Sphingomonas sp.
  misc_feature (1)..(649): tr|A0A5E7YSQ8|A0A5E7YSQ8_9SPHN Tryptophan halogenase (M odular protein) OS=Sphingomonas sp. EC-SD391 OX=2038398 GN=SPHINGO391_390365 PE=4 SV=1
MATDTGPGATNDQPITTIVVVGGGTAGWLAACLIAARADRGVEQPLSVTLIESPDVATIGVGEGTWPTMRRTLERIGISETDFLLACDGAFKQGSRFDGWRTGAANDSYLHPFTAPVDGDPRDIVVAWAEHGGRFADTVGAQGAICHRDLAPRQRAMPDYAGTLNYAYHLDAGKLAAMLMRHATERLGVRHVRDHVVGIDGTADGDIAAVRTRASGAIAGDLFLDCTGHAALLIEGYYGIGTVDRGGTLFNDRALAVQVPVAADSPIASQTNATAHAAGWIWDIGLPMRRGVGCVYSSAHLSDDAAADTLTRYLRATAPDAALPSFRQLTFRSRHRETFWHRNCLAVGLSAGFLEPLEASAIVLIELSLDALLDNFPSHRGAMDIHSMRFNTLFRYRWDRIVEFLKLHYVLSERDEPYWRDHRDPASIPPRLAELLQLWRHQPPSRADFPMVDEIFPAASYQYVLYGMEFPAPTRGPIATPDRARTQTLLAQVDQRRRMLAAGLPTNRAYLDALRHATRHSHNLPCRKLGASGFLRPLQKPVRHSAAVTPLYGHPTHPSNGFLQFQVTFRISARNAAASPFHPACSSCLRRTGFYAALADRLERVCHATGQDVQDRDPASVRLRPRSRPCWSGLQKPRSAVACGTGSLR

SEQ ID NO: 86271 - protein, 501 aa, Rheinheimera sp.
  misc_feature (1)..(501): tr|A0A0M0M0H7|A0A0M0M0H7_9GAMM Tryptophan halogenase OS =Rheinheimera sp. KL1 OX=1635005 GN=WH43_18310 PE=4 SV= 1
MNTKAVKNVVILGGGTAGWITASLLVKVLGKAINITLVESDDIGIVGVGEATIPPIINFNAALGLDEKAFIRETQGSIKLGIQFENWGKPGDSYMHAFGAIGKEFPFCNFHHFWLKSKQQGMGFDFWDFSLAYQAARQNNFAKLARIEGVNLPGLSYAYHFDAGLYAQFLRRFCEPLGVKRIEGTVKKVHLDPVNGEVIRLTLASGNEVEGDLFVDCTGLHSLLIDKSLNTGFEDWSHWLPADSALAVPCESVQPITPYTKAIAHPKGWQWRIPLQHRIGNGFVYSSKYCSDDEAKQTLLSNLDGKALAEPRKISFRTGRRLKQWNRNVVSIGLSSGFLEPLESTSIHLIQSGVFRLLKCFPHSGITDAARDEFNRQSKVEFEQIRDFIILHYKLNNRGDSQYWKDYQTMDIPESLRRKIDLFSASGLIFREQDELFAEVAWQQVFIGQGIVPTDTHPLVNALKEEQLQDLLSNLKAVMQLTSQRLGSHADFLQSCHLKDM

SEQ ID NO: 86272 - protein, 532 aa, Serratia odorifera
  misc_feature (1)..(532): tr|I1V4W6|I1V4W6_SEROD Tryptophan halogenase PrnA OS=Se rratia odorifera OX=618 GN=prnA PE=4 SV=1
MSKPIKNIVIVGGGTAGWMSASYLVRALQQQANITLIESEAIPRIGVGEATIPSLQKVFFDFLGIPEREWMPQVNGAFKAGIKFVNWRESPDRSRNDYFYHLFGNVPNCDGVPLTHYWLRKREQGFQQSMAYACYPQPGALDGNLAPCLHDGSRQMSHAWHFDAHLVADFLKRWAVDRGVNRVVDEVVEVKLNELGFISGLLTKEGRQLEADLFIDCSGMRGLLINQALKEPFIDMSDYLLCDSAVATAVPNDDAQVGVEPYTSSIAMNAGWTWKIPMLGRFGSGYVFSSKFTSRDQATTDFLNLWGLSENQPLNQIKFRVGRNKRAWVNNCVSIGLASCFLEPLESTGIYFIYAALYQLVKHFPDTAFDPRLADAFNTEIVYMFDDCRDFVQAHYFTSSREDTAFWLANRHELRLSDAIQEKIERYKAGLPLTTTSFDDATYYDTFDFEFKNFWLNGNYYCIFAGLDMLPDRSLPLLQLRPESIEKAEAMFAHIQREAERLRAGLPTNYDYLRSLHQSNTGQSRPASPETL

SEQ ID NO: 86273 - protein, 505 aa, Xanthomonas translucens
  misc_feature (1)..(505): tr|A0A5C1X350|A0A5C1X350_XANCT Tryptophan 7-halogenase OS=Xanthomonas translucens pv. undulosa OX=487909 GN=F0 H33_19720 PE=4 SV=1
MIAAPLRNLVVVGGGTAGWMAAAALARVLGPDYRITLIESEQIGIVGVGEATVPHIKAFNNLLGINEAEFVRQTQGSFKLGIEFVDWQRPGTTYIHGFGTEIGHSLGLLPFQQYWFKQALAGKAKPLGAYTLNTVAARRGKFMTSASDAPPNSPLGNIAYAYHFDASLYAAFLRRFSEQRGVTRREGIVEQVQLHPESGHVLSVRLAPGDTIAGDLFIDCSGFRGLLIEQALHTGYHDFTHWLPCDRALAVPCAKVGPPTPYTRATARAAGWQWRIPLQHRTGNGYVYSSAHISDDEAAATLLANLDGAALADPRPLRFVTGRRKQVWNRNVVALGLASGFMEPLESTSIHLIQSGISKLLELFPREGISPVLVQRYNDRIAFEFDRIRDFLVLHYTATERDDSDFWRQCRAMAITPELQATLDLFGDSGRFYRNGDEMFAEISWVQVMVGQGILPRAYHPLVDQVPAADIERFVASIEQTIGHCVDAMPPHQAFIDRYCAAAPR

SEQ ID NO: 86274 - protein, 512 aa, Colwellia sp.
  misc_feature (1)..(512): tr|A0A168PG42|A0A168PG42_9GAMM Tryptophan halogenase, p utative OS=Colwellia sp. C1 OX=1737566 PE=4 SV=1
MKTRVIIVGGGTAGWLTAGIIAARHCSKNTSAQDTDVILVESPEVKNLGVGEGTWPTMRDTLRQIGISERTFLSCCDASFKQASKFVGWSNGQNEHYYHPFTAPSGYGAVSMADHWSATNKDIDFESWACAQGAICDKNLAPKLPQMPEYAFSLNYGYHLNAGKFVKILHQHCVEKLGVKYIQGHVEQIIPAENDDISEIVLSNGEHIAGDLFIDCSGFTALLIDKHYQIPFKSKQHILFNDTALALQVEHATDDVPIASCTVATAQESGWIWDISLQNRRGIGHVFSSDFTSVERAEEALLKYVENDPLLASQQLTPRTIKFNPGHRETFWHKNCVAIGVSAGFVEPLEATALVLIEKSAEWISEQLPRDRSAMSILAKRFNTLTLQRWQEIIDFLKLHYILSNRKDSEYWREHQQANSIPESLQEALTLWRTQAPGVYETNQRFELFSSASKQYVLYGMGFNTEQKKSDQLCQKEASLIKRLRNETLHSTEKLLSISPTNRQFLSRMLEK

SEQ ID NO: 86275 - protein, 505 aa, Kutzneria sp.
  misc_feature (1)..(505): tr|A8CF74|A8CF74_9PSEU KtzR OS=Kutzneria sp. 744 OX=345 341 GN=ktzR PE=4 SV=1
MTAAYLKTAFGDRLSITVVESSRIGTIGVGEATFSDIQHFFQFLNLREQDWMPACNATYKLGIRFENWRHVGHHFYQPFEQIRPVYGFPLTDWWLHDAPTDRFDTDCFVMPNLCEAGRSPRHLDGTLADEDFVEEGDELANRTMSEHQGKSQFPYAYHFEAALLAKFLTGYAVDRGVEHVVDDVLDVRLDQRGWIEHVVTAEHGEIHGDLFVDCTGFRGLLLNKALGVPFVSYQDTLPNDSAVALQVPLDMQRRGIVPNTTATAREAGWIWTIPLFGRVGTGYVYAKDYLSPEEAERTLREFVGPAAADVEANHIRMRIGRSQESWRNNCVAIGLSSGFVEPLESTGIFFIHHAIEQLVKHFPAADWNPKSRDMYNSAVAHVMDGIREFLVIHYRGAARADNQYWRDTKTRPLPDGLAERIECWQTQLPDTETIYPYYHGLPPYSYMCILMGGGAIRTPASAALALTDQGAAQKEFAAVRDRAAQLRDTLPSHYEYLARMRGLDV

SEQ ID NO: 86276 - protein, 535 aa, Jahnella sp.
  misc_feature (1)..(535): tr|V5UVQ7|V5UVQ7_9DELT Tryptophan halogenase OS=Jahnell a sp. MSr9139 OX=1434086 GN=mscL PE=4 SV=1
MLTTEDYEFDQMKALFAPPGFTRARRTTTVRSVGVIGGGTAGYLTALALKRVFPDLKVTVVASSKIPVIGVGEATTPLLPKLLHSFLGLDVVEFYEKVRPTWKLGIKFVWGKPGDYYFHYPFEPGDLVESLLYEGHINGANFQGRLMDMDKTPVLELPDGTWRSCLHYVPYAYHLENRRFVAYLAEKLPEFGVETLDRTVIDAEVEGEDRIGTLICEDGDRLKYDLYIDCTGFRALLLEKLGAKFESYGTSLVTNTALTARVPHHGHIKPYTTARTMKNGWCWVIPHDDIDHLGYVHSSDFCSLEEAERELQEAFPGMQKHIGLVRFRSGRHDHFWRGNVVAIGNSYAFVEPLESTAIHVITEEINVLLNNFPVTLEERHTPRYVNRRVNHRWDQLRGFLAIHYKFNGRLDTDFWKFCRNEVDLADGQQYVDVFREMAPMGARIHRLWERPECFDDAGYDTLLLGQGVETRLMKPRYTREQWRARYEKGNAILATAKTHAQALDFFAKNPDELRRSVDLRSASGMSFPGLLEDIM

SEQ ID NO: 86277 - protein, 534 aa, Sphingomonas sp.
  misc_feature (1)..(534): tr|A0A520DQR4|A0A520DQR4_SPHSX Tryptophan 7-halogenase OS=Sphingomonas sp. OX=28214 GN=EOP65_02105 PE=4 SV=1
MNEHTIRSVVILGGGTAGWMAAAAMARFLNNGVTRVTLIESEEIGTVGVGEATIPPLRTFNSMLGIDEHEFIRETGGTYKLGIEFVGWGDIGERYFHPFGAHGHDLGGVHFHQLYLRERQRRVLPDISAWSMSAVAAQAGKFAPPAPQAQSAVKDLFYAYHFDAVRYAGFLRRFAERNGVQRVEGKVVAVAQRPEDGHVTALRLDDGQVIGGDLFIDCSGFRGVLIEEALETGYEDWRHWLPCDRAVAVPSAYSGDPDPFTRATARGSGWQWRIPLQQRMGNGLVYCSDFLQPDAAERELLANLEGAPLAAPRHLSFTTGRRKLAWNRNVVALGLASGFIEPLESTSIHLVQSGIARLIALFPDRRFDPVERDEYNAQMHELYADVRDFVILHYKATRRGDTPFWDRCRTMDIPDSLARKIELFRGKGRVFRENRELFATTSWVSVCLGQDIVPQDYEPAVDALDEERVAGALEEMRREYLDIAGRLPSHGDFLRHIAGQPSAPATAPAAPAATAGPTFSFASESPFDFSADPL

SEQ ID NO: 86278 - protein, 150 aa, Sphingomonas sp.
  misc_feature (1)..(150): tr|A0A520JGR4|A0A520JGR4_SPHSX Tryptophan halogenase (F ragment) OS=Sphingomonas sp. OX=28214 GN=EOP67_19490 PE =4 SV=1
ISKLLALFPDQGFSPVEIDTYNRLAETQFDQVRDFLVLHYHATRRTDSPFWREAGARAIPDSLAEKIALWRRRGRLFRWEDDLFAEASWVAVLLGQGIVPEGWDRLADTVDARDVDARFDRLRVMFADAAARMPHHEDYLARTSPARVRA

SEQ ID NO: 86279 - protein, 464 aa, Sphingomonas sp.
  misc_feature (1)..(464): tr|A0A520IMI6|A0A520IMI6_SPHSX Tryptophan 7-halogenase (Fragment) OS=Sphingomonas sp. OX=28214 GN=EOP67_47705 PE=4 SV=1
MTACLIAHRWRDRGGRVTLVESPEIGIVGVGEGSTPQLKHFFDTLGIAEAEWMPACDATYKLGIGFEGWSDREGYDQYFHPFPTELDGHTAPQFFYNARARRTGRNVDAHPDQFLLPARLAAQNRAPQPAANFPFEVSYGYHFDAYKVGAFLATHATETLGVVHLQRRIASVETASTGEITALTDTGSEHIAGDFFVDASGFRSTIFSALDVPFVSYADVLFNDRAVVMPTAHTPGAPIPSQTRATALSAGWAWHIPLTSRNGNGYVYSSRHLTEAQAEAELRAHIGVDTGEARHLTMRVGRVRDSWSHNALAVGLAQGFLEPLEATALHLVIATVEAFLDMIDQAGATEATRTAFNTRIAARYDGVRDYIVAHYRLNQRHDDPTGYWAEARGVDALSDDLKMLMSTWFTGADMVAAIDRAGLGRYYSAISWHCLFAGYGTFPDAARLIPPGADIDPIDLPKID

SEQ ID NO: 86280 - protein, 172 aa, Sphingomonas sp.
  misc_feature (1)..(172): tr|A0A520JJX3|A0A520JJX3_SPHSX Tryptophan halogenase (F ragment) OS=Sphingomonas sp. OX=28214 GN=EOP67_13540 PE =4 SV=1
MTAAALSRLVPSGVSVTLVESEEIGTVGVGEATIPPLLDFNRMLGIDEDAFVRATGATFKLGIEFRDWARLGDTYLHPFGTHGRDIGGVSFHQLWLRQAALGNPDPGPIGDYCLSAVAARRGRFTRPSANPESVLSTLFYAFHFDAALYAKFLRDMAEQDGVVRVEGRVVAV

SEQ ID NO: 86281 - protein, 140 aa, Sphingomonas sp.
  misc_feature (1)..(140): tr|A0A520D8C2|A0A520D8C2_SPHSX Tryptophan halogenase (F ragment) OS=Sphingomonas sp. OX=28214 GN=EOP65_12445 PE =4 SV=1
FPDRDCDPALAARFNTTFARDMDGIKDFLILHYHATGRDEPLWRHCQTMRLPDGLHERIGQYRRSGRLILDADELFREASWLAVLDGQGIRAQSYNPLADAIDPAANRAQVQQIADVIARAAPTLPTHDAVLAQMIGTPS

SEQ ID NO: 86282 - protein, 201 aa, Sphingomonas sp.
  misc_feature (1)..(201): tr|A0A520I0Y1|A0A520I0Y1_SPHSX Tryptophan halogenase (F ragment) OS=Sphingomonas sp. OX=28214 GN=EOP68_01115 PE =4 SV=1
MANGERVRRIVVVGGGTAGWLSACLLAARAGDVAGSPIEVTLVESPDVPTIGVGEGTWPTMRRTLAAIGLAEADFLLACDASFKQGSRFDGWRTGEDRYYHPFVPPFAAEPRDLVAAWDGRRPFAAAVSPQGAACDADLAPRQRAMPDYAGALNYAYHLDAGKFAALLARHGVATLGIRHVRDHVVAVAQSDDGDVVAVET

SEQ ID NO: 86283 - protein, 492 aa, Sphingomonas sp.
  misc_feature (1)..(492): tr|A0A520IWC3|A0A520IWC3_SPHSX Tryptophan 7-halogenase OS=Sphingomonas sp. OX=28214 GN=EOP67_41250 PE=4 SV=1
MAAQAKRTGSGVTVKLVESDRIPTVGVGEGTWPTMRNTLAKIGISETDFIRSCDASLKQGARFVGWTDGLPGDAYYHPLNPPAGASEIDLAPHWLGRSDGSGASFADCVDYQAALCDAGLAPKTITAPEYAGHANYAYHLDAGKFATMLRDHATASLGVEHVIGDVTRVNQSDSGDLLDVELHVGRRIAGDLFVDCTGFAALLIGGVYGVPFKSCRDVLFADRAIAMQVPYDREDDPIACHTISTAQDAGWIWDIGLWTRRGVGHVYSSAHTSDDAAEAALRRYVGPAADALSVRTINIDGGYRERFWQNNCVAVGLSAGFIEPLEASALMLIETSMDAIADRLPRTRAAMDMVARQFNDTFRHHWLRIVEFLKLHYVITHRTDTDFWRDNAAAASMPDGLQERLDLWRHHSPAPQDFSHAREVFSWPSYQYVLHGMRFASHYPPVGAAASEAAIATGLIARNDRLRADLIARAPRHRDLLRSVREYGLQRV

SEQ ID NO: 86284 - protein, 310 aa, Sphingomonas sp.
  misc_feature (1)..(310): tr|A0A520JAT2|A0A520JAT2_SPHSX Tryptophan 7-halogenase (Fragment) OS=Sphingomonas sp. OX=28214 GN=EOP67_30555 PE=4 SV=1
METATRQRVVVVGGGTSGWMTAAALAKLLPDRCDVHLIESEAIGIIGVGEATLPHIRAFNERLGIVEADFMATTRATFKLGIEFRDWGRIGDSYIHPFGTFGRGTGDVQFHHYYTRLLHAGIELPPIEAFSMACTLARTNRFAQPSTDARQIASTFGYAYQFDAVAFAPYLRRFAEALGARRSEGRIVDVERDGESGDVNAVVLEDGRRIKGDLFVDCSGFAALLIGKALGEPFQDWSRWLPADRAVALPCRTETAVTPFTSAVAMPSGWRWRIPLQHRTGNGYVFASGFVSEDTAADALTAAVEGTPLA

SEQ ID NO: 86285 - protein, 506 aa, Sphingomonas sp.
  misc_feature (1)..(506): tr|A0A520JKZ0|A0A520JKZ0_SPHSX Tryptophan 7-halogenase OS=Sphingomonas sp. OX=28214 GN=EOP67_11570 PE=4 SV=1
MTDPNRGPIRKVVIVGGGTAGWMAAAAAARYLDDGQRQIVLIESDAIGTVGVGEATIPPILGFNALLGIDERDFLRATGATFKLGIEFVGWDTGDDRYMHAFGGHGRDIQGLAFHQLWLKLRDRPGIGALDAYSPSAVAAYLHKFGRPSGQQPLAYAYHFDAGLYAAFLRRHAEAGGVTRIEGRIIGADRDPDTGHVSAVRLDDGRSVDGDLFIDCSGFRSLLLGETMSVPFEDWSHWLPCDRAVAVATEPSAPLLPYTRATARSAGWQWRIPLQHRTGNGHVYASEHMSDDEASALLLANLDSKPTADPRQLRFKAGRRTKMWEGNVVALGLAGGFLEPLESTSIHLIQTGISKLFALFPDRSFSDVERDEYNRLMGDAYTSVRDFIILHYHATRRDDSTFWRRVRTMPIPDSLTRKLALFREKGRIFRYDDELFGIPSWVQVLLGQHVTPVGYDPIVDALDADRVADALREMRAATLRTAKALPDHAEFVARHAPFDRHQGFAK

SEQ ID NO: 86286 - protein, 504 aa, Sphingomonas sp.
  misc_feature (1)..(504): tr|A0A520DQX9|A0A520DQX9_SPHSX Tryptophan 7-halogenase OS=Sphingomonas sp. OX=28214 GN=EOP65_02115 PE=4 SV=1
MERAERQRVVVVGGGTSGWMAATALAKLLPSRCTVELVESEAIGIIGVGEATLPHIRAFNERLGIVEAEFMAATRATFKLGIEFRDWGRIGDSYIHPFGTFGRGSGEVQFHHYYTRLLRDGVPLPPIESYSMACSLARANRFGQPARDPQQIASTFGYAYQFDAVAFAPYLRRIAEGLGARRTEGRIVAAERDSQSGDVTALVLEDGRRVEGDLFVDCSGFVALLIGKELAEPFEDWSRWLPADRAVAIPCRTATAVTPYTSAIAMPSGWRWRIPLQHRTGNGYVFASDFLSESAATDALLGAVEGTPLADPRILRFKAGRRARSWVNNVVAVGLASGFLEPLESTSLYLVQQAITALIELFPEKRIAPVDRDEFNRLINMEYDRVRDFLILHYHATERDDSPFWTYVRTMPIPDSLAEKMALFKRRGRVVKYREGAFLDASWVSVYLGQRVVPTGADPRAAAPSTDSLVAGLDRMRGEIAAAVGAMPAHAAFLAGYCPMPAAT

SEQ ID NO: 86287 - protein, 500 aa, Sphingomonas sp.
  misc_feature (1)..(500): tr|A0A520D577|A0A520D577_SPHSX Tryptophan 7-halogenase OS=Sphingomonas sp. OX=28214 GN=EOP65_15260 PE=4 SV=1
METRRIRRVVILGGGTAGWMTAAALSHSFGAAVTVTLLESEEIGTVGVGEATIPTIHWFNALIGLDEAEFLRATKATFKLGIAFVDWTAPGHRYFHPFGQYGAALPGVAFHHRWLKAAADGLDLPLGALSLAERLATENRFARPSGDARSILSSLGYAYHFDAGLYAAYLRRVSEARGVVRVEGRLGSVERDADTGFVGALTTARGERLEGDLFIDCSGFRALLIDGVVGEPFEDWSHWLPCDRAVAVPCARVATTTPYTRSTARAAGWQWRIPLQHRTGNGYVYASAQCSDDAAIATLLANLDGEALAEPRLLRFTAGMRRRPWRDNVVAIGLSSGFLEPLESTSIHLIQSGIAKLLTLFPDRDCDPALAARFNTTFARDMDGIKDFLILHYHATGRDEPLWRHCQTMRLPDGLHERIGQYRKSGRLILDADELFREASWLAVLDGQGIRAQGYNPLADAIDPAANRAQVQQIADVIARAAPTLPTHDAVLAQMIGTPS

SEQ ID NO: 86288 - protein, 424 aa, Sphingomonas sp.
  misc_feature (1)..(424): tr|A0A520DCZ1|A0A520DCZ1_SPHSX Tryptophan 7-halogenase (Fragment) OS=Sphingomonas sp. OX=28214 GN=EOP65_09830 PE=4 SV=1
MTATPIGRVVIVGGGTAGWMAAAAASRFLNDGQRTITLVESDAIGTVGVGEATIPPIRGFNARLGIDEAEFLRATGGTPKLGIEFVNWGASGDRYMHPFGTPGHDIEGLNFHQLWLKLRGEPEIGDFEGYAMAAVAARAGRFAPPSPDPRSPLSGVDYAYHFDAGLYAAFLRRRAEEQGTIRVEGRITGVEQDARGHVTAVRLEGDRRIAGDLFLDCSGFRSLLLGETMGVGFEDWSHWLPCDRAIAVPTERTQPLLPYTRATAHDSGWQWRIPLQHRTGNGHVYASAFTDDDTAERVLLANLDAAPTAAPRRLSFTAGRRRQSWAGNVVALGLAGGFLEPLESTSIHLIQEGISKLFALFPDARFSPVERDEYNRLMGNHYTAVRDFIILHYAATRRDDTPFWRHVRTMDLPETLARKIALFR

SEQ ID NO: 86289 - protein, 198 aa, Streptomyces alboflavus
  misc_feature (1)..(198): tr|A0A1Z1WKW3|A0A1Z1WKW3_9ACTN Tryptophan 5-halogenase OS=Streptomyces alboflavus OX=67267 GN=prnA PE=4 SV=1
MRIGRSERSWVNNCVAIGLSSGFVEPLESTGIFFIQNAIEQLVKHFPAAGDDEGLRAAYNRQVGNVMDGVREFLVLHYYAAERADNQYWKDTKTRPMPDSLAERIEQWKTKLPDSETIFPNYHGFESYSYIAMLLGLGGIKTAPTAALGLFDYTSAKAEFALVKDQAKQEVDRLPSQYEYFAHLRRLTPEERAQPLVA

SEQ ID NO: 86290 - protein, 508 aa, Brevundimonas sp.
  misc_feature (1)..(508): tr|A0A514BZT0|A0A514BZT0_9CAUL Tryptophan 7-halogenase OS=Brevundimonas sp. M20 OX=2591463 GN=FKQ52_04820 PE=4 SV=1
MGDTDPRITSVLIVGGGTAGWMAAAALSRAFGDLPEPGRPVIRLVESDAIGTVGVGEATIPPIRQFNRSIGLDEADFMASTGATPKLGIAFHDWMGSGSRYFHGFGDHGPDVQGQPYRQHLFRLKAEGRLSSLDPWSVPAVMAESGRFGPPVSDPRSILSAYSYAYHFDAGLFAKRLSALAQTAGVARVEGRISDVEAADGRVQAIRLEDGRRLEADLFIDCSGFRGLLIEGALQAGYEDWSRWLPCDRAIALPTSASRPPDLYTTARAASAGWCWRIPLQHRVGNGYVYSSAFINDDDALDELVNGLEAPAEAEPNRLRFVTGRRRAAWKGNVVALGLASGFLEPLESTSINLIQTGIGRLLELFPDREFDPALIAEYNRRTELEWIGVRDFIIAHYHLAGRTEGALWAHCRETAPPDSLAERLELFRARGEIDPSHYDSFREASWTSVLTGLDVWPRKVAPQVSALDLDVVERQALKISELIARATATLPDRLEFLRGVQMKTEAR

SEQ ID NO: 86291 - protein, 474 aa, Mitsuaria sp.
  misc_feature (1)..(474): tr|A0A5C6YUC9|A0A5C6YUC9_9BURK Tryptophan 7-halogenase (Fragment) OS=Mitsuaria sp. TWR114 OX=2601731 GN=FUT87_ 25225 PE=4 SV=1
MVQRIVIVGGGAAGWMTAAALASSRQGRWSVTLVESEEIGIIGVGEATFPSIRAFNERIGIDEAEFLHATHGSYKLGIEFRDWHSIGDRYFHTFGNFGSLLGPYMLWGQYRRAADASLGELGEQCLPTAMAMQGRFVVPDEDGGAPYKYAYHFDAMLYAAFLREWSMRRGARRIEGRIVEVLRREDGDVERLRLADGREVEGDLFIDCSGFASLLLGRALKEPFVDFSHWLPVDGAWACPCERVGEALTPYTRATALEGGWAWRIPLQSRTGHGHVFSSRYIDPDAARAQLMAQLDGKPLAEPRLLRFSTGHRERFWVRNVVALGLSSGFLEPLESTSIFLIQTNLAHLMTLLEAKAPIDEAAIDAFNARGTREFRRIRDFILLHYCLTARRDSALWRDMATMDLPETLAYKIELWRHHGVLHQQQDEGFDETSWLAIHAGMRHWPQRTDPVLEELPLDHARDILRQRREAIAR

SEQ ID NO: 86292 - protein, 515 aa, Streptomyces viridochromogenes
  misc_feature (1)..(515): tr|L8NY63|L8NY63_STRVR Putative Tryptophan halogenase P rnA OS=Streptomyces viridochromogenes Tue57 OX=1160705 GN=STVIR_8786 PE=4 SV=1
MENVVIVGGGTAGWMTAAYMTAAFGDRVKITLVESADVGTIGVGEATFSDIRHFFEFLGLAERDWMPACNATYKLAVRFENWREPGHHFYHPFEQLGSVKGFPLTDWWLRHPTTKRFDVDCFVMANLCDAGRSPRYADGRLLEQEFVENEDLPTTIADYQGAQFPYAYHFEAHLLAKFLTKYATQRGVRHIVDNVQDVGLDERGWISHVQTAEHGRLEGDLFVDCTGFRALLLNKALGEPFVSYQDTLPNDSAVALQVPMDMDKDPIRPCTTATAQDAGWIWTIPLISRLGTGYVYSRDYLDPEEAERTLREFVGPAAADVPANHIKMRIGRSRRGWVNNCVAIGLSSGFVEPLESTGIFFIHYAIEQLVKYYPAADWDVSLREQYNNSLMNVMDGVREFLVLHYRGAKRADNQYWRDTNTRKIPDSLAERLEQWESKVPDAGTVYPRYHGLPPYSYNCILLGTGGIDVRPSPALDLIDEKDALAEFQRIKDKARTLVASLPTQNEYFRKMRDGA

SEQ ID NO: 86293 - protein, 419 aa, Actinoplanes sp.
  misc_feature (1)..(419): tr|G8SM58|G8SM58_ACTS5 Tryptophan halogenase OS=Actinop lanes sp. (strain ATCC 31044 / CBS 674.73 / SE50/110) O X=134676 GN=ACPL_6152 PE=4 SV=1
MSSQLFGVPDEFDVIVIGGGPAGATTAGLLAQRGHSVLVLDRERFPRYHVGESLIPAFMRPMKELGLTERMDARGFERKYGGTLIWGNEQVPWQFSFIEGGYEYAYHTRRADLDALILDRARELGACVVEDATVRETIDVDGRVTGVRYALRGGDGLVEARARLVVDASGQARVIGRRQTGVKWHDELRNVAVWTYFDNCERLPGDEYTNILIEGLDEGWFWGIPIDKGTISVGYVTRASMAGEGDQKLEQIFREQVERTTKLKKMLAPGRRSAGFRTARDWSYHSDRFYGDGWVLVGDAAAFVDPLFSTGVALATLAGSTLAKIVDQIIEHPEIEEKALDRYATAYSNFFDEIRTFVERFYDRTKYKEFYHSLAQEMVDPEQKNKPSQDFVTLISGMSGKHAMFHIDLSDLIAADDGR

SEQ ID NO: 86294 - protein, 526 aa, Colwellia psychrerythraea
  misc_feature (1)..(526): tr|A0A099KCC8|A0A099KCC8_COLPS Tryptophan halogenase OS =Colwellia psychrerythraea OX=28229 GN=ND2E_4230 PE=4 S V=1
MTDIHKDDLVKEVVIIGGGTAGWLTACHLAKKHGSNTPQGLRVTLIESPNIPTIGVGEGTVPSILESLRYFGISETDIIRECDATFKQSIKFVNWMKPKGNSHNNYYHHPFDYIDSNQFDLTPYWLNGQFEGHSYTDTIGIQSYVSDLHLAPKLMTHEEYAGINGYAYHLDAAKFSQLLTRHAVEKLGVKHVLAEVKDIRLTDCGAIDSVVTDNQGEFFADLFVDCTGFSSLLLGQTLGVNFISKNDVLFADHALAIQVPYTDPNQTIPSYTISTAQEAGWIWDIGLSERRGTGYVYSEKYSSHARAEQVFRDYLRQSIGDKVDELPCRRIEMNVGYREKFWVKNCVAIGLSQGFVEPLEATGLLIFDDTAKMLAEQLPSKMSTMPIIAERFNKIGRYQWDRVIDFIKLHYYLSDRDDAPFWRDNRSQESTPQKLLDNLALWRERPPSDYDFITKQEVFYRTNYLYVLYGMAFNTDISAIAYRYTEQGKAEQKHSLILQQKAKVQGMLLPHRELLQRIKQYGLQKI

SEQ ID NO: 86295 - protein, 492 aa, Colwellia psychrerythraea
  misc_feature (1)..(492): tr|A0A099KQX6|A0A099KQX6_COLPS Tryptophan halogenase OS =Colwellia psychrerythraea OX=28229 GN=ND2E_2590 PE=4 S V=1
MNTDKIKKVVIAGGGTAGWMAAAAISKLLGKNLEITLVESDEIATVGVGEATIPTLQYFHQLLNIKEADFLKATHGTFKLGISFENWRDKNEDYIHAFGTTGKDCWAAGFQHFWLKGQQKGIAGEYGDYCLEKAAASAEKFAQLPNNGLNYAYHIDATLYGQFLRKMSEQHGTKRIEGKIDKVNLHPESGYIDSLTLASGKVIDGDLFLDCTGQRALLIEQALHTGFEDWSHWLPCDSAIAVQTKSVDNPIPYTRSIAHDFGWQWKIPLQHRVGNGIVFSSKFVTDDEAKSTLMNNLVGEAITEPRVIKFRTGTRRQHWNKNCVAVGLSSGFLEPLESTSIHLIQQAIVRLMRMFPHTGIQQSDIDEFNKQTKFDTASIRDFIILHYSVTNRQNSNFWRHCRNMPIPETLANKIKLFKETGRFFRENNELFDDSWMQVMIGQGLLPRNYHPIVDNMSDDELKRFLEHIKANVDGTVNQLPNHATFIEQFCHA

SEQ ID NO: 86296 - protein, 480 aa, Planctomycetes bacterium
  misc_feature (1)..(480): tr|A0A5C5WX11|A0A5C5WX11_9BACT Tryptophan halogenase OS =Planctomycetes bacterium Pla22 OX=2527999 GN=Pla22_243 20 PE=4 SV=1
MNPSHVAIIGSGFSGSLLGWILASQGVQVSLIDAQTHPRFAIGESSTPIADTLLRRLGETYQLKPLVDLSTYGSWKKTHPKITCGKKRGFSYYHHEAGQPFAEDHLGKRSLLVAASQSDSKADTHWYRSEVDEYFFKQAILSGVQPYSATSIVDIASVGDQCRLLCGGNYTGELIADYVIDATGRAAITAKLLGQPNLRDQLKTQTATSFAHYRGVRPWRDYLQAHGFDTSNDPFNPDDAAQHHLLGNTWTWMLRFDNDITSIGFCSPRGQVNDFASTSAYHWMMQDAVQVYPDDQSLIPSGQSLITEPWIQSYHEPIVADRVWMMPTAAITMDPLHSTGIAHGLAGVERLATMLLNPDGNAPARYAEILHQEVSLLDRLISTAYTVANDPARFNAACMVYFAAAITCEEQLKAGQNPSHLYNAGEDAFRTAVRNACGIISDLGEPRFESLVRTEIAPWNTAGLMSSGHQNRYAYTATKG

SEQ ID NO: 86297 - protein, 496 aa, Colwellia psychrerythraea
  misc_feature (1)..(496): tr|A0A099K9W2|A0A099K9W2_COLPS Tryptophan halogenase OS =Colwellia psychrerythraea OX=28229 GN=ND2E_0467 PE=4 S V=1
MNNPIKKVVVLGGGTSGWISAALLKKILGSSIQLELVESDDIGTIGVGEATIPPIRHLNNVLGINEAEFLRETKATIKLGINFEDWKNRGHSYLHSFGAAGKSLAFCHFHHLLKRANQLEDGSHLWQYDLNYLCAKAGKFAQIKSKDPIIELPYAYHFDAGLYAKYLRKFSEKLGVIRTEGLVEHVEQCPTSGHITSLKLKNGQTVNGDLFIDCSGFRGLLIQEKLRTGYEDWSHLLQCDRAIAVPSERLDKTLPYTRSIAHSAGWQWRIPLQHRNGNGLVYSSSHCSDQQAMDTLMGNLDSKAIADPKVIRFQTGRRYQQWNKNVIAIGLSSGFLEPLESTSIHLVQSAVVRLVHLFPHLGINSSLVDEFNKQSATEFEQIRDFLVLHYHATERTDSDFWQDMCQMKIPDSLAHKIEIFKQSGRLFREQNDLFTDSSWLQVMLGQGIIPQDYHPIADTMSDEKLTEMLRKVKEIKQAPIDKLPSHDEFLTMYCRQ

SEQ ID NO: 86298 - protein, 520 aa, Streptomyces sp.
  misc_feature (1)..(520): tr|A0A429JN96|A0A429JN96_9ACTN Tryptophan halogenase OS =Streptomyces sp. WAC 06725 OX=2203209 GN=DMH15_07360 P E=4 SV=1
MLTNVVIVGGGTSGWMSASYLKAAFGDRLSVTVLESKRIKTIGVGEATFSTVRHFFDYLGLPEHVWMPKCNATYKLGIRFENWHRKGSYFYHPFERLRVVDGFPLTDWWLHRKPGNSERFDQDVFLMSAICDAERSPRYMDGTLFEQDFKEQTDPKDRKPERSTLTEQDTQFPYAYQFDASLLADYLCAYSTERGVRHIEDDVVEVARDDRGWIGHLRTREHGDVTADLFIDCTGFKGLLLNEALEEPVISFQDTLPNDRAVALRVPVDMEKRGLRPCTTATAQDAGWIWTIPLFGRIGTGYVYASDYTTPEEAERTLREFVGPDAEDVEANHIRMRIGRSRNAWVNNCVAVGLSSGFVEPLESTGIFFIQQGIEQLVKHFPGADWNPQLRDSYNRAIGNTIDGVREFLVMHYRGAGRNDNQYWKDAKTRALPDGLAERLDMWRSKLPTTETIFPKYHGFEPYSYHSMLLGLGGVDLKAPPALALMDDSAAQAEFKLLRAQSQELAKRLPSQYEYLAQMH

SEQ ID NO: 86299 - protein, 507 aa, Colwellia psychrerythraea
  misc_feature (1)..(507): tr|A0A099KJ52|A0A099KJ52_COLPS Tryptophan halogenase OS =Colwellia psychrerythraea OX=28229 GN=GAB14E_3679 PE=4 SV=1
MKKIVVVGGGTAGWLAANHLGKKFKHNDAITVTLIESPDIAPIGVGEGTVPNIRKTLSSFGISETEFIRECDVTFKQSIKFVNWMDKKKHGSDNFFHHLFDAPSKFGEDLTAHWLKFGQDKIYADMVSPQHSACEHKKAPKSITTPEYEGTLGYAYHLNAAKFAHLLSKNAVARFGVCHIKANVINVELSDSGAIAALNTKELGKLEYDFYLDCTGFESLLSGQALNIPFVDKSKELLVNSALVVQVPTKESDEIPPYTVATAHQAGWIWDIALTNRRGVGFVYSNNHMSDEEASRKLDYYLKGNPTGLSYRKLPMKVGHREKFWHKNCVSLGLAQGFLEPLEATSILLTDFAASFLVDRFPESEEKMAVLEQRFNHVMGYAWNRVVDFIKLHYCISDREDSQFWLDNKKADTIPDTLKARLDLWQQFSPQKEDFFSKFEVFDYDNYLYLLYGMNYKTKLSPLSTQYHDKAKAHAEGIKAISAKLNQQLPNHRELINKIKRYGLQAV

SEQ ID NO: 86300 - protein, 515 aa, Streptomyces sp.
  misc_feature (1)..(515): tr|A0A2S4ZGF6|A0A2S4ZGF6_9ACTN Tryptophan halogenase OS =Streptomyces sp. Ru62 OX=2080745 GN=C3492_29755 PE=4 S V=1
MTQSVVILGGGTAGWMTASYLRAAFADRVDITVVESRRIGTIGVGEATFSTVRHFFDYLGLSEADWMPECNGTYKLAVRLENWRAPGTYFYHPFERMRVVDGVPLTDWWQKVGGTGRFDRDCFLIPWLCDAKASPRYLDHRLFEQDFDEDPDRPLYRTTLAEQNTQFPYAYHFDASLLADYLCRHAVGRGVHRIIDDVVDVRLDERGWIDRLVTREHGDLTADLYVDCSGFRSRLLGDALGEPFISFQDSLPNDRAVALRVPVDTAVRGIRPCTTATAQDAGWIWTIPLYDRVGTGYVYAADYCEPEEAERVLRDFVGPAAADLEANHIRMRIGRSHRAWVNNCVGIGLSAGFVEPLQSTGIFLIQHAIEQLVRYFPGTDRDPVLRDTYNLSTARAIEGVREFLILHYRGAARVDNDYWRDAKKRAVPEDMAVRMEQWQSKLPDNDTTYPYYHAFEPYSYVCMALGLGGIPLRHPPALDLFDTRAARAELARVREQARKLVDTLPSQVEYLSGLR

SEQ ID NO: 86301 - protein, 523 aa, Colwellia psychrerythraea
  misc_feature (1)..(523): tr|A0A099KRL5|A0A099KRL5_COLPS Tryptophan halogenase OS =Colwellia psychrerythraea OX=28229 GN=ND2E_2587 PE=4 S V=1
MNKALKNIVIVGGGTAGWLTAAIIAAQHNSHHPDGVNITLIESPDIKPIGVGEGTWPTMRNSLEKIGISEDDFFRCTDASFKQGSQFIGWNNGQVNDSYYHPFIAPHGFGQTNISANWQQFNSHIPFAHAISFQPYLCDHGCAPKQPQTPEYAGVANYGYHLNAGKFAALLQQHCIAKLGIKHISDNVIKVNGEVKENITSVTTKNNGDISAHLFIDCSGSNALLLGQHYQVPFINKKDILFNDTALAVQVPYSKPDAPIASHTISTAQKAGWIWDIGLPTRRGVGYVYASDYLTDSEAETTLRDYLKQDLPAEAVKEAVIRKISFTPGHRENFWHKNCVAVGMAAGFLEPLEASALALVELSANMIAKELPANMSIIEITAKRFNQRFHYRWQRIIEFLKLHYLLSKRTDSPYWLDNQSATSVPQRLQELIKLWRFQAPSYNDFSEIEEIFPAASYQYILYGMGFITEKRTTSNLYDNTALAEKYAFENRQLCDKYLAGLPKNRQLINHILARGKNKNIHSI

SEQ ID NO: 86302 - protein, 514 aa, Colwellia psychrerythraea
  misc_feature (1)..(514): tr|A0A099KJG4|A0A099KJG4_COLPS Tryptophan halogenase OS =Colwellia psychrerythraea OX=28229 GN=GAB14E_3643 PE=4 SV=1
MQQTNSQSHMQDKIQKVVIVGGGTAGWMTASLLAKTLGKTLEISLVESDKIGIIGVGEATIPPIINFNSAIGINEKAFIKATQGTIKLGIEFNNWHRNGDSYMHAFGKIGKKLPFCDFNHFWLRAQQDKRGNANASSTIDTSSFWDFSLNYQAAKQHKFAPINNIPNTNLPGIAHAYHFDAGLYAKFLRKHATNLGVKRIEGTITKVNQHTDSGFINSLSLENDTNIAGDLFIDCSGLAALLIEKTLSTGYEDYSHWLPCDRAIAVPCEKVEPIEPYTRSTAHNFGWQWRIPLQHRTGNGLVYSSKHMSDDEAKELLLNNLDGKALAEPRVIPFKTGRRRKQWHNNVIAIGLSSGFFEPLESTNIHLIQTAAIRLMKFFPHNGIKQIEVDEFNAQSKVELEGIRDFIILHYKLNNRGDSEFWRACQRMDIPESLVTKIELFKKTGKVFCKPDDLFTEIAWQQVMIGQGNIPEDYHPLVDTLSIEQRTDLMASLKTLINRTVEKLPSHDEFLQSL

SEQ ID NO: 86303 - protein, 523 aa, Colwellia psychrerythraea
  misc_feature (1)..(523): tr|A0A1Y5EP26|A0A1Y5EP26_COLPS Tryptophan halogenase OS =Colwellia psychrerythraea OX=28229 GN=A9Q75_02980 PE=4 SV=1
MALDNNHILIIGGGTAGWLSAAILAKTLNSKNTDGVKVTLVESPTIPILGVGEGTWPNLRATLHKIGISETDFIRECDATFKQGAEFINWSKTPDPKQSHSYYHPLSTVSHSSYDFNLAPYWLQQDKKTRRPYDRAVASQARVCDEGLAPKQIVMAEYSAAQEYAYHLNANKLAEFLKQHCVEKLGVEFISANVTNIALDDENFITHVDTDHESEKQITADFFVDCSGAKGLIIKETYNTAWHSISDVIFNDTALAVQVPYSDKNQKINTHTLATAQEAGWIWDIGLQNRRGVGHVFSSKYISDQKAQQQLVDYLGDDYTEDLTIRKIKLNHGYHKKFWHKNSVAIGMSAGFVEPLEASAIFLFDAAANMLAAQFPRDKAQMKYAEDKFNRQLTMRMQRTVEFIKLHYCISQRRDSQYWIDNCDPITIPDNLKQRLAFWQGQVPTKYDFENAWEPFNLDSYLYVLYGMGFETDVANVAAKYTETTKAKHLFNNIDKASELLIDKLPKQRTLIEKVIKYGFTQV

SEQ ID NO: 86304 - protein, 499 aa, Streptomyces alboflavus
  misc_feature (1)..(499): tr|A0A1Z1W9I8|A0A1Z1W9I8_9ACTN Tryptophan halogenase OS =Streptomyces alboflavus OX=67267 GN=prnA PE=4 SV=1
MKKAFGDKISVTLVESGKIGTIGVGEATFSDIRHFFEFLDLKEEEWMPACNATYKLAVRFQDWRRKGHHFYHPFEQMPTVNGFPLTDWWLQDGPTDRFDTDCFVMANLCDAGRSPRFLDGSLIDQGFTEGAKELSGLTMSEHQGKTQFPYAYHFEAALLAKYLTKYSTDRGVHHVIDEVQDVRLDERGWIDHIVTKDHGSLEGDVFVDCTGFRGVLLNKALEVPFISYQDTLPNDSAVALQVPLDMEKRGINPYTQATAQDAGWIWTIPLFGRIGTGYVYAKDYLSPEEAERTLREFVGPEAAEVEANHIRMRIGRSEQSWKNNCVAIGLSSGFVEPLESTGIFFIHHAIEQLVKHFPAADWSPELRKSYNSSIANVMDGVREFLVLHYQGAGRDDTQYWKDTKTRAVPDGLAERLERWKVQLPDSENVFPYYHGLPPYSYMCILLGTGAIPARATPSLGMSDTAAAHKEFAAIRDKARHLIETLPSTYEYFASMRERA

SEQ ID NO: 86305 - protein, 496 aa, Sphingomonas paucimobilis
  misc_feature (1)..(496): tr|A0A0C9NHY8|A0A0C9NHY8_SPHPI Protein/1, contig: SP636 OS=Sphingomonas paucimobilis NBRC 13935 OX=1219050 GN= SP6_36_00160 PE=4 SV=1
MSDTRPITRVVVAGGGTAGWLAATALVRQLGPLVDVTLIESDDIGTVGVGESTIPTARSFHAFLGVDEAAFMSATQATFKLGIAFENWHQLGARYFHPFGTVGRAVAIADFQHFWLEARVHGFGRDYTDYSREARAAAEGRFARDANETLAYAYHLDATAYARFLRTIAEPAGVTRVEGRIIRVEQDGEGGDIAALHLERGERIAGDLFIDCTGFRALLIEGALETGFEDWSHWLACDRALAVQTEAVREPVPYTRAIAHRAGWRWQIPLQTRVGNGLVYAGDRMSEDEAVATLLGEVEGRPLFDPRPLRFRAGVRRRAWNRNCVALGLAAGFIEPLESTSIHLVMIAVMRLIQSFPFRGGDTGALAARFNAQSAQEWAHIRDFIILHYAQTERDDSPFWQHCASMPLPDSLKERIALFVESAGAWQGQDDLFRIDSWVSVMLGQGLMPRAHHQIARMLSPQALRESLSGLDRQIAEAIAPIPPHATFLRSYCPAA

SEQ ID NO: 86306 - protein, 517 aa, Erythrobacteraceae bacterium
  misc_feature (1)..(517): tr|A0A2D9PBT8|A0A2D9PBT8_9SPHN Tryptophan halogenase OS =Erythrobacteraceae bacterium OX=2026738 GN=CL952_06290 PE=4 SV=1
  misc_feature (411)..(411): Xaa can be any naturally occurring amino acid
MSGEFTNLVIVGGGTAGWLSACILAARRPELAITLIEAPDIPTVGVGEGSWPTLRETLAVIGIDETEFLTECDASFKQGSRFDGWVDGSERDCYYHPFSAPLSGAMPDILTAWKMQNDGQPYAEAVSPQAAICNRDLAPRQRTMPPFAGALNYGYHLDAGKFGALLASHGVKKLGVRHVHGKVTRTERGVDGLFTRLLLDNGSAIEGDFFIDCTGMASKLMGEELGIGWVDRSNVSFNDRALAVQVPVVPDSAIASQTIGTAHRAGWLWDIGLPTRRGVGCVYSSRFLSDDEAQAILMNYVGARIAGAEQAALTPRGLKFSTGYRDKFWAGNCLAIGLSAGFIEPLEASAIVLIELSLKALADGYPQSRTALPRLADRFNSLFRYRWERIVDFLKLHYVLSTRTEPYWQAXRDPATIPSSLAAHLDLWRDHAPSSGDFPQIDEIFSAASHQYVLYGMRFPQPADISSAPSSEVQRQFAKVAERSRALSAALPSNRAYFDALCSSMDKNSARGVPTRQ

SEQ ID NO: 86307 - protein, 294 aa, Paraglaciecola psychrophila
  misc_feature (1)..(294): tr|M4RPI5|M4RPI5_9ALTE Tryptophan halogenase OS=Paragla ciecola psychrophila 170 OX=1129794 GN=C427_3387 PE=4 S V=1
MLAKHYSVPFVGKKHILFNDSALAVHVPHQTPDSPISSFTCSTAQTAGWVWDIALPSRRGVGYTYSSAHLSDEKAEQTLRNYITPIIGKSAAQVSSIRKIGFNPGHREKFWHKNCVAVGLAAGFIEPLEATALALIELSAKMISEQLPATRQTMDIVAKQFNIKFLHRWDNIIEFLKLHYVLSKRVDSDYWRDNRDETHFPEGLQEQLILWKTQSPYHYDGDEAGKMFPPASFQYILYGMGFITNSARKKRIDLSKNADRLFNENVKHSRQLLAALPTNRELINKIKQYGLPKI

SEQ ID NO: 86308 - protein, 516 aa, Acidobacteria bacterium
  misc_feature (1)..(516): tr|A0A1Q7Y223|A0A1Q7Y223_9BACT Tryptophan halogenase OS =Acidobacteria bacterium 13_1_20CM_3_58_11 OX=1803432 G N=AUG46_00740 PE=4 SV=1
MVRPVRSICIVGGGTAGWLTAGIIAARHRTESGGLQITLVESETIGIIGVGEGTWPTMRTSLKKMGVSETDFFRECNASFKQGAKFARWVTGQESDFYYHPLMLPEGFPSLDLAPFWTKYSDEHANAPSFSDAVCFQEAVCELGLAPKLITSPEYAGVANYAYHLDAGRFASFIRQHCVKNLGVRHIIDEVTGVAKTDTGDIDYVETSKSGRLGGDLFIDCSGFRSLLLGETLEVPFVDCSDVLLIDRALAMQVPYDDEQSEIVPHTLSIAQKHGWIWDIGLQTRRGVGYVFSGNHTTADAALAELRAYVGDRHRDLQPREIKIVAGHRQTFWKQNCVAVGLAGGFLEPLEASALVLIELSAEMISAMMPATRETMDIVARRFNETTLYRWGRIIDFLKLHYLLSKRTDSKFWIDNRDPASIPESLKEQLELWRYRAPGDQDFTSNREMFPAASYQYVLFGMGFRMDVGNLPLDRDVGIAQQAFTQNETLKAKWTRTLPKNRDLINKIKEHGLQKI

SEQ ID NO: 86309 - protein, 526 aa, Kordiimonas lacus
  misc_feature (1)..(526): tr|A0A1G6ZI51|A0A1G6ZI51_9PROT Tryptophan halogenase OS =Kordiimonas lacus OX=637679 GN=SAMN04488071_1830 PE=4 SV=1
MAAGGGHDTLIKHVLVVGGGTAGWLAACHLAKALRSADATGVRVTLVESADIPTIGVGEGTVPAIRKSLQHLGIDEADFIRECDATFKQSIKFVDWLHAPNGTSHAYHHVFDYPANNGLDLTPYWLMGGAGNASFVDAVSVQGQVCDAGLGPKVMTNRQYEGLTSYAYHLDAAKLAAFLTGHATSKLGVEHKLANVTDVVLAEDGSIKAVTTDAFGDLEADLFVDCTGFSSLLLGQKMGVGFIDKRDTLFVDHAVAAQVPYTSADAPIPCHTISTAREAGWIWDIGLTERRGTGYVYAADYTDHDRAEAVLRDYLRESIGDAADEVATRRIPMRIGYREKFWEKNCVAIGMSQGFVEPLEATGLLVFDATARMLADQFPPTQAAMPLLAKRFNDRVRNAWDRVIDFIKLHYCLSKRDDTAFWRDNRDEAKLPEGLRENLALWRTQPPTVYDFPNKFDVFGIENYLYVLYGMGFETDMAPLEHRYTDTVLAREDFGYVRQMADQMTGQLLPHRTLIDRIKQYGIQKV

SEQ ID NO: 86310 - protein, 517 aa, Erythrobacteraceae bacterium
  misc_feature (1)..(517): tr|A0A2D6NJG7|A0A2D6NJG7_9SPHN Tryptophan halogenase OS =Erythrobacteraceae bacterium OX=2026738 GN=CL951_02680 PE=4 SV=1
  misc_feature (70)..(70): Xaa can be any naturally occurring amino acid
  misc_feature (275)..(275): Xaa can be any naturally occurring amino acid
MSGEFTNLVIVGGGTAGWLSACILAARRPELAITLIEAPDIPTVGVGEGSWPTLRETLAVIGIDETEFLXECDASFKQGSRFDGWVDGSERDCYYHPFSAPLSGAMPDILTAWKMQNDGQPYAEAVNPQAAICNRDLAPRQRTMPPFAGALNYGYHLDAGKFGALLASHGIKKLGVRHVHGKVTRTERGVDGLFTRLLLDNGSAIEGDFFIDCTGMASKLMGEELGIGWVDRSNVSFNDRALAVQVPVVPDSAIASQTIGTAHRAGWLWDIGLPXRRGVGCVYSSGFLSDDEAQAILMNYIGSRIAGAEQTALTPRGLKFSTGYRDKFWEGNCLAIGLSAGFIEPLEASAIVLIELSLKALADGYPQSRTALPRLADRFNSLFRYRWERIVDFLKLHYVLSTRTEPYWQAHRDPATIPSSLAAHLDLWRDHAPSSGDFPQIDEIFSAASHQYVLYGMRFPQPADISSAPSSEVQRQFAKVAERSRALSAALPSNRAYFDALCSSMDKNSARGVPTRQ

SEQ ID NO: 86311 - protein, 517 aa, Microbulbifer marinus
  misc_feature (1)..(517): tr|A0A1H3YCA8|A0A1H3YCA8_9GAMM 2-polyprenyl-6-methoxyph enol hydroxylase OS=Microbulbifer marinus OX=658218 GN= SAMN05216562_1673 PE=4 SV=1
MQQAPLSILILGGGAAGWLTAAVLAAEHGRARGGHCDIVLVESPDIPTIGVGEGTWPSMRETLRRIGLSETRLFAECEASFKQGSLFSAWRTTDCKDQYYHPFSLPHGYFEQDLAPFSQEAYAYAVTPQAAICDAHLAPKQLATPEYAGVLNYGYHFDAVKFGLCLRDHCTRHLGVQHVRANIASVEGGADGSVAALVTDAGERLCADLFVDCSGSAAKIIGEHLQVPWVDRSSILFNDRALAVQIPHASPESPIASVTRATAQANGWIWDIGLPSRRGMGYVYSSQFTDTATVEGEFRRFLARELPTGADSELMFRELKFAPGHRAAMWQGNCVAVGMAAGFIEPLEASALALIEQSAGLIRDFLPARNEQMGLAAKRFNRQILAHWENIIDFLKLHYVLSERTDSDYWLAHRRDESIPESLRENLQLWRHRAPAKQDFPQAQPLFPPPSYRYVLNGMGYDCDWVRAPRKDGDQARAKTLLTEVQKQLASYRQGLPANRQLISQLVARSQPGVTVR

SEQ ID NO: 86312 - protein, 511 aa, Gammaproteobacteria bacterium
  misc_feature (1)..(511): tr|A0A2E4LGF2|A0A2E4LGF2_9GAMM Tryptophan halogenase OS =Gammaproteobacteria bacterium OX=1913989 GN=CMQ30_0157 0 PE=4 SV=1
  misc_feature (8)..(8): Xaa can be any naturally occurring amino acid
  misc_feature (373)..(373): Xaa can be any naturally occurring amino acid
  misc_feature (389)..(390): Xaa can be any naturally occurring amino acid
  misc_feature (450)..(450): Xaa can be any naturally occurring amino acid
  misc_feature (489)..(489): Xaa can be any naturally occurring amino acid
MKNPNIKXFVIVGGGTAGWMSAAALSRIVGTQECAITLIESERIGTVGVGEATIPPIVEFNNLLGINSDEMLRETNGTFKLGIEFINWGKKGDSYMHPFGSFGRTILNVSFWHYWKKAFDLGISPGLENYSLNWLAAKENRFFRGAQIPNSPLTKIPHAYHFDANLYAKFLRNFSVNLGVNRIEGEVRDVMQNSESGFITGLRLSDESIIQGDFFLDCTGFKGLLIEQCLNTGYEDWSHLLPCDRALAVPSEAINPKHPYTKSIAHSIGWQWRIPLQHRTGNGIVYCSKFSNDQAAADILIDNLPSPALSEPKNLRFKTGKRKKIWSKNCLSIGLASGFMEPLESTSIHLIQSTIMRFFSLFPHKENFETEMXYFNKSIDEEFKSIRDXXILHYKLTTRDDSELWNYCRNMEIPDSLTEKLELYRSGSWLERNNKELFGVDSWLSVLNGXNAKANSYNPLVDTLPESELKKIMQDTREVLAQCSSSIPXHEQFILDNCASRDHQLNPKNIQ

SEQ ID NO: 86313 - protein, 500 aa, Gammaproteobacteria bacterium
  misc_feature (1)..(500): tr|A0A4Q5Q1Z3|A0A4Q5Q1Z3_9GAMM Tryptophan 7-halogenase OS=Gammaproteobacteria bacterium OX=1913989 GN=EOO53_19 160 PE=4 SV=1
MAEHTAVNSIRKIVIAGGGTSGWLAAAAISKILGKNLDVTLIESPEIGRIGVGEATIPTLRVFHKLLGINERELMAHVQGTFKLGIEFSNWANKGDKYFHSFGLTGKDCWACQFQHFWLAGKKYGIKVPFGDYCPESKAARLEKCSGEEDGVNYAYHLDATLYADFLKNFSIKHGAKHVEGLIEKVIVSPENGFIKSLLLKDGREIEGDLFLDCTGFRAMLIDGALNTSWEPYGHYLPCDSAIALQTELVRAPRPYTQSIAHDFGWQWRIPLQHRAGNGMVYSSRHVSDDEAMATLMKNLEGRPVTEPRVIKYKTGRRTKAWNKNCIAVGLTASFIEPLESTSIHLAMSAIYRLMRYFPQNEISMSNVDEFNKQSAEETDRARNFVILHYHATQRDDSEFWRYVKNMEIPEALAHRVQLFKDTAAIALEEKELFLNDSWVQVMMGQGIMPGAYHPIADVMGEMELKNFLGYLKDSVGEKVAAMPTHQQFINKYCKAAAPM

SEQ ID NO: 86314 - protein, 496 aa, Gammaproteobacteria bacterium
  misc_feature (1)..(496): tr|A0A2E8WQE8|A0A2E8WQE8_9GAMM Tryptophan halogenase OS =Gammaproteobacteria bacterium OX=1913989 GN=CMQ23_0475 5 PE=4 SV=1
MNIDHPVRKVLIVGGGTAGWMTAAALSKLIGKKLDITLVESDQIGTIGVGEATIPTFIALHQLMKISEAEFLSQVQGTIKLGISFEGWQTPEKNYIHAFGTTGQGCWAAGFHHFWNRADRLGLALDYGRYSPELMAAREGRFGHVREAPLNYAYHLDATAYAKYLRSFAETQGVKRVEGRIDAVHKDAEGAIASVQLSHGAQLEADLFVDCSGFVGLLVNKALETPFEDWSKWLPCDRAVAVQTTSVEDPIPYTRAIAHGAGWQWKIPLQHRVGNGLVFSSEFLSDDEATQLLLSNITGTTITDPRVIQFRTGQRQSHWVKNCVAIGLASGFIEPMESTSIHLIQRGIVRLMQLFPYGGINEGDRAEFNDQMTTEFRHIRDFIIMHYHLTDRTDTEFWRRNSAMDIPEPLAHRLALFQQSGNVFQGQWDVFGENSWTQVMMGQGIKPAHYHPIVDMMSETELDSFIKHQEQKVSRVLQKAPSHLDFLNTYCRAPQP

SEQ ID NO: 86315 - protein, 523 aa, Gammaproteobacteria bacterium
  misc_feature (1)..(523): tr|A0A2D9STE0|A0A2D9STE0_9GAMM Tryptophan halogenase OS =Gammaproteobacteria bacterium OX=1913989 GN=CMQ11_1812 0 PE=4 SV=1
  misc_feature (64)..(64): Xaa can be any naturally occurring amino acid
  misc_feature (68)..(69): Xaa can be any naturally occurring amino acid
  misc_feature (75)..(76): Xaa can be any naturally occurring amino acid
  misc_feature (79)..(79): Xaa can be any naturally occurring amino acid
  misc_feature (81)..(81): Xaa can be any naturally occurring amino acid
  misc_feature (83)..(83): Xaa can be any naturally occurring amino acid
  misc_feature (85)..(86): Xaa can be any naturally occurring amino acid
  misc_feature (90)..(92): Xaa can be any naturally occurring amino acid
  misc_feature (94)..(94): Xaa can be any naturally occurring amino acid
  misc_feature (97)..(97): Xaa can be any naturally occurring amino acid
  misc_feature (180)..(180): Xaa can be any naturally occurring amino acid
  misc_feature (294)..(294): Xaa can be any naturally occurring amino acid
  misc_feature (352)..(352): Xaa can be any naturally occurring amino acid
  misc_feature (488)..(488): Xaa can be any naturally occurring amino acid
MNDPINRVVVVGGGTAGWLTAGIIAAEHCISKSTNHRPFELTLIESPDISTIGVGEGTWPSMRXTLQXXGISETXXLTXCXAXFXXGTFXXXWXTGXGDTYAHPFTAPYRYADTNLAPHWLARAERPSFSEAVCPQPQLFSKRLAPKQITTPEYAFNVNYGYHLDATNLAAFLKRHCIDXLGVKHIQATVTEINSADNGDIESISTDRAGTIAGGLFIDCTGSKSLLLGKHFGIALQDKSQILFNNSALATQVPYPTDDAPIESCTLSTAQDAGWIWDIGLPSRRGVGHVYSSXHTSEEQASDALIKYVESITTASKSKQVSLRKLTFEPGHREKFWHRNCVAIGMSAGFIXPLEASALVLVELSASMIAEQLPATRSVMDLVAGRFNKRFLFRWERIIEFLKLHYVLNKKTALPYWADNLAPSSVPDSLKESLSLWRHISPWHYDSHHVDDLFPSASFQYVLYGMGFETTSSHTKRKTEEDAANLAXTLFKENIAKAAQLMSALPTNRELINKINTFGLQKI

SEQ ID NO: 86316 - protein, 508 aa, Sphingomonas sp.
  misc_feature (1)..(508): tr|A0A0Q4CSC3|A0A0Q4CSC3_9SPHN Tryptophan halogenase OS =Sphingomonas sp. Leaf9 OX=1735674 GN=ASE58_10860 PE=4 SV=1
MSARADGPLRRIAIVGGGTAGWMAAAALSRVLGPHGPAITLVESEEIGTIGVGEATIPPLQAFNAMLGIDEDDFVRATQGTFKLGIDFHDWGQVGHRYFHPFGVYGIDAGAVPFEAMWRRLRAAGQAGPLADYSICTAAARAGRFQRPQPGNTPLAQIGYAFHFDAGLYARFLRARAEAAGVVRREGRIVEVVCDGASGFIDAVVLADGGRVEADFFIDCSGFRGLLIDEAMGAGFEDWSHWLPNDRAVAVPSANVGPPSPFTRSTARDAGWQWRIPLQHRTGNGYVYSSAHVSDDEAAATLLAGLEGKALADPRPIRFRTGRRDRFWIGNCVALGLSGGFLEPLESTSIHLVQAGIARLLEMLPTRACDLADSARYNRLMAAEFDQVRDFVILHFHASARRDTAYWRDQAARPIPDTLAERLAIYARTGRVYREGDELFTKTSWLAVMDGQGLTAATHDPLADAMPIDAAAARLQRIGAVVAAAAAQMPPHEAFIARHCTAATGQRA

SEQ ID NO: 86317 - protein, 504 aa, Sphingomonas sp.
  misc_feature (1)..(504): tr|A0A0Q4CT13|A0A0Q4CT13_9SPHN Tryptophan halogenase OS =Sphingomonas sp. Leaf9 OX=1735674 GN=ASE58_01710 PE=4 SV=1
MKDGNIRSIIIVGGGTAGWMAAAAFSRILSGSGMAIRVVESEAIGTVGVGEATIPHIQYFNRLLGIDEDEFVRRTCATFKLGIEFVDWGAIGERYIHPFGSYGQEMEGLHFHHFWYRQAQMGGALPLDRYSIGVGAARAGKFQRPDHSRPGSPLGGISYAFQFDAALYARYLRERAEAAGVERIEGRIVDVVLNGGNGHVDHVVLDDGRSVGGDLFIDCSGFRGLLIEGALQAGYDDWREWLPCDRAVARPCSRVADPTPYTRATATSVGWRWRIPLQSRTGNGHVYCSDYADDETALAMLDAGLDGEALAGPNFLRFTAGIRRKAWDRNVVALGLASGFLEPLESTSIHLIQSGIARLLTNFPDRSFNQPDIDYYNRRTRAEYEQIRDFLVLHYKATARDDSPFWRRCRAMAIPDSLAERIAIFRENARLYRHDKELFSETSWLAVLHGQNVVPKRHHPIADLLSDAELDDRMTRIAAAMDSGVRAMPDHMAFIDRHCRSPDQ

SEQ ID NO: 86318 - protein, 499 aa, Sphingomonas ginsenosidimutans
  misc_feature (1)..(499): tr|A0A2A4I1N1|A0A2A4I1N1_9SPHN Tryptophan halogenase OS =Sphingomonas ginsenosidimutans OX=862134 GN=COA17_0370 0 PE=4 SV=1
MTALPVREVVIVGGGTAGWMAAAALSRFLPRTRTRIRLVESEEIGTVGVGEATIPTIQTFNRMLGIDEDAFVAATGGTFKLGIQFENWRAIGDRYFHPFGQFGHDIDGLAFHQLFLKLAGQRRCADLWHYAPCAVAAAAGRFARIAEGEAPFPLPYAFHFDAGRYARFLRDYAEARGVERIEGRIADVAQHADTGFVQAVRLADGRHVDGELFVDCSGFRGLLIEGALASGYDDWSHWLPCDRAVAVPTARDRAPVPYTRAIAQGAGWQWRIPLQHRTGNGYVYSSAHVDDDAAQAALMGAVEGEVLADPRRLSFVTGRRRRFWNRNVVALGLAGGFLEPLESTSIHLIQTGIAKLLALFPDAGFSTVEAEEYDRLMRSAYDGVRDFIILHYHATQRDDTPFWRHVRTMEVPDTLRRKIELFRVHGRFFRYDDELFSLASWTAVLLGQGIVPAAYDPVADVLDEDRLAETLERMRHAILAQTRAMPSHADFIARHCAAG

SEQ ID NO: 86319 - protein, 510 aa, Gammaproteobacteria bacterium; identical to SEQ ID NO: 82364
  misc_feature (1)..(510): tr|A0A2E1UDH1|A0A2E1UDH1_9GAMM Tryptophan halogenase OS =Gammaproteobacteria bacterium OX=1913989 GN=CMP97_0543 0 PE=4 SV=1
  misc_feature (167)..(167): Xaa can be any naturally occurring amino acid
  misc_feature (173)..(173): Xaa can be any naturally occurring amino acid
  misc_feature (175)..(175): Xaa can be any naturally occurring amino acid
  misc_feature (191)..(191): Xaa can be any naturally occurring amino acid
  misc_feature (202)..(202): Xaa can be any naturally occurring amino acid

SEQ ID NO: 86320 - protein, 500 aa, Sphingomonas sp.
  misc_feature (1)..(500): tr|A0A0Q4CB69|A0A0Q4CB69_9SPHN Tryptophan halogenase OS =Sphingomonas sp. Leaf9 OX=1735674 GN=ASE58_17210 PE=4 SV=1
MPHEPVRSIVIVGGGTAGWMAATYLARRLTHLNLSITVIDSAAIGTVGVGEATVPAIRDFLSAIELGEPDVLRETGGTIKYGIRFDGWGGAAHRFFHPFGLYGVGAGGVAFHQYWLKLHAAGRAGPIGDYCLATQLARGGLFLPPADRPANDLGVFNFALHFDAAKFAALLRRLALANRVGHVDGRITQVATDPARGHVTSVTLEDGRSIAGDLWIDASGFRSLLLGEALGVPYVDWRHWLPCDRAVAIPCKAAPGDPVPYTVATARTAGWQWRIPLRHRIGNGSVYCSDFQSDGDAEDALLASLEGEPLADPNRLRFVTGHRARFWSGNVVGLGLASGFLEPLESTSISLIQSGLERFVALFPDRDCDPRLAATYNRQSVLEFERLRDFLFLHYLANGRDEPFWQAIRAVEPPEPLQIKLDAWRSGGEFVRNEWDTFQDPSWLSLYAGFNDLPTRHSPLADAVPVDTLADSFARMRDAIGKTLAHAEPHGRFLNRVAGA

SEQ ID NO: 86321 - protein, 358 aa, Gammaproteobacteria bacterium
  misc_feature (1)..(358): tr|A0A3B8Z8B6|A0A3B8Z8B6_9GAMM Tryptophan halogenase (F ragment) OS=Gammaproteobacteria bacterium OX=1913989 GN =DCF95_11845 PE=4 SV=1
MTANALQKKWQHLGINITLVESPDIGIVGVGEGSTPKLKHFFDSLGIKESEWMPECNATYKNGISFKNWSTVSGYEEYFHPFGCSLDFVTLKFLYDNATLRRKGVDVIAHPNRFSLMASLAEKKLAPIASKNFPFHFQYGYHFDSVLIGKFLQKKAAEVGGINHIQATVKSVELNSNGDITSLKLNNDQILSGDFFVDCSGFASILLEKTLKVPFISFSDNLFNDSAITIPTEIEPNIPSQTVSTALTNGWVWRIPLTNRIGNGYVYSSQYCTQDEAEKELRAHLGVLESDIEARHLKMKVGRAKESWRNNCVAVGLSQGFIEPLEATALQFVISTIEEFATAFEEGGFTHQFKELFN

SEQ ID NO: 86322 - protein, 495 aa, Colwellia psychrerythraea
  misc_feature (1)..(495): tr|A0A1Y5EQ86|A0A1Y5EQ86_COLPS Tryptophan halogenase OS =Colwellia psychrerythraea OX=28229 GN=A9Q75_00615 PE=4 SV=1
MNNLSEVKNVVIAGGGTAGWMAATALAKLIGNKLNITLVESDEISTVGVGEATIPPLLTFHKMLKINEAEFMSSVNATFKLGINFENWKDNDSEYFHSFGTTGRDCWATTFLQFYNRSKKEGYQAKYEEYCLELQAGLNDKFAHLPNSGLKYAYHMDATLYAKFLRKLSEQHGVKRIEGKIERVNIDEKSGFIKSLTLLSGVTIEGDLFIDCTGFRGVLIEQALHTGYDDWSHWLPCDRAVAVQTESTEEPKPYTRSIAHESGWQWKIPLQNRTGNGLVYCSKYLNDENAEKLLLENVEGKLLKKPLFIKFTPGQRRKHWNKNCVALGLSSGFIEPLESTSIHLIQRGIIRLMQMFPKMGITDTVINEYNYQSEEEIRYIRDFIILHYHVTNRNDSTFWRYCSKMDVPSSLSHRIELFKEHGYVFKAPWDLFAENSWIQVMLGQGLSPKDHHPIADMMSTNEQDMFLNSIKNSIEQTVKSLPTHKQYLDQYCKSN

SEQ ID NO: 86323 - protein, 547 aa, Kutzneria buriramensis
  misc_feature (1)..(547): tr|A0A3E0HPX8|A0A3E0HPX8_9PSEU Tryptophan halogenase OS =Kutzneria buriramensis OX=1045776 GN=BCF44_105333 PE=4 SV=1
MLFPHGTLATRIARELIAISGMDNRMGEFDMAKKVVIVGGGTAGWMTASYLKAAFADRVDVTLVESGKVGTIGVGEATFSDIRHFFEFLDLREEDWMPACNATYKLAVRFENWREPGHHFYHPFEQVRTVEGFPLTDWWLQNRPSDRFDKDCFVLASLCDAERSPRHLDGSMFENDYVDGSDNLHRMTMSEHQGKTQFPYAYHFEAALLAKFLTGYAVDRGAKHLIDDVRHVALDDRGWVSHVVTAEHGEIHGDLFIDCTGFRAVLLNQALGEPFISFQDTLPNDSAVALQVPQDMFERGIRPCTTATAQEAGWIWTIPLFNRIGTGYVYAKDYCSPEEAERTLREFVGPAGADAEANHIRMRIGRSRNSWVNNCVAIGLSSGFVEPLESTGIFFIHHAIEQLVRHFPDQAWNPVHRDQYNSAVANVQEGIREFLVLHYLSAARSDTRYWRDTKTRRVPDALAERIEQWKVQLPDSESIMPYYHGLPPMSYMCILLGGGAIPLRPSPALGLVDDSLAREEFQLIADKARTLVDKLPNQYEYFASLRR

SEQ ID NO: 86324 - protein, 506 aa, Sphingomonas sp.
  misc_feature (1)..(506): tr|A0A4R2RX82|A0A4R2RX82_9SPHN Tryptophan halogenase OS =Sphingomonas sp. PP-CE-1G-424 OX=2135658 GN=C8J43_1034 7 PE=4 SV=1
MIVGGGTAGWMAATLLARRLDRQSVTITVVESSDIRTVGVGEATVPGIRDFFREIGVTEQDVMAAAQGTVKLGIEFVDWKREGERFFHPFGLYGMRSRGVAFHHYWRKLNAAGRPTPLSEFCLATALAERNLFMRPTDSPVHDLLFFDWAVHFDAGLFAKFLAKKAGEWGVKHIDATITDVLVDQSTGFISSVDTECGKTIAGDFFIDCSGFRSLLLGDALGVPYEDWTNLLPCDRAVAMPCERAEPLTPYTRSTALTAGWQWRIPLQHRVGNGYVYASRHISDDEAVATLKGRLEGEALAEPNMIRFRTGRRTAFWQGNCVALGLAAGFMEPLESTSITLIQTGLEKLLALLPDRSFDPALADEYNRTTGLEYARIRDFLVLHYFANGRQGEPMWDRCRGTALPEQLERKLKLFKARGHLVRYEWESFQDPSWLSMYAGFGIDAAAHDPLADHFSLSDLEAAFERMKGSIRDAVALAEPHETFLKSFAPASAPPASRSMNFAANG

SEQ ID NO: 86325 - protein, 500 aa, Asticcacaulis sp.
  misc_feature (1)..(500): tr|V4MZA1|V4MZA1_9CAUL Tryptophan halogenase OS=Asticca caulis sp. AC402 OX=1282361 GN=ABAC402_12565 PE=4 SV=1
MGGGTAGWMAASALAHEFKRLPIAITLVESEEIGTVGVGEATLPHIRNFNTALNIDEVTFMKATEATFKLGIEFCNWGRIGDRYIHPFGDYGEKIDGIPFYQHWLRLQKSGLASRLDDYAFPTSIAEANRFRHPSTDATRIESTYGYAYQFDATRYAAFLRQFAEARGVVRRQGKVVDTRLDAETGHVASLTLDSGEVVAADLYVDCSGFRGLLIEQALKTGYEDWSQWLPCNRALAVPCESRGTLTPYTRATALEAGWQWRIPLQHRTGNGYVYCSSFISDEDASRRLLGNLDAPALADPRQLYFTTGRRKKLWNHNVVAIGLAAGFLEPLESTSIHLIQEGISELLHIFPDKRFLQSDIDEYNRRMGVNFERVRDFLLLHYAATQRDDTEMWRHFRNLKLPDSLDEKIQIWLTRGQLIRYEFGVFLPPSWVAVMLGQNLLPRHYDPRVDRMPHDRLVQSAEGLRRRVNAAASATPDHKDYIRQMGAASDTGPLVAQAG

SEQ ID NO: 86326 - protein, 522 aa, Actinoalloteichus sp.
  misc_feature (1)..(522): tr|A0A1L7F9E8|A0A1L7F9E8_9PSEU Tryptophan halogenase OS =Actinoalloteichus sp. GBA129-24 OX=1612551 GN=UA75_174 00 PE=4 SV=1
MPRSVVIVGGGTAGWMTASYLKAAFADRIEVTLVESARVGTIGVGEATFSTVRHFFDYLGLDEREWMPACQATYKLAIRFEDWRHKGHHFYHPFERQRMVDGFPITDWWLQQGVTDRFDRDCFLIAALCDAKRSPRHHDGRLFEQDFVESGPERVHRTTLSEQDTQFPYAYHFDASLLADYLSGYAVRRGVRHVVDDVLDVSLDERGWIDHVLTREHGELRGDLFVDCTGFRGLLLNKALEEPFQSYQDTLPNDRAVALRVPVDMAAKGIRPCTTASARDAGWIWTIPLFGRIGTGYVYASEYITPEEAERDLRAFVGPAADDLEANHIRMRIGRSRDSWVRNCVAVGLSSGFVEPLESTGIFFIQHGIEQLVKHFPGDDWNPALRDAYNRSIANCMDGVREFLVLHYRGAARTDNQYWRDAKTRPVPDALAERMEAWQTRLPDTETVFPHYHGFEPYSYACMLLGLGGVPLRSSPALALLSDASAHKEFQIVRDQADELVRTLPSQHEYFARLHPASNGPG

SEQ ID NO: 86327 - protein, 502 aa, Asticcacaulis sp.
  misc_feature (1)..(502): tr|V4NC07|V4NC07_9CAUL Tryptophan halogenase OS=Asticca caulis sp. AC402 OX=1282361 GN=ABAC402_18455 PE=4 SV=1
MAAIETIVIVGGGTAGWMAAAALSRLRSGRPVNIVLIESEEIGTVGVGEATIPPFLDFNRLLNIDEREMLAAVQGSFKLGIQFVNWGKLGDSYIHPFGNYGYQVDGVSFHHVWHKYKMAGDKRPIQVFNIETMAAQFGRFARTDDYKHEDLPPINYAYHIDAGRYARYLRAYAEKRGAVRLEGKVTDVARNAQSGFVEGLTLNNGETLKGDFFIDCSGFRGVLIEQALKTGYDDWSHFLPCNRAVALPCDRADGSGPLPYTRATAHTAGWQWQVPLQHRNGNGHVYCSEYMGDDEALDILVNNIAGKPGAQPNFLRFVTGRRKKFWNKNVVALGLASGFMEPLESTSIHLINTGINKLVSLISLDGVTQAQEDAFNRLTGKEYERIRDFLILHYKATSRDDSPFWNYCRNMTVPQSLTEKMELFQHNGQIFREDDELFTETSWAAVMMGQGIVMKGHNAMADTLAEAKTREELDGIEKSIQYVVQHMPTHGDYLKKYCPAKM

SEQ ID NO: 86328 - protein, 501 aa, Sphingomonas sp.
  misc_feature (1)..(501): tr|A0A4R2RVM0|A0A4R2RVM0_9SPHN Tryptophan halogenase OS =Sphingomonas sp. PP-CE-1G-424 OX=2135658 GN=C8J43_1031 33 PE=4 SV=1
MVEQRIRKVVIAGGGTAGWLAAAALTRQLGQLLDITLVESEEIGTIGVGEATIPTMRAFHTILGLDEREFMRATQATFKLGISFENWARDGDRYIHSFGDIGKSTWMGDFHHFWLAAKAAGDRSDIGDYCLELQAAKAERFALPSEGQINYAYHLDAGLYARFLRARSEANGLKRIEGRIASVDRDGETGFIRALVLDSGERVEGDLFLDCTGFRGLLIEGTYGAGYEDWSHWLPTNSALAVQSAATGPAHPYTRAIAHDAGWRWRIPLQHRVGNGLVYASDHLSDDEAHARLLGAIGGAPLTPPRLIRFRTGRRRQVWMGNCVALSLASGFVEPLESTSIHLVMTGLMRLMQTFPFGGIAPSLVTRFNDQAQAELERVRDFIILHYHLNQRPEPFWAARRDMPIPDTLVERIALFTEGAQAYQGGEDLFRVASWVQVMLGQRLTPRDHHRLGSIMGGSQLASVLTNIRGTIADAVAGMPTHQQFLDRYLATPTAAASGIR

SEQ ID NO: 86329 - protein, 506 aa, Chondromyces crocatus
  misc_feature (1)..(506): tr|A0A0K1EKN9|A0A0K1EKN9_CHOCO Tryptophan halogenase OS =Chondromyces crocatus OX=52 GN=CMC5_053240 PE=4 SV=1
MFDLIVIGGGPGGSTLASFVAMRGHRVLLLEREAFPRHQIGESLLPATVHGICAMLGLTDEMKRAGFPIKRGGTFRWGKEPEPWTFGFTRHPDDPYGFAYQVERARFDDMLLRNSERKGVDVRERHEVIDVLFEGERAVGVRYRNTEGVELMAHARFIVDASGNRTRVSQAVGERVYSRFFQNVALYGYFENGKRLPAPRQGNILSAAFQDGWFWYIPLSDTLTSVGAVVSREAAEAIKDGHEAALLRYIDRCPIIKEYLAPATRVTTGDYGEIRIRKDYSYCNTSFWKNGMALVGDAACFVDPVFSSGVHLATYSALLVARAINTCLAGEMSEQRCFEEFERRYRREYGNFYQFLVAFYDMNQDTDSYFWSARKIINTEERANEAFVRLIAGRSNLDEPVFQSVAKDFFTEREGFGAWFGGLVTSMAKGDGGGLMVGEGATDATESTGFAPENFMQGFTREITELQHLAMFGEDRGPETPLWSGGLVPSRDGLAWAVESGEDAAG

SEQ ID NO: 86330 - protein, 497 aa, Asticcacaulis sp.
  misc_feature (1)..(497): tr|V4NI04|V4NI04_9CAUL Tryptophan halogenase OS=Asticca caulis sp. AC402 OX=1282361 GN=ABAC402_09120 PE=4 SV=1
MEGHVIKRVVIAGGGTAGWCAAAALSRLLGPLLDITLVESDDIGIVGVGEATIPTVRTFHHLLGIDERDFLRATNGTFKLGIAFENWARPGDRYIHAFGTVGKSSWMAPFHHIWLQARSDGYGGELSDYCLELQAAEAGKFQTSEKSGLNYAYHFDAGLYGQFLRGLSEKHGVKRVEGKISQVEQEPESGFIAALHLESGEVIEGDLFIDCTGFRGLLIEQTLKTGYEDWTHWLPMNRAVAVQTQSLGPLNPYTRAIAHDAGWRWRIPLQNRVGNGLVYSSAYLSDDAAHEQLMGALDAPTLVEPRQIKFVTGRRRKTWNKNCVTLGLSSGFIEPLESTSIHLFQIGVTRLIQMFPFNGISPSLIDHFNTLSAQELEMVRDFVILHYKANQRGESGFWRDRQTMSVPDSLMHRIEVFAAEGIAWQAGGELFRLDSWLQVMMGQRIEPRGWHRLGQLMKRPQAEGVFRDMKASIDRAVAGMMSHEQFVRQYCAMQETA

SEQ ID NO: 86331 - protein, 501 aa, Asticcacaulis sp.
  misc_feature (1)..(501): tr|V4NKW4|V4NKW4_9CAUL Tryptophan halogenase OS=Asticca caulis sp. AC402 OX=1282361 GN=ABAC402_07200 PE=4 SV=1
MSEHLIKNVVVLGGGTAGWLSAAMLAKTWGRSIKITVVESDDIGTVGVGEATIPPLTKLLIYLGIDENQFLSRVQGTFKLGIEFVDWYEKGQSYMHAFGAPGQALGILPFYQYWLAQRLRGHDINLWDFSLNTLAARQNRFARIKQVPNTSMEGIDYAFQFDAGLMAQFMRIGCENSGVRRIEGKVAGANLRSSDGFIESLTLENGQVVEGEMFIDCSGFRGVLIEDAMKAGYVNWQHWLPCDRAAAMPTTSYGPLKPYTRARAHGCGWQWRIPLQHRTGNGHVFCSTFLSEDDAVKTLRDHVDGEPLAEPRILKFVTGRRKNSWVKNCVALGLASGFMEPLESTSIHLVQSGMTRFLRLFPDKRFNPLEIAEYNRQTAHEYELIRDFLVLHYKSTKRNDTPFWDYCRTMDIPDTLAHKIDYFRLHGRLLIEDEDLFKETNWAQVLIGQGVMPGASAPLTATISEDDLTDFMKNLRIILDRTVSGIPDHAAFVKQNCPAVV

SEQ ID NO: 86332 - protein, 532 aa, Streptomyces sviceus
  misc_feature (1)..(532): tr|B5HTB3|B5HTB3_9ACTN Tryptophan halogenase OS=Strepto myces sviceus ATCC 29083 OX=463191 GN=SSEG_02830 PE=4 S V=1
MTDSASEYDVVVIGGGPGGSMTSTLLAQYGKRVILFEAAKFPRYHIGESLLSGTADLLKKIGVLEKLENAGFIKKYGVEWVWGERREPWTVYFKDALAMPYDYGYQVERGPFDQMLLENAREHGVDAREEHRVTDFVIGDDGTVRVDYRDADDKPGSVTARWLVDSSGQGGLVTKRLHQQEWDPYLKNMAMWTYWRGAERPAGLDAGNTFLPTFDEGWWWFIPLRDDITSVGVVVDRQSYLKNKEAGLDNYYRSCLERTPELAERLQGAEQVDKMHAQRDWSYIYDRFSGDGYIAVGDAACFIDPLFSTGVHLSMLSGYLAATAVNTILDKPELGRDTVLDFYESAYRKEFERLRAQVYFLYGGHGGSKESYFWHARSQFDVPGIEPEKAFISLIAGAFQHRSWYRRYLEQLDVPADLRSTIEGVFDGKTVGVNVDWKQPVVPSEEIEVGEDLAVDGGHLRPSPVLRHSSGTSMPLTPALAALRELADGSRSADDLIGLLVDKELEPPDRARALVHEAIAFGLFEPQEPAKD

SEQ ID NO: 86333 - protein, 506 aa, Alteromonas mediterranea
  misc_feature (1)..(506): tr|A0A1J0SFI6|A0A1J0SFI6_9ALTE Tryptophan halogenase OS =Alteromonas mediterranea OX=314275 GN=BM525_08950 PE=4 SV=1
MHDPQNKTIKRVVIAGGGTAGWLTAALMKKLLGQAVDITLIESEAIGTVGVGEATIPPIRLVNQVLGIDEAQFLHDTKATIKLAIKFENWKTKGQSYYHTFGAPGKSMAFCHFHHYWLKARQQGHKNDLWVYDLNYQAAEAGRFAQINAKDPALELPFAYHFDASLYAQYLRKISEEMGVVRKEGKIARVARFSDSGYVKALHLESHDVIEGDLFIDCTGFKGLLIEGALGAGYDDWSHLLPCDSALAVPSERHKDTAPYTRSIAHDAGWQWRIPLQHRNGNGHVYSSRYISDDDAHATLMGNLDTKPLGDPKLIKFTTGRRRKQWYKNVVAVGLSSGFLEPLESTSIHLIQSAIVRLIQLFPHKGVTSSLTDEYNKQSELEFEQIRDFLVLHYTVNERTDSAFFNDMRSITLPDSLAHKIELFKENGVLQREQNDLFLESSWLQVLYGQGITPKDYHGLVNSVPDTQLNNMLTRLLEIKKEPISKLPTHDEYINGMVTNYKRSMS

SEQ ID NO: 86334 - protein, 514 aa, Caulobacter segnis
  misc_feature (1)..(514): tr|D5VGN3|D5VGN3_CAUST Tryptophan halogenase OS=Cauloba cter segnis (strain ATCC 21756 / DSM 7131 / JCM 7823 / NBRC 15250 / LMG 17158 / TK0059) OX=509190 GN=Cseg_2005 PE=4 SV=1
MVSPVKNIVIVGGGTAGWLTAGVIAAKHKARQASGFTVTLVESPNTPIIGVGEGTWPTLRTTLAKIGVSETDFFRECDAAFKQGAKFARWTTGAEDDAYYHPLVLPQGFSQVNLAPHWLASGGDVSFCDAVCPQGVLCDEGLAPKTITAAPYQGAANYAYHLDAGKFAPFLQRHCTEKLGVRHVLADVRSVSLAEDGDIRAIVTEQAGEIEGDLFVDCTGFRSLLLGEALGVPFKDCGDVLFCDTALAIQIPYENENSPISTHTISTAQSAGWIWDIGLPTRRGVGHVFSSRHISDDDAERELRAYIGPACRDLPVRKIAIRSGHREIFWKRNCVAVGLAAGFLEPLEASAIVLIELSAKLIAEQMPACREVMDVIAGRFNATTQYRWGRIIDFLKLHYVLSQRSDTAFWRDNRDPDTIPERLADLLRLWRHQPPWLHEEFDRVEEVFPAASYQYVLYGMGFRTEVEREALADEAALAQRALRENALQTERLRATLPRHRDLIRKIVEHGLQPV

SEQ ID NO: 86335 - protein, 514 aa, Sphingomonas paucimobilis
  misc_feature (1)..(514): tr|A0A411LF49|A0A411LF49_SPHPI Tryptophan 7-halogenase OS=Sphingomonas paucimobilis OX=13689 GN=DRN02_002165 P E=4 SV=1
MVQPVQNIVIVGGGTAGWLTAGVIAARHQGRRPHGFTVTLVESPNVPIIGVGEGTWPTLRTTLRKMGVSETAFFRECDASFKQGARFNRWTTGAADDGYYHPLMLPQSFGQVNLATHWLAASEATSFCDAVTPQGRICDAGLAPKTIATPEYEALANYAYHLDAGKFADFLRRHCCETLGVRHVLADVEEVLLSEQGDIRAVRTAQAGEVTGDLFVDCTGFRSLLLGEAMEVPFKPLGDVLFCDTALAIQVPYDDPEAPIASHTISTAQSSGWIWDIGLPTRRGVGHVFSSSHIGRDEAERELRVYLGEVGRDLPVRELKIRAGHRTRFWERNCVAVGLAAGFLEPLEASAIVLIELSAKLIAEQMPACREVMDTVAKRFNDTTLYRWGRIVDFLKLHYALTQRTDSDFWRDNCRPETMPDRLQELMTLWRYQAPWMHDEFDRVEEVFPSASYQYVLYGMGQRTEIAPGSLEAEAIVAERARRENDVQTGRMLAGLPRHRDLIRKIVERGLPTI

SEQ ID NO: 86336 - protein, 491 aa, Planctomycetes bacterium
  misc_feature (1)..(491): tr|A0A518IWZ7|A0A518IWZ7_9BACT Tryptophan halogenase OS =Planctomycetes bacterium Mal33 OX=2527992 GN=Mal33_362 50 PE=4 SV=1
MNKEVDLLVLGSGFGGSLLSLLLARQGLRVAVIDRAVHPRFAIGESSTPLADATLKELAQRYDLPELMPLTAYGPWRRRHPDLMCGLKRGFSYFGHSRGTEFSPADQLLVAASSNDEHSDTHWLRSDVDAWLFERAADRGAMQFEGASYRLSREDSQWLVAGEASGAAFSLRAPMIIDATGAAGEVLRYLKIASQTHQLKTTSWAVYGHFENVTSVAEMLDRRQIDRRRHPFACDDAAVHLVLDDGWMWQLRFCDDRVSAGFAIGQPADTPKPNADEIWRQRLDRFPFLRQQFAAAKIVAPASGLQTTSRMQRLTSLAAGPGWAALPNTAGFIDPLHSTGLAHTMFGVRRLVEILLQTGTSNQLLAELENYSSTLIDELRLVDQLVEGCYAGLPSFRLWSAWCMLYFAAVTSMEQSPGGGVAAFLHADDPRFRTVVGEARGELQRAIDAGRGPAACERFEAWLRQAIAPWNRVGLLESECDGMYARTAKPV

SEQ ID NO: 86337 - protein, 527 aa, Maricaulis sp.
  misc_feature (1)..(527): tr|A0A1Q8FP39|A0A1Q8FP39_9RHOB Tryptophan halogenase OS =Maricaulis sp. W15 OX=1772333 GN=AWH62_06960 PE=4 SV=1
MNQTCNSILILGGGSAGWLTAAYLARRLGSGRPDGPTITLVESPNVPSVGVGEGTLPSLRLTLATLGVDEAAFMRASEATFKQGIHFSGWSQSPDGSPASYFHPFNSPRQMGGIDLVPYWSLGAAGKGDSYTRAITPQHDVYTAMKAPKRLEDAPFSGPLNYAYHLDVHRFGEFLKAYALGLGVKHVSDHITAVERAETGDIAGLDGEASGRLTADLYVDCSGFKARLIGDALGEPLVPVGDSLFCDRAVAIQVPWDRPDAPLPSATISTAHEAGWTWDIGLRQRRGVGYVWSSAHSDADAAETILRRYVGQDADDHPVRHLTMTTGFRRRQWVGNCVAVGLSAGFLEPLESTGILLIEAAAHLIADNLPRRGDFAPAARHFNSAMGQRFTCAVDFLKLHYALSNRRDTAFWRDNADPASWPLSLRDKLDRWQVRLPNAHDLDSAHDSFRHINYAYVLIGMGAAPDLAGDRARYPFLSEATAEFGRIKDATGRAMAALPDHRALVEGLQTHRFGAAAPRTASMGGAR

SEQ ID NO: 86338 - protein, 498 aa, Maricaulis sp.
  misc_feature (1)..(498): tr|A0A1Q8G0F2|A0A1Q8G0F2_9RHOB Tryptophan halogenase OS =Maricaulis sp. W15 OX=1772333 GN=AWH62_00025 PE=4 SV=1
MSDNKVDHILIIGGGTAGWMCAAALSHRLRADRVRIELVESEGIGTVGVGESTIPHIRHFNASLGIDEADFMARTHATYKLAIEFRDWGRIGDSYMHPFGAFGVPGAVVDFHHDWLRSGGETALGSIDDYSLPIAMARGQRFARPASDPRDLASTYAYAFQFDAAAYARYLRDFAEARGVIRTEGRVTDVQVDGETGHVRNVSLESGQRIEADLFIDCSGFRGLITEQALATGYEDWSHWLPCDRAIALPSAATGELPPYTRATALEAGWAWRIPLQHRVGNGHVYASAFMDDERAETLLRDQLEGEALAEPNRLRFLAGKRKRQWNRNCVAIGLSSGFLEPLESTSIHLIQSAIGHLLDLFPTGEWDPAEADEFNRVMDQEYARIRDFLILHYKATQRDDTEFWRHCREMDIPDSLAGKIEHFRERGLIADYEHGVFLKPSWQAVFLGQHITPQRLDPRAVNAAAGIRPLAAELTRIATAMPGHAEVLSAHAHATAD

SEQ ID NO: 86339 - protein, 415 aa, Pseudomonas fluorescens
  misc_feature (1)..(415): tr|J2Y5E7|J2Y5E7_PSEFL Tryptophan halogenase, putative OS=Pseudomonas fluorescens Q2-87 OX=1038922 GN=PflQ2_52 41 PE=4 SV=1
MPSVEMESRQVVIIGAGPSGAIAAALLKRKGHDVLVIERQHFPRFSIGESLLSHCLDFVEEAGMLEAVNAAGFQRKNGAAFAWRERYSAFDFGDTFSHGKPTTFQVQRADFDKLLADQAALQGVEIRYGEAIASADFTLAKPQLGVQREDGSEYRVEADFVLDASGYGRVLPRLLDLEAPSNFPVRQAVFTHIEDRIDAPTFDREKILITTHPSKRDVWFWTIPFSGGRCSVGVVAAAEHFASRTDDLDACLRGFIDETPSLAEVLKNAVWDTPARTIGGYSANVKTLHGPGFALLGNAAEFLDPVFSSGVTIAMRSASMAAGVLHRQLQGESVDWQSEFAAPLKRGVDTFRCYVEGWYAGTFQDVIFYTEGSDDIRRMISSILAGYAWDERNPFVSEPKRRLRMLSEICASPAS

SEQ ID NO: 86340 - protein, 516 aa, Sphingomonas paucimobilis
  misc_feature (1)..(516): tr|A0A411LED4|A0A411LED4_SPHPI Tryptophan 7-halogenase OS=Sphingomonas paucimobilis OX=13689 GN=DRN02_000490 P E=4 SV=1
MARESKGPERGCGVVSDKVRAVVVGGGTAGWMTAAALARLLPGQCNVHLIESEAIGVVGVGEATLPHIRAFNERLGISEADFMARTRATFKLGIEFRDWGRIGDSYIHPFGTFGRGGGAIDFHHYWARLMQGGQDLPPLDQLSYACTLARQGRFDHPGRERDQLSSTFGYAYQFDALLFAPYLRSLAEEMGALRTEGIVIDVERDGESGLIRAVTLGDGQRIEGDLFIDCSGFRSLLLGQTLGEPFEDWSKWLPTDRAVAMPCRTRTAVTPYTSAIAMPAGWRWRIPLQHRTGNGYVYASDFISDDDARDALIEAVEGEPIAEPRLLRFKAGRRQRSWVGNCIAIGLASGFLEPLESTSIYLVQQAITALIEIFPERHPSDADRDEFNRIIDLEYDRIRDFLILHYHATTRDDSPFWNYVRTMPIPDSLAEKMELWRRRARVVKYREGVFLDASWIAVYLGQGIVPQGWDPRADIAATPELTQAVAALRAEIAHDVAARPDHRDFLDRYCPMGAAA

SEQ ID NO: 86341 - protein, 510 aa, Hyphomonadaceae bacterium; identical to SEQ ID NO: 82759
  misc_feature (1)..(510): tr|A0A2E1LTZ6|A0A2E1LTZ6_9RHOB Tryptophan halogenase OS =Hyphomonadaceae bacterium OX=2026748 GN=CME93_08210 PE =4 SV=1
  misc_feature (374)..(374): Xaa can be any naturally occurring amino acid
  misc_feature (449)..(449): Xaa can be any naturally occurring amino acid
  misc_feature (454)..(454): Xaa can be any naturally occurring amino acid

SEQ ID NO: 86342 - protein, 508 aa, Litorimonas taeanensis
  misc_feature (1)..(508): tr|A0A420WJR0|A0A420WJR0_9RHOB Tryptophan halogenase OS =Litorimonas taeanensis OX=568099 GN=DES40_0473 PE=4 SV =1
MEKIDKIVIAGGGTAGWMAAAALSKILGPHYCEIELVESEAIGTVGVGEATIPQIGTFNRTLGITEDDFVRETNATFKLGIEFVDWGQLGDRYIHPFGGYGLDMGGVSFHAFYLKNHPKHNHQILEDYSLQAKAARKNRFMRPVNAGNSPLSNIAYAFHFDAGLYAKYLRRLAEERGVTRTEGKIVDIEQDPETGFVTSISLDKGIKVKGDLFIDCTGFRGLLIEQTLKTGFTDWSHWLPCDSAVVAPCKRKGEMLPYTRSTASAAGWQWRIPLQHRVGNGHVYASSFMSDEEALTHFIENLESPPLQDPRVIRFKTGMRKKAWNKNVVALGLSGGFLEPLESTSIHIIQHGIAKLMQMFPDKSFNQVDIDRYNRLTDFENEKIRDFIILHYYATQRTDSDFWNYTKTMEIPEYLAEKINLFKSYGRVFRENEELFNDTSWFAVMLGQNIIPNAYDPVADIFDAEETAKRLQNISETIETASNYMPQHEDFIKENCASDTFIKHYAKE

SEQ ID NO: 86343 - protein, 511 aa, Caulobacter segnis
  misc_feature (1)..(511): tr|D5VNT1|D5VNT1_CAUST Tryptophan halogenase OS=Cauloba cter segnis (strain ATCC 21756 / DSM 7131 / JCM 7823 / NBRC 15250 / LMG 17158 / TK0059) OX=509190 GN=Cseg_3733 PE=4 SV=1
MQDKRIRKLVIVGGGTAGWMAAAALRRHFQGGPLEITLVESSEIGTIGVGEATIPTIRGFYQQLGLSDIEVMRATQATCKLGIRFDGWLREGHAFIHPFGLFGQDLRGVPFHHYWRKLAQGGEPTNIQDYSLGASLAAAGKFMAPPRNPANSLSIFDWALHLDAGLFAQLMRRVAEDNGVRRIDARITKVNLRPEDGFVASLDLDTGATVEGDLFIDCSGFRGLLIEEALQTGYESWSDLLFCDRAFAVQSEGVGDPAPYTEVKAQSAGWRWRIPLQHRYGNGYVFSSRHISDEDALAELKAAVPDRLLHAPRLIRFNPGRRKQAWNRNVIALGLSSGFLEPLESTSIALIETGVEKIKALFPDKDFAPELVDEFNDWSRREMERVRDFIILHYWANQRSRGEGSDTAFWRDCNAVTLPDSLRRKVELFRQRGHFVRYRWEMFQPASWMAIYAGFELLPEMVDPALDGIDAQALSAPLAEMRKAIAEVVASAPPHAAFLDQYCRPAPVAAQ

SEQ ID NO: 86344 - protein, 498 aa, Hyphomonadaceae bacterium
  misc_feature (1)..(498): tr|A0A2E3AXQ7|A0A2E3AXQ7_9RHOB Tryptophan halogenase OS =Hyphomonadaceae bacterium OX=2026748 GN=CME95_14895 PE =4 SV=1
  misc_feature (459)..(459): Xaa can be any naturally occurring amino acid
MTEAGKKQRVVIAGGGTAGWMTAAAMGKVLEKVCDVTLVESDSIGTVGVGEATIPTLVTYNRLLGIDEAQLMSALRATFKLGIAFENWTDVGHRYIHSFGITGKDHWTAGFQHFWRRGRELGVAGEFGDYCLELIAAEQERFKHLPDLGLNYAYHLDATAYAGFLREIAEQHGVVRREGKIREVRRAEDGDIGSLFLEDGSEIAGDLFVDCTGFRALLIDGALGVGYEDWSHWLPCDRAIAVQTASVRPPRPYTRSIAHEAGWRWQIPLQHRTGNGTVYCSRYMSDDEARGKLLGDIEGECLSEPRLLRFRTGTRRAHWHRNCIAIGLSSGFIEPLESTSIHMIQRSVMRLMQMFPREGVHQPDIDEFNRQTAYEIEHIRDFIILHYHLTNRTDTPFWRHCRTMDIPDGLRHRMALFQQAGRVFRANDELFAENSWTQVMLGQGLMPQSHHPVADVMTXAEVTRFLSYITENVNKTVAGLPMHQDYLGSYCPATKSDL

SEQ ID NO: 86345 - protein, 531 aa, Streptomyces roseochromogenus
  misc_feature (1)..(531): tr|V6KS34|V6KS34_STRRC Uncharacterized protein OS=Strep tomyces roseochromogenus subsp. oscitans DS 12.976 OX=1 352936 GN=M878_11230 PE=4 SV=1
MSDNRIRKILVLGGGTTGWMSAAYLAKALGSSAEVTVLEAPSVPRIGVGEATIPNLQKVFFDFLGLSEEEWMPECNASFKLGIRYINWRTPGSGEALGREHQGGKDHFDHVFGVLPSHENLPLSHYWTHKKLTGQTDEPFDQACYTQPQIFDRNLSPRYLDGTRWASYAWHFDAQKVADFLGRFSVEKLGVQHIQDKFVGADVDQRGHIVAVKTEEGRRLEADLFIDCSGFRSLLMNGVMKEPFLDMSDHLLNDRAVATQIPHDDENNGVEPFTSAIAMSAGWTWKIPMLGRFGTGYVYSSRFTSQDEATQEFCRMWGIDPETHPLNHVKFRVGRNRRAWVKNCIGLGLANQFVEPLESTGIYFVYAALYQLVKHFPDKSFDPVLVNRFNHEVEEMFDDTRDFIQGHFSFAPRNDTPYWRACKELELAPRFVEKVKEYKSGLGVNLPVTDEAGYYGNFEAEFRNFWSNANYYCILAGLGELPDNPMPLLAHQPESIASAEAVFEEIKKRREELLATLPSTHEYLLKLHGKA

SEQ ID NO: 86346 - protein, 508 aa, Maricaulis sp.
  misc_feature (1)..(508): tr|A0A1Q8G0G5|A0A1Q8G0G5_9RHOB Tryptophan halogenase OS =Maricaulis sp. W15 OX=1772333 GN=AWH62_00015 PE=4 SV=1
MINPRTLDQVVIVGGGSAGWMTAAALSRLIGNGHTKITLIESEAIGIVGVGEATIPPIRHFNELLGLDERDFLRATQGTIKTAIEFVDWTRPGHTYLHPFGTYGADMNAVKFHQYWLKLRQLGQAEAFGEYNLCDVAARQNRFGPVARDRQSPVSSLHWAYHFDASLYARHLRRYAEQRGVQRIEGKVVDVHQRPEDGFIASVEMESGDRITGDLFVDCSGFRGLLIEQTLKSGFEDWTHWLPCNRAIAVSSASAGELTPFTRSTARDAGWQWRIPLQHRIGSGFVYSADHLSEDEATSVLLDNLDGEPLNTPKPIRFTTGRRKQAWIKNCVAIGLASGFLEPLESTSIHITQAGISRLMALFPDKDFDPAGITEYNRQAEYLYRHIRDFIVLHYHANERHGVPLWDHCRNMAIPETLQRKLDLFRLKGRLFRYEDELFAESSWHAVLLGQNVMPDGYDPLVDAAPEDRIIDAFRQMHQAVAGAVASMPKHQTFIDQHCRAAMTAPPA

SEQ ID NO: 86347 - protein, 433 aa, Litorimonas taeanensis
  misc_feature (1)..(433): tr|A0A420WJF9|A0A420WJF9_9RHOB Tryptophan halogenase OS =Litorimonas taeanensis OX=568099 GN=DES40_0475 PE=4 SV =1
MAHVGSVSSIRIDGDFHGGSICAVFLSWLGKSLGFTVSGSLSEHSSYEKQPPIILGPQALSLFRKIGLDERDMLKACAGTFVVGAEFEHDNLNAPSFAPYLTSVATLDGIAFHQIYGAARSLHIIAPYSDYFAPLYLAKGKRFSHPIETQPVGRANFRYNLILERALFEDYMRRAAKHYGFRSATQNDADLILKADNNPLQADGFTKISPNTTMPSHIKYRVKNSAIIQIVQTQTDCLETLFPVENQSRKTQSDTCQNVWQDNVINLSDCLRSLLPYDHAYMDAIASLLLSLFDLWPDKSDTTINAAEFNRRVESSINRAKDFQSALCVAAGLIDIENTSQPFKVKWQQFLSRGRLVSYDDEPVSDAEWIAYLLALGINPERVDPLTGKFTPTQMTDALNLQKDISQKWGNSQAIQTEYLGRAKALYAHKRSQ

SEQ ID NO: 86348 - protein, 505 aa, Litorimonas taeanensis
  misc_feature (1)..(505): tr|A0A420WLR3|A0A420WLR3_9RHOB Tryptophan halogenase OS =Litorimonas taeanensis OX=568099 GN=DES40_1265 PE=4 SV =1
MVVNADNKQVKTIAVVGGGSSGWMTACLLNARLNEDPRRPVTITLIEAPNIPVIGVGEATVPSIRRTLKAIGISEKAFMIGADATFKSLIRFEDWNKGEHFDHPFDRRERPNSDPAVLSWLARNQMGGEGFSNRFSVLSNTSTKGLAPKALGWPEYQSTFPYAYHLDAVKLGKVLTEFGTENGIAHKLAKIVNVEISEAGDIEALVSEDGASYRADLYVDCTGFSAHLAKHIMPETQDYSEHLLCDRAVTMSVPYEVHRPDRILPYTSAKALGAGWLWDINLRSRRSLGYVHSSAHLSSDEAEAELRVIEGRHADNIEVKHIRFKTYKRNKSWHRNCLAIGLADGFVEPLESTGLYMMQFAAQSVADILRFNRHFDAATTNQFNKLMQTLFDEILGYVALHYLTSKRRDTPFWKDATASHRTPAALQNLLKEWKKRPPHDVDLLSNHRLFSLESYEYLLFGMGYMSEGQINAAPVVFDQTDMLNKVYAKFPEHEDWLSSTLGHIK

SEQ ID NO: 86349 - protein, 513 aa, Hyphomonadaceae bacterium
  misc_feature (1)..(513): tr|A0A3D2W017|A0A3D2W017_9RHOB Tryptophan halogenase OS =Hyphomonadaceae bacterium OX=2026748 GN=DHW63_05215 PE =4 SV=1
MNTSRISKVVILGGGTAGWMTAAALAKLFALRIKVALVESDDIGTIGVGEATIPTIHWFNELIGLNEAEFMLATKASFKLGIEFIDWTAPNHRYFHPFGQLGIALTGVSFHHRWLKARREGPTRVLSAYSLATQLALAGRFAKPVQDPKSILSTLGYAYHFDAGLYARHLRTLSEAQGVVRHEGKVVRIEQDPETGFVTALSTDRGERLEGELFIDCSGFRALLIEDLFKAGFDDWSHWLPCDRAVAVPCARGDDITPYTRSTARAAGWQWRIPLRHRTGNGYVYSSSFTDDEAAAEMLLANLDGEALADPRFLRFTAGRRRKTWDRNVVAIGLSAGFLEPLESTSIHLIQSGIAKLLALFPNRDCDPGLAAQFNRLFALDMDNIKDFLILHYHATSGKTEPLWEHCRHMMLPDSLIEREAQFRRSGRLLLGTDDLFKEASWLAVLDGQGIEAGDYNPLADLLDSRTNLAQLEQIEQVIARAVPTLPVHEQAIVALTGERADAAAAAGSRPAP

SEQ ID NO: 86350 - protein, 521 aa, Xiangella phaseoli
  misc_feature (1)..(521): tr|A0A1H7CMR8|A0A1H7CMR8_9ACTN Tryptophan halogenase OS =Xiangella phaseoli OX=1144548 GN=SAMN05443287_11014 PE =4 SV=1
MMIRDVVIVGGGTAGWMTATYLKTAFQDRISVTLVESAAVGTIGVGEATFSTIRHFFDYLGLDERDWMPQCSGSYKLAIKYDNWRGDGSHFYHPFERLRTSDGFTMAEWNLALGDATESFDRGSFITPYLCEAQRSPRMLDGSLFTTSLDGALGRSTLDEQRAQFPYAYHFDAALMARYLTKLGVELGVRHVVADVVGVGQDERGWLTHVTTRDQGDVTGDLFVDCTGFRGLLINQTLQERFISFTDVLPNNRAVALRVPRDMERQGIDPYTKATAKEAGWIWTIPLYGRIGTGYVYSDEFCDPDEAERTLREFAAPGQDDLAANHIRMRIGRNERSWVNNCVAVGLSSGFVEPLESTGIFFIQHAIEQLVKHFPDNTWDPVLIRGYNEKVARVIDGVKEFLVLHYVASPRQDTAYWRETKVRKIPDGLAERLETAAVRVLDESTIYPYYHGFEVYSWITVLLGMGWAPKSARPALAHIDPTRASAELAAIRADAERLVNTLPNAYEYLSTIQPPTAQGRS

SEQ ID NO: 86351 - protein, 503 aa, Hyphomonadaceae bacterium
  misc_feature (1)..(503): tr|A0A3D2W2G6|A0A3D2W2G6_9RHOB Tryptophan halogenase OS =Hyphomonadaceae bacterium OX=2026748 GN=DHW63_09740 PE =4 SV=1
MQDQIKSILIVGGGSAGWMTAALFSHLFQGLYRIQLIESEEIATIGVGEATIPAIKKYNELLKLDEAEFMRTTQGTFKLGIQFNDWLKPGASYIHGFGVIGQDWEWLRCHHYWLKLNQLGEASDLANYSINTAAALHNKFVRAQPNMPESPLSHIAHAFHFDAGLYAQFLRRYSETRGVKRIEGKIVDVTLRPDDGFIESVTMENGAIVDADFFVDCSGFRGLLIEQALKTGYEDWTHWLPCDRALAVPCSRSEDFTPYTRSTARPAGWQWRIPLQHRTGNGHVFSSAFMDEAEAEKLLLANLDGKQLAEPNRIRFTTGKRKKLWNKNCVAVGLASGFLEPLESTSLFMIQSSVVRLIRLFPDGVIDPANVAEFNRQSDFEYERIRDFIILHYKATERDDSPFWRYCRDMEIPATLQRKMDLFRANGRIFREDDELFSEESWIQVFLGQGVTPRGYDPLVDLKSTPQIVQFMGNIESVIAKCVEVMPTHEAFVEKFCDAKAAS

SEQ ID NO: 86352 - protein, 507 aa, Sphingomonas sp.
  misc_feature (1)..(507): tr|A0A4R2RWT7|A0A4R2RWT7_9SPHN Tryptophan halogenase OS =Sphingomonas sp. PP-CE-1G-424 OX=2135658 GN=C8J43_1035 42 PE=4 SV=1
MTGTPAARITKVVIVGGGTAGWMTAAALSRLVATGVAVTLVESEEIGTVGVGEATIPSLRDYNRMLGIDEDALVRATGATFKLGIEFRDWRRLGDSYLHPFGTHGRDIEGVSFHQLWLRQANLGGDPGPIGDYCLSAVAARKGRFTRPASNPQSVLSTLSYAFHFDAALYAKFLRGMAEEAGVVRVEGRVAAVDRDAESGFITGLRLDGDRRIDGELFIDCSGFRSLLLGDALGVPFTSWQHWLPCDRAWAVPSERQGTLTPYTRATAETAGWRWRIPLQHRVGNGHVYASDHLDDDDALRALLAGLDGKPLAEPRQLRFVAGRRERLWEKNCVAIGLSGGFLEPLESTSIHLIQSGITRLMALFPDRGFDDVEIAEYNRVMLREYAQIRDFIILHYHATERSDSTFWNHCRTMTIPDTLQAKLDLWSGKARTFREQGELFTPDGWIAVLLGQGVRPVSTDPLVAALPPEESARFMDHVRDMIGKTADAMPAHEQFIAQHCAATIAP

SEQ ID NO: 86353 - protein, 546 aa, Nostoc sp.
  misc_feature (1)..(546): tr|A0A2L2NT83|A0A2L2NT83_9NOSO Tryptophan halogenase OS =Nostoc sp. 'Lobaria pulmonaria (5183) cyanobiont' OX=1 618022 GN=NLP_3599 PE=4 SV=1
MSQDVQKILIVGGGSAGWMTAAYLSKALDKNINITLVESSNITKIGVGEATFSTIKVFFDFLGLQEYEWMPKCNATYKMAIKFVNWNAKGQHFYHPFQRYEVIDGFDISEWWLKMKKDQEAFDYACFLIPWLCDHQRSPRYLDSKVFDHKVQNEFSQEHIAKKNILDKLKIQYPYAYHFDANLLARFMKDYAMSRGVKQIVDDMVDIKLTEDGSIDSLTTKEHGILSGDLFIDCTGFRGLLINKALGEPFISYSDSLLCDRAIAMQIPTDIKKDGINPYTTSTALSSGWVWNIPLYGRNGTGYVYSSAFISAESAEQEFRQHLGAAANNGQASHIKMRIGRNRNSWVKNCVAIGLSSGFVEPLESTGIFFIQHGIEELVNHFPSKSFNQELIHSYNKVVADCIDGVREFLTLHYYASDRTDTEFWKATKNNIKVPEELQEKLRLWKNRLPSNKTINPKYHGFESYSYSVMLLGLNYMPESSLPILEHIGNHNAEAAFLEIRERANYLTSTLPSQSEYLTHVIKSQEQSEYVSGVSDRSYQIHALIS

SEQ ID NO: 86354 - protein, 501 aa, Streptomyces sp.
  misc_feature (1)..(501): tr|A0A1Q5IUD0|A0A1Q5IUD0_9ACTN Tryptophan halogenase OS =Streptomyces sp. CB02261 OX=1703940 GN=AMK29_25860 PE= 4 SV=1
MTASYFKAAFGDRIDITLVESGTVGAVGVGEATFSDIRHFFEFLGLKEKDWMPACNATYKLAVRFENWREPGHYFYHPFEQMRSVNGFPLTDWWLKNGPTDRFDKDCFVMASVIDAGLSPRHQDGTLIDQPFVEGGNEMQGLTMSEHQGKTQFPYAYQFEAALLAKYLTRYSVERGVRHVVDDVTKVELDERGWISAVRTAEHGDITGDLYIDCTGFRGVLLNQALEEPFISYQDTLPNDSAVALQVPMDMERRGIRPCTTATAQDAGWIWTIPLTGRVGTGYVYAKDYLSPEDAERTLREFVGPAAADVEANHIRMRIGRSRNSWVRNCVAIGLSSGFVEPLESTGIFFIHHAIEQLAKNFPGEDWNPVHRDVYNDAVSHVMDGVREFLVLHYVAAKRTDTQYWRDAKTRAIPDSLAERIEKWKVQLPDSESIYPYYHGLPAYSYMCILLGMGGIDLAPSPALALSDGAAARREFELIREKTESLVKVLPRAYDYFTRLG

SEQ ID NO: 86355 - protein, 499 aa, Sphingomonas sp.
  misc_feature (1)..(499): tr|A0A4V2SX64|A0A4V2SX64_9SPHN Tryptophan halogenase OS =Sphingomonas sp. PP-CE-1G-424 OX=2135658 GN=C8J43_1141 8 PE=4 SV=1
MNDTSEPPRTRVVVAGGGTAGWIAAAAIVRQLGSLVDVTLVESDEIGTVGVGESTIPTARSFHAFLGIDEAAFMRATQATFKLGIAFENWRQVGDRYFHPFGSIGRSVAIADFQHFWLEARARGFGEAYGDYSLEQQAAGAGLFGHDEQHSLAYAYHLDATAYARFLRALAEPWGVRRVEGCIERVERDGEGGYIAALVLASGERISGDLFVDCTGFRALLTEGTLETGFEDWSEWLATDRALAVQTETVGPPVPYTRAIAHGAGWRWQIPLQTRTGNGLVYSSGHMSDDEAHETLIGALDGRTLFEPRPLRFRSGMRQQAWNRNCIALGLAAGFIEPLESTSIHLIMNAVIRLIQLFPFRGDDHGALASRFNAQSRHEWEHVRDFIILHYHVTQRDDSAFWRDCARMTIPDSLAERIALFTKTAGAWQGQDDLFRIDSWVSVMLGQGVVPRAHHRIASIIKGQELRTSFEDLSRGIASTVRLLPRHCDFLARYCPADG

SEQ ID NO: 86356 - protein, 496 aa, Sphingomonas paucimobilis; identical to SEQ ID NO: 86305
  misc_feature (1)..(496): tr|A0A411LLQ3|A0A411LLQ3_SPHPI Tryptophan 7-halogenase OS=Sphingomonas paucimobilis OX=13689 GN=DRN02_015540 P E=4 SV=1

SEQ ID NO: 86357 - protein, 501 aa, Brevundimonas sp.
  misc_feature (1)..(501): tr|A0A326L0I2|A0A326L0I2_9CAUL Tryptophan halogenase OS =Brevundimonas sp. OX=1871086 GN=DI552_00885 PE=4 SV=1
MDDLRIRKIVIVGGGTAGWMTAAALGKLLGPDYAEIVVVESDEIGIVGVGEATIPQIGMFNRMLGLDEDDFVRKTKGSFKLGIQFVDWGRKGQTYFHPFGPFGVDMEGVSFHAFWLRLAQAGAPHPITDYSLQAVAAEDDRFMRAVDAGPKSPLSKIAYAFHFDAGLYARFLRQFAEARGVRRQEGKIVRVDQRATDGFIEAVALESGERIEGELFIDCSGFRGLLIEQTLKAGYEDWSHWLPCDRAVAAPCESAPVLTPYTRSTARDAGWQWRIPLQHRTGNGHVYSSRYISDDEAAGVLLSNLDGRPLADPRFLRFVTGRRKQAWVKNCVALGLASGFIEPLESTSIHLIQSGVAKLLQMFPDRTFPQADIDRFNRATRLEMEQVRDFIILHYNLSERDDTTFWRHCRDMDVPETLKEKYRLFETTGRIFRENDELFNDTSWFAVMIGQGMRPKRFDPVAEVLSLDETQRRLAEVRRVMRTCADQMPPHAEFIRRNCAA

SEQ ID NO: 86358 - protein, 510 aa, Glaciecola nitratireducens
  misc_feature (1)..(510): tr|G4QLL6|G4QLL6_GLANF Tryptophan halogenase OS=Glaciec ola nitratireducens (strain JCM 12485 / KCTC 12276 / FR 1064) OX=1085623 GN=GNIT_2013 PE=4 SV=1
MKKLLILGGGTAGWMAANMLNHYFTESKVINPNQKSWQITLVESPQIGIIGVGEGSTPQLKKFFDLLGIQESEWMPACHATYKNGISFLQWSEHQATNRYFHPFPSPFDRQTASAFLYHCQMRSRGMDVPVNPDDFFLSAKLAQLNRSPKPLLGKPQIPLNYAYHFDSAKLGAFLCQRAVNRGVVHINGKMERAIQDKDKSMRAIKLATGETLDADLFIDATGFNSLLLQGVLEEPFDSFDSNLFNNKAVAIPSTSQKIIPSETKATALSAGWAWQIPLTNRTGNGYVYSDQYLSPEQAEEELRRHINSNIADESETRSEAKHLNMKVGQVQRHWHKNVVAVGLSQGFIEPLEATALHLVQETIQKLAASLTDPSFDSEQERIKLRFNEAIKRRFNGIRDYIVCHYKMNTRTDSQYWVDNRENNNISTQLADVIDTWRSKKDIAAVLEQHQMTHYYPVISWYCLLAGYGSFAPATSPNKLPSSNMKQLAHYIMQNASHFAPHNESLGIST

SEQ ID NO: 86359 - protein, 484 aa, Brevundimonas sp.
  misc_feature (1)..(484): tr|A0A326L0K2|A0A326L0K2_9CAUL Tryptophan halogenase OS =Brevundimonas sp. OX=1871086 GN=DI552_00865 PE=4 SV=1
MSAAALAALVAPTGVRVTLVESSEIGTVGVGESTLPHIRDFNQKLGIDEADFMRATQATFKLAIRFDDWGRIGDSYYHPFGDYGALGGAAPFHHYWLHGGGADRVGSIDDYALPIVAAREGRFAPPVDDRRSVLSTYDYAYHFDAGLYAAYLRRFAEARGVTRIDGRIASVAQSPEDGTIRSVTLEDGREIAGDFFIDCSGFRGLLIEQTLKAGYTDWSRWLPCDRAVALPCASDAPKRAYTQAVALEAGWRFRIPLQHRIGNGYVYSSAFLDADNAETRLRGLLEGEALKEANHLRFLAGQRTRNWAANCVSVGLASGFIEPLESTSIYLIQAAITKLTELWPAHARDAPAARAFNRQMDLQYERIRDFIILHYQATQRDDSPLWRAVRETPPPDSLAERIALFREKGVVQDYREGLFQHPSWIAVLLGQHVTPARAHPLVAAEDPVRLRAGLQRMRDAIRRAADSLPTQDAYIARYCAAEAV

SEQ ID NO: 86360 - protein, 507 aa, Cellvibrio japonicus
  misc_feature (1)..(507): tr|B3PI17|B3PI17_CELJU Tryptophan halogenase OS=Cellvib rio japonicus (strain Ueda107) OX=498211 GN=CJA_0356 PE =4 SV=1
MPNSELTKMTTMKKPEKILIVGGGTAGWMAANLLVSRWKDIDVCLLESTEIGIIGVGEGSTPHLKFFFDAIDVADSEWMPRCNATYKNGISFANWSSIPGFESYFHPFPAQTDDVFTVPFFFSNIKARMQGNNVNAHPDHYFLETYLTRANLGPIPAESFPFGVAYGYHFDSGLLGQFLAEKAMSRGVKRILGTITEVVLDANGSLAAVRLDDDSLLDASFFIDCSGFKSLLLQGALKATFKSFKENLFNNAAVVMPTAISEIIPPETRSTALSNGWAWKIPLTNRYGNGYVYSTDYITPEQAEIELRQHLNLVDSDVAARHLQMKVGRVEKHWEKNCLAVGLSQGFIEPLEATALALSFNTISLFMAHYEKGLYTNQFEDAFNKEVNAKFDSVRDYIVCHYKVNQRKDTDYWKDNAANTYLSETLNQILYFWQRGGDFAKNMYMNNLVGSYQPKSWACLLAGYGVFPPLTSDAKAAQFKPVQDMEQLADFIRRCGLNFKQHNELLH

SEQ ID NO: 86361 - protein, 494 aa, Sphingomonas sp.
  misc_feature (1)..(494): tr|A0A2T7VTG4|A0A2T7VTG4_9SPHN Tryptophan halogenase OS =Sphingomonas sp. TPD3009 OX=2171625 GN=DC425_07115 PE= 4 SV=1
MPDGGGGVTQDRAIRSILVAGGGIVGWLAAAALKRRAPFLTVTLLDGARSPNALADRIACTLPSLAGFHADLGIGDEDAVVRTGAGYRLGTRFVGWGRDDADYVHAYDHYGQAFGATAFHLHWLRAAQEGAVPRFDAFAPAAALGRAGRYAPPTPGTIFARHQPGLTLDLPRYTRMIRAFAAHVGVDVVVGEIADIERHDRGGIAAVALVGGGRLAADLYVDATGPEARLRDTIDSARDDWSAWLPCDRVMLADGPTAEPPLLTPVTAHATGWSWDGGTQRGIVYAADRLADDDAAGLLGSAGVAPMTIRPGTRREPWRANCVAIGDAATAIDPLEWCNLHLALSAIDRLIAMLPDRDMAPVEAADFNRQTLAEAERVRDMLALHYRATARPEPMWRAVARVPPPDSLAHTMLQFEERGRLPFYEEETFTRDGWAAVLIGQGIRPRRIDPLAEAIPLSDAHAAMLGVTDAIAAALPHAPTHAAWLAAQARRLAR

SEQ ID NO: 86362 - protein, 509 aa, Lysobacter aestuarii
  misc_feature (1)..(509): tr|A0A508AYJ0|A0A508AYJ0_9GAMM Tryptophan 7-halogenase OS=Lysobacter aestuarii OX=1706195 GN=FKV25_02820 PE=4 SV=1
MDATDTPKGPVRKVVIAGGGTAGWLAACALSHQFRERLEITLVESEQIGTVGVGESTVPPIRTFHRFLQIDEQEFLRAVAGTFKLSISFENWRRPGERYIHPFGITGQGTWATAFHHFWLDSIRRGMPSELGDFCLETVASRGDRFSLQTKPQVNYAYHFDASLYAKFLRRIAERHGLRRLEGKIREVRQHAHDGSVSALVLEDGTVLEGDLFIDCTGFRGLLIEQTLETGYEDWNEWLPSDRAVAVQTESVGPPVPYTRAIAHEAGWRWHIPLQHRVGCGLVFSSRHMSDDEARAKLLRDVGAPAIREPWLVPFRTGRRLKAWNRNVVALGLASGFIEPLESTSIHLAISAVVRLVQLFPFDGMASSLVDLYNDVSRAEMEHVRDFIILHYHATQREEPMWKACREMALPDSLEIRLRAWRERAHAWQDPDELFRVDSWTHVLLGQGVQPGPAHPLARALGDDGLRSLLASIRRPIDQAVATMPSQQAFIDGYCRASAEVWGARPVPG

SEQ ID NO: 86363 - protein, 516 aa, Alteromonadaceae bacterium
  misc_feature (1)..(516): tr|A0A1Y6C386|A0A1Y6C386_9ALTE Dehydrogenase (Flavoprot ein) OS=Alteromonadaceae bacterium Bs31 OX=1304903 GN=S AMN02745866_02128 PE=4 SV=1
MIKNIVIVGGGAAGWLTAGILAANYAKADNRAVSITLVESPDINTIGVGEGTWPTMRMTLSQIGVSETEFLRCCNASFKQGSKFVNWSHGEGGDAYYHPFTIPQAYNETNFHALWQRHFSNSAYDAVANPQAAICELSCAPKNITVPEYAGVLNYGYHLDAGKFGDLLKRHCTEKLGVRHVSDNVIQVVAAEDESIAYLKTEKSGDIHGDLFVDCSGTHCLLLGEHYNIPFKDCRQYSINDTALATQVPYDNQNSPIASATIATAHSAGWTWDIGLSSRRGVGYVYSSQHISDDDAEKELRAYIGSSVESSVAEQLSVRKIKIRAGHREKFWHRNCVAVGMAAGFIEPLEASALALVELSAKFIRDELPMSSSTIPLVEKRFNTTFSYRWEKIIEFLKLHYLISQRRDTAYWCEVSDPASAPDGLKELLELWKFRPPYHHDLLHTEEIFPSASYQYVLYGMGFETSADMKAPEGNSEQKFLRQVRESIQQAEKLSGSLPSNRALLQTIEKHELQKI

SEQ ID NO: 86364 - protein, 502 aa, Sphingopyxis sp.
  misc_feature (1)..(502): tr|A0A095AZQ1|A0A095AZQ1_9SPHN Tryptophan halogenase OS =Sphingopyxis sp. LC81 OX=1502850 GN=FG91_01492 PE=4 SV =1
MGDSRITKVVIVGGGTAGWMAAAALSRTMDNLSIRLVESDEIGTVGVGEATIPAIRLFNALIGIDENEFIRETGGTFKLGIQFHDWGRIGDVYMHAFGQIGRSLGMLPFQQYWLRGRNEGVAGRLGDYSLNESAGRQNRFARLPQIPNTSLDGIAYAFHFDAALYAAYLRKVSEAAGVERTEGKIASVRRNGESGHVEAVVLENGKAIEGELFIDCSGFRALLIEEALETGFEDWTHWLPCDRAIAVPSENAGPARPYTQAIAHTAGWQWRIPLQHRTGNGHVFCSDFISEDEATATLLANIEGRPLADPRTLRFRTGMRKQAWNGNVVALGLASGFLEPLESTSIHLIQNGIAKLLAHFPDRDFDAANIDAYNRRVRFDYERIRDFVILHYHANQRTDAPFWVRCREMGIPETLARKIELFKSQGQIVREGDELFVEIGWFQVLTGQNIMPGSYHPMADQLTHDELAGFFADIETIVARTASHLPTHEDFIAQHCAAGVPA

SEQ ID NO: 86365 - protein, 502 aa, Lysobacter aestuarii
  misc_feature (1)..(502): tr|A0A508A7V2|A0A508A7V2_9GAMM Tryptophan 7-halogenase OS=Lysobacter aestuarii OX=1706195 GN=FKV25_09295 PE=4 SV=1
MTEEARDIRQRRIRRVVIAGGGTAGWMAAAGLARALGKVVDITLVESEEIGTIGVGEATIPTLMTFHRLLQINEQEFMAATQATVKLGIQFENWRKPGHAYFHSFGTTGKDHWMANFVHFWLRGRREGVAGSYDEYCVELLAALEGRFAHLPRNGINYAYHLDAGLYARYLRRFSEALGARRVEGRIAAVETDEASGYITALAMADGSRIEGDLFIDCTGFRALLIGQALNVGFEDWSHWLPNDRAFAVPTASVGDAVPFTRSIAGTAGWQWRIPLQHRVGNGIVYSSRHLDDDDARQALLDGVDGEPLRDPLQIRFRPGKRLKCWHRNCVALGLAAGFVEPLESTTIHMIQRGIVRLLQTFPDVIDPRHVTAYNAQLDDELQHVRDFVILHYHVTERRDTPYWRMLADMEVPASLRERIALFRETGNVFHAPMELFAENSWIQVMMGQGITPRQYHPAAEVMSEADLARFFDDIRRSVRTTVDTLPAHMDYIRQYCPAGPA

SEQ ID NO: 86366 - protein, 503 aa, Oleiphilus messinensis
  misc_feature (1)..(503): tr|A0A1Y0IBD7|A0A1Y0IBD7_9GAMM Tryptophan-5-halogenase OS=Oleiphilus messinensis OX=141451 GN=OLMES_3770 PE=4 SV=1
MKKITDVVVLGGGTAGLISAITLRKHCPELSIKLIRSKAIGVIGVGEGTLGSFNPFFFDYLGLDRGEFYRQVNPSWKLGIKFRWGRRGAFNYAFSPNCDWQWDDLAYPNGFYCQDNFLHTCQYSSLMDVDMAFVKKPNGDPLILNDAVFHLENTRFVDYLESQAEALGIPLIDKKVSSATCSERGVSSFLLEDGNTLEADLFIDASGFKSVLLHQHLNIPFQSFESSLFCDRALIGTWKRTTEAIRPYTTSDTMNAGWSWRIDHESHINRGYVYSSSFLSRDAAETEFRTENPLLGDLHEIKFTPGKYARSWEKNVVAIGNASGFVEPLEATSIGIICAQSKKLVDALKASQGAPNQMIRDLYNHYVDTQWEATRRFLTLHYKLNTLLDNSFWQTCNSETVTGDLISEMLQFYETYGPDNRLMRAFLPESDPFGIDGYLTIMVGMKHPYPTAASVYSHPPLSEADKVRWRTHQHYYREQAEQNALSAQEALAIIKSPDWEWYQ

SEQ ID NO: 86367 - protein, 526 aa, Dyella sp.
  misc_feature (1)..(526): tr|A0A318DH37|A0A318DH37_9GAMM Tryptophan halogenase OS =Dyella sp. AtDHG13 OX=1938897 GN=BDW41_11662 PE=4 SV=1
MARLKKVLIVGGGTAGWLAACYLAKAVNARDPQGVQVHLVESPDIGLLGVGEATFPSIRGTLAAIGLDERRFLVGATATYKQGIHYRHWVRPPGTPGADHFFHPFNAPSQRPGGPELLPYWLLGAAPEGMPFADAVSMQTALVDHGRGPKRFKDPDYQGPMNHAFHFDAACFARVLAEHGQEALGVKRHVATVERTELDEHGAIARVVTRELGELTADLYVDCTGLRGLLIGNVMQSPFKSRADVLFADRAVAMQVPYEKADTPIPSYTISTAQEAGWIWDIGLQKRRGVGYVYSSRHTSDERAEQVFRGYLGAAAEGLKAMHIKFETGYRPEHWRRNCVAVGLAGGFVEPLESTGIALIELATYLLTHLLPSDTDEMERAARHFNEMMIARYDRIIDFIKMHYCLSQRRDSAFWIDNTDAASIPATLQDKLAQWKHRPPHRLDFISDLEMFLVSSWQYVLYGMEFKTDISAMRSAYPRMEEARQEFRNIQLAASQALQDLPDHRALVERMCQEYRERAGRQNAVA

SEQ ID NO: 86368 - protein, 532 aa, Nonomuraea sp.
  misc_feature (1)..(532): tr|A0A4R4NS68|A0A4R4NS68_9ACTN Tryptophan 7-halogenase OS=Nonomuraea sp. KC201 OX=1848320 GN=E1267_05415 PE=4 SV=1
MSHDNRVRNIVILGGGTAGWMTASYLSKALQRTVKITVLEAPTIPRIGVGEATVPNLQRAFFDYLGIPEDEWMRECNASFKVAVKFINWRTPGPSSPTPQPLGGRTDQFFHPFGLLPSADQIPLSHYWVAKTLKGETDEPFDYACFKETAIMDANRAPRALDGTPATYYAWHFDAQKVANFLRTFAVEKQGAEHVEDQMTEVLRDERGFITALRTAGGRLLEGDLFIDCSGFRGLLINQAMEEPFIDMNDHLLCDSAVATAVPHDDAEHGVEPYTSAIAMSSGWTWRIPMLGRFGTGYVYSSQFATKDEAAEELCRLWGLDPENAPLNHIRFRVGRNRRAWVRNCVSIGLASCFLEPLESTGIYFVYAAIHQLAKHFPDRTFDPVLIDSFNREIEEMFDDTRDFIQAHFSLSPRTDTPFWRANKELELADGIKQKIAMYKAGLPINLPITDERGYYGNFEAEFRNFWTNGSYYCVFSGMGLRPDKPLPSLTYKPEAIEAAETLFANVKRHQKELATSLPSNYEFLRHLHGDS

SEQ ID NO: 86369 - protein, 529 aa, Catenovulum sp.
  misc_feature (1)..(529): tr|A0A2S0VV16|A0A2S0VV16_9ALTE Tryptophan 7-halogenase OS=Catenovulum sp. CCB-QB4 OX=2172099 GN=C2869_17255 PE =4 SV=1
MRSILICGGGTAGWMTAVYLSHLYNRFEQTVSIELIESSDLPPVGVGEATVHSIRHFFDMVGINEAEFFTATDATFKLGIEFINWKQAQKGKTHSYWHPFDMQTAEIAGDNLAQCWLDNLAHTKHDYAHSVSISPYLSAAHKAPKTIDMPAYQAPIPYAYHFDAGKLATFLKSIALKRGVKHTIGAIDKVIQHNGIIQAIQTNIANKQADFYFDCTGFRGLLINQLSANNWLSLEDELPCNRALAIQTPYPDQQQPATHTQAIAMQHGWRWRIGLQNRVGNGYVFSDKYCSESQAEQELRQDLLQNNTKLGRDAEFKLLKMRIGHRQQTWINNCCAIGLSSGFIEPLESTGIYLIEAGLRLWGEYTRFHDFSQLSKATSLLPNQYNQILRDIYQDLKRFIVLHYVLSDRQDSEFWRSWQQVLNQDEVLQQQLAVWRYKPVEASDFFAAKSQLFNEINYRFVLYGMGHLPTQTVTQTTKQSASQVPATRGSSHQQNQLNLLKQLNQFCLKQTQKHPDQMAVLNSFKSIKS

SEQ ID NO: 86370 - protein, 471 aa, Catenovulum sp.
  misc_feature (1)..(471): tr|A0A2S0VN87|A0A2S0VN87_9ALTE Tryptophan 7-halogenase OS=Catenovulum sp. CCB-QB4 OX=2172099 GN=C2869_04135 PE =4 SV=1
MTASLLAKQWPQADITLIESPNIPTVGVGEGSTPYIRHLFKTLDISEAQWMSKCNATFKNGITFKHWSIRKGFESYFHPFLSQYDDDVTPLFAQHTRLRRHGYPITCHPDNYYLTKELTNQRKSCQLQDSSNPVETLYAYHFDAEKLGLLLKEKSLALGVNHLLGNISQVKQAENGDIASVVSDEQGELSADIFVDCTGFKALLMQKTLNTPFVSYSDNLFNDSAVAIASPKIDNYSPQTVSTALSNGWAWHIPLQNRVGNGYVYSAKYQTADSAEQELRHFIGQDRVKDVEARHIKMRVGRSEKHWNKNCLAVGLSQGFIEPLEATALHLVQDTIESFIAAIEEGKGTTAKQDYFNDKINYAFERVRDYIVTHYISNSRNDTPYWQDCRKIPVSDSLQRILYAWFNGMDVAEELDLQQISQYYPSASWHALLAGVGTFPEPDPSKTETFANEIQQIQHRRDELAKLFKNL

SEQ ID NO: 86371 - protein, 274 aa, Streptomyces albogriseolus
  misc_feature (1)..(274): tr|A0A1B1V581|A0A1B1V581_STRAO Putative dehydrogenase/r eductase OS=Streptomyces albogriseolus OX=1887 GN=thdE PE=4 SV=1
MTAATPRTVAIVAGGSRGIGAEISRHLAAAGMDVVIGFAHDTVAAEKLVGEISGAGATGGPGAGAGAGDGPGAGAGAGAGAGQAKAVLADIAEPDGAARLFDEAEQAFGGVDIVVTCAGAHAARRGPLAATDDDDFRRVVDVNFRGTFHMLRAAATRVRTGGRIITFSSSALALGAPGQAVYNASKAAVEVLTRQLAKELAGRDITVNAIAPGPTGTELFLSGRPPEAIEALAGQIPLGRIGRPDDIAAVVDFLLGEQGGWINGQVLHANGGIV

SEQ ID NO: 86372 - protein, 497 aa, Phenylobacterium sp.
  misc_feature (1)..(497): tr|A0A521PKE5|A0A521PKE5_9CAUL Tryptophan 7-halogenase OS=Phenylobacterium sp. OX=1871053 GN=EPO51_17155 PE=4 SV=1
MQGQVVKKVVVAGGGSAGWMAAAALSTQLGGLLDITLVESDAIGTVGVGESTIPTARTFVHLLGLDEREFMRETGATFKLGILFENWGQLGDRYIHSFGQVGKSTLMAHFHHLWLQARAQGFGGDLGDYCLELRASEEGKFFTSDAAPVNYAYHIDATRFGRYLRRRCENKGVRRVEGKIQQVQQQPETGHITALVLESGERVEGDLFIDCTGFRGVLIDQTLKAGFEDWGQWLPNDRAVAVQTRTTHPAMPLTRAIAHTAGWQWGIPLQHREGNGWVYCSDFMSDDEASASLLGQLKGERLTDPWQLRFRPGRRRKAWDKNCVAIGLAAGFIEPLEATSLHMIMIAVTRLLQLFPFTGVNDALVTRFNFLADQEILRIRDFIILHYNATQRTDTPYWDRCRTMEIPQSLAERIELFRETAQVYHVPGELFLVDSWLQVMLGQRIVPKSHHLMGALMPPERLRRALDDLRGNIARAVGRMPSHQDFVDQYAGLQPAD

SEQ ID NO: 86373 - protein, 420 aa, Streptomyces albogriseolus
  misc_feature (1)..(420): tr|A0A1B1V588|A0A1B1V588_STRAO Putative Na+/H+ antiport er OS=Streptomyces albogriseolus OX=1887 GN=thdA PE=4 S V=1
MTGNAVSDFFLALTLAITAAKLLGAALQRIGQPAVVGEILAGILVSPMVLSATVSEKIFPESVQPVFSGLANVGLATFMFLVGYEMDGALLRGRKRIPLSIAVGSVVLPLAGGVALAIPLASTYAPGSHTGFVLFVGVAMSVTAFPVLARILSDRELNRTATGAIVLVAAAIGDIVAWICLAGVIAFTGATGEWRFVLLPLYVLALAFLVRPALKKAVHYAEHHDKQATVLFPVLIAGLLVSSAATEWLGIHFIFGAFAFGAIMPRAMSESLRVLVVNQMQQTGYLLLPLYFVVAGMKVDLAGFGGGVLLTLVLVIAVAVVTKTLGVYAAGRLAGADHGQALTASVLMNTRGLTEIVIVSVGLEMALIDQKFYSIMVVMAVVTTVLTGPLLKRIGAHRLVGANPPEGASAAAREKQNAPG

SEQ ID NO: 86374 - protein, 501 aa, Streptomyces sp.
  misc_feature (1)..(501): tr|A0A2D3E318|A0A2D3E318_9ACTN Tryptophan halogenase OS =Streptomyces sp. KCB13F003 OX=2052824 GN=ulm24 PE=4 SV =1
MTAAYLRAALGESINVTVVESKRIKTIGVGEATFSTVRHFFDYLGLPENEWMPKCNATYKLGIRFENWRAKGHYFYHPFERLRVVDGFPLTEWWLNKKPSDRFDQDVFMMSEICDNLRSPRYLDGTLFEQDFIERGGSMDLERTTLAEQATQFPYAYQFDASLLADFLTEYATTRGARHIEDDVVEVVRDERGWISHLRTREHGELAGDLFIDCTGFAGLLLNKTLGEPFLSYQNSLPNDSAVALRVPHDAERTRLRPCTTATAQEAGWIWTIPLFERIGTGYVYASDYTTPEEAERTLREFVGPQAADVEANHIRMRVGRSRNSWVNNCVAIGLASGFVEPLESTGIFFIQQGIEELVKHFPNADWDPQLRTSYNRTVANAMDGVREFLVLHYRGAARNDNAYWRDAKTREIPDGLAARMEAWQSKLPTEETVFPHYHGFEPYSYHAMLLGLGGIDLKPAPVLAHMDDSRAAQEIQRLKDQARDIAKRLPSQYEYLAQMH

SEQ ID NO: 86375 - protein, 502 aa, Erythrobacter sp.
  misc_feature (1)..(502): tr|A0A5E7YIK5|A0A5E7YIK5_9SPHN Tryptophan halogenase OS =Erythrobacter sp. EC-HK427 OX=2038396 GN=ERY430_41407 PE=4 SV=1
MAIEHIVIVGGGTAGWMAAAALSRLRKNRELAITLVESEEIGTVGVGEATIPPFVDFQTLLEIDESEMLAAVQGSFKLGIQFVNWGNVGESYIHPFGNYGYQMGGLSFHHIWHHAKSRGDNRPIQVFNAETMAAYFGKFAKTDDMKRDDLPPINYAYHINATAYAAFLRKYAEARGVVRTEGKVADVRLDAETGFVTSIALENGPEIAADFFVDCTGFRGLLIEQALETGYEEWTHWLPCNRAVALPCNRDDGAPPPPFTKATAHKAGWQWQVPLQHRNGNGHVYCDAYMSADEATDILIANIAGKPTADPNHLRFITGRRKKFWNKNVVALGLAAGFMEPLESTSIHLINTGINKLIALLSLDGVNEAQQASFNRLTAKEYEKIRDFLILHYNATRRDDSDFWNYCRTMSVPDSLTEKVELFKMNGQIFREDDELFTETSWAAVMMGQGISMNGHNAMAATLDQAETHKELDEIEKSIRFLVQHMPAHGDYLARYCPAKAA

SEQ ID NO: 86376 - protein, 536 aa, Betaproteobacteria bacterium
  misc_feature (1)..(536): tr|A0A536XDX7|A0A536XDX7_9PROT Tryptophan 7-halogenase OS=Betaproteobacteria bacterium OX=1891241 GN=E6H58_068 85 PE=4 SV=1
MTTTATLFNYSFSLTQPNPRAHLPPAIRKIVIVGGGSAGWMTAMTLAAALLPKGIEIEVLESPIVGIIGVGEGSTPWLRGFFDALGIEESEWMPACHATYKCGITFDGWSTKPGFESYFHPFASMLDNLTMTQFVYNSHGRLNGVNLHAHPNRFFIASTLAEQHLAPKPQRNFPFDVWYGYHFDAVLLGQFLQKKAIERGVKYKSCHVKEVKLNERGDIASVQTDGDETIAADFFVDCTGFAGLMIQQALKTPFVSFSSNLFNDAAVAMPTPIGDDIPSQTVSTAMKNGWAWKIPLTARYGNGYVYSSSFCSADEAERELREHLGLLDSPTPARHLKMKIGRVTKHWNRNCLAVGLAQGFIEPLEATALLFIQQTASAFVEALEAGDVSEAAHERFNERVNQHFEGTRDYIVTHYKTNSRSDTEYWRANASNENLSEPLKQLFGFWMAGKPIAGDVGRQTIGKGYPVFSWYCIMSGMGIFPDAHTLRAPTPSEARYKMSEIDNLLQRSALNFVKQRDLLADIPPKRREDALQIYFW

SEQ ID NO: 86377 - protein, 521 aa, Xanthomonas campestris
  misc_feature (1)..(521): tr|A0A2H1T0L8|A0A2H1T0L8_XANCH Tryptophan halogenase OS =Xanthomonas campestris pv. phaseoli OX=317013 GN=prnA PE=4 SV=1
MPDTTPSDPHQRPVRRVVIAGGGTAGWMAAAALSKLLGRHLHITLVESDEIGTVGVGEATIPSLVTFHRLLEIDEAAFMAATQATIKLGIAFEHWRDVDQHYIHSFGHAGTDHWSAGFQHFWLKGRQRGVARDFGDYCLELRAAQEGRFAHLPNGGMNYAYHLDAGLYARFLRRFSEGFGVTRVEGRIGQVETDAQSGFLTALTLQDGMRVEGDLFLDCTGFAGLLIGKTLGVGSDDWSRWLFADSALAVQTESVGPPVTYTRSRADQAGWMWRIPLQHRVGNGIVYSSRYMDQDGARAVLERNLTGRALTEPRPLRFTPNQRHRVWEKNCVALGLASGFLEPLESTNIHLIQRGIIRLLQTFPQVINAVDIAEYNRQAAQEITHIRDFVILHYHATDRRDTPFWRDCAAMDIPDSLRHRVELFRQSGRVFHQANELFAENSWVQVMLGQGVVPQQHHPVADLMGDAELSRFLETIRTRVEAALVRLPAHADFLQRYCPAPPLPEPAARVPAPPVMATPAG

SEQ ID NO: 86378 - protein, 357 aa, Burkholderia cepacia
  misc_feature (1)..(357): tr|K7XQI5|K7XQI5_BURCE Tryptophan halogenase (Fragment) OS=Burkholderia cepacia OX=292 GN=prnA PE=4 SV=1
SHPIKNIVIVGGGTAGWMSASYLVRALQQQANITLIESEAIPRIGVGEATIPNLQKVFFDFLGIPEREWMPQVNGAFKSAIKFVNWRKSPDRSRDDHFYHLFGSVPNCDGVPLTHYWLRKREQGFQQPMEYACYPQPEALDARLAPCLLDGTRQMPHAWHFDAHLVADFLKRWAVGRGVTRVVDEVVEVHLNERGDIASLSTKEGRTLEADLFIDCSGMRGLLINQALKEPFIDMSDYLCDSAVASAVPNDDARVGIEPYTSAIAMNSGWTWKIPMLGRFGSGYVFSSKFTSRDQATADFLNLWGLSDKQPLNQIKFRVGRNGRAWVNNCVAIGLSSCFLEPLESTGIYFIYAALYQ

SEQ ID NO: 86379 - protein, 505 aa, Xanthomonas campestris; identical to SEQ ID NO: 84637
  misc_feature (1)..(505): tr|A0A2H1T5U9|A0A2H1T5U9_XANCH Tryptophan halogenase OS =Xanthomonas campestris pv. phaseoli OX=317013 GN=prnA PE=4 SV=1

SEQ ID NO: 86380 - protein, 506 aa, Xanthomonas campestris; identical to SEQ ID NO: 84626
  misc_feature (1)..(506): tr|A0A2H1T176|A0A2H1T176_XANCH Tryptophan halogenase OS =Xanthomonas campestris pv. phaseoli OX=317013 GN=prnA PE=4 SV=1

SEQ ID NO: 86381 - protein, 510 aa, Rubrivivax sp.
  misc_feature (1)..(510): tr|A0A519IGS6|A0A519IGS6_9BURK Tryptophan 7-halogenase OS=Rubrivivax sp. OX=50259 GN=EOP39_07450 PE=4 SV=1
MNDQAIRRIVIVGGGTAGWMSAAPLSQVFGTQPGGGAPNPVGVEIVLVESPEIGTVGVGEATLPSIRYFNDTLELDNAEFMRKTQASFKLGIEFKDWGQLGNRFFHGFGGFGPPVVNRSPVMHYLRLNAQGGMPSYEEWSTATVMARRNRFALPEQGPPSAANSYSYAFHFDAGLYAAYLRDYAMARGVRREEGTIVDVSLRPTDGFVTAVTLSDGRRIEGDLFIDCSGFRALLIEGACKAGYHDWTHWLPCDSAQAVPCDKVLPMTPYTTSTARSAGWQWRIPLQHRTGNGHVYCSGYTSDEEAGRVLMANLDGAAQDSPRQLRFKTGLRKRIWDRNVVAVGLSSGFLEPLESTSLSLIIHGISALVELFPDRHCEPHLVDEYNRKMTRQYESIRDFIILHYKQTDRDDSEFWRYCKSMSIPDTLAHQMDVFRRNGRVTILDRDSFGEDSWWSLYLGLGMKPEELPPLLAQVGEQPLREHFSRVRMAVSKTVDGMPDHAAYLSRLVGAG

SEQ ID NO: 86382 - protein, 519 aa, Rubrivivax sp.
  misc_feature (1)..(519): tr|A0A520C4V2|A0A520C4V2_9BURK Tryptophan 7-halogenase (Fragment) OS=Rubrivivax sp. OX=50259 GN=EOP35_01245 PE =4 SV=1
MTTAPQPIRRVVIAGGGTAGWMVAAGLSKCLGKQVDIRLVESEEIGTVGVGEATIPTLHILHEILDLDEVEFVKATQATFKLGISFENWRNVGEDYFHSFGKTGKGHWTAGFHHFWLEARKRGLASSYDDYCLELRAARDNRFATLPDNGINYAYHFDATLYGQYLRRLSAAQGVQRIEGKIAKVHTDAASGNITGLQLDGGALIEGDLFIDCTGMRSLLLGETLGVPYESWSQWLPCDSALAVQTMSVGEPVPYTRSIAHPWGWQWRIPLQHRVGNGIVFSSRHVSEDEAKATLLANVQGEVLRQPRLIKFTPGQRAQAWKKNVVAIGLSGGFLEPLESTSIHLIQKGLTRLVELFPSDGIRQSDIDEYNAQSRDAMEVARDFIILHYHVTNRDDSQFWRDCRDMDVPPLLKHRIQHFRDTARIMLRQGELFAENSWVQVMMGQGILPASHHPITRNMDNRSMADFLGEIRKDVVRTVMKLPTHQQFISHNCPAPKLDVAPGKPLGGASLRINPQARL

SEQ ID NO: 86383 - protein, 219 aa, Streptomyces griseus
  misc_feature (1)..(219): tr|V9XLX4|V9XLX4_STRGR Tryptophan 6-halogenase (Fragmen t) OS=Streptomyces griseus subsp. griseus OX=67263 PE=4 SV=1
GGGTAGWMTASYLGKALQDTVEITVLEAPTIPRIGVGEATVPNLQRSFFDYLGIPEEEWMRECNASFKMAVRFINWRTEGRGEPNPRTLPGDGPDHFYHPFGLLPDHDQTPLSHYWFQRKHQGETTEPFDYACFREPPLMDAMKAPRHTDGTAATRYAWHFDAHLVADFLRRFATEKQGVRHVQDEMVRVEQDERGYVTALHTKGGQALDADLFIDCSG

SEQ ID NO: 86384 - protein, 399 aa, Gammaproteobacteria bacterium
  misc_feature (1)..(399): tr|A0A534C4F4|A0A534C4F4_9GAMM Tryptophan 7-halogenase OS=Gammaproteobacteria bacterium OX=1913989 GN=E6K42_12 100 PE=4 SV=1
MPTARRPAGTRIPRRSRCVASKCGIRFDGWSTKPGFGSYFHPFASMLDNLTMKQFVHNVEARINGADLEAHPDRFFIAARLAAKRRAPKASESFPFDIWHGYHFDAVLLGQFLHRKAVDRGVRYKSCHVTHANLDADGNLASVGTEEGETIAADLFVDCSGFAGLLIDKALHTPFVSFSSNLFNDAAVAIPSPMEGSIPSETVSTAMKHGWAWKIPLTTRFGNGYVYSSRFCSADEAETELRGHLGLLDADVPVRHLKMKIGRVTRHWNRNCLAVGLSQGFIEPLEATALLFIQQTAATFVEFVERGDLGEAAHQRFNDMMNTHFEGIRDYSWYSIMAGMGIFPDPQDLRPPTAQEARFSVAEIDNLLERSSANYPDHRAALESIPPRRTEPALQVYFW

SEQ ID NO: 86385 - protein, 197 aa, Gammaproteobacteria bacterium
  misc_feature (1)..(197): tr|A0A534GYJ1|A0A534GYJ1_9GAMM Tryptophan 7-halogenase (Fragment) OS=Gammaproteobacteria bacterium OX=1913989 GN=E6K24_18055 PE=4 SV=1
EAHPDRYFIAARLAAKRRAPKASESFPFDIWHGYHFDAVLLGQFLHRKAVDRGVRYKSCHVTHANLDADGNLASVGTEEGETIAADLFVDCSGFAGLLIDKALHTPFVSFSSNLFNDAAVAIPSPMEGSIPSETVSTAMKHGWAWKIPLTSRFGNGYVYSSRFCSADEAETELRRHLGLLDADVPARHLKMKIGRVT

SEQ ID NO: 86386 - protein, 498 aa, Brevundimonas sp.
  misc_feature (1)..(498): tr|A0A519KTC2|A0A519KTC2_9CAUL Tryptophan 7-halogenase OS=Brevundimonas sp. OX=1871086 GN=EON86_12745 PE=4 SV= 1
MRDIVIVGGGTAGWMTASALAKVAGTQSLSITLIESDEIGIVGVGEATIPPILLFNKLLGIDENEFIRETQATFKLGIQFVDWGKLGHTYAHPFGLFGADMNGINFSHYWLRAVQAGADADNHRFVAEAEAMRLNRFARTPAGGSGEMPRVNYAFQFDAGLYAAWLRKYAEKRGVVGREGEIVGAARDGESGTIRSVTLADGREVKGDLFIDCSGFRGLLIEQEMQAGYEDWTQWLPANRAVAVPCDRVEDPVPYTRSTARESGWQWRIPLQHRTGNGYVFSDAFISEDQATADLMSRLDGAPQAEPRVLRFVTGRRRKGWVGNVVAIGLSSGFLEPLESTSIHLIQTAISKLLALFPRARRDDAMADQFNREMDQQYEGVRDFIIAHYKVTTRDDTPFWRHCRDMAVPDSLAAKLELFRARGEVMVENHELFRETNWFPVLYGQGLTPEGYHPLADVLSDDDLRLRLSQIRAAIRARVDSLPSHDSYLRQCVAGTAR

SEQ ID NO: 86387 - protein, 102 aa, Gammaproteobacteria bacterium
  misc_feature (1)..(102): tr|A0A534I4H6|A0A534I4H6_9GAMM Tryptophan 7-halogenase (Fragment) OS=Gammaproteobacteria bacterium OX=1913989 GN=E6K21_13105 PE=4 SV=1
MQDRRLRSILIVGGGTAGWMAAAALAKVLGPDYAIRLIESEEIGTIGVGEATVPHLKLFNSVLEIDEVEFIREVRGTFKLGIQFVDWGRAGDRYIHGFGTIG

SEQ ID NO: 86388 - protein, 511 aa, Gammaproteobacteria bacterium
  misc_feature (1)..(511): tr|A0A534JD93|A0A534JD93_9GAMM Tryptophan 7-halogenase OS=Gammaproteobacteria bacterium OX=1913989 GN=E6K20_05 085 PE=4 SV=1
MNGARTPGPIISVVILGGGTAGWMTAASLLQRLSRLGISVTVVESSQIGTIGVGEATVPAILRYFDSLGLDVYEVLRATNGTIKLGIEFDGWKHEGHRFIHPFSRYGIQAGPVAFHHLWNRLRAAGETAPVDDYSLGVQMARAGRVFLPPKQPRAEFEIFDWAVHFDAGRFAQFLRRFSEARGVRRIDARLTEAVRDPQSGHIIRLRLDNGETVDGQLFIDCSGFHRLLIERALESGYEDWRHWLMCDRAVALPCAAADPAQLAPYTRSRALAAGWTWRIPLQNRVGNGYVYSSDHISDEDAVASLRRELEGEALAEPNFVRFRAGHVRRFWVGNCIAIGLSGGFLEPLESTSISLIQMGIDKLIHLWPDTRMAPELASEYNRLSVQEFARVRDFIILHYAANGRTDGDLWRYCREMPLPDTLEHKIALYRAGGQIVQYQSESFFDSSWVCMYANFGIEARNWDPLAELIDLDELKNLTRRLRPDIAALACEGSPHREFLRLKGALAETRT

SEQ ID NO: 86389 - protein, 389 aa, Gammaproteobacteria bacterium
  misc_feature (1)..(389): tr|A0A534DMX6|A0A534DMX6_9GAMM Tryptophan 7-halogenase (Fragment) OS=Gammaproteobacteria bacterium OX=1913989 GN=E6K38_13075 PE=4 SV=1
MDKRVEDIVIVGGGTAGWMTAAFFSKLLKSGVRIRLIESDEIATIGVGEATIPAIKHYNAALELDENEFLARTQGTFKLGIEFVDWAKLGDFYIHGFGRIGQDLGILKCYQYWLKMRARGLVPGLEHYSINTVAPRQSKFMRSVPEMKQSPLGDIANAFHFDARLYALFLRAYAEARGVRRTEGKIVGTELRAGDGYIDAVRMESGERIPADLFFDCSGIRGLLIEQALHTGFESWNHWLPCDRAVAVPCESVDPLLPYTRATAHKAGWQWRIPLQHRIGNGYVYSSQYISDDEATAVLLARLDGKPSGPPRYIKFLPGKRRKLWNKNCVAVGLSSGFLEPLESTSIHLIQTTIVRLARFFPSRGFNPIDVEEFNRRADFEYERIRDFI

SEQ ID NO: 86390 - protein, 499 aa, Sphingopyxis sp.
  misc_feature (1)..(499): tr|A0A1Y5PTU2|A0A1Y5PTU2_9SPHN Tryptophan halogenase OS =uncultured Sphingopyxis sp. OX=310581 GN=SPPYR_2280 PE =4 SV=1
MSNKKAVQRVVIAGGGTAGWMMAAAIARTMGHTVDLTLVESEQIGTIGVGESTIPPLVNFNRILGIPETEFMRAAQATFKLGILFDNWKHDGDSYFHSFGLSGKDHWSAGFQHFWLNARERGHEQPYADYCLELVAGMQGKFAHLPEERMNYAYHVDATLYGRYLRKLAEADGCKRVEGKIARVELDGESGDIAALHLDGERRVEGDMFVDCTGFRGLLIDGALHAGFEDWGHWLPNDSAIAVQSKHLRKPPPYTQAIAHDAGWQWRIPLQHRMGAGIVYSSGYLSRDAAYDRLMSSVGEPLIEPFDIKFRGGVRRKQWFRNCVAVGLAGGFVEPLEATTVHLIQRAILRFIRLMPNGRVSERDAMEFNEQQRLDIEQIRDFVILHYKATNRRDSAFWRHVAAMPIPDSLQQKIELFRETGRVFRKNEELFAENSWVQVMMGQGIEPQTYHPIAAKLRDDEVERLFQTLRDNIAQTVATLPEHHAYVERYCGAEEPTAA

SEQ ID NO: 86391 - protein, 135 aa, Brevundimonas sp.
  misc_feature (1)..(135): tr|A0A519PIU4|A0A519PIU4_9CAUL Tryptophan halogenase (F ragment) OS=Brevundimonas sp. OX=1871086 GN=EON88_25845 PE=4 SV=1
MTQRKKTRVVIAGGGTAGWLAAALLTRQLGALLDVTLVESEQIGTVGVGESTIPTVTRFHALIGVEERAFMTATGATFKLGISFEGWGRTGDRYIHSFGDVGKSTWMGDFQHFWLEARDRGVAGALGDYCFEHQA

SEQ ID NO: 86392 - protein, 40 aa, Gammaproteobacteria bacterium
  misc_feature (1)..(40): tr|A0A534ENW5|A0A534ENW5_9GAMM Tryptophan 7-halogenase (Fragment) OS=Gammaproteobacteria bacterium OX=1913989 GN=E6K39_12775 PE=4 SV=1
MADSRIRSIVIVGGGSAGWMAAAALAKTLGRECAIRLIES

SEQ ID NO: 86393 - protein, 510 aa, Unknown; identical to SEQ ID NO: 84044
  misc_feature (1)..(510): tr|A0A4S0RDK8|A0A4S0RDK8_9BACT Tryptophan 7-halogenase OS=bacterium M00.F.Ca.ET.177.01.1.1 OX=2563908 GN=EN820 _02130 PE=4 SV=1

SEQ ID NO: 86394 - protein, 352 aa, Brevundimonas sp.
  misc_feature (1)..(352): tr|A0A519Q4F6|A0A519Q4F6_9CAUL Tryptophan 7-halogenase (Fragment) OS=Brevundimonas sp. OX=1871086 GN=EON88_157 10 PE=4 SV=1
GLYAAFLRRFAEGLGVVRVEGRIADVRMTDDGAVAGVTLADGRALDAEFFIDCSGFRGLLIEQALKAGYEDWSHWLPCDRAVAVPCESSGPPTPYTRSTAREAGWQWRIPLQHRIGNGYVHSSRFISEEDATATLMANLDGRPLADPRVLRFTTGRRKASWVKNVVAMGLASGFLEPLESTSIHMIQSAIARLMTLFPDRRFDPAVTAEYNRQTRIEAEQIRDFIILHYHATARTDSPLWEHVRTMAPPESLARKIDLFRSSGRFFRDGDELFSETSWIAVMFGQNIMPERWDPLADTLDADVMAGKLARMRMPTSSRAIAARRMSPSRPDREAANVHANEGWGINVGHGRS

SEQ ID NO: 86395 - protein, 505 aa, Xanthomonas campestris
  misc_feature (1)..(505): tr|A0A3S9RI46|A0A3S9RI46_XANCA Tryptophan 7-halogenase OS=Xanthomonas campestris pv. arecae OX=487849 GN=NX80_ 008970 PE=4 SV=1
MTQAQIRKVVIAGGGTAGWIAACALSHQFRDLLDITLVESEQIGTVGVGESTVPPIRTFHRFLQIDEQEFLRAVAGTFKLSISFENWLRQGDRYIHPFGITGQSTLVCAFHHLWLESQRRGMPGSFGDYCLETVASRVDRFALHGEPAVNYAYHLDAALYAKFLRARSEACGVKRIEGKIQQVTVQPHSGDVASLVLEDGQVIEGDLFIDCSGFRGLLIEQTLHTGYEDWSHWLPCDRAVAVQTEAVGPPVPYTRAIAHEAGWRWHIPLQHRVGNGLVFSSKHLSDDEAHTKLLHDVAAPAVKDPWMVPFRTGRRLKAWNKNVVSLGLASGFIEPLESTSIHLTISAVVRLLALFPAEGIAPSQVQLFNDVSRAEMEHVRDFVTLHYHATQRDEPLWQQCREMELPESLALRLRAWRERAHAWQGADELFRVDSWTHVLMGQGIAPEQHHPLTRAFADHDLRRLLDGIAQPIQHAVQQMPSQQAFIERYCKAGAQVWGMRSPMPA

SEQ ID NO: 86396 - protein, 498 aa, Sphingomonas sp.
  misc_feature (1)..(498): tr|A0A4U1L7T5|A0A4U1L7T5_9SPHN Tryptophan 7-halogenase OS=Sphingomonas sp. L-1-4w-11 OX=2572576 GN=FBR43_14475 PE=4 SV=1
MRSIVIAGGGTAGWMAAAAFARFLPREAWRVVLVESEAIGTVGVGEATIPQIQLFNHHLGLDEDEFLAATQGSIKLGIEFRDWVRPGHAYMHGFGQVGRGLGLAEFHHYWLRAHEAGTAAPFGAYSLNNMAAAAGRFARFEAQGPVPPMPYAFHFDAGLYAAYLRRHAEAGDVVRHEGRIVAVEPGEGGIAALLLDGERRIAGDLFIDCTGFRGLLIGEALGVGYHDWRHWLPCDRALAVPSARVGDPAPYTRATARRAGWQWRIPLQHRTGNGYVYASAHVSDDGAAATLLANLDGEPLGDPRPLAFTTGKREAFWAGNCIALGLSSGFLEPLESTSIHLIQTAVARILAFLPADRPTEADRAEYNRLTHVEYDRIRDFLILHYHANQRVGEPLWDAMRALELPEELARKLDLWRASARLSRRDDELFAEPGWTQVLIGQEILPERHHPLADAPGDRDLAAFLSTVADVARRTAAALPPHGDFLRGLSRAPQMKVSA

SEQ ID NO: 86397 - protein, 506 aa, Proteobacteria bacterium
  misc_feature (1)..(506): tr|A0A523NUN0|A0A523NUN0_9PROT Tryptophan 7-halogenase OS=Proteobacteria bacterium OX=1977087 GN=E2O36_05680 P E=4 SV=1
MNNQLNGPGKILIVGGGTAGWMTAMLLAKAWPGTPSEICLLESSDIGIIGVGEGSTPKMRRFFDGLDIPESQWMPACNATYKCGIRFPQWSTRKGYKSYYHPFFSIHDDSTVRAFANSVAHRRANIDVPAHPDAFFVSNHLANDELAPKPDPELEYQSEYAYHFEAGLIGRFLQERAIASGVTHLIDTVTAVKQHDNGDIARVETKDRGSIAADFFVDCTGFASVLTSKTLGVPFLSYKDTLFNDRAVALPTPLDGRSLPSQTISTALKYGWAWKIPLSNRFGNGYVYASDYIDADGAERELREHIGLNDDSVTARHLKMRVGRVESSWNGNCLAVGLSQGFIEPLEATALMIVQDTVENFITRFTEGHFTDKYRAEFNVKINLIFDSIKDYIFMHYKLNSRNDTNYWVDNRENTHVSDSLRQILDVWDSGGDMLGELRRQGPRLAYSPTSWFCILAGMGRFPRKPKKAKRNTQVSDPDELRRYCEKIVRHFPGHRDTIDAMRAAS

SEQ ID NO: 86398 - protein, 518 aa, Sphingomonas sp.
  misc_feature (1)..(518): tr|A0A4U1L7R3|A0A4U1L7R3_9SPHN Tryptophan 7-halogenase OS=Sphingomonas sp. L-1-4w-11 OX=2572576 GN=FBR43_00035 PE=4 SV=1
MADRVTSVVIVGGGTAGWLAACRIAAAADPHADTPLRVTLIESPDIPTIGVGEGTWPTMRRTLAAIGIAEADFLVACDASFKQGSRFVGWRDGAPDDAYLHPFTPPVEGDARAILAGWQARGALPFAAAVSPQPHVCARDLAPRQPAMPDYAGALNYGYHLDAGRFAALLRRHGVERLGVRHLRDHVDRVVLAQNGDIAAVETRAGGAVAGDLFIDCTGHAALLIGERYGVPFVDRSDVLFNDRALAVQVPVAPGSPIASQTDATAHAAGWIWDIGLPGRRGIGCVYSSAHLGDDEAADTLAAYVRRTMPDADAAALAPRRLAFRSGHRARFWERNCLAIGLSAGFLEPLEASAIVLIELSLDALVGDFPVTRGGMAHHAARFNARFAYRWDRIVEFLKLHYVPSVRSEPYWRDHRAAASIPGRLADLLAMWREAPPSARDFGAEDEIFPAASHQYVLYGMGALPPPAGAMRVADRAGVAQRMAQAAERARALAASLPTNRAYLDALHAQAPALEGMR

SEQ ID NO: 86399 - protein, 505 aa, Xanthomonas translucens
  misc_feature (1)..(505): tr|A0A5C1WSI6|A0A5C1WSI6_XANCT Tryptophan 7-halogenase OS=Xanthomonas translucens pv. undulosa OX=487909 GN=F0 H33_00480 PE=4 SV=1
MAQIRKVVIAGGGTAGWIAACALAHQFRDLLDITLIESEQIGTVGVGESTVPPIRSFHRFLQIDEQEFLRAVAGTFKLSISFENWRRPGERYIHPFGLTGQSTLVCAFHHFWLEAQRRGMLSELGDYCLETVASRLDRFALQQSPPVNYAYHLDAGLYARLLRGHAERHGLKRVEGKIQQVRQHAESGCVEALLLEDGTLVEGDLFIDCTGFRGLLIEQTLHTGYEDWKQWLPCDRAVAVQTEAVAAPVPYTRAIAHAAGWRWHIPLQHRVGCGLVFSSAHLSDDEARAKLLHDAAAPPIKEPWLVPFRTGRRRKAWNKNVVALGLASGFIEPLESTSIHLTIAAVMRLLTLFPTDGIAPSMVDLYNEVSCIEMEHVRDFIILHYHANQRDEPMWQACREMALPDSLQQRLRAWHERAHAWQGADELFRVDSWIHVLLGQGIVPAQHHPLARALPDQQLQQFLDAIRQPIDRAVAQMPSQQDFIACYCKAGREVWAGRAPVAAPA

SEQ ID NO: 86400 - protein, 495 aa, Colwellia sp.
  misc_feature (1)..(495): tr|A0A161IA17|A0A161IA17_9GAMM Tryptophan halogenase OS =Colwellia sp. C1 OX=1737566 PE=4 SV=1
MMDSKTKVVIAGGGTSGWLSAYSLISRLGTVLDITLVESDQIGTVGVGEATIPTIRSFHSLIGIDEQEFMSATQATFKLGIQFDNWGKEKGSYFHSFGEIGQRSWMAEFHEFWMEAKAQGFGGSLEDYCLELKAAKANKFATRAGKKPVSFAYHFDATAYADYLRTKSETAGVKRREGLIEHVQKDGTGNITSITLANGETILGDVFIDCTGFRGLLIGEHLDVGYEDWSHFLAADSAIAVQTKAVEEPRPYTQSIAHPAGWQWRIPLQSRVGNGIVYSSKFLSDDEARSTLMGNLTGEPITEPRQLRFTTGRREKAWHKNCIAIGLSSGFLEPLESTSIHLVTTALMRLMKLFPFGGKINLLAEQYNREAQLEAETIRDFIILHYHLTERDDSPFWDHYRTMEIPESLAHRMAIFKENGYAWPDDFGLFRVDSWVQVMMGQGITPEKHHKGSCVIPTEGLKEQMAALRKMIANSVEQLPTHNDFIKKYCPAKNR

SEQ ID NO: 86401 - protein, 491 aa, Sphingopyxis sp.
  misc_feature (1)..(491): tr|A0A1Y5Q3F5|A0A1Y5Q3F5_9SPHN Tryptophan halogenase OS =uncultured Sphingopyxis sp. OX=310581 GN=SPPYR_2884 PE =4 SV=1
MTGPRDITLVGRDAPLWLAAAALRRALAPAGVAVRVVELPAETGAADLYPTLPAIEALHNQIGINEAALLRTTRGAFTLGQNFVDASDAGRPSFLHGYGAHGTAIDGGDFFPHWVKARHHGLDVGLDDFSLTASAARGGRLFFPDADSEIYGRSDYGYHLPAAAYAKSLKAIARHLGVELFETATVAVERGDAGVAALLLDDGRRIESALFADLTRERLLSGGAFEAWDTPGDRVLSALAPRPAALPAYAEIRAGAGGWTGLFPGLTHIHVQHVFSRAATTDQEARAAAEAACGLPLDAVTVRPFAAGVAAEPWAGNVIALGDAACVLDPAHGFALHGLQLGIVHLLAAYPADGAGYAARRVEYNRVLRSHLARVADFQAAHHVLQNYSGAFWDAARALPLSEELGHRIDLFAARGELAPLEDESLPPDSWRALFVGHGIMPESWRPAADRVPPDEVKAHFRKMLGFVREAVLRQPTHDACLARIMQSAHG

SEQ ID NO: 86402 - protein, 523 aa, Streptomyces vinaceus
  misc_feature (1)..(523): tr|A0A5J6JC95|A0A5J6JC95_STRVI Tryptophan 7-halogenase OS=Streptomyces vinaceus OX=1960 GN=CP980_28410 PE=4 SV =1
MNTKNPDKVVIVGGGTAGWMTASYLKKAFGDRLSVTLVESGKIGTVGVGEATFSDIRHFFEFLDLKEEDWMPACNATYKLAVRFQDWQRPGHHFYHPFEQMRSVDGFSMTDWWLQDGPTDRFDRDCFVMASLCDAGRSPRYLNGSLLRQEFDERAEEPAGLTMSEHQGRTQFPYAYHFEAALLAKFLTGYSTDRGVQHIIDEVQEVKLDEHGWISHIVTKGHGDISGDLYIDCTGFRGVLLNQALGVPFISYQGTLPNDSAVALQVPLDMKTRGIPPYTQATAQEAGWIWTIPLFGRIGTGYVYAKDYCSPEEAERTLREFVGPEAADVEANHIRMRIGRSEQSWKNNCVAIGLSSGFVEPLESTGIFFIHHAIEQLVKHFPGADWHPQLRAGYNSAVSNVMDGVREFLVLHYKGAGRNDTQYWKDTKTRAIPDALADRIERWQVQLPDSENVFPYYHGLPPYSYMAILLGTGAIELRPSPALGLADSTAAQKEFAAIRDKAQFLVDTLPSQYEYFAAMQKLP

SEQ ID NO: 86403 - protein, 510 aa, Unknown; identical to SEQ ID NO: 84044
  misc_feature (1)..(510): tr|A0A4S0Z8Z7|A0A4S0Z8Z7_9BACT Tryptophan 7-halogenase OS=bacterium M00.F.Ca.ET.163.01.1.1 OX=2563906 GN=EN806 _02130 PE=4 SV=1

SEQ ID NO: 86404 - protein, 496 aa, Sphingopyxis sp.
  misc_feature (1)..(496): tr|A0A1Y5PQ37|A0A1Y5PQ37_9SPHN FAD dependent oxidoreduc tase family protein OS=uncultured Sphingopyxis sp. OX=3 10581 GN=SPPYR_0960 PE=4 SV=1
MSARARAVRRIVIVGGGTAGWMTAAALGRALAGHSHDITLVESEAIGTIGVGEATVPPIHEFNRYLRLDPADFLRATHGTIKLGIAFEGWGGADRRYFHPFGYLGIEMSGIHFHHYWLRHLAAGGDSDHGPYNLETMAAREGRFAPATRHGPVHHAVQFDAAAYARLLRSYAEDKGVTRIEGKVADVRLDPEDGFITALALDDGRVIDGDFFIDCSGFRGLLIEGALHTGYTEWSHWLPCDSAVAMPCESTGDPSPFTSSTAREAGWQWRIPLQHRTGNGYVYSSAHLGHDEAEALLRSRLPGAPLADANRLRFAAGHRKAIWNRNCVAIGLAGGFIEPLESTSIHLIQTTIIRLLSLLPRDAVDPNVVRRFNRDALHEYEVIRDFVIAHYALANRDDTPFWRDVAAAGMPDSLAERIEAFRATGNILFEPGDLFGPTNWYAVLTGQGVRPQSWHPIADGLSGEELASRLATLRGRVAEQLAELPPHAEFLRRLNS

SEQ ID NO: 86405 - protein, 518 aa, Kordiimonadales bacterium
  misc_feature (1)..(518): tr|A0A5A7NA20|A0A5A7NA20_9PROT Tryptophan halogenase OS =Kordiimonadales bacterium JCM 17846 OX=1236968 GN=JCM1 7846_24590 PE=4 SV=1
MSKAIRSIVIVGGGSAGWLTAGLIAAEHRAYEKDGLSVTLVESPTVPTIGVGEGTWPTMRATLIKLGISETDFFKECDASFKQGAKFQRWVTGRDDDFYYHPLMLPQSFQSFDLAPYWKKIVSSTKQKISFSDAVCFQEAMCERNLAPKLITTPEYEAVANYAYHLDAGKFGAFLQSHCTQKLGVRHILDDVKGVVAADTGDIAGLETAASGRIEGDLFIDCTGFSSLLLGRHYDVPFKPCDDVLFIDRALAVQVPYAQDDDPIVPHTLSTAQSAGWVWDIGLPSRRGVGYVYSSRYQSEEAATETLRAYVGPAFDRLSVRQIPIRSGHRETFWRHNCVAVGLSAGFLEPLEASALVLIELSADMIAKNMPACRDVMDLAAKRFNETTAYRWDRIIDFLKLHYMLSQRTDSAFWIDNRDPATIPESLRQQLEIWRYQAPGNADFTSNNEVFPAASYQYVLYGMGFETDFSYQAHRLHREKDAMTLFGKNAKQKDQVLRALPKNRDLIEKIRRTGLQAI

SEQ ID NO: 86406 - protein, 512 aa, Kordiimonadales bacterium
  misc_feature (1)..(512): tr|A0A5A7N7I0|A0A5A7N7I0_9PROT Tryptophan halogenase OS =Kordiimonadales bacterium JCM 17846 OX=1236968 GN=JCM1 7846_19640 PE=4 SV=1
MPQRPIRNIIIVGGGTAGWLSACLLASHCKTEQGRGGTVTLIESPSIPTIGVGEGTWPTMRQSLKRIGLTETDFLRATTAGLKQGSRFIGWADGSADDHYDHPFSPPLDAHGFDPFALWCAMGAEQRPAFADFHHVQARLCAAGFGPKTPLQADYEGHLNYGYHLDAGAFASLLCQHGTTNLGIRHLRDDVLDVGLDEDGAIGHLICQQSGRVDGDFFVDCTGFSARLIGTALGVPFRDCNHILFADRAIAVQKPHATADAPLSCQTHATAQKAGWIWDIALKERRGLGHVYASDFLSDDEAQKILLEHAGMKEAEATPRLLKIKSGYRQSLWQKNCVAIGLSAGFFEPLEASALMLAELSAQALCALLPLDHGDLAIASRRYNQRFAHFWPAILKFLKLHYILSRRTEPFWLANRDAQSWPDDLAELLALWRDQPPLPDHLGAENEVFSYLSYRYVLYGMGFAAPRNPPRGQGAPARWQQMLDGLMGRMESTLPRHRDLINHVHRHGFQAI

SEQ ID NO: 86407 - protein, 507 aa, Luteimonas sp.
  misc_feature (1)..(507): tr|A0A5D4XG66|A0A5D4XG66_9GAMM Tryptophan 7-halogenase OS=Luteimonas sp. XBU10 OX=1132694 GN=FZO89_15585 PE=4 SV=1
MTDHDARIRRIVVVGGGSAGWMAAATLATYLGRGSSVRLVESEEIGIVGVGEASVPHLKTFNGEVLGIEEAEFLKASQGTFKLGIEFRDWGRIGDTYLHGFGRIGRSMGPLPFHQFWLKRFLAGHAPDIGAYTLQTVAAPQGRFMVGGSDAPAGSPLADFAYAYHFDAGRYARFLRELAERRGATRTEGRIVDVVRRAGDGFVEAVVLESGERIEGDLFIDCSGFRALLIGQALEVDYVDWRQWLPCDRAMAVPSANAGPPTPYTRATARAAGWQWRIPLQHRTGNGYVYASEHLSDDEAAATLLAHLDGVALAEPRALRFTTGMRREFWHANVVALGLASGFMEPLESTSIYLVQSGLQRLLGLFPDLGFEPQLVRRYNAETTFEYERIRDFLVLHYHATTRDDSPFWTHCRTMPVPDALRETITMFQRDGRYFRHGDDFFALPSWVQVMLGQGIVPAGYHPVVDEMPESHLDAFLSRVREDIARAAAAMPTHQQFIDRYCKAPPA

SEQ ID NO: 86408 - protein, 484 aa, Gammaproteobacteria bacterium
  misc_feature (1)..(484): tr|A0A534I2G9|A0A534I2G9_9GAMM Tryptophan 7-halogenase OS=Gammaproteobacteria bacterium OX=1913989 GN=E6K32_01 505 PE=4 SV=1
MTAAALTKSFGKLLQVTLVESEEIGIIGVGESTVPHLRDFNRLLEIDEADFVRRTKGTFKLGIQFRDWRRLGDSYVHGFGTIGRSLGLLDFHQYWLKARKLGLAKDIGHYSINTLAAPQGRFLVPPSDAPPNTPLADIVYAYQFDAGLYARYLRDYAEGRGARRIEGKIVEVKQNGESGFVESVRLESGATVAGDLFIDCSGFRALLIGGTLRSGFQDWTHWLPLDRAIAVPCEKVEPPTPYTRVTAREAGWQWRIPLQHRTGNGYVYSSRFVSDDEAMAVLLKNLDGKPLADATKPIRFAAGKRDKLWHKNVVAIGLAGGFLEPLESTAIFLIQSGIFRLVQLFPRRDFDPTLEQTYNAQAQFEYERIRDFLILHYCATEREDSELWRYCRSMKIPDSLREYIRLFADAGRFFRNGTELFAVTSWVQVMLGQGIRPRSYHPAADWVTDSDLRSFVESVEKLIARCVSIMPSHEDFIARHCAAV

SEQ ID NO: 86409 - protein, 521 aa, Xanthomonas axonopodis
  misc_feature (1)..(521): tr|A0A3S0CVI4|A0A3S0CVI4_9XANT Tryptophan 7-halogenase OS=Xanthomonas axonopodis pv. eucalyptorum OX=2497685 G N=EI541_10490 PE=4 SV=1
MPDTTPSDPHQRPVRRVVIAGGGTAGWMAAAALSKLLGRHLHITLVESDEIGTVGVGEATIPSLVTFHRLLEIDEAAFMAATQATIKLGIAFEHWRDVDQHYIHSFGHAGTDHWSAGFQHFWLKGRQRGVARDFGDYCLELRAAQEGRFAHLPNGGMNYAYHLDAGLYARFLRRFSEGFGVTRVEGRIGQVETDAQSGFLTALTLQDGMRVEGDLFLDCTGFAGLLIGKTLGVGSDDWSRWLFADSALAVQTESVGPPVTYTRSRADQAGWMWRIPLQHRVGNGIVYSSRYMDQDGARAVLERHLTGRALTEPRPLRFTPNQRHRVWEKNCVALGLASGFLEPLESTNIHLIQRGIIRLLQTFPQVINAVDIAEYNRQAAQEITHIRDFVILHYHATDRRDTPFWRDCAAMDIPDSLRHRVELFRQSGRVFHQANELFAENSWVQVMLGQGVVPQQHHPVADLMGDAELSRFLETIRTRVEAALVRLPAHADFLQRYCPAPPLPEPAARVPAPPVMATPAG

SEQ ID NO: 86410 - protein, 484 aa, Sphingomonas sp.
  misc_feature (1)..(484): tr|A0A4U1L7I1|A0A4U1L7I1_9SPHN Tryptophan 7-halogenase OS=Sphingomonas sp. L-1-4w-11 OX=2572576 GN=FBR43_14445 PE=4 SV=1
MTACLMAERWLRPGARPVEILLVESPDIGIVGVGEGSTPQLKALFDRLGIAEAEWMPRADATYKLGIGFERWSSDPAHQRYFHAFPGPVDLHTQPAFVARARMRRQGYAVAAQPDDWYLAAHLAERRLGPHPAASFPFAPSYGYHFDAYRVGEVLRDAAVRRSVIHRQARVERVELAENGDVRALVVEGGEAIAGDFFIDCSGFRSVIAQQALGARFVSFADNLFNDAAVVMPTPSEPTTAIATRATALSAGWAWAIPLTTRIGNGYVYASAHVGADAAEAELRAHLGVGDDVPARHLKMKVGRVADSWTRNCLAAGLAQGFLEPLEATALHIVQATADEFVAAFDAGGFTPQHRDRFNARIARRYEGVRDYIVAHYRMNLRTDTDYWRANAANEHLSDDLKAMMTAWFTGADLEAAIAERDIGGYYASISWHALFAGYGVFPPADRLKPLPPGHAAPEIGDLLARSAINFASHDEQLAQLRER

SEQ ID NO: 86411 - protein, 505 aa, Xanthomonas axonopodis
  misc_feature (1)..(505): tr|A0A3S0CU92|A0A3S0CU92_9XANT Tryptophan 7-halogenase OS=Xanthomonas axonopodis pv. eucalyptorum OX=2497685 G N=EI541_04850 PE=4 SV=1
MTQAQIRKVVIAGGGTAGWIAACALSHQFRNLLDITLVESEQIGTVGVGESTVPPIRTFHRFLQIDEQEFLRAVAGTFKLSISFEHWRRQGERYIHPFGITGQSTLVCAFHHLWLESQRRGMPGSFGDYCLETVASRVDRFALHGEPAVNYAYHLDAALYARFLRARSEACGVKRVEGRIQQVTVQPHSGDVASLVLEDGQTIEGDLFIDCSGFRGLLIEQTLHTGYEDWSHWLPCDRAVAVQTEALGPPVPYTRAIAHEAGWRWHIPLQHRVGNGLVFSSKHLSDDEAHAKLLRDVAAPAVKEPWMVPFRTGRRLKAWNKNVVSLGLASGFIEPLESTSIHLTISAVVRLLALFPAGGIAPSQVQLFNDVGRAEMEHVRDFVILHYHATQREEPLWQQCRQMELPESLALRLRAWRERAHAWQGADELFRVDSWTHVLMGQGIAPEQHHPLTRAFSDHDLRRLLDGIAQPIQHAVQQMPSQQDFIERYCKAGEQVWGMRSPVPA

SEQ ID NO: 86412 - protein, 503 aa, Sphingomonas sp.
  misc_feature (1)..(503): tr|A0A4U1L773|A0A4U1L773_9SPHN Tryptophan 7-halogenase OS=Sphingomonas sp. L-1-4w-11 OX=2572576 GN=FBR43_00020 PE=4 SV=1
MSGGVCKRIVVAGGGTAGWMAAAAIARSMGPAASVTLVESDAIGTVGVGESTIPPLVTYNRLLGINEADFMRATNATFKLGILFDGWKNGRDRYFHSFGSTGNDHWAAGFQHYWLNGRTRGHDAPYDDYCLELVAALEGKFAHLPDNALNYAYQLDSTAYARFLRSMAEGDGTQRIEGRIAEVALDPERGDIAALVLDDGRRIEGDLFLDCTGFRALLIEGALHAGFEDWTHWLPCDSAIAVQTANAGPPVPYTRAMAHDAGWQWRIPLQHRTGNGLVWCSRYLSRDAALDRLMGNLEGTVLTEPNHLKFTTGARRRQWHRNCIAIGLSGGFMEPLESTSIHLIQRAILRLIRMLPLGAVNPSDVAEFNDQQLQDMEQIRDFLILHYKATERRDSPFWRQCAAMDVPDTLAQKMALFAETGRVFRRNEELFAENSWVQVMLGQGIVPRSWHPIAARLSDDELARLLGGIRERVTRTVAGLPGHAAYVARYCGATAAAATGKAA

SEQ ID NO: 86413 - protein, 502 aa, Sphingopyxis sp.
  misc_feature (1)..(502): tr|A0A1Y5PSD6|A0A1Y5PSD6_9SPHN Tryptophan halogenase OS =uncultured Sphingopyxis sp. OX=310581 GN=SPPYR_0415 PE =4 SV=1
MGDSRITKVVIVGGGTAGWMAAAALSRTMDHLSIRLVESEEIGTVGVGEATIPSIRLFNALVGIDEDEFVRETRGTFKLGIEFRDWGRIGDSYMHAFGQIGRSLGMLQFPQYWLRGRAEGVAGRIGDYSLNETAARAGRFGRLPQIPNTGLDGIAYAFHFDAALYAAYLRKIAESAGVVRTEGKIDSVRRNGENGHIEAVVLEGGEEISGELFIDCSGFRALLIEGALGTGFDDWAHWLPCDRAIAVPSEDAGPARPYTQAIAHQSGWQWRIPLQHRTGNGHVFCSDFIGEDEAAATLLANIEGRPLAEPRTLRFRTGMRRRAWNANVVALGLASGFLEPLESTSIHLVQNGIAKLIAHFPGRNFDAANIDTYNERVRFDYERIRDFIILHYHANQRSDSPFWTRCREMAIPATLAGKIELFRSQGQIVREADELFVEIGWFQVLTGQNIAPRGYHPMADQLTREELAGFFADIETIVARTASRLPTHDDFIAQHCAAGVPA

SEQ ID NO: 86414 - protein, 493 aa, Sphingopyxis sp.
  misc_feature (1)..(493): tr|A0A1Y5PPZ5|A0A1Y5PPZ5_9SPHN Putative Tryptophan halo genase OS=uncultured Sphingopyxis sp. OX=310581 GN=SPPY R_0959 PE=4 SV=1
MPGARAVTHSVQRVVVFGGGVAAAMAALAVSRAYARLGTDIVWVDTGEAPAPHAALVAPPDLATFHRLLGIDEAALARHAAATVNMGQQFAGWSGGDDAFLHAYGDAGSAFASLPFVQHWTRARAAGLRVALEDFCLAAAAAKQGRTGAPRETATRQAVKAGWHLDAAGYAKLLRAACEQADIRIVPGAGAVPHKGGSRLDRIDLADGEQLGADLFIDTDGALVAALDGGAEARPGFCDRIIRASAPAFDPLPLYSRVAAHPAGWLTLIPLANRTAIEFAYDSASLSDAGAPAALAAALGRPADAAPPAALGAAARPRPWIGNVVAVGPGAGDAPPLDGAELLLLQLGIAQLVLLWPIDRAEMPEAAIYNEELAGTRARVADFTAQHFRLNARIGEPYWDAARAAPVSVELAAKIDLFAARGMFAHYNHEAHVEDSWALVMAGHGVTPRSFDPQALLTEDQALMAEFQRQLRAVASDVHAMESHADALRRMRE

SEQ ID NO: 86415 - protein, 504 aa, Gammaproteobacteria bacterium
  misc_feature (1)..(504): tr|A0A534J624|A0A534J624_9GAMM Tryptophan 7-halogenase OS=Gammaproteobacteria bacterium OX=1913989 GN=E6K20_12 965 PE=4 SV=1
MADARLRSIVIVGGGSAGWMAAAALAKTLGRECAIRLVESEEIGTVGVGESTVPHLEAFNRALEIDEAVFVRQVRGTFKLGIQFVDWGRVGARYFHTFGPIGHDYGFLPFHQYWLKLFLAGKADDIGAYSLHSVAALRGKFMTGATDAPQGSPLHYVAHAYHFDAGLYALYLRHYAEARGVRRTEGKVVDVVLRGTDGFIEAVVLQGGEKIAGDLFIDCSGFRGLLIEQALHTGYEDWTHWLPCDRAIAVPCEKVGPATPYTRSTARAAGWQWRIPLQHRIGNGHVYSSAYISDDEAHRTLMSDLDGRALAEPRILKFTTGRRRKFWNKNCVAVGLASGFMEPLEATSIYLIQSGVGRLINLMPDRNFSPVLIERYNQQAAFEFERIRDFLILHYYATERRDSPFWQYCGNMQIPEQLADNIRLFQDSGRFFREGDEMFAIASWVQVMMGQHFVPHGYHPAVDLIPEQEVIELVASVRNVIAHCVEVMPTHEQFIARFCPAEAA

SEQ ID NO: 86416 - protein, 495 aa, Actinoplanes deccanensis
  misc_feature (1)..(495): tr|A0A3G5BRW9|A0A3G5BRW9_9ACTN Tryptophan halogenase OS =Actinoplanes deccanensis OX=113561 GN=fadM PE=4 SV=1
MADAMPKVIVIGGGPGGSTAAGLLAKGGAEVKLLERAEFPRYHIGESITTSCRAIIDYVGALDKVNACGFTSKTGVLMRWGQERDWVIDWTAQFGADTRSWQVDRDVFDKVLLDNAADSGAEVVQKAHVKRVLFDGDRAVGVEWQPAGGESRIETADYVVDASGRAGLISAQHYNNRRPHEIFRNVAIWGYWENAELLPESPAGGINVISSPDGWYWLIPLRDNRFSVGFVTHKTNFVEKRRGFDSQEAMLTAMIDQSDTMKQVLANATQLPDVRVEQDFSYAADKFCGDGYFLVGDSACFLDPLLSTGVHLAMYSGMLSAASILSLTRGEVNEPEAQAFFESLYRNAYHRLFTLVISFYQQHAGKDRYFALADTLSRAAQGNGAKSADLAFGEIIAGLTDLREAADQTGAAAEPITETIDAAATGGAKPVQELLGAAEQARLRAEEAAPNQRVTIAPMYIDANDLYDAASGLYLVTEPRLGISRVSSEATVAAG

SEQ ID NO: 86417 - protein, 505 aa, Xanthomonas translucens
  misc_feature (1)..(505): tr|A0A5C1ZIL8|A0A5C1ZIL8_XANCT Tryptophan 7-halogenase OS=Xanthomonas translucens pv. undulosa OX=487909 GN=F0 H32_20020 PE=4 SV=1
MIAAPLRNLVVVGGGTAGWMAAAALARVLGPDYRITLIESEQIGIVGVGEATVPHIKAFNNLLGINEAEFVRQTQGSFKLGIEFVDWQRPGTTYIHGFGTEIGHSLGLLPFQQYWFKQALAGKAKPLGAYTLNTVAARRGKFMTSASDAPPNSPLGNIAYAYHFDASLYAAFLRRFSEQRGVTRREGIVEQVQLHPESGHVLSVRLASGDTIAGDLFIDCSGFRGLLIEQALHTGYHDFTHWLPCDRALAVPCAKVGPPTPYTRATARAAGWQWRIPLQHRTGNGYVYSSAHISDDEAAATLLANLDGAALADPRPLRFVTGRREQVWNRNVVALGLASGFMEPLESTSIHLIQSGISKLLELFPREGISPVLVQRYNDRIAFEFDRIRDFLVLHYTATERDDSDFWRQCRAMAITPELQATLDLFGDSGRFYRNGDEMFAEISWVQVMVGQGILPRAYHPLVDQVPAADIERFVASIEQTIGHCVDAMPPHQAFIDRYCAAAPR

SEQ ID NO: 86418 - protein, 514 aa, Proteobacteria bacterium; identical to SEQ ID NO: 85147
  misc_feature (1)..(514): tr|A0A520PSP6|A0A520PSP6_9PROT Tryptophan 7-halogenase OS=Proteobacteria bacterium OX=1977087 GN=EVA80_01230 P E=4 SV=1

SEQ ID NO: 86419 - protein, 506 aa, Xanthomonas campestris
  misc_feature (1)..(506): tr|A0A3S9RNN0|A0A3S9RNN0_XANCA Tryptophan 7-halogenase OS=Xanthomonas campestris pv. arecae OX=487849 GN=NX80_ 022285 PE=4 SV=1
MIPAPLRNIVIVGGGTAGWMAAAAFARVLGPTFNVQLIESEQLGTVGVGEATVPHIKAFNNLLGIDEAEFVRQTQGSFKLGIEFVDWQRRGSAYMHGFGTQIGHPLGLLPFHQYWIKQHARGKAQPLGAYTLNTVAAARGKFMTSAGDVPANSPLANIAYAYHFDATQYAHFLRRYSEQRGVTRIEGLVEQVQLHPESGHVQSLQLASGQTVHGDLFIDCSGFRGLLIEEALHTGYHDFTHWLPCDRAFAVACEKVGPPTPYTRSTARAAGWQWRIPLQHRTGNGYVYCSAHISDDEAAATLLANLDGKPLADPRPLHFTTGRRKQFWNRNVVALGLASGFLEPLESTSIHLIQSGISKLLELFPREGISPVLVQRYNDRSAFEFDRIRDFLLLHYHATERDDSAFWRHCRSMPITPELQTTLDLFRDSGRFYRNAEEMFAEISWVQVMVGQGILPQGYHPLVDQVPDRDAEGFLASVAQTIAHCVDVMPTHQQFIERYCKAAVPA

SEQ ID NO: 86420 - protein, 512 aa, Sphingopyxis sp.
  misc_feature (1)..(512): tr|A0A1Y5PTQ7|A0A1Y5PTQ7_9SPHN Tryptophan halogenase OS =uncultured Sphingopyxis sp. OX=310581 GN=SPPYR_2283 PE =4 SV=1
MNEAIERVVIVGGGTAGWLTAARLASSSRARAGKLSVTLIEAPDIPTIGVGEGTWPTMRATLAAIGIGEGEFLAACDASFKQGSRFDGWVTGAADDRYLHPFTSPPAAPAAELLAAWRSGAPDLPFAAAMTPQAQVCDLDLAPRQRAMPDYQGAANYAYHLDAGKFAALLARHAVQRLGVRHVADHVTGVDRDGAGGIASVATRGNGAIAGDLFVDCTGHASLLIGGHLGVEWVDRGDTLFNDRALAAQVPVPPGSPIASQTVSTAHEAGWIWDIGLPDRRGIGCVYASRFMDDDAAEAVLRAYIARVLPGAPEVPARRLSFPTGHRARFWEGNCIAIGLSAGFIEPLEASAIVMIELSLNALIDNFPARRAALPIHAARFNELFRYRWDRIVEFLKLHYVLSRRDEPYWRAQREAAHVPPGLTGMLALWRDQPPSAWDFPRVDEIFSAESHQYILYGMGFSVPADLPTTGGRAEGLLADTRQRARSLAAALPANRDYLDALRSGTPAAAAL

SEQ ID NO: 86421 - protein, 506 aa, Xanthomonas axonopodis
  misc_feature (1)..(506): tr|A0A430K9R6|A0A430K9R6_9XANT Tryptophan 7-halogenase OS=Xanthomonas axonopodis pv. eucalyptorum OX=2497685 G N=EI541_22250 PE=4 SV=1
MIPAPLRNIVIVGGGTAGWMAAAAFARVLGPTFKVQLIESEQLGTVGVGEATVPHIKAFNNLLGIDEAEFVRQTQGSFKLGIEFVDWQRPGSTYMHGFGTQIGHPLGLLPFHQYWIKQHARGKAQPLGAYTLNTVAATRGKFMTSAGDVPANSPLANIAYAYHFDATQYAHFLRRYSQQRGVSRIEGLVEQVQLHPESGHVQSLQLASGQVVHGDLFIDCSGFGGLLIEQALHTGYHDFTHWLPCDRALAVPCEKVGPPTPYTRSTARAAGWQWRIPLQHRTGNGYVYCSAHISDDEAAATLLANLDGKPLADPRPLRFTTGRRKQCWNRNVVALGLASGFLEPLESTSIHLIQSGISKLLELFPREGISPVLVQRYNDRLAFEFDRIRDFLLLHYHATERDDSAFWRHCRHMPITPELQATLDLFRDSGRFYRNAEEMFAEISWVQVLVGQGILPQGYHPLVDQVPDRDVEGFLASVAQTISHCVDVMPSHQQFIDRYCKAATLP

SEQ ID NO: 86422 - protein, 506 aa, Proteobacteria bacterium
  misc_feature (1)..(506): tr|A0A523PIM9|A0A523PIM9_9PROT Tryptophan 7-halogenase OS=Proteobacteria bacterium OX=1977087 GN=E2O35_00245 P E=4 SV=1
MNNQLNGPGKILIVGGGTAGWMTAMLLAKAWPGTPSEICLLESSDIGIIGVGEGSTPKMRRFFDGLDIPESQWMPACNATYKCGIRFPQWSTRKGYKSYYHPFFSIHDDSTVRAFANSVAHRRANIDVLAHPDAFFVSNHLANDELAPKPDPEFEYQSEYAYHFEAGLIGRFLQERAIASGVTHLIDTVTAVKQHDNGDIARVETKDRGSIAADFFVDCTGFASVLTSKTLGVPFLSYKDTLFNDRAVALPTPLDGRSLPSQTISTALKYGWAWKIPLSNRFGNGYVYASDYIDADGAERELREHIGLNDDSVTARHLKMRVGRVESSWNGNCLAVGLSQGFIEPLEATALMIVQDTVENFITRFTEGHFTDKYRAEFNVKINLIFDSIKDYIFMHYKLNSRNDTNYWVDNRENTHVSDSLRQILDVWDSGGDMLGELRRQGPRLAYSPTSWFCILAGMGRFPRKPKKAKRNTQVSDPDELRRYCEKIVRHFPGHRDTIDAMRAAS

SEQ ID NO: 86423 - protein, 345 aa, Gammaproteobacteria bacterium
  misc_feature (1)..(345): tr|A0A534FLU9|A0A534FLU9_9GAMM Tryptophan 7-halogenase (Fragment) OS=Gammaproteobacteria bacterium OX=1913989 GN=E6K34_10860 PE=4 SV=1
RRYAEARGVRRTEGKVVDVSLRGTDGFIEAVTLEDGERVSADLYIDCSGFRGLLIEQALHTGYEDWTHWLPCDRAMAVPCENVGPPTPYTRSTARSAGWQWRIPLQHRTGNGYVYSSAYIKDEAVADTLMSNLDGRALAEPRILKFTTGMRRKFWNRNCVAVGLASGFMEPLESTSIYLIQSGIARLINLLPDRSFSPVLIERYNKQAAFEFERIRDFLILHYFATERRDSPFWQYCSSMDIPPQLADTIRLFRDSGRFFRDAEEMFAITSWVQVMLGQHILPRNYHPAVDLIPEAELNELVGGVRNVISTCVAAMPMHEQFLARYGQAAAKQAAERPATTRQAR

SEQ ID NO: 86424 - protein, 535 aa, Gammaproteobacteria bacterium
  misc_feature (1)..(535): tr|A0A534FKM8|A0A534FKM8_9GAMM Tryptophan 7-halogenase OS=Gammaproteobacteria bacterium OX=1913989 GN=E6K26_12 790 PE=4 SV=1
MTTATLFNYSYSPTSGRNPHPAPVPVRRIVIVGGGTAGWMTALILARSLIERGVEITLLESPTVGIIGVGEGSTPWLRGFFDSLGLEESEWMPACHATYKCGIRFDGWSTKPGFGSYFHPFASMLDNLTMKQFVHNVEARINGADLEAHPDRYFIAARLAAKRRAPKASESFPFDIWHGYHFDAVLLGQFLHRKAVDRGVRYKSCHVTHANLDADGNIASVGTEEGETIAADLFVDCSGFAGLLIDKALHTPYVSFSSNLFNDAAVAIPAPMEGSIPSETVSTAMKHGWAWKIPLTTRFGNGYVYSSRFCSADEAETELRGHLGLLDADVPARHLKMKIGRVTRHWNRNCLAVGLSQGFIEPLEATALLFIQQTAATFVESVERGDLSEAAHERFNDMMNTHFEGIRDYIVTHYKTNTRTDTEYWRANAANLNLSDDLKKLYSLWMAGKSIAPAVGQQVLGKGYPVFSWYSIMAGMGIFPDPQDLRPPTAQEARFSEAEIDNLLERSSANYPDHRAALESIPPRRTEPALQVYFW

SEQ ID NO: 86425 - protein, 505 aa, Xanthomonas translucens
  misc_feature (1)..(505): tr|A0A5C1Z9A2|A0A5C1Z9A2_XANCT Tryptophan 7-halogenase OS=Xanthomonas translucens pv. undulosa OX=487909 GN=F0 H32_00460 PE=4 SV=1
MAQIRKVVIAGGGTAGWIAACALAHQFRDLLDITLIESEQIGTVGVGESTVPPIRSFHRFLQIDEQEFLRAVAGTFKLSISFENWRRPGERYIHPFGLTGQSTLVCAFHHFWLEAQRRGMLSELGDYCLETVASRLDRFALQQSPPVNYAYHLDAGLYARLLRGHAERHGLKRVEGKIQQVRQHAESGCVEALLLEDGTLVEGDLFIDCTGFRGLLIEQTLHTGYEDWKQWLPCDRAVAVQTEAVAAPVPYTRAIAHAAGWRWHIPLQHRVGCGLVFSSAHLSDDEARAKLLHDAAAPPIKEPWLVPFRTGRRRKAWNKNVVALGLASGFIEPLESTSIHLTIAAVMRLLTLFPTDGIAPSMVDLYNEVSCTEMEHVRDFIILHYHANQRDEPMWQACREMALPDSLQQRLRAWHERAHAWQGADELFRVDSWIHVLLGQGIVPAQHHPLARALPDQQLQQFLDAIRQPIDRAVAQMPSQQDFIACYCKAGREVWAGRAPVAAPA

SEQ ID NO: 86426 - protein, 514 aa, Sphingopyxis sp.
  misc_feature (1)..(514): tr|A0A1Y5PZK5|A0A1Y5PZK5_9SPHN Tryptophan halogenase OS =uncultured Sphingopyxis sp. OX=310581 GN=SPPYR_2885 PE =4 SV=1
MTSEGPYRIVILGGGTAGWMCAAGLAGLLAAIDYDITLIESDEIGTVGVGEATLPHIKSFNDMLGIDEAEFMRATRGTIKLGIEFVDWLRPGARYIHPFGTFGDRWASADFQHHWARARLAGTDGRSLQDYSFAVAAARANSFEHPNTDPKSIRSTYSYAYHFDAGLYAVFLRTWATARGIRRMEGKVVDVARHAQNGEVERLILASGAEVAGDLFIDCSGFRSLLLGQTMGVPWLDWSAWLPCDRALAVPCESARPLTPYTRATAQRGGWTWRIPLQHRIGNGHVFSSAFCGEEEARRTLLGGLDGEALDEPRLLRFQTGRRAAGWKSNVVALGLASGFLEPLESTSIFLIQAATTDLAGLVPRRGAGVDPRMIREFNRLFEIHHDRIRDFLVLHYSANERVGEPLWDHVRTMPLPDSLAHKLALFRESAVAPDYKLGLFSRDSWLSALEGQGVLPSAASPLTHRLPAADLQARLDDLAMRIAVNAADMTPHAEFIAGYCAAGSAVRPAASAA

SEQ ID NO: 86427 - protein, 540 aa, Myxococcus fulvus
  misc_feature (1)..(540): tr|Q9RPF9|Q9RPF9_MYXFU Tryptophan halogenase OS=Myxococ cus fulvus OX=33 GN=prnA PE=4 SV=1
MDQSSVENDNRVRKIIIVGGGSSGWMAAAYLSKALNFNADITLIESPTIPRIGVGEATIPTIKEELFDFLEIPEEEWMSECKATYKLGIRFQNWKKPASQGGDHYYHNFGEMPQVKGVPLSHLWMYKHQLQGFAEPMAYSCYPTSPICDAQKSPRYMDGTKAVHYAYHFDALLVANFLKKWSIERGLTFISDDIVDTQLDDGGSIKHLRGASGRSYAADLYIDCTGFAGLLIEQALGEPKVTFHDSLLTDRAVAINIPSDPATEGIRPYTTASAFSSGWTWEIPLYGRAGNGYVYSSAFQTPEDAEREVRAWFGKKADALDVRHIKFVSGRRRRSWVKNCVSIGLASSFLEPLESTGLYFVYAALYQLVACFPSKHIEPVLRDKFNERVSYMVDDVRDFIVLHFCTSPRTDTPYWKANQNELKLPDTLKEVLELQRAGIPIRRSYHTNDALYSSFEAGFDRFWTNSNFQSIFAGVGYLPRQPMPLLHSRPDILAEAERTFDDLRQKTAQMMSRLPSQYDYLTSLYARGSRAREEERQRAG

SEQ ID NO: 86428 - protein, 218 aa, Micromonospora narashino
  misc_feature (1)..(218): tr|V9XSP9|V9XSP9_9ACTN Tryptophan 6-halogenase (Fragmen t) OS=Micromonospora narashino OX=47870 PE=4 SV=1
GGGTAGWMSASYLGRALGPHVRITVVEAPSIPSIGVGEATVPNLHKTFFDFLGLAEEDWMRECNASFKMGIKFVNWRTPGAGSPKPRQLNGYSDHFYHLFGILPNSENLPLSHYWAAKRFAGETDEPFDYACYRESPVLDANLAPRFADGTKWTNYAWHFDASLVAAFLRRFATEKQGAIQIEDEMVDAEVDQRGHITSLRLKSGRTVDGDLFIDCSG

SEQ ID NO: 86429 - protein, 506 aa, Sphingomonas sp.
  misc_feature (1)..(506): tr|A0A5E7XTK1|A0A5E7XTK1_9SPHN Tryptophan halogenase OS =Sphingomonas sp. EC-HK361 OX=2038397 GN=SPHINGO361_100 066 PE=4 SV=1
MQRVRRVVILGGGTAGWMTAAALGATLGQTVSISLLESDAIGTVGVGEATIPTIHWFNQLIGLDEADFVRETKASFKLGIEFVDWTRPGHRYFHPFGRYGVDLGAVPFHQRWLRARADGHDRPLSAYSLAAQLAEAGGFARPSNDPGSILSTLGYAYHFDAGLYARYLRSLAEARGVTRYEGRLEQVEHDANSGVITALTTERGERLSGDLFIDCSGFRALLIGDEMGSPFEDWSHWLPCDRAVAVPCARVAETTPFTRSTLRPAGWQWRIPLQHRTGNGYVYASRFVSDDEAAATLLANLDGEALAEPRMLRFQAGFRREAWRGNVVAIGLSSGFLEPLESTSIHLIQSAIAKLITLFPDADCDPALARQFNALFGRDMDGIRDFLILHYHATTGHHHPLWQHTRTMALPDTLIEKEAHYARSGRVMLSSDELFREASWLAVLNGQGIVAAGPAPIADTLDGAANRRQLDQIEAVIARAVPTLPRHDDAIAALLGESGARASVHG

SEQ ID NO: 86430 - protein, 521 aa, Xanthomonas campestris
  misc_feature (1)..(521): tr|A0A3S9RNT9|A0A3S9RNT9_XANCA Tryptophan 7-halogenase OS=Xanthomonas campestris pv. arecae OX=487849 GN=NX80_ 021210 PE=4 SV=1
MPHTMPSDPQQRPVRRIVIAGGGTAGWMAAAAMSKLLGRHLQITLVESDEIGTVGVGEATIPSLVTFHRLLEIDEAAFMAATQATIKLGIAFEHWRDVDRHYIHSFGHAGTDHWSAGFQHFWLKGQQRGVARDFGDYCLELRAAQEGRFAHLPNGGMNYAYHLDAGLYARFLRRFSEGFGVTRIEGRIGQVETNAESGFLTALTLQDGTQVEGDLFLDCTGFAGLLIGKTLGVGSDDWSRWLFADSALAVQTESVGPPVTYTRSRADQAGWMWRIPLQHRVGNGIVYSSRHMDQDSARVVLERNLTGRALTAPRPLRFTPNQRHRVWEKNCVALGLASGFLEPLESTNIHLIQRGIIRLLQTFPQVINAVDIAEYNRQAADEITHIRDFVILHYHATDRRDTPFWRDCAAMDIPDSLRHRVELFRQSGRVFHQANELFAENSWVQVMLGQGIVPQQHHPVADLMGDAELSRFLETIRTRVEGALVRLPAHADFLQRYCPAPPPPEPAARVPAPTVMATPAG

SEQ ID NO: 86431 - protein, 514 aa, Sphingopyxis sp.
  misc_feature (1)..(514): tr|A0A1Y5PUK8|A0A1Y5PUK8_9SPHN Tryptophan halogenase OS =uncultured Sphingopyxis sp. OX=310581 GN=SPPYR_2572 PE =4 SV=1
MATRSILIVGGGTAGWLTAAYLARFFDLPRNPRLSITLLASDEIGSIGVGEGAFPTIRDTLRFIGIDESAFVRATSATFKQGIRFDDWVRTPKAGRSSHFLHPFEPPFHGDGHSLVAYWLLQEEKTRRPFAEAMTIQNRVAEAQRAPKRPGEGEFSGPLNYAYHFDAARLAGILSAQASAMGVAHLGGTLTGVALDPESGAIDHVVTAEHGPLAADLYIDCSGFRAELIGGALQSPFRRVKHQLFTDRALACKLPYDRPDVPIESYTIAAAHEAGWIWDIGLAGARGLGCVYSSDHLSDDRAAEILANYTGRRSDDVAVRSIPFEAGYRPAAWVGNCVAVGLSGGFLEPLESTGLVMIETAAAMIAEMFPLNGPVAAPARRFNELMAARYDNIINFLKLHYCLSQRREAFWRDNGDPASIPDRLAQLLEEWRYRPPSRFDFILDLESFAPFNYQYILYGMEFRTDLSPVREDFPDVAEAERIFARIRSFGDRAANELPAHRAMIDQINAGAATA

SEQ ID NO: 86432 - protein, 506 aa, Kordiimonadales bacterium
  misc_feature (1)..(506): tr|A0A5A7MW59|A0A5A7MW59_9PROT Tryptophan halogenase OS =Kordiimonadales bacterium JCM 17845 OX=1236967 GN=JCM1 7845_06900 PE=4 SV=1
MTTAQISADPVTRIVIIGGGTAGWMAASVLSKALVGRVSIQLIESDAIGTVGVGEATIPQIRLINHYLGLDENAFLKHCKGTFKLGVQFNNWGRIGDSYMHAFGDLGLPLGPLSFPHYWLRAQQEGVGGDLWNYSLNYQTAMQGRFSRLEKVGTSHLGGIKYAFHFDAGLYARYLRAGCEKRGVNRTEGRIVKTNLRGTDGFIESVILESGATIAGDLFVDCSGFRGLLIEQALKTGYEDWSHWLPCNRAVTVASEPTGPVRPYTQATAQQSGWQWRIPLQHRVGNGHVYSAAHISDDEATHQLLQNLESPALSDPKALRFKTGRRQQAWNRNCVALGLAAGFMEPLESTSIHLIQSGISRLVSLFPDRHFDPSLIDLYNRQTQFEYERVRDFLILHFKATQRRDTAFWQACAHMDIPHSLQEKIDLFSATGRIVREGEELFTEMGWIQVFTGQHIKARCHHPLADNITQSQLTEFLDNIEKLITHTVPSLPHHADFITHNCRAAA

SEQ ID NO: 86433 - protein, 512 aa, Sphingomonas sp.
  misc_feature (1)..(512): tr|A0A5E7Y0W3|A0A5E7Y0W3_9SPHN Tryptophan halogenase OS =Sphingomonas sp. EC-HK361 OX=2038397 GN=SPHINGO361_100 448 PE=4 SV=1
MIVGGGTAGWLAACRIAAAADPAAERPVSVTLVESPDIATIGVGEGTWPTMRRTMARIGIDEAELLIACDASFKQGSRFDGWVTGEAGDSYHHPFTPPIAGDPREAARLRPGDAFADRLCAQPQICALDLAPRQRSMPGYAGALNYAYHLDAAKLAALLKRHATGRLGVRHVRDHVLDVEAAEGGDIASVRTRDNGAIAGDLFIDCTGHAALLIGEHCGIDVVDRSDELFNDRALAVQVPVAPGSAIAAQTNATAHAGGWIWDIGLPTRRGVGCVYASTFMDDAAAEATLKAYLRRTTPDCDADALNIRLLTFRSAHRERFWAGNCLAIGQSAGFLEPLEASAIVMIELALDALIDDFPANRAVMAVQAERFNAQFRYRWDRIVEFLKLHYVLSRRTEPYWRAHRDAGSIPSRLAQSLELWRHRAPAAIDFPAKDEVFPGASYQFVLYGMGFLLPSGVAVAEREGGDMAAAIRQVEQRGRALAASLPTNRAYLDALRAEHAGTDPILERYAE

SEQ ID NO: 86434 - protein, 535 aa, Gammaproteobacteria bacterium
  misc_feature (1)..(535): tr|A0A534F5S8|A0A534F5S8_9GAMM Tryptophan 7-halogenase OS=Gammaproteobacteria bacterium OX=1913989 GN=E6K39_01 735 PE=4 SV=1
MTTATLFNYSYSPTSGRNPHPAPVPVRRIVIVGGGTAGWMTALILARSLIERGVEITLLESPTVGIIGVGEGSTPWLRGFFDSLGLEESEWMPACHATYKCGIRFDGWSTKPGFGSYFHPFASMLDNLTMKQFVHNVEARINGADLEAHPDRYFIAARLAAKRRAPKASESFPFDIWHGYHFDAVLLGQFLHRKAVDRGVRYKSCHVTHANLDADGNIASVGTEEGETIAADLFVDCSGFAGLLIDKALHTPYVSFSSNLFNDAAVAIPAPMEGSIPSETVSTAMKHGWAWKIPLTTRFGNGYVYSSRFCSADEAETELRGHLGLLDADVPARHLKMKIGRVTRHWNRNCLAVGLSQGFIEPLEATALLFIQQTAATFVEFVERGDLSEAAHERFNDMMNTHFEGIRDYIVTHYKTNTRTDTEYWRANAANLNLSDDLKKLYSLWMAGKSIAPAVGQQVLGKGYPVFSWYSIMAGMGIFPDPQDLRPPTAQEARFSEAEIDNLLERSSANYPDHRAALESIPPRRTEPALQVYFW

SEQ ID NO: 86435 - protein, 534 aa, Gammaproteobacteria bacterium
  misc_feature (1)..(534): tr|A0A523LLE1|A0A523LLE1_9GAMM Tryptophan 7-halogenase OS=Gammaproteobacteria bacterium OX=1913989 GN=E2O53_08 230 PE=4 SV=1
MNPKRVLIVGGGSSGWMTAAYLDAVLNRDGRKRAEISLIESPDVPRIGVGEATIPSINHILAAIGIDEFEFLKRVDGTYKQAIQYVNWLDGQGESYYHAFGRYRGGPVDSTSLDWLMSNRSLPFSETISAQPVMCDACLAPKMMGPWDFGTQLTYAFHMNALKFADYLCEIATSRGVQHHVDHVVAIEMADNGDIAAVKTKSGARIEADIFIDCTGFAGLLIEKKLGVEWVDCSQWLLCDRALAIQVPYEHNYPGYVRPNTIATAVSAGWIWEIPLQNRRAWGYVHAGDYISKDDAEKELRAHIGSLADDFEARYVPFKVGYRSKSWVRNCIAIGLSAGFIEPLESTGLYLSDLAAVMLTEHFPDRGDRDALAFRYNRIISNRFHEILDFINLHYCLTRRKDNEFWLEVGKPERMTDRLRVKLEFWRNKPPSPTDFEDQWFPGQAGTSLPSAGLSGDHRSPIDTGGVFSLSSYEAILYGMDFLKDECDQWFGTNRPASQVPKRIADRLKIAPQKLLPHDVWLRRVIGMPDYKTG

SEQ ID NO: 86436 - protein, 532 aa, Streptomyces rugosporus
  misc_feature (1)..(532): tr|K7QVV7|K7QVV7_9ACTN PyrH OS=Streptomyces rugosporus OX=295838 GN=pyrH PE=4 SV=1
MERRKRERLGSLGRPTKKELRMIRSVVIVGGGTAGWMTASYLKAAFDDRIDVTLVESGNVRRIGVGEATFSTVRHFFDYLGLDEREWLPRCAGGYKLGIRFENWSEPGEYFYHPFERLRVVDGFNMAEWWLAVGDRRTSFSEACYLTHRLCEAKRAPRMLDGSLFASQVDESLGRSTLAEQRAQFPYAYHFDADEVARYLSEYAIARGVRHVVDDVQHVGQDERGWISGVHTKQHGEISGDLFVDCTGFRGLLINQTLGGRFQSFSDVLPNNRAVALRVPRENDEDMRPYTTATAMSAGWMWTIPLFKRDGNGYVYSDEFISPEEAERELRSTVAPGRDDLEANHIQMRIGRNERTWINNCVAVGLSAAFVEPLESTGIFFIQHAIEQLVKHFPGERWDPVLISAYNERMAHMVDGVKEFLVLHYKGAQREDTPYWKAAKTRAMPDGLARKLELSASHLLDEQTIYPYYHGFETYSWITMNLGLGIVPERPRPALLHMDPAPALAEFERLRREGDELIAALPSCYEYLASIQ

SEQ ID NO: 86437 - protein, 496 aa, Sphingomonas sp.
  misc_feature (1)..(496): tr|A0A5E7ZTK4|A0A5E7ZTK4_9SPHN Tryptophan halogenase OS =Sphingomonas sp. EC-HK361 OX=2038397 GN=SPHINGO361_500 15 PE=4 SV=1
MADARPRTRVVILGGGTAGWMTAAALANDLAPIADIRLVESADIGIVGVGEATLPHIRQFVQHLGIDEGAFMAATHATFKLGIAFEGFGAIGDRYIHPFGTFGRDLAGVAFHHYWLRAGGRVPIGQWSVAVAAAEANRFAHPNPADPELAGSYGYAYQFDATRFGPFLRDYAVARGVARTEATVRSVERDGTTGDIAALHLDTGERIAGDLFVDCSGFRNLLLGGELDEAWEDWSGWLPCDSAAAMPCASPEGAIEPYTRAVAMPAGWRWRIPLRHRVGNGYVFASDHVSEDEACEALIAAVEGEPLTEPRVLRFRAGRRRRSWVRNVVGVGLASGFLEPLESTSIYLVQAAITRLIELFPAGGIADADRNAFNRLVDMEYDRIRDFLILHYHATRRDDSTFWDHVRTMAVPDSLAEKLALWRATGRVARYGEGLFLEPSWVAVLIGQGILPDAYDPRAAIPDDAAMDRAMQDLRARVGATAIAMPEHRASLAAMR

SEQ ID NO: 86438 - protein, 514 aa, Sphingomonas sp.
  misc_feature (1)..(514): tr|A0A5E7ZWB9|A0A5E7ZWB9_9SPHN Tryptophan 7-halogenase OS=Sphingomonas sp. EC-HK361 OX=2038397 GN=SPHINGO361_1 50195 PE=4 SV=1
MTQGQQGGDRRVRRITIVGGGTAGWMTAAMLSQLLKGFDIRLIESDQIGTIGVGEATIPAIRNYAAIAGIDQAEMLRASQATFKLGIEFVDWKAKGNSYIHGFGKIGQDLMWLHPHHIWLKLAAEGRAKHFDHYALNTLAARRNRFAFPDPRNPGSPMAGIDYAYHFDASLFAKFLRAQSEARGVTRIEGRIVEVARHGEDGHVTHVVLDDGRQIEGDLFIDCSGMRGLLIGEAMGVGYESWSEWLLCDRAQAVPCESVSPLTPYTRSTARDAGWQWRIPLQHRIGNGHVYASALTRDEAAAEVLLANLDSKPLADPRPVAFAPGKRHRAWEKNVVAIGLSGGFLEPLESTSIHLIQTGILRLIALFPASGIEAVDVAEYNRQTDFEYRDVRDFIIAHYKVTDREDTPFWRHVKHMAVPDSLAERLELFRTSGRFFMHRQAELFREESWVQVLIGQGHPMRYDPVIDTLPPQQISDFLKDIEEVIDDTANRMPDHAAFVARNFAAPAPPPAVAA

SEQ ID NO: 86439 - protein, 510 aa, Stenotrophomonas maltophilia
  misc_feature (1)..(510): tr|A0A0M1F6X2|A0A0M1F6X2_STEMA Tryptophan halogenase OS =Stenotrophomonas maltophilia OX=40324 GN=ABW45_00325 P E=4 SV=1
MVDTESTPAGRIRKVVIAGGGTAGWLAGCALAHQFRDQLEITLVESEQIGTVGVGESTVPPIRTFHRFLQIDEQEFLRAVAGTFKLSISFENWRLPGDRFFHPFGTIGHGTWAAPFHHFWLDSLRRGMPSDLGDFCLESLASRGDRFSLQTQPQASYAYHFDAGLYARFLRRRAEGHGLRRIEGRIAQVRQHAHDGSVQALVLEDGEVIEGDLFIDCTGFRGLLIEQTLGTGYEDWHEWLPCDRAVAVQTEAIASPVPYTRAIAHEAGWRWHIALQHRVGCGLVYSSRHLSDDEATAKLLRDVGAPPLRDPWQVPFRSGRRLKAWNRNVVALGLASGFIEPLESTSIHLTISAVVRLIQLFPFDGIRASLVQLYNDVSRQEMEHVRDFIILHYHATQRTEPMWKACREMRVPESLQQRLQAWRERAHAWQDPGELFRVESWTSVLLGQGIPPGPPHPLARAVSDADLRTLLKGIQQPVQHAAAQMPTQAEFIAQYCRSGADVWRSMATPA

SEQ ID NO: 86440 - protein, 529 aa, Saccharopolyspora erythraea
  misc_feature (1)..(529): tr|A4FJG0|A4FJG0_SACEN Tryptophan halogenase OS=Sacchar opolyspora erythraea (strain ATCC 11635 / DSM 40517 / J CM 4748 / NBRC 13426 / NCIMB 8594 / NRRL 2338) OX=40594 8 GN=prnA PE=4 SV=1
MEHKVQKVVILGGGTAGWMTASYLAKAFGKDVGVTVLEAPTIPRIGVGEATVPNLQRVFFDFLGLEEKDWMPECNASFKTAVKFINWCTPGPGQPDPRPTPTGSDHFYHPFGLLPECDRLPLSHYWVRDRLAGTSTQPFDYACFPQTAVMDAYRAPCWPDGKPAVTYAWHFDAHLVADFLRRFSTETLGVVHAEGVMSRVQKDANGYITALLTEAGEEISGDLFIDCSGFRGLLINESMGEPFIDMSDQLLCDSAVAASVPDEGTAVEPYTSAIAMPSGWTWKIPLLNRFGSGYVYSSSFVDQDQATEEFSRLWGLDPASSFNHVRFRVGRNQRAWVKNCVSIGLSSCFLEPLESSGIYFITASIYQLAKHFPDKSFHSSLVNAFNREIEAMFEDSKDFIQAHYYFSPRTDTPFWKANKDLVLSRDILEKVETYRAGLPVNAPVVDGGTYYSNFEAEFRNFWTNGSYYCILAGLGVLPDAPLPSLAHRDGSAESKALFEQVREEGRYLAEHLPSTAEYLETIHPTVSAR

SEQ ID NO: 86441 - protein, 538 aa, Burkholderia cenocepacia
  misc_feature (1)..(538): tr|A0A3N8XD85|A0A3N8XD85_9BURK Tryptophan 7-halogenase OS=Burkholderia cenocepacia OX=95486 GN=DF152_32520 PE= 4 SV=1
MTHPIKNIVIVGGGTAGWMSASYLVRALQHHANITLVESAAIPRIGVGEATIPSLQKVFFDFLGIPEREWMPQVNGAFKSAIRFVNWRKSADGSRGDHFYHLFGNVPNCDGVPLTHYWLRKREQGFQQPMEYACYPQTEALDGKLAPCLADGTRQMSHAWHFDAHLVADFLKRWATERGVKRVVDEVEQVHLNDRGYIASLSTKEGRTLEADLFIDCSGMRGLLINQALKEPFIDMSDYLLCDSAVASAVPADDARDGIEPYTSAIAMNAGWTWKIPMLGRFGSGYVFSSKFTSRDQATADFLDLWGLSDKQPLNQIKFRVGRNRRAWVNNCVAIGLSSCFLEPLESTGIYFIYAALYQLVKHFPDTSFDPRLADAFNAEIVYMFDDCRDFVQAHYFTTSRDDTAFWRANRHDLRLSDAIKEKVERYKAGLPLTTTSFDDSTYYDTFDYEFKNFWLNGNYYCIFAGLGLLPDQSLPLLRHRPESIDKAEAMFARIRREAERLRATLPTNYDYLRSLREGDAGLSRSQPGPTLATPEIL

SEQ ID NO: 86442 - protein, 256 aa, Kitasatospora aureofaciens
  misc_feature (1)..(256): tr|S4S398|S4S398_KITAU CtcD OS=Kitasatospora aureofacie ns OX=1894 GN=ctcD PE=4 SV=1
MRLIDLSSTIDANAWEVDGIRHEVLTPADGARHMAEGMLRDHGLEFDVADLPDGELLSLDTLTLTTHTGTHVDAPSHYGSRAAYGVPRHIDELPLEWFIGPGVRLDLTDCGVGTVGVDRLRRAFDEIDHRPSAGEIVLLHTGAERLAGTPEYFTRFAGLDGAATNLLLDLGVRLIGTDAFGLDAPFTHMLAEFQRTRDRSVLWPAHFAGRQREYCQIERLSNLGALPAPTGFTVQAFPVKIAGAGAGWTRAVALLD

SEQ ID NO: 86443 - protein, 505 aa, Caulobacter flavus
  misc_feature (1)..(505): tr|A0A2N5CUU0|A0A2N5CUU0_9CAUL Tryptophan halogenase OS =Caulobacter flavus OX=1679497 GN=C1707_01450 PE=4 SV=1
MSDQRVRSVVVVGGGTAGWMTAAALAKTLSAQRLKITLVESEAIGTVGVGEATIPPILTFNAMLGIDERAFMRATKASFKLGIEFVDWGAVGETYHHPFGTFGLDLEGLKFHQVWRKFSELAGPIGDYNLTEAAARRWRFSLPDPDPSKVMSSLRYAYHFDAGLYARFLRGFSEQRGVVRIEGRIGQVDQNGETGFVEAVVLEDGRRIEGDFFVDCTGFRGLVIGQALKVPYQDWGRWLPNNRAVAIGCELGGDGLTPFTRATAREGGWQWRIPLQHRIGNGYVYSSHHVDDDRALDTLLANLDGAPTDEPNFLRFTPGRRERAWEKNVCSIGLSAGFIEPLESTSIHMIQAGITKLLALFPGNGVDPLEVDEYNRLTAEQVDRIRDFVILHFHATRRDDTDYWRYLSSMIVPDSLARRMELFAHRGRWFPSEYDLFHEPNWLAVLLGQGIVPEEWDPLVDSLPDNQVRQRLSQLSDLIARTAEAMPGHAEFVARYCGAQQGVAA

SEQ ID NO: 86444 - protein, 503 aa, Caulobacter flavus
  misc_feature (1)..(503): tr|A0A2N5CVQ5|A0A2N5CVQ5_9CAUL Tryptophan halogenase OS =Caulobacter flavus OX=1679497 GN=C1707_12315 PE=4 SV=1
MDQRIRKVVVVGGGTAGWMAAAAFSRLLVSDAVAVEVVESEAIGTVGVGEATIPTIRNFNQTLGLDEVEFIRATQASFKLGIDFRDWGRVGHRYFHGFGDFGADHEAVQAHQLWRRLKALGDPSGLEDWSLPTAAAALNRFIPPSPDPRSPLHDYAYAYHFDAGLYAAFLRRYAQARGVTRTEGKIVDVALRGQDGFVEAVVLDDGRRIEGDLFVDCSGFRALLIEGTLKAGFEDWSRWLPCDRALAVPCRLGGDGLTPYTRSTARAAGWQWRIPLQHRIGNGYVYSSAFVDDERAARTLMDNLDGEALDDPRPLRFLAGRRRKFWDRNVVAVGLSGGFLEPLESTSISLIQNGISRLLEFFPDRRCDPLLADEFNRVSALEYERIRDFIILHYCINQRDEPMWRQVREVALPDSLQAKIALYRARGHVAIHEGDGFGRPSWIAIYNGLGVVPEAYDPLADRIPEAELRGLMDHRRALIRHTAQTMPTQEAFIARHCAAPPLG

SEQ ID NO: 86445 - protein, 506 aa, Xanthomonas euvesicatoria; identical to SEQ ID NO: 86133
  misc_feature (1)..(506): tr|A0A2S7E8N1|A0A2S7E8N1_XANEU Tryptophan 7-halogenase OS=Xanthomonas euvesicatoria pv. citrumelonis OX=189396 GN=TN51_02955 PE=4 SV=1

SEQ ID NO: 86446 - protein, 491 aa, Glaciecola sp.
  misc_feature (1)..(491): tr|A0A348MT15|A0A348MT15_9ALTE Tryptophan halogenase OS =Glaciecola sp. OX=1905676 GN=DCR37_00020 PE=4 SV=1
MNPQRIVILGGGTAGWMAANLLAHRWREHPIHITVVESPDIGIIGVGEGSTPSLKRFFADLNIPESDWMERCKATYKVNIEFAGWSPNSQNASYSHPFISQLDTFSERPFQVNCYTRRLGLDVETTPEKFLFNGWLAKHNKHPIAPDHFPFNVEYGYHFDSGLLGQFLADHAQQLGVEHKQRTIEHVQQHPDDSIAALVCDNGEVIPADLFFDCTGFRSVLLQQTLGVKFNTFKDNLYNDAAVVFPTAVDQNQPVETQATALSNGWAWRIPLTHRTGNGYVFSQDFISADHAETEFRAHLGLLDSDIEARHLQMNVGQVSQHWYKNCVGLGLSQGFIEPLEATALHLVQTSVERFIEEYEAGHFSNKRQDNYNNIINENFERVRDYIVAHYKLNTRDDSEYWRANRNNEHISKPLLELLDVWFRRGDLTQHLKENGHASHFSATSWHCLLSGYGAYPPLSVNQPGTGDLYSDNQLDAFFKGCLMNFKSSRV

SEQ ID NO: 86447 - protein, 505 aa, Xanthomonas euvesicatoria
  misc_feature (1)..(505): tr|A0A2S7EGK8|A0A2S7EGK8_XANEU Tryptophan 7-halogenase OS=Xanthomonas euvesicatoria pv. citrumelonis OX=189396 GN=TN51_01590 PE=4 SV=1
MTQAQIRKVVIAGGGTAGWIAACALSHQFRNLLDITLVESEQIGTVGVGESTVPPIRTFHRFLQIDEQEFLRAVAGTFKLSISFEHWRRQGERYIHPFGITGQSTLVCAFHHLWLESQRRGMPGSFGDYCLETVASRVDRFALHGEPAVNYAYHLDAALYAKFLRARSEACGVKRVEGRIQQVTVQPHSGDVASLVLEDGHVIEGDLFIDCSGFRGLLIEQTLHTGYEDWSHWLPCDRAVAVQTEALGPPVPYTRAIAHEAGWRWHIPLQHRVGNGLVFSSKHLSDDEAHAKLLRDVAAPAVKEPWMVPFRTGRRLKAWNKNVVSLGLASGFIEPLESTSIHLTISAVVRLLALFPAEGIAPSQVQLFNDVSRAEMEHVRDFVTLHYHATQRDEPLWQQCRQMELPESLALRLRAWRERAHTWQGADELFRVDSWTHVLMGQGIAPEQHHPLTRAFSDHDLRRLLDGIAQPIQHAVQQMPSQQDFIERYCKAGEQVWGMRSPVPA

SEQ ID NO: 86448 - protein, 525 aa, Mesorhizobium sp.
  misc_feature (1)..(525): tr|A0A441XLL0|A0A441XLL0_9RHIZ Tryptophan 7-halogenase OS=Mesorhizobium sp. OX=1871066 GN=EOQ62_23750 PE=4 SV= 1
MTKSVLIVGGGTAGWMTASYLAKVFPKLRITVLESDIIPTIGVGEATFSTIKVFFDFLGLPESEWMPHCNATYKLAIKFANWGPEPGHFYHPFQRYATIDGFNAGEWWLRLKPGQQFDRSCFVTPALCEAKLSPCFLDGRVFDEKVQDLFADPRRKASVLSEHKEQYPYGYHFDAALFAKYLRDYATKLGVKQILDDVINVELADDGSIDHVIGKISERVSADLFVDCTGFRGLLLNEALQEPFISFKDSLLNDRAVALRVPSTPDTDEIEPFTTATTMSAGWTWNIPLYNRIGTGYVYSSQFITPEMAESELRNHVGSRAENCSANHIKMRIGRSRNSWVKNCIGIGLTSGFVEPLESTGIFFIQHNIEELVAHFPGENIDPDVVASFNRIVGSCIDGVRDFLVLHFKGSGRNDTPFWKAVKQTPLPDHLEERFQLWRKRLPNAKSIDSRYHGFEYYSYSVMMLGLGSAPTEYLPTLAQRDPTNAIISFNQVNEQSQKLVSTLPSHREYIMQLYSTAPHSERHK

SEQ ID NO: 86449 - protein, 521 aa, Xanthomonas euvesicatoria
  misc_feature (1)..(521): tr|A0A2S7EIG9|A0A2S7EIG9_XANEU Tryptophan 7-halogenase OS=Xanthomonas euvesicatoria pv. citrumelonis OX=189396 GN=TN51_14335 PE=4 SV=1
MPDTTPSDPQQRPVRRVVIAGGGTAGWMAAAALSKLLGRHLQITLVESDEIGTVGVGEATIPSLVTFHRLLEIDEAAFMAATQATIKLGIAFEHWRDVDQHYIHSFGHAGTDHWSAGFQHFWLKGRQRGVAREFGDYCLELRAAQEGRFAHLPNGGMNYAYHLDAGLYARFLRRFSEGFGVTRIEGRIGQVETDAQSGFLTALTLQDGTRVEGDLFLDCTGFAGLLIGKTLGVGSDDWSRWLFADSALAVQTESVGPPVTYTRSRADQAGWMWRIPLQHRVGNGIVYSSRYMDQDGARAVLERNLTGRALTEPRPLRFTPNQRHRVWEKNCVALGLASGFLEPLESTNIHLIQRGIIRLLQTFPQVINVADIAEYNRQAAQEITHIRDFVILHYHATDRRDTPFWRDCAAMDIPDSLRHRVELFRQSGRVFHQANELFAENSWVQVMLGQGVVPQQHHPVADLMGDAELGRFLETIRARVEAALVRLPAHADFLQRYCPAPPLPEPAARVPAPPVMATPAV

SEQ ID NO: 86450 - protein, 517 aa, Glaciecola sp.
  misc_feature (1)..(517): tr|A0A3D1S1P6|A0A3D1S1P6_9ALTE Tryptophan halogenase OS =Glaciecola sp. OX=1905676 GN=DER52_04605 PE=4 SV=1
MFYPYLGTETMNNQIITVVGGGSAGWMTANLLHNQLHQHGFTIRVIESPSIGIIGVGEGSTPQLKVFFDMLGIAEQTWMPRCDATFKHGIRFNGWTDLVHPQYDHYFHPFPSNQDHNSGRYFLQQVHTMLAGYPAMPHPDLYFLTATLAQQNKTPAHEHPELQTNYGYHFDSAKLGQFLKTHGTQQGIQVITTTIDSIQHQANTIVSVTDEQGQIFNSDWFFDCTGFGGKLIQEALGTDFIHYTDNLFNDRAVAIPTRREEQELPQTTATALPCGWAWRIPLTSRIGNGYVYSSQYCTADEAEHVLRQHLNIDDKIPARHLSMKVGRLAQHWVGNTIAVGLAQGFIEPLEATALHLVQETVTQFIGAFTAGRFTTIYQEQFNDNINARFEGIRDYIVAHYACNQLTHARMSQKYASSNSRFHFDGKAVTIDTPRYWEDCREKVVTSENLQAVLACWERGGDLHQLLVDRKMQTYYPTLSWYTLLAGYRRFTHQQYQDNLQTQQIQAKLVELTQHFTC

SEQ ID NO: 86451 - protein, 516 aa, Sphingomonas sp.
  misc_feature (1)..(516): tr|A0A3M0EJZ5|A0A3M0EJZ5_9SPHN Tryptophan halogenase OS =Sphingomonas sp. PP-F2F-G114-C0414 OX=2135662 GN=C8J47 _1123 PE=4 SV=1
MRKQILIVGGGTAGWLTAGYLAKRLGADLAGGVSITLVESRDIGILGVGEGTFPTIRRTLATIGIDEAELVRRCGATFKQGAKFVHWRHEPGQGRTDHYLHPFQIADASDGLDLLPYWLLGYGGPDNWDEVSNPQKKAADQMRAPKLATNPDYVGPLNYAFHFDAVALAGLLREQGVKNGVRHLTDTVTEVLLDADGAIGGLRTEQNGLLDADLYIDCTGFRAELIGKAMKIPYRSCRDVLFCNRAITAQLPYARRDEPIASYTISTAQEAGWIWDIGLDRRRGIGHVYSSDHSDDETAERVLRGYLGAGGGEAEVRHFKFDAGYREVNWYKNCVAVGLSSGFFEPLEATGIAFAEVSAGMIANLFPWGGDYETSARQFNANMLRRYERALDFIKLHYCISERRDTAFWRDNVADASVPDSLLELLDRWRFRPPNELDIDGQVDIFTDASWQYVLYGMGWKTDLSAKAGALRYPEDARRAFAEVQRQAQYAIANLPSNRALVDYAQTHRFGARAPA

SEQ ID NO: 86452 - protein, 502 aa, Sphingomonas sp.
  misc_feature (1)..(502): tr|A0A0Q4GCD5|A0A0Q4GCD5_9SPHN Tryptophan halogenase OS =Sphingomonas sp. Leaf20 OX=1735685 GN=ASE72_15300 PE=4 SV=1
MDTPAKTRVVIAGGGTAGWLAAALFMRQLRPLVDVVLVESEEIGTVGVGEATIPTVQAFHALIGVDEREFMAATGATFKLGIAFEGWARTDDRYIHSFGDVGRATWMGDFQHFWLEAQANGDAGPFSDYCLELQAAEAGRFATGQTGRRLNHAYHFDAGRYAKYLRARCEAAGLTRREGRIARVDRDPGTGHITALALDDGSRVEGDIFLDCTGFRGLLIGDALGVGYEDWGHWLPADRALAVQTTSVEPARPYTRAIAHDAGWQWRIPLQHRVGNGIVYDSDFLSDDAARERLLGSVEGTPLTEPKLIRFTTGRRQRAWEGNCIALSLASGFVEPLESTSIHLVMVALTRLLQVFPFDGINPSVVARYNDQSRRELEGVRDFIILHYHLNQRSEPFWKRCATMPIPDTLAQRIALFVEGGQAFQSGDDLFRVSSWSQVMLGQRLTPKNWHRLARLMPADRLAQSLAELKAGIAAEVAKLPQHQAFLAGYCPETTARPAAAA

SEQ ID NO: 86453 - protein, 446 aa, Caballeronia catudaia
  misc_feature (1)..(446): tr|A0A158BMS5|A0A158BMS5_9BURK Tryptophan halogenase OS =Caballeronia catudaia OX=1777136 GN=AWB75_03723 PE=4 S V=1
MSEATQTQQQTWDVVVIGGGPAGSTAATLLADRGYRVRVLEKARHPRFHIGESLLPANLRLFERLGVADEVRAIGMVKLAAEFVSPQHDNRMQRFMFADAWDKSMPSAYQVRRSELDEILLRNAAKHGAHVSEGCRARDVAFAPDHSSATISAEHDDGRIEAVRARFIVDASGRDTLLANQFRTKRRNARHNSSALYGHFRNARRNAGQNEGNITVFWFEHGWFWFIPLADGATSIGAVVWPAYLKRRPKGTSVEAYFRETIALCAPLAERLSDAELISEVHATGNYAYTGDMTHGRNFLLLGDAFAFIDPVFSSGVMLAMQSAFAGAEAIDGALSNPAGAPAALAKFDRDVRHGPREFSWFIYRMTSPTMRNLFMGPRNPLRMKEALLSLLAGDIFGTTPIWRSLRAFKGIYYVTAALDWRNSLRAYRMRKRNLSDAERAELSAN

SEQ ID NO: 86454 - protein, 493 aa, Acinetobacter populi
  misc_feature (1)..(493): tr|A0A1Z9YYG3|A0A1Z9YYG3_9GAMM Tryptophan halogenase OS =Acinetobacter populi OX=1582270 GN=CAP51_11100 PE=4 SV =1
MLDLRHAKNITIIGGGTAGWFAALTLKRMFSDHVKVQVIESPSIGIVGVGEGGLINLVSALNSLNIPTSEFMRETGAAFKWGFCYEGWRTGEKEDEFYHLFINPKHEPFNHEAAAFLPLISALITQNIPLASAVKDFDVIRQRISQKDAIDVLQNDSGFATSFHFDSHKVASFLCKKAVERGVIHTQTKVHDIVFNAEGYAQQILTEQGPLKTDFIIDASGFSRLVIGKKLKSSWSSFKDYLWLDRAIPFHVSHHGKNPELVTRATAMKAGWMWQIPLVERIGAGYVFSSEFTTEDQAIDEIQQYFGFEIEPQKTLSFKPGHYKKVWQKNVMALGLASGFVEPLEATSIGQMLEQLRMFERVVTHSGWVVSDLSIEQYNQANTASWHGIRDFLRMHYDCPRQDTPFWQKVANTPYPESYAALKEVFMQRSPRMEDIKGYAQYGWNGIFHVVNWIFVAQALNLISKTGCAQELQILPIEQKKQIIAYIEVLSNF

SEQ ID NO: 86455 - protein, 391 aa, Glaciecola sp.
  misc_feature (1)..(391): tr|A0A3B8T3R5|A0A3B8T3R5_9ALTE Tryptophan halogenase (F ragment) OS=Glaciecola sp. OX=1905676 GN=DCE62_04155 PE =4 SV=1
MFYPYLGTETMNNQIITVVGGGSAGWMTANLLHNQLHQHGFTIRVIESPSIGIIGVGEGSTPQLKVFFDMLGIAEQTWMPRCDATFKHGIRFNGWTDLVHPQYDHYFHPFPSNQDHNSGRYFLQQVHTMLAGYPAMPHPDLYFLTATLAQQNKTPAHEHPELQTNYGYHFDSAKLGQFLKTHGTQQGIQIITTTIDSIQHQANTIVSVTDEQGQIFNSDWFFDCTGFGGKLIQEALGTDFIHYTDNLFNDRAVAIPTRREEQELPQTTATALPCGWAWRIPLTSRIGNGYVYSSQYCTADEAEHVLRQHLNIDDKIPARHLSMKVGRLAQHWVGNTIAVGLAQGFIEPLEATALHLVQETVTQFIGAFTAGRFTTIYQEQFNDNINARFEG

SEQ ID NO: 86456 - protein, 510 aa, Paucibacter sp.
  misc_feature (1)..(510): tr|A0A0U3EW67|A0A0U3EW67_9BURK Tryptophan halogenase OS =Paucibacter sp. KCTC 42545 OX=1768242 GN=AT984_06420 P E=4 SV=1
MNVQAFPTESARSSASAVRRVVIAGGGTAGWMVAALMGKLMGKQLEIRLVESDEIGTVGVGEATIPALHMFHELLGIKEAEFMAATQATFKLGIKFEGWKAPGEDYIHSFGLTGQDHWSAGFQHFWLKGRQRGLAQRYGDYCLELRAAEENRFAHLPQNGMNYAYHLDATRYARYLRGIAEAHGVQRIEGKITEVLRVTPDGDLSALRLGDGALVAGDLFIDCTGFRALLLGETLGVPYEDWTHWLPCDRAVAVQTASVREAPPYTRSIAHPFGWQWRIPLQHRVGNGLVYSSRELSDADAPEVLTRHVEGELLMKPRLLRFIPGQRREVWNRNCIAVGLSSGFIEPLESTSIHLIQRAAIRLMRLFPAGGVREVDRVEFNRQTQDDLEHIRDFIILHYHVTERDDSDLWRHVRTMAVPETLRHRIELFTETARVFRPLDELFAENSWIQVMLGQGISPRHHHPVADLMGDAELQQFLEHIRRQVSQRLATLPPHAAYVERLCAPYRAAA

SEQ ID NO: 86457 - protein, 554 aa, Nostoc sp.
  misc_feature (1)..(554): tr|A0A252CZ80|A0A252CZ80_9NOSO Tryptophan halogenase OS =Nostoc sp. RF31YmG OX=1932668 GN=BV378_29105 PE=4 SV=1
MSQYVQNIVIVGGGSAGWMTAAYLSKALKKNVHITLVESSNITKVGVGEATFSSIKSFFDFLGLQEYEWMPKCNATYKMGIKFVDWNSDRRHFYHPFERFDFIDGFSISEWWLKLKSFNEPFDYSCFMAPTLCDHQRSPRYLNGKIFDDRVEHLFSEKHFSEKNLITLADAEGQYPYAYHFDANLIARFLKDYSRQRGVKQIVDDVVDVNLTEDGSIDSLNTKEHGIVSGDLFIDCTGFRGLLINKALGEPFISYSESLLCDRAIAMQIPSDIQKNGINPYTTATALSSGWVWDIPLYGRNGTGYVYSSAFISAEEAEQEFRHHLGNVAHNCKASHIHMRIGRNRNSWVKNCVAIGLSSGFVEPLESTGIFFIQHGIEELVNHFPGKSFNEELICNYNKAVANCIDGVRDFLVLHYFASDRADTKFWQATKQEIKVPAELQEKFKLWRRRLPNKKNINPYFHGFETYSYSVMLLGLNHKPEGSLPLLEHLDNEKALAKFTAIKEKAKYLSTNLPSQYEYLTYVIKSQEHSEYLSENQLPASFVSDSAHQIPIAS

SEQ ID NO: 86458 - protein, 499 aa, Sphingomonas sp.
  misc_feature (1)..(499): tr|A0A0Q4G6G7|A0A0Q4G6G7_9SPHN Tryptophan halogenase OS =Sphingomonas sp. Leaf20 OX=1735685 GN=ASE72_04105 PE=4 SV=1
MTETSERPRTRVVVAGGGTAGWIAAAAIVRQLGSLVDVTLVESDEIGTVGVGESTIPTARSFHAFLGIDEAAFMRATQATFKLGIAFENWRRLGDRYFHPFGSVGRSVAIADFQHFWLEARARGFGGAYGDYSLEQQAAGAGLFGHDEQHSLAYAYHLDATAYARFLRTLAEPWGVRRVEGRIDRVERDGEGGDIAALVLASGEQIAGDLFIDCTGFRALLTEGTLGTGYEDWSEWLATDRALAVQTETVASPVPYTRAIAHTAGWRWQIPLQTRTGNGLVYSSRHMSDDEAHATLIGALDGRPLFEPRPLRFRSGMRRQAWNRNCIALGLAAGFIEPLESTSIHLIMNAVIRLIQLFPFRGDDHAALAARFNAQSRHEWEHVRDFIILHYHVTERRDSPFWRDCARMTVPDSLAERISLFTTTAGAWQGQDDLFRIDSWVSVMLGQGVVPRAHHRIASIIKGQELQNSFADLSRGIARTVRTLPRHGEFLARYCPAHG

SEQ ID NO: 86459 - protein, 514 aa, Paucibacter sp.
  misc_feature (1)..(514): tr|A0A0U3EDA6|A0A0U3EDA6_9BURK Uncharacterized protein OS=Paucibacter sp. KCTC 42545 OX=1768242 GN=AT984_13175 PE=4 SV=1
MTPPAAIAHIIIVGGGTAGWMSANLLMQQWGGLGCRVTLIESSEIATIGVGEGSTPYLREFFRRLGLAESEWMPACNATYKCGIEFPQWTTQPGFESYVHPFFNQDDLSLGTRFFTQACLRRRGSAADANPQDFFIAAELARQRKAPFYLPRADGRTSPPTDYAYHFDAGLLGQFLKSHALKLGVTHRIGTVAEVLRQENGDISGLRLNGSDEVLTGSLFIDCSGFQGLLINQALGVPFESFADNLFNDRAIAMPTALDESQDIPSQTRSTALSHGWAWQIPLTNRFGNGYVYASAFVSAEEAEQELREHLGPAAHDSEARHLKMRVGQVSEHWRHNCLAIGLSQGFIEPLEATALMLIQFSLDHFIAALEHAHFGRAGQAGFNARIRQMFEGVRDYVVGHYQLNSRDDTEYWRANLANRNISARLGSILEVWDCGADFEAELTRHGEALMYIRPSWYCLLAGMGRFPGGLQPAPPSGLISSAQARSALAAKAGEFWGHRAYLQQHAAADTQPR

SEQ ID NO: 86460 - protein, 415 aa, Chitinophaga pinensis
  misc_feature (1)..(415): tr|C7PAY7|C7PAY7_CHIPD Tryptophan halogenase OS=Chitino phaga pinensis (strain ATCC 43595 / DSM 2588 / NCIB 118 00 / UQM 2034) OX=485918 GN=Cpin_1863 PE=4 SV=1
MTTEKVDVLVIGAGPAGSVAASIIHQAGYSVKIVEKLKFPRFVIGESLLPRSMEALEEAKFIDAIKAKGFQEKFGAKFVKGDKVCDFTFKEQHTEGWNWTWQVTRADFDKTLADTVASMGVPVSYETTVTDIQFNGSDSVTTVEDIKGNKSQIEARFIVDGSGYGRVIPRLFNLEKNSVLQPRKALFAHTVDERRSMADEPNRITAVVHQPGTWIWIIPFSTGVTSVGFVGDPSFFDSFPGTQEEKYRAMLESEPFTRERFRDVEFVFEPRVLESWSATTDKFYGDGFVLTGNVTEFLDPIFSSGVTLACVSSQTAAKLVIRKLKGEVVDWEKEYMEPTMQGVNTFRSYVMAWYDGTLDKIFFSAEKRPDVKNQICSVLAGYVWDMSNPYVQNHDTALKRLARTIELTEILKQDK

SEQ ID NO: 86461 - protein, 494 aa, Psychrosphaera saromensis
  misc_feature (1)..(494): tr|A0A2S7UV27|A0A2S7UV27_9GAMM Tryptophan halogenase OS =Psychrosphaera saromensis OX=716813 GN=BTO11_07850 PE= 4 SV=1
MNNKNIVKVVIAGGGTAGWMAAASLSKLLGKAFDITLVESDEIGTVGVGEAAIPTLAAFHRLLGINEQDFMKATHSTFKLGINFENWRNGNDEYMHGFGRVGKDCWAGEFQHFWLHGKKNNIDYNFDNYCFEIQAAKARKFALSKGGLNYSYHLDATLYAKYLRTFSESHGVKRIEGKISTVSKNKDTGDITSIQLENGASIEGQLFIDCTGFAGVLIEKSLHTGYEDWSHWLPCDSAVAVQTKTVSEPLPYTRSIAHKSGWQWRIPLQHRVGNGLVFCSKYLSDEDAKNLLLKNIESEPLKHPKVIKFKTGRRRKGWNKNCVALGLSSGFLEPLESTSIHLIMSGILRLIRLFPFQGITPSAVNEYNKQFTSELEHIRDFIILHYHCTERDDSPFWQYCKNMEIPGTLKQRLNLFKETGRVFTTESELFRVDSWSQVMLGQGAYPKQYHQIAAIMKQHELESFLTQIRETIDNAVDKLPSHQTFLDQYCRSTP

SEQ ID NO: 86462 - protein, 513 aa, Paucibacter sp.
  misc_feature (1)..(513): tr|A0A0U3DDB9|A0A0U3DDB9_9BURK Tryptophan halogenase OS =Paucibacter sp. KCTC 42545 OX=1768242 GN=AT984_21730 P E=4 SV=1
MTVKSIAIIGGGTAGWLAANHLAVELRAETGISITVIESPEIGIIGVGEGTVPQIRKSLQKFGISEAELLATCDATFKDGIKFVDWLAPTSAPGANAYYHPFASPYPSGIDVTSHYLKHADWMAFESVCEVPALADAMKSPKRVSSPPFEGPLNYAYHFNAVKFGQLLAKNARDKLGVLHKQATIVDARLNAQGEVDVLITQDGERLQYDFYVDCSGFHSLILGKLLKVPFVDKSAHILTDSALAVQIPTADDAPIPPYTLAKAHSAGWLWDIPLTNRRGVGFVYASQHLSEAAALQGLAAYLGVGEDKLSPRKIPMRIGYREKFWCKNAVALGLAQGFVEPLEATSIFVTDFAAELFARNFVPDKAQMSAAADYCNKVVSYTWERVMDFVQLHYCISDRRDSDFWRRATLEAPRSEVLSERLALWQQHAPKKSDFFSRFDLFDVDNYLFVLYGMRFKTRPKRMTAFEEQVFAHEFDKVRQHTLQLGAELMPQREWLDGFLAAYRASAGSAGR

SEQ ID NO: 86463 - protein, 535 aa, Nonomuraea jiangxiensis
  misc_feature (1)..(535): tr|A0A1G8RXY4|A0A1G8RXY4_9ACTN Tryptophan halogenase OS =Nonomuraea jiangxiensis OX=633440 GN=SAMN05421869_1092 09 PE=4 SV=1
MDSRIRNIVILGGGTAGWMAAAYLGKALQGTARITVLEAPDIPKLGVGEATIPNLQTAFFDFLGIAEDEWMREVNASYKIAIKFINWRTGGEGSARPRSAGGRSDQFYHIFGLLPFHEGIPLSHYWVRKKHLGRTAQEFDHACYREPLLLDANKAPRWMDGTRAANYAWHFDAHLVADYLRRFSTGKLDVEHVQDRMEDVTFDANGYLTSLRTATGRVLTADLFVDCSGFRGLLINKALNEPFVDMSDHLLNDSAVATAVPNDDATTGVEPFTSAIAMKSGWTWKIPMLGRFGTGYVYSSQFAGQDEAVKEFCDLWELDPDRTDLNLIRFRVGRNRRAWVKNCVSIGTSSCFVEPLESTGIYFIYAALYQLVKHFPDKSFDPVLIDRFNREIETMFDDTRDFIQAHFHFAPRDDTPFWRANKELKLGDGMQDKMDMYRAGLPINNPPSDDASHYYANFEEEFRNFWNNGNYYCVLAGLDHLPPRPLPLLAHMPESVASAEALFTRVSEEQRRLVESLPTNYEFLRSLHGHTEQRH

SEQ ID NO: 86464 - protein, 496 aa, Glaciecola sp.
  misc_feature (1)..(496): tr|A0A348MT14|A0A348MT14_9ALTE Tryptophan halogenase OS =Glaciecola sp. OX=1905676 GN=DCR37_00015 PE=4 SV=1
MQQPIKKVVIAGGGTAGWMTAALMQKVLQGQIEIELVESEDIGIVGVGEATIPPIQVFNQFLGVDEKEFLRETNGTIKLAIQFENWRVKGESYLHTFGAPGTNLGFCNFQHYWLRAYKAGLQKSIWEYDLNYLCSVDGSFNKINTQNPMFDMPYAYHFDSSLYGKYLRKIAEKGGVIRTEGIIEHVQQDPIYGNITGLQLKSGKQIQGDLFIDCTGSRAILSQQTLGVKYEDWSHWLAADSALAVQTNRFEKTLPYTRSIAHDKGWQWRIPLTNRNGNGIVFSSKYMTDEEAHDRLINNLGSDPINDVRKISFRTGRTKEQWHKNVISIGLASGFLEPLESTSIHLIQSAIVRLLKLFPHNGIQQSAVDLYNAESKTEYETIRDFIILHYHVNERTDSDFWQDMRNLPLPDRLAQKIQVFSDVGEIFNDQHDIFRDASWLQVMLGQGIMPKDYHPAANQMSEAQLTDTLDKVFAAKRQPLVKMLPHDDFLAHYLKV

SEQ ID NO: 86465 - protein, 517 aa, Pseudoxanthomonas sp.
  misc_feature (1)..(517): tr|A0A1H0ZY74|A0A1H0ZY74_9GAMM Tryptophan halogenase OS =Pseudoxanthomonas sp. CF385 OX=1881042 GN=SAMN05428982 _0649 PE=4 SV=1
MDLPVRHVVILGGGSAGWLTAAVLAAEHQTALAGGLRITLIESPDVATVGVGEGTWPTMRDTLRRTGVSETDFIRQCDAAFKQGSKFVRWREEVDGDYYHHPFVLPPGFLETHLATGWMAHRDVPFSMLTCYQAHLCEAGKSPKQMSTPEWASVANYAYHLDAAKLGVFLRTHCVGKLGVRHIADHMVGVETHENGDIAALRTREHGAIEGDLFVDCSGMRALLIGQHYGVEIESQKDVLFNDRAIATRVPYADPHVEIACQTISTAQEAGWIWDIGLQSRRGIGHVYSSTHTSDDAAEAALRRYIVATGGREQDIDTLPKIMIRPGFRRGAWHRNCVAIGLSSGFMEPLEASSLVMVELAAGMLADQMPATRAAVDIVAKRYNDTFSYRWDRIVDFLKLHYVLSKRDDSEYWRDNRRPETIPERLRDLLEFWRHQPPSRYDLNRVEEVFPSASYQFILYGMGFVPDARPTTRRMDDVRRAEEYFGQSADIARKMLSALPGHREMLDHVMTRGMPRI

SEQ ID NO: 86466 - protein, 498 aa, Pseudoxanthomonas sp.
  misc_feature (1)..(498): tr|A0A1H0ZYI1|A0A1H0ZYI1_9GAMM Tryptophan halogenase OS =Pseudoxanthomonas sp. CF385 OX=1881042 GN=SAMN05428982 _0652 PE=4 SV=1
MPDIHHQPIRRVIIAGGGTAGWMAAAALSKVLGEVLDITLVESEEIGTVGVGEATIPTLLSFHRMIDIGEQEFMAAVQGTIKLGISFENWLDVGHRYIHSFGFSGKDRGATGFQHFWLRGRKEGYASGYEDYCLELKAALQDRFAHLPRSGTNYAYHMDASLYAKFLRRFSERHGAKRVEGKIAEVLTDAASGHITALKMESGDSLEADFFIDCTGFRALLIGKTLGVGFTDWSHWLFNDSALATQTTAVRDAVPYTRAIAGKAGWQWRIPLQHRVGNGIVYSSRHVGDDEAREEFLGSLEGEVIKQPWPIRFRPGQRQQCWAKNCVALGLAGSFIEPLESTTIHLIQRGIVHLLQNFPQVVTPPAIDEYNARLDEELQHVRDFVVMHYALSNRRDSPYWREIAEMALPSTLRHRIELFRETGTVFHVPGELFGENSWIQVMMGQGIMPKRYHPTADAVPPAELQRFLDDIRASVLGNVERMPAHMDYLRSYCPAPKP

SEQ ID NO: 86467 - protein, 497 aa, Mycobacteroides sp.; identical to SEQ ID NO: 82350
  misc_feature (1)..(497): tr|A0A0R3F6T8|A0A0R3F6T8_9MYCO Tryptophan halogenase OS =Mycobacteroides sp. H072 OX=1720568 GN=AOT86_09930 PE= 4 SV=1

SEQ ID NO: 86468 - protein, 497 aa, Paraglaciecola agarilytica
  misc_feature (1)..(497): tr|K6XFT8|K6XFT8_9ALTE FADH2 O2-dependent halogenase I OS=Paraglaciecola agarilytica NO2 OX=1125747 GN=prnA PE =4 SV=1
MNKKPIKRVVIAGGGTAGWMAAAALAKLLGKNLSVSLIESDDIPTVGVGEATIPTLHIFHRLLGINEQEFMAATNATFKLGIKFENWKAQNDDYIHSFGFLGQGCWAAGFQHFWLKGKEKGMVTQIGDYVPEHLACREGRFAVLANQEQNHAYHLDAGLYAQFLRKIAEQHGCKRVEGKIQTVTLNEDSGDISSLTLASGETVEGDLFIDCTGFRALLIEQALHTGFEDWSHWLPCDSAVAVQTTAKPNPVPYTRSIARDAGWQWRIPLQNRTGNGLVFCSKYVSDEQAKAALLANIEGETLNEPRVIKYKTGTRRKHWNKNCIAVGLSSGFIEPLESTGIHLFQRAIVRLMLMFPSNGIEQADVDEFNAQSRADVEDIKDFIILHYHQTERTDTPFWRYCKNMPIPDTLAHRMDLFAGTGKVFKKAEELFGETSWIQVMLGQGIMPKQYHPIVDMMSDDELQRFLNNIKANVKRKVANWPDVNDFIRHYCQSQAAQ

SEQ ID NO: 86469 - protein, 502 aa, Massilia psychrophila
  misc_feature (1)..(502): tr|A0A2G8T086|A0A2G8T086_9BURK Tryptophan halogenase OS =Massilia psychrophila OX=1603353 GN=CR103_12615 PE=4 S V=1
MSLPHIRNIVIVGGGTAGWMTAAGLAKVLTGNWTIRLVESEEIGTVGVGEATIPLINIYNKALGIDEDEFMRATNGTFKLGIEFCNWGKLGGSYMHGFGNLGPDIGITKFHQYWLKAQQEGYAMDIENYSICSLAARHAKFMRARPELGNSPLSEIAHAFHFDANLYAAFLRKYAEQRGVIRIEGKVSGATTRPADGFIEAIVMDNGERIEGDLFIDCSGFRGLLIEQTLHAGYDDWSHWLPCDRAWAVPCESVAPLLPYTRSTARDAGWQWRIPLQSRIGNGHVYSSKFTDDASAVDILMNNLDGQALAEPRQLKFVTGKRKKFWDKNCVAIGLSSGFMEPLESTSIHLIQSTIARLTTFFPDQGFDQCNIDEFNRQANFEVEKIRDFLILHYKATSRTDTEFWNYCRNMDIPDSLRNKMALYESNGRVFREASEMFSEISWFEVMHGQGLKPRSYHPLVDALAEGKIRTFLENVSSTTLRCVEAMPTHADFVRDNCAART

SEQ ID NO: 86470 - protein, 517 aa, Comamonadaceae bacterium
  misc_feature (1)..(517): tr|A0A257G454|A0A257G454_9BURK Tryptophan halogenase OS =Comamonadaceae bacterium PBBC2 OX=2015581 GN=CFE39_037 40 PE=4 SV=1
MNEAVKHIVIVGGGSAGWLAAGVIAAEHCSASDAGLRVTLLESPDVAPIGVGEGTWPTMRDTLHKIGVSETDFFRECDASFKQGSRFNGWVNGRADDHYFHPFVLPQGYGETDLVSGWLQQYAQLPFADLVSFQPHLCVHGKAPKQKGTPEYAAVANYGYHLDASKFGQFLRKHCTEKLGVRHVLDHMTGIHTHENGDIASLQTQANGALEGDLFIDCTGMQSLLLGKHYQIPFLSQKHVLFNDTAMALQIPYADENTPIASQTISTAQDSGWIWDIGLPTRRGTGYVYSSAHTTDEAAQQALHSYTVQTGGPINPGTPRKLTFKPGYHSKFWHKNCVAIGLSAGFIEPLEASALALVELSASMLSDEMPATRSGMELAAKRFNDAFIYRWERVIDFLKLHYVLTQRTDSDYWRDNCQPEGIPERLQELLVLWQHQSPSRYDLARIDEVFPSASYQYVLYGMGFRPKQRPTVRRTDDTAAAMTYFQEAASLTRKMLAALPDNRELITHIQRNGMLKI

SEQ ID NO: 86471 - protein, 509 aa, Pseudoalteromonas luteoviolacea
  misc_feature (1)..(509): tr|A0A161ZT76|A0A161ZT76_9GAMM Uncharacterized protein OS=Pseudoalteromonas luteoviolacea DSM 6061 OX=1365250 GN=N475_04440 PE=4 SV=1
MASITIVGGGTAGWMTAVLLNQAYNKFGNTVSIQLVESPDVDIVGVGEATVPAIKDFLQAVGIDEAEFIKSTNATIKNGILFKNWCAPTEEGEVHQYMHPFDQERVEKRLDVATSWLLSSRNKSYDDSVSIAKALSDKNLTPKVQQSKSFQSIVPYSYHLDARLFGQFLRKHAIARGVTRVEAHVNNVVAKEGKIVSLSTDKGEITSDLFIDCTGFRALLLSKLEEQENWHSYSDVLLCDKAVTIQTENDTSYAPNPYTISHALSAGWSWKIDLQNRSGNGYVYSSRHISPEQAELEFRKHLGLDEQTKFNHIDMHVGRRRQQWIGNCVAVGLSSGFIEPLESTGLHLIYLAARQFVLHNNFSKTQQSTRDNYNKTMNDTYDELKDFIVLHYVLSDRTDSEFWRDIPKTLDGCELLKSRLSVWKHKVCEYFDVSNSTSHMFSDVSYRYILYGMNYFPELDIPFVEGEFDDVFAYIENRQQQACHHTLSHKEYLNATVHGQSGFVSVSMK

SEQ ID NO: 86472 - protein, 509 aa, Pseudoxanthomonas sp.
  misc_feature (1)..(509): tr|A0A543DMX4|A0A543DMX4_9GAMM Tryptophan halogenase OS =Pseudoxanthomonas sp. 3HH-4 OX=1690214 GN=FB548_2901 P E=4 SV=1
MDSPNTPAAQIRKVVIAGGGTAGWLAACALSNQFRDRLDITLVESEQIGTVGVGESTVPPIRTFHRFLQIDEQEFLRAVAGTFKLSISFENWRRPGERYIHPFGITGQGTWAAAFHHFWLDSLRRGMPSELGDFCLETLASRGDQFSLQSQPQVNYAYHFDAGLYAKYLRRIAEGYGLRRVEGKIREVRQRADDGAVQALVLEDGQVIEGDLFIDCTGFRGLLIEQTLGTGYEDWNEWLPSDRAVAVQTESVGPPVPYTRAIAHEAGWRWHIPLQHRVGCGLVFSSRHMSDDEARAKLLRDVGAPAIRDPWLVPFRTGRRLKAWNKNVVALGLASGFIEPLESTSIHLAISAVVRLVQLFPFDGIASSLVELYNEVSRAEMEHVRDFIILHYHATQRDEPMWKACREMPLPDSLEIRLRAWRERAHAWQDPDELFRVDSWTHVMLGQGIQPGPPHPLARALADDDLRKLLDSIRQPIERAVAGMPSQQAFIDRYCKAGPEVWGNRPVPR

SEQ ID NO: 86473 - protein, 500 aa, Novosphingobium sp.
  misc_feature (1)..(500): tr|A0A1E4N6E8|A0A1E4N6E8_9SPHN Tryptophan halogenase OS =Novosphingobium sp. SCN 63-17 OX=1660120 GN=ABT10_0405 0 PE=4 SV=1
MSLRIAIIGGGTAGWMTANLLAHRWGGQGAQITLVEAPEIATIGVGEGSTPTLKRFFEVLGIAEDEWMPACCATYKASIRFRGWSPASGVAQYSHPFLTQLDLHTEEAFTLNCGNRRLGLDVPTAPDDFLLGGVLAAQGKAPLAPAHFPFRMEYGYHFDAGLLGRFLRDCATARGVTHHQAQVQDIIRDDRGAIAAVMTDRAGRIEADYFVDCSGFAALLMRGALDVPFVSFRSNLFNDAAVVLPTPSAALIPVETTATALSHGWAWSIPLTNRNGNGYVFSRDFLSADAAEQELRAALGMLDSPVEARHLSFHTGQLARHWEQNCLAVGLAQGFVEPLEATALHLVLNTVDLFMDHLERGSFTPQYRDVFNAVITDRVERVRDYIVAHYKLNTRDDSDYWRANRNNDDLSDPLLQILDTWFRRGDLAALLARQPGLSHFNSASWHCLLAGYGAFPPLAEVQREDVDFYRSRDLARFLDGCSLNFPSHGDALAQMKKVAA

SEQ ID NO: 86474 - protein, 507 aa, Pseudoalteromonas sp.
  misc_feature (1)..(507): tr|A0A3A3D5X1|A0A3A3D5X1_9GAMM Uncharacterized protein OS=Pseudoalteromonas sp. MSK9-3 OX=1897633 GN=BGP78_098 60 PE=4 SV=1
MTRIVIIGGGSAGWLTAGVIAAHHGEQVHVTLIESANIKTIGVGEGTWPTMRDTLQKIGITETDFMRSCDASFKQGSQFINWGSSQMPDNYYHPFSLPAGYIQGHSAHVPRSSDLSFAHMLCPQATWCDAKLAPKLGSDKEFTGQGNYGYHLDADKFAKLLKKHCTEQLHVAHIVDEVIEVIGQCTDNIEAVITTTHGNVAGDLFIDCSGGAALLIDKHYKVPWLSQQQVLKNDSAVAVQVPHKSSECDINSCTLSTAQTEGWIWDIALPTRRGIGYTFASEFTGEHIAKAALLNYIKKQGLSKPNAEAIRTIKFNPGYRQTLWYKNCVAVGMSAGFLEPLEASALVMIELSAAYIAENLPQNPVHMETVAARFNREFSHHWQSAVAFLKLHYVLSNRADSEYWQTMRSQGIPKNLSELLALWRYQVPKHQDLPHSNDIFSVASYQYILYGMGFDTAITQPILSMQSETLFKDIQLSVNRFAEQGKQTLPTNRALLLNIKNHGIPKI

SEQ ID NO: 86475 - protein, 525 aa, Paraglaciecola agarilytica
  misc_feature (1)..(525): tr|K6XRX7|K6XRX7_9ALTE Tryptophan halogenase OS=Paragla ciecola agarilytica NO2 OX=1125747 GN=GAGA_4353 PE=4 SV =1
MQLNSQVKDIVIVGGGTAGWLTAGLLASRLSSRVQSGELNITLCESPDVPTIGVGEGSWPTLRSTLQTIGVTETDFIRQCNVSFKQGSRFVNWQHDRPSQYDHPFDVPQQASQGAEAQHWLSTQSQVPFSQAYCLQTELANNNLAPKLITTPEFTGFANYGYHLDAALFAEFLREHCIQHLQVKHVLANVKQVEQDENGDITCLHLAPPSQNNSNHPDYINGDLFVDCTGFRALLLGDTLGVCNTQVDDVLFANNAIATQLPYVEQNSPIASFTESTAQDNGWIWDIGLPNRRGIGYVYSDRYCDEQDAHRTLVKFLQKTQQNTDTLSYKQIHFTPGYKQQFWKNNCVAIGLSAGFIEPLEASALVLVEMSANMLAEQLPNTRSCMDVIAKRFNQTFTYRWQRIIDFLKLHYVLSRRSSAFWQDNRAQSSVPDSLKELLALWQHKVPDMNDFPARDEVFQAASYQFVLYGAGFKSQLLSTPDKNLLEAAEQQFLSIQGYTSQLTNKTISNRDLLSKIYRYGLQKR

SEQ ID NO: 86476 - protein, 530 aa, Sphingomonas sp.
  misc_feature (1)..(530): tr|A0A0Q4JSJ0|A0A0Q4JSJ0_9SPHN Tryptophan halogenase OS =Sphingomonas sp. Leaf30 OX=1736213 GN=ASE89_19235 PE=4 SV=1
MTGRTPGPASARGPLRSIVIVGGGTAGWMAATLLARRLERQPVKITVIDSSAIGTVGVGEATVPGIRDFFREIGVTEQEVMAATQGTVKLGIEFVDWKREGERFFHPFGLYGMRSRGVAFHHYWRKMNAAGHASPLADFCLATALAERNLFMPPTDRPVHDLLFFDWAVHFDAGLFARFLAQKAIAWGVEHIDATITDVRVDGRTGFISGVDTSCGKAIDGDLFIDCSGFRSLLLGGALGVPYEDWTNLLPCDRAVAMPCTRSGPLTPYTRSTALEAGWQWRIPLQHRVGNGYVYSSRHISDDEAVATLKGRLEGEALGEPNMIRFRTGRRTAFWQGNCVALGLAAGFMEPLESTSITLIQTGIEKLLALLPDRGFDPALAEEYNRTTGLEYERIRDFLLLHYFANVRRGEPMWDRCRDTALPNALAHKLRLFKARGHLVRYEWESFQDPSWLSMYAGFGIDAAAHDPGADHFSVQDLESAFARMKESIAQAVALAQPHDAFLGLSARHPARAQAAEPGGAPDRLMMPAR

SEQ ID NO: 86477 - protein, 530 aa, Xanthomonas translucens
  misc_feature (1)..(530): tr|A0A0K2ZM60|A0A0K2ZM60_XANCT Tryptophan halogenase OS =Xanthomonas translucens pv. arrhenatheri LMG 727 OX=11 95923 GN=XTALMG727_1829 PE=4 SV=1
MGRAAATAARERRDAHASTLCRAAPPVATQVNAGEPLRHIAIVGGGTAGWMAAAALVRVLGAGATRITLVESEAIGTVGVGEATIPPIALFNALLGIDENAFLRATQGSFKLGIEFVDWLQPGQRYFHPFGTYGADFGTVPFDGLWQRMHRAGRAAPLAAYSLNTLAAMRGRFMRPQQGDALLSRLGYAFHFDAALYARLLREYAEGRGVTRLEGKVEQVLRRSPDAAIASIVLACGMRIDADFFIDCSGFRGLLIEDAPGAGFVDWSHWLFNDRAVAVPSARASAFTPYTRSTAREAGWQWRIPLQHRTGNGYVYSSAHLSDDAAAATLLANLDEEALAEPRTLRFRAGRRGLFWSGNCLALGLAAGFLEPLESTSIHLIQAGIARFLEMLPDRAGNPADIRRYNRLMAQEFDSIRDFIILHFHATARPGAYWERARTMPIPDSLAERLQIFAHSGRVFREADELFSKTSWLAVMQGQGLSARGFDPLAAAMPDAEAAARLQRVAAAMAMAVERMPAHADFIRAHCAAT

SEQ ID NO: 86478 - protein, 489 aa, Sphingomonas sp.
  misc_feature (1)..(489): tr|A0A0Q4KE57|A0A0Q4KE57_9SPHN Tryptophan halogenase OS =Sphingomonas sp. Leaf30 OX=1736213 GN=ASE89_18325 PE=4 SV=1
MAAAALAAKLAGLPISITLVESDEIGTVGVGEATLPHIRAFNLALGIDEAEMMRATEATYKLGIEFCDWGRRGDRYIHPFGDFGPTTNDVPFYQYWLKLRQSGDRSRIDEYSYPVIAAEQGRFRRPSGDLDAVESTFGYAYQFDAGLYAKFLRGFAEKRGVSRIEGKVVRVVQDGETGFVRDVVLTNGTTLSADLFIDCSGFRGLLIETALQSGYDDWSAWLPCNRAIAVPTESNGALRPFTRATARTAGWQWRIPLQHRVGNGHVYCSSFISDDEAHDQLVAGLDAPMQAEPRRLSFTTGRRREFWKKNVVAIGLAGGFLEPLESTSINLIQDGITELLAVFPDKGFAARDIAEYNRRIGLHYERIRDFLLLHYVATQRADSEMWRHFRNLRLPDSLSERIDAWRARGHLIQYEFGLFLSPSWVAVFLGQNIVPDRHDPRVENMSVDALTARAMDVRAKVDAAVRRTPEHTAFIRESGGAARLAVAGA

SEQ ID NO: 86479 - protein, 487 aa, Sphingomonas sp.
  misc_feature (1)..(487): tr|A0A0Q4KCE9|A0A0Q4KCE9_9SPHN Tryptophan halogenase OS =Sphingomonas sp. Leaf30 OX=1736213 GN=ASE89_04045 PE=4 SV=1
MTAATLGLTTGTPSAARLADITLVESEEIGTVGVGEATVPHIRFFNQRLGIDEADFVRRTKATFKLGIEFCDWGRIGDSYIHPFGDFGHDIDGLPFHQHWLHATRDKPDETPALAACSLPIVAARAGRFTPPLDDPRSVGSTYSYAYQFDAGLYAAYLRDYAEARGVTRIEGRVEHVERGPSGIAALRLADGQRIEGDLFVDCSGFRALLIEGALKAGHEDWAHWLPCDAAWAVPTANTGPLVPYTRATARDAGWQWRIPLQHRTGNGHVFSTRFTDPDRARAVLLDNLEGEPLAEPRMLRFRTGRRHRQWIDNCVAIGLSAGFLEPLESTSIHLIQLAIGKLIELFPNDPVLDPADAAEFNRAMALEYDRVRDFLVLHYCATERDDTPFWRHMRTMELPPSLAGKIAAFRDRGIVEQYREGMFLPASWLAVYYGQRIMPERIHPLVAALPVADARARVAAVVDACRRTAEGMPTHADYLARIGAAA

SEQ ID NO: 86480 - protein, 517 aa, Duganella sp.
  misc_feature (1)..(517): tr|A0A1H8L5X6|A0A1H8L5X6_9BURK Tryptophan halogenase OS =Duganella sp. CF517 OX=1881038 GN=SAMN05428959_104141 PE=4 SV=1
MGSTDTHGGAIRRIVIVGGGTAGWMAAAPLAQRLARHPTEPCEVTLVESPEIGTIGVGEATLPTIRAYNEALGLDGADFVAKTQASFKLGIEFKDWGHVGNRFFHAFGDFGPVLAGVGAHQHWLRLAQAFNSMPDIENWSVPSVMARHGKFSPPKDDQPGVTDAYSYGFHFDASLYAKYLRDYAVARGARRLEGMIVEVEQHPQSGFVTAVKLQDGRRIEGDLFIDCSGFRGLLIEGALKAGYEDWSAYLPCNSAQAVPCASVAQLTPYTRSTAKQAGWLWRIPLQHRTGNGHVYSDGFTSDEQARRVLLDGLDGAALDEPRQLRFTTGRRRKSWVKNVVAIGLSAGFVEPLESTSINLIEMAVGKLLELFPDRDCAPALADEFNRFMGIRYESVRDFIILHYKLTKRDDSEFWRYCADMAIPDALRHQIELFRETGRVAIVDRGGFAEPSFVAMMMGLGVMPKRYDPLADRVDLRAVHGHFAGLRDLIAQTVARMPDHGAYVAGQAKSGAASRVAA

SEQ ID NO: 86481 - protein, 232 aa, Burkholderiales bacterium
  misc_feature (1)..(232): tr|A0A4Q3UBK5|A0A4Q3UBK5_9BURK Tryptophan 7-halogenase (Fragment) OS=Burkholderiales bacterium OX=1891238 GN=E ON93_24470 PE=4 SV=1
MHLPHGFPERLVILGGGTAGWMSAAFLDRNYNTPQRRQLEIVLVEAPAIGRIGVGEATLLTMRDFCDFLGIPEELLMQRTNATLKHGLSLEGWNGPDSRYFHAFEALDPSVANNAGPSWLARKARGTARAFHEEMGIQSRVAYAGCSPKPMMDSGGYRSRLPYAYHFDAEAFADLLKEIALARGVVHVEGEVTEIGQTENGDVSQLRLADGRVVEGDFFIDCSGFAALLNQK

SEQ ID NO: 86482 - protein, 513 aa, Sphingomonas sp.
  misc_feature (1)..(513): tr|A0A0Q4K2R9|A0A0Q4K2R9_9SPHN Tryptophan halogenase OS =Sphingomonas sp. Leaf30 OX=1736213 GN=ASE89_07415 PE=4 SV=1
MREIKHIVIVGGGTAGWLTAGVIAAKHQARRAHGFTVTLVESPNIPIIGVGEGTWPTLRNTLRRMGISETELFRQCDASFKQGARFNRWTTGAPDDGYYHPLMLPQNFGQVNLAPHWLETPDATSFCDAVTPQGRVCDAGLGPKTIATPEYEAVANYAYHLDAGKFSGFLQRHCCDVLGVRHVLADVTEAVVTETGDIAMVRTEQAGDIPGDLFVDCTGFAALLIGRTLGVPFKSCADTLFCDTALAIQVPYPDDETPIASHTISTAQSAGWTWDIGLPTRRGVGHVFSSSHISVDEAERELRAYIGDAAADLPVRKLSIKAGHREIFWKNNTVAVGLAAGFLEPLEASAIVLIELSAKLIADQLPACREVMDVVARRFNETTLYRWGRIIDFLKLHYALTQRTDNDFWRDNVRPESIPDRLQGLMDLWRYHAPWMLDEFDRAEEVFPAASYQYVLYGMGHRTHVPPGVAEADVRAADRAIRENQTQTERLMAGLPLHRGLIRKIVEYGLPTI

SEQ ID NO: 86483 - protein, 505 aa, Altererythrobacter namhicola
  misc_feature (1)..(505): tr|A0A1C7D6S8|A0A1C7D6S8_9SPHN Flavin-dependent tryptop han halogenase RebH OS=Altererythrobacter namhicola OX= 645517 GN=rebH_2 PE=4 SV=1
MSAKGKPSIVIAGGGTAGWMAAAALARFASATHDITLVESEAIGTVGVGEATIPQIHNFNHALGLDEAAFVSATQASFKLGIEFAGWSGDGSAYMHAFGPVGRAHGPLPFQHYWLRAADEGDAGSLAEYSLNEQAARAGKFRRGPSRSGGAAMPYAYHFDAALYAAHLREYAEARGVTRVEGRIDSVAKHGESGHIRALHLDGGTQVVGDFFIDCTGFRALLIGEAMGTDFDAWDALLPCDRAIAAPCAKAGAITPYTRATARPAGWQWRIPLQHRTGNGHVFCSQHMGEDEATQLLLDNLDGEPTADPRTIRFQTGKRREHWRGNCLALGLAAGFMEPLESTSIHLVQSAIARFLPLLPGAVPAQAAIDRFNADADTEWLAIRDFLVLHYRANAREGEPFWDAMRGLALPDTLTSKIALWQQTGTIHRAGDELFAEVGWLQVLAGQGVMARAHNPIADAMPKEDLARFLAQQKQAIAADLATMPTHEAAIADLTARHNPSGVAA

SEQ ID NO: 86484 - protein, 497 aa, Pseudoalteromonas sp.
  misc_feature (1)..(497): tr|A0A3A3D2E2|A0A3A3D2E2_9GAMM Tryptophan halogenase OS =Pseudoalteromonas sp. MSK9-3 OX=1897633 GN=BGP78_16415 PE=4 SV=1
MAEQRIKNLTIVGGGTAGWLTASLFAKVMGKQLNITLIESDDIATVGVGEATIPPILPFNGALGIDEKAFIKATSATIKLGIQFEGWSKDVPSYMHAFGAIGKDFPFCEFYHHWLAAKSQGDQSNFWDFSLNYQAAKQHKFAKLHTIPNTQLKGLSYAYHFDAQQYAVFLSQHAQTLGVKRIAGTVSSVRVNEESGFIEQLDLADGQQVSGDLFIDCTGMHGLLIEKALNCGFEDWSHWLPCDRAIAIQSNPLSNDIVPFTRSIAHPAGWQWEIPLQHRVGNGIVYSSKHMSDEEAQAILLAGISGDTLGKPKHLRFRTGRRLTPWCKNVVAIGLSSGFLEPLESTSIHLIQTAAVRLLKLFPQNDITQQSRDIFNRETQQELEQIRDFVILHYKLNDRADSAFWRLCHTMPIPESLKRKIALFKETGVIHSEVTDLFSSVAWQQVMLGQGVIPQQQHPLVDTLTAEQREELLSSLRLLIDKTASALPKHVAFLASL

SEQ ID NO: 86485 - protein, 509 aa, Xanthomonas oryzae
  misc_feature (1)..(509): tr|Q5H6B8|Q5H6B8_XANOR Tryptophan halogenase OS=Xanthom onas oryzae pv. oryzae (strain KACC10331 / KXO85) OX=29 1331 GN=prnA PE=4 SV=1
MIPAPLRNIVIVGGGTAGWMAAAAFARVLGPTFTVQLIESEQLGTVGVGEATVPHIKAFNNLLGIDEAEFVRQTQGSFKLGIEFVDWQRPGTAYMHGFGTQIGHPLGLLPFHQYWIKQHARGKAQPLGAYTLNTVAAARGKFMTSAGDVPANSPLANIAYAYHFDATQYAHFLRRYSQQRGVTRIEGLVEQVQLHPESGHVQSLQLASGQTVHGEVFIDCSGFRGLLIEEALHTGYHDFTHWLPCDRALAVPCEKVGPPTPYTRSTARAAGWQWRIPLQHRTGNGYIYCSAHISDDEAAATLLANLDGKPLADPRPLRFTTGRRKQFWNRNVVALGLASGFLEPLESTSIHLIQSGISKLLELFPREGISPVLVQRYNDRSAFEFDRIRDFLLLHYHATEREDSAFWRHCRSMPITPELQTTLDLFRDSGRFYRNAEEMFAEISWVQVMVGQGILPQGYHPLVDQVPDRDAEGFLASVAHTIAHCVDVMPPHQQFIDRYCKAAALPCGG

SEQ ID NO: 86486 - protein, 502 aa, Sphingomonas sp.
  misc_feature (1)..(502): tr|A0A0Q4KHG9|A0A0Q4KHG9_9SPHN Tryptophan halogenase OS =Sphingomonas sp. Leaf30 OX=1736213 GN=ASE89_18310 PE=4 SV=1
MDELAIRRIVVVGGGTAGWMAAAALSRVLGRAVEIELIESEAIGTVGVGEATIPHLQYFNRLLGIDEDDFVRRTAATFKLGIEFVDWGRIGDRYFHPFGTYGQEMEGLHFHHFWLRQAQLGGALDLDRFSIGADAARAQRFQRPDHSRAGSPLGTISYAFQFDASLYARYLRERAEAGGVRRTEGRIVDVTLDSGNGHVQAVTLEDGSRVAGDLFIDCSGFRGLLISEALGAGFENWSHWLPCDRAVARACRRTTDPLPYTRATAKAAGWQWRIPLQSRTGNGYVYCSDHLSDDEALAGLNAALDGDPLSEPNFIRFKAGVRHKAWDRNVVALGLANGFLEPLESTSIHLIQSAIARLLTNFPDRRFNQHDIDYYNRRTRVEYEQVRDFIILHYATTTRDDSPLWRYCRSMALPTSLGERIAIFRENGRLYRHDNELFSETSWLAVMHGQGLVPRRYHPLADLLPEGELDKRMAHIANAMRLAVDRMPSHQQFLDQIGHPAV

SEQ ID NO: 86487 - protein, 505 aa, Novosphingobium nitrogenifigens
  misc_feature (1)..(505): tr|F1Z4S1|F1Z4S1_9SPHN Tryptophan halogenase, putative OS=Novosphingobium nitrogenifigens DSM 19370 OX=983920 GN=Y88_0040 PE=4 SV=1
MGGGTAGWLAAGLLAARLGLAARDDLQITVVESPRVPILGVGEGTWPTFRQSLKAMGIGEADFLAACDATFKQGSQFVGWNQSPVPGGHSYIHPFTPPHRFGELDLASAWLAEPTTGFDEAVCFQTVLCRAGLAPKLRNSPDYEGIGNYAYHFDAGKVAAFLKDHCIAHLGVKHVADDVLDCVTDRGDDGEGDGAITALRTARHGDLPGDLFIDCSGQHGVLMDRVYKARMVDCRDILLVDTALAIPVPYPQADSPIASVTLATAQSAGWIWDIGLKTRRGTGYVYSSRHVSHDEARHTLDRYVRTISGKPMQDEPRRIAINSGYRERFWIANCVAIGVSAGFIEPLEASSIAMIEISANHLAEHLTFDRKVMAIEAGRFNRKMDQLWHDVIDFLKLHYVLSDRTEPFWLDNRAPCSIPSSLRDNLRIWQNRPPIEGDFVHTCQLFGPASYQYILYGMHRAGAVKGDASCKPRNERANNHIGEVRALTAKLSRVLGPNRDFAVGI

SEQ ID NO: 86488 - protein, 517 aa, Sphingomonas sp.
  misc_feature (1)..(517): tr|A0A0Q4K928|A0A0Q4K928_9SPHN Tryptophan halogenase OS =Sphingomonas sp. Leaf30 OX=1736213 GN=ASE89_15735 PE=4 SV=1
MDRAITSIVIVGGGTAGWLAACLIAARADRDAERPLQVTLIESPDVATIGVGEGTWPTMRRTLERIGISETEFLLACDAAFKQGSRFDGWRTGAPDDRYLHPFTTPAEAAPRDLASAWSDSGLAFAEALCAQHAVCRQDLAPRQRAMPDFAGTLNYAYHLDAGKFAALLARHATERLGVRHLRDHVVGVDGAADGDIAAVRTRASGRIDGDLFLDCTGHTGLLIGEHYGVGTIDRGRELCNDRALAVQLPVAADSVIASQTNATAHAAGWIWDIGLPARRGIGCVYSSAHLDDDAAADTLTRYLRATAPDAPLPDFRPLRFQSRHRDRFWHRNCLAIGLSAGFLEPLEASAIVLVELSVEALLDNFPATRRTMDLHAARFNTLFRYRWDRIVEFLKLHYVLSQRDEPYWRDHRDPGSIPPRLAELLQLWADQPPSHGDFPMVDEIFPAASYQYVLYGMGFPAPRRTPVRTGARGAADMLVQQVDRHGRMLAAALPTNRAYLDALRHAMTGATMETRA

SEQ ID NO: 86489 - protein, 489 aa, Sphingomonas sp.
  misc_feature (1)..(489): tr|A0A0Q4KKN2|A0A0Q4KKN2_9SPHN Tryptophan halogenase OS =Sphingomonas sp. Leaf30 OX=1736213 GN=ASE89_04870 PE=4 SV=1
MTAAAMARLVESGVAVTLVESEEIGTVGVGEATIPSLLDYHRMLGIDEDDFVRATGATFKLGIEFRDWGRLGDAYFHPFGTHGRDVEGVAFHQLWLRQAGLAQPGMPGPIGDYCLSTVAARNGRFTRPSANPQSVLSTLSYAFHFDAALYAQYLRNLAEAAGVVRIEGRVAAVDRHAGTGFIEAVRLADGRAINGDLFIDCSGFRSLLLSDAMDVGFTSWQHWLPCDRAWAVPSAPRDAPAPHTRATAEAAGWRWRIPLQHRVGNGHVYASDHVDDDTALHVLLGGLDGPPLADPRQLRFVAGRRDRLWERNCVAIGLAGGFLEPLESTSIHLIQSGIARLMSLFPDTGFSAVEIAEYNRQMLREYDQVRDFIILHYHATTRTDSAFWRHCQSMTLPPSLQAKLDLWAGRARIFREQGELFTPDSWIAVLLGQGIWPASVDPLTAGLPVAESAMFLDHVREMVAKTAEAMPRHADFIARHCAAPLRTAA

SEQ ID NO: 86490 - protein, 512 aa, Novosphingobium sp.
  misc_feature (1)..(512): tr|A0A1E4N6I3|A0A1E4N6I3_9SPHN Tryptophan halogenase OS =Novosphingobium sp. SCN 63-17 OX=1660120 GN=ABT10_0404 5 PE=4 SV=1
MTKTQEDANVTRPIRKVVILGGGTAGWMTAALLAKVLGATTQERKIAIELVESDDIGIIGVGEATIPPIQQVNAVLGIDEAEFLRETKATIKLAIRFENWGAIGESYYHTFGAAGRNLPFCSFHHFWTRARQLGIEGSYWDFDLNYLCARGGKFAPTTGNDPIWDMPYAYHFDSGLYGQFLRRYSEKLGVVRTEGKVRDVQRAAGVGDIMALVLADGRQVAGDLFIDCSGGRGVLIQQQLGTGYEDWSHWLPCDRAMAVPSQRHAQTAPFTRSIAHGAGWQWQIPLQHRNGNGLVYSSRFCSDDEAAQVLLGHLETPALDEPRIIHFRTGRARRQWNRNVVAIGLSSGFLEPLESTSIYLIQSAITRLLHLFPHDGITADLIGEYNRQSQIEMELIRDFIILHYHANQRRDSAFWRDLRQMEVPERLARKIALFSANGTLVQDQYDIFMEPSWVQVLMGQGILPADYHPLADGPSEEQLRRQLAQLAQLKARPLDQLPSHDDYLQRCLGQPA

SEQ ID NO: 86491 - protein, 510 aa, Burkholderiales bacterium
  misc_feature (1)..(510): tr|A0A3S0FDX6|A0A3S0FDX6_9BURK Tryptophan 7-halogenase OS=Burkholderiales bacterium OX=1891238 GN=EKK53_00045 PE=4 SV=1
MNASDPSLRKIVIVGGGTAGWMTAAPLAQRFQHAGPNGCEVVLVESPDIGTIGVGEATLPPIRAYNRTLGLDGADFVRRTQGSFKLGIEFRDWGRVGHRFFHGFGDFGPAIENRSPWQHWLRLSRIVNGLPHYEDWSTATVMARGHRFTPPVDGPPSAANAYSFAYHFDAGLYAAYLREYAQARGAQRVEGLIVNVELRPDDGFVQAIQLADGRRIEGDLFIDCSGFRALLIDGAMHSPFEDWRALLPCNSAQAVPSERIEPLTPYTTSTAKAAGWQWRIPLQHRTGNGHVYCSDFISDDEASATLLAGLDGRALDTPRQLRFTTGRRRAMWVKNVVAIGLAGGFLEPLESTSIQLIMDGVGRLLQFFPDRTFQPHLAAEFNRRMNVQYESIRDFIVLHYKLTERRDSELWRYCAAMPIPDTLAHQIELFREAGRVAILDPDGFAEPSWVSLFLGLGLVPQRYDPFVDHIDPEALLQHFARLRQAIVQTAGDMPLHADYIRRHCPAPPMA

SEQ ID NO: 86492 - protein, 518 aa, Thalassomonas sp.
  misc_feature (1)..(518): tr|A0A553FEK8|A0A553FEK8_9GAMM Tryptophan 7-halogenase OS=Thalassomonas sp. M1454 OX=2594477 GN=FNN08_08545 PE =4 SV=1
MKKKNVNSITIVGGGSSGWMTALYLNKLYNHTQANIDITVIESKDIGILGVGEATVHSIRFFFAAMGLDENELLKETNATLKTGIMFRNWMKPVNQQTHQYFHPFEHQSLGNILDISSAWILSSRHLFERYDQGVSLSSHLMVDNLSPKMPASAPYQGIVPYGYHLDATLMARFLRKKATQAGVTHIEATVDKVNVSDNKIVSINTDKGEFSADIFIDSTGFKGLLIDAIKQDNWQSFEQELPCNKAVAMQVEYKEQQVPRSYTTATALSNGWAWEIDLTSRRGTGYVYDGSRLTKEQAEEELKQHLGADANVLKTLHLNMKIGCRKEFWVGNCIAIGLAGGFIEPLESTGLHLINVGVKLLSTHISSNQIQQASRDSYNRLMNGVYDDLKRFIVLHYCLTDRNDTEFWQQAQESVKYCPELQSQLAVWQHKTCEFMDLSGGYATTFTDENYRYILYGMGHIPELHMPYEESSCKKIFDRFSFMAEKAKSVSLSHKKYLETLHSAQSGSNVSIMMNKA

SEQ ID NO: 86493 - protein, 536 aa, Burkholderiales bacterium
  misc_feature (1)..(536): tr|A0A431J7L8|A0A431J7L8_9BURK Tryptophan 7-halogenase OS=Burkholderiales bacterium OX=1891238 GN=EKK52_20210 PE=4 SV=1
MTDTATVFNQHVAARPASGTSLAPPPIQHVCVVGGGTAGWMTALMLATSAYGPRLKVSVLESPQVGIIGVGEGSTPWLRGFFDGLGIEESEWMPACNATYKAGITFEGWSTRPGFERYFHPFASMLDNMTMHPFVDNVHARLDGADVYAHPDRFFVAAALARQGRGPRARADFPFDVWYGYHFDATLLGQFLARKAVERGVRHLQRHVHRVQLNEAGDIASLLLDDGQALSADFFIDCTGFSSLLIGEALGTPFIPFAENLFNDAAIAMPTPLDGPIPSQTVSTALRHGWAWKIPLTTRCGNGYVYSSAHCSADEAETELRRHLGLLDADVPARHLKMRVGRMTQIWNRNCVAVGLSQGFIEPLEATALLFVQRTAAAFVNALEQGNLGPAARQRFNDEMATRFENTRDYIVAHYKTNSRTDTEYWRANADNMQLSDSLEGVLMTWLSRKPLAAGLKAGRFGAGYPIVSWYALLAGMGIFPDASEMRPPTPHEARHRLDAVDDFVARSARNFPDHRDLLAHIPPRVGDKTLQIYLW

SEQ ID NO: 86494 - protein, 498 aa, Burkholderiales bacterium
  misc_feature (1)..(498): tr|A0A431LJ33|A0A431LJ33_9BURK Tryptophan 7-halogenase OS=Burkholderiales bacterium OX=1891238 GN=EKK53_07790 PE=4 SV=1
MSSHTPPPRRIVILGGGSAGWMSAAALATALQGTSIALVESEDIGIIGVGEATFPSIRNFNQVLGIDEAEFLAATRGSYKLGIQFCDWRRPGEHYFHTFGDFGALDGPMALWGQYLRLQAHCEGGLGDFCLPTVMARQGRFRPPDPDDGIGARYTYAYHFDATLYGRFLRRLAEGRGARRVEGRVVDVARRPDGGVRALRLDDGREVEGDLFIDCSGFASVLMGQTLGAGFVDYSHWLPVDRAWAVPAERTPGPLLPYTRATAMEAGWCWRIPLQDRTGHGHVFSSRHVSEERAREQLLAQLEGQPLAEPRLLRFKTGHRERFWQHNVVAVGLAAGFLEPLESTAIFLVHNAIGRLIPLLQQPVDAADAADTFTAQQTRQYQRIRDFIILHYCLSERRGSAFWQHLTGMALPPTLAFKLHAWRETGMLHNYDDEAFDETSWLAIHAGMGHWPRHRSPWMDDVPPPMAAHYLSQRHGAIAQLAASMPPHDAYLRTRTGG

SEQ ID NO: 86495 - protein, 505 aa, Pseudoalteromonas sp.
  misc_feature (1)..(505): tr|A0A3A3D4J3|A0A3A3D4J3_9GAMM Uncharacterized protein OS=Pseudoalteromonas sp. MSK9-3 OX=1897633 GN=BGP78_161 80 PE=4 SV=1
MLNSILIVGGGTAGWLAANHLGKKFKNSGTTVTLIESPNIPTIGVGEGTVPMMRQTLSYFGIDEGVFFQQCDAAFKQGIRFENWMKSNSDKPHFYYHPFDYFADDDRFLKYWLNGSQGNSFAEFVGIQSHLCESSKAPKKVTQPQFESVSSYAYHLDAGKFSELLKKNAIEHFGVNFILAEMKSIETNVEGNISNIATDQGALKAELFIDCTGFNSLILGDKLKVKFVDKSNVLFTDKALAVQVPHSSDRISPYTCSTAQSAGWIWDIPLFSRKGVGHVFSSSHTTSDDAYQALESYVGRNLDEFTVRKIDMKIGYREKAWFKNCVALGLSQGFVEPLEATGLLVFDVTAKMLADILPNSINGFSASASQFNAVVTNMWLKVIDFIKLHYCISDRTDSDFWLDNRVQNSIPDTLQEKLARWQHVPPNQYDFSGKLDVFNLDNYLYVLYGMSFKTDKASCVLSDRNKHAFASHLSSYDKYKQNVLMSVPDHKVLLEQIRIFGMAKI

SEQ ID NO: 86496 - protein, 505 aa, Sphingomonas sp.
  misc_feature (1)..(505): tr|A0A0Q4KJ35|A0A0Q4KJ35_9SPHN Tryptophan halogenase OS =Sphingomonas sp. Leaf30 OX=1736213 GN=ASE89_15750 PE=4 SV=1
MTTPPIHRVVIAGGGTAGWMAAAAIARTMGRTVAVTLVESEAIGTVGVGESTIPPIVTFNRLLGINEAEFMRETQATFKLGILFDNWKDRGDTYFHSFGTTGKDHWSAGFQHFWLHGLTRGHHQPFDDYCLELRAALQGKFAHLPDGRMNYAYQLDSGLYARFLRKMAEADGTTRIEGRIAQVELNGESGDIAALTLDSGARIEGDLFLDCTGFRALLIEQALHAGFDDWTHFLPCDSAIAVQTESVRPALPYTRAIAHDAGWQWRIPLQHRTGNGIVYCSRYLDHDAALERLLGTVEGPTLTEPNKIRFVTGARRQQWHRNCVAIGLAGGFMEPLESTSIHLIQRAILRLLRMFPSAGISPRDVAEFNEQQHTDMLQIRDFLILHYKATDRRDSAFWRQCASMPVPDSLAHKIALFRETGRVFRKNDELFAENSWVQVMLGQGIVPESYHPIATKMRDDELVRLLGGLRDTTNATVDALPDHAAYVAHYCSTAPSASAGSPHLG

SEQ ID NO: 86497 - protein, 77 aa, Pseudomonas sp.
  misc_feature (1)..(77): tr|A0A2N8B2Q7|A0A2N8B2Q7_9PSED Tryptophan halogenase (F ragment) OS=Pseudomonas sp. FW305-25 OX=2070636 GN=C1Y3 1_32165 PE=4 SV=1
ITREHEELFTEVGWLQVFAGQGVLPTGHHPLADAIPASDLAEFMDTIAKLNAREVAQMPSHADFIARHCAAPQPVTA

SEQ ID NO: 86498 - protein, 521 aa, Xanthomonas arboricola
  misc_feature (1)..(521): tr|W4SCU4|W4SCU4_9XANT Uncharacterized protein OS=Xanth omonas arboricola pv. pruni MAFF 301420 OX=1418095 GN=X PR_0847 PE=4 SV=1
MTDTAPSDPQQRPVRRVVIAGGGTAGWMAAAALSKVLGRHLQIVLVESDEIGTVGVGEATIPSLVTFHRLLEIDEAAFMAATQATIKLGIGFEHWRDVDRHYIHSFGHTGTDHWSAGFQHFWLKGRQRGLARDFGDYCLELRAAQEGRFAHLPNGGMNYAYHLDAGLYARFLRRFSEGFGVQRIEGRIGNVETHAHSGYLTALTLDNGTRVEGDLFLDCTGFAGLLIGKTLGVGTDDWSQWLFADSALAVQTESVGAPVPYTRSRADQAGWMWRIPLQHRVGNGIVYSSRYMDQDSAAQVLQRNLSGRALTQPRALRFTPNQRHRVWEKNCVALGLASGFLEPLESTNIHLIQRGIIRLMQTFPQVINDVDIAEYNRQAAAEITHIRDFVILHYHATDCRDTPFWRDCAAMDIPDTLRHRVELFRQSGRVFHQANELFAENSWVQVMLGQGITPKQHHPVADLMGDAELRHFLETIRTRVDAALARLPAHADFLRRYCPAPPLPEPATRLPADATLATGAR

SEQ ID NO: 86499 - protein, 508 aa, Paraglaciecola agarilytica
  misc_feature (1)..(508): tr|K6XWB3|K6XWB3_9ALTE Tryptophan halogenase OS=Paragla ciecola agarilytica NO2 OX=1125747 GN=GAGA_0320 PE=4 SV =1
MSKAVNKIVIVGGGTAGWLTAAIIAAQHKTDDNQGLQILLVESSDIPTVGVGEGTWPTMKNTLQQIGLKESDVFARCHAGFKQGGKFVDWVHGNGDFYYHPFTVPLGYGRIDLAPYVDNIENYAVESNFQHHVCEAGLAPRSMAEGEYKGQCNYAYHLDAGEFAEVLKEHCKNNLNVSQIIGTVASVNLTPEGAIGSILLSNQQQIDGDLFVDCTGFSSLLLGQALEVPFISADKVLFNDSALALHMPYESGTSPIASHTIATGQNAGWIWDIGLTHRRGVGHVYSSQYLSDDEAEANLRRYLGPTSDDIPVRKIGFKSGHRAQVWKQNCVAVGMSAGFVEPLEATAIMLVEISARFIADNIPPDASLTPIIAKRFNQQMAYRWSRIIDFLKLHYMLTKRPEPYWQAHTDPDSIPDSLKEDLALWKFRGPISADFDAAIELFPAASYQYVLYGMGFKPDFSRQAHLYNQQQNAQKVMLRNQQLTQQLLETLPPHREYIERWLSTQSMR

SEQ ID NO: 86500 - protein, 495 aa, Burkholderiales bacterium
  misc_feature (1)..(495): tr|A0A431JBF2|A0A431JBF2_9BURK Tryptophan 7-halogenase OS=Burkholderiales bacterium OX=1891238 GN=EKK52_17745 PE=4 SV=1
MTPPQQILIVGGGTAGWMAACLLRQRWAARGVAVTLVESPEIGTVGVGEGSTPYLRGFFATLGIAERDWMPACDATYKCGIRFPGWSTVPGYESYVHPFFNEADRELGNQFFTNACLRRRGQAADANPQDFFLAAELARQRRAPHDLTEGPATDYAYHFDASKLGAFLHTHAVGRGVRHVEGTVARVEQHENGDIAAVHLANGERLAADLFVDCSGFKGLLINETLGEPFLPFADNLFNDRAVAMPTALVESEDIPSETVSTALRHGWAWQIPLTSRYGNGYVYSSAFVSDDEAECELRAHLGAAAEGVEARRLRMRVGRVARHWSHNCVAIGLAQGFIEPLEATALMLIQLSVEQFIGALEAGDFGPRHREAYNRRVNEMFEGVRDYVVAHYRLNTRHDTDYWRANRAHPNVSDRLASLLDVWDRGGDFEAELERHGPALMYLRPSWYALFAGMGRFPAELRPAPGAVTAAQARGRLGRMAAAFFSHRGALMGR

SEQ ID NO: 86501 - protein, 520 aa, Novosphingobium sp.
  misc_feature (1)..(520): tr|A0A1E4N5A6|A0A1E4N5A6_9SPHN Tryptophan halogenase OS =Novosphingobium sp. SCN 63-17 OX=1660120 GN=ABT10_0729 0 PE=4 SV=1
MPDFDQQNASPGAIRSVVVAGGGTAGWMAATYLAARFEGRGIGITLVESHEIGTIGVGEATVPAIRDFFRMIGLHDFDVLRATGGTPKLGIDFAGWAGEGTRFFHPFGLYGLSSRGVPFHQYWLKLAQAGLGRDLGDYSLCTEMARNGAFMLPVDNPVNDLAVFDWAVHFDASRFAAMLRDLGQRRGVRLIDDVITRTVTDGETGHITSLETRGGLSIAGDLFIDCTGFRALLLGEVMGSSWVDWTDLLPCDRAVAMPCAASGGFDRPYTTSTARKAGWQWRIPLQHRVGNGYVYASAHISDDEAAATLRAHLEGEALAEPNLIRFGAGHRREFWRGNCIGVGLAAGFLEPLESTSITLIQTALEKLVDLFPDRACDPALADEFNRATTLEYERIRDFLILHYHANRRHGEPLWDQMRAAPLPEKLAHKLSLWRARGKLVRYEWEAFFDPSWLSMYAGFGIMPAAHDPMADYFTDAQVVEALDHMREAIRAAAAHARPARDFLARLAPEASRAAAPVGVG

SEQ ID NO: 86502 - protein, 513 aa, Burkholderiales bacterium
  misc_feature (1)..(513): tr|A0A3S0D0R7|A0A3S0D0R7_9BURK Tryptophan 7-halogenase OS=Burkholderiales bacterium OX=1891238 GN=EKK53_00175 PE=4 SV=1
MNTTKPFNRVVIAGGGTAGWMMAALMSKLLGKQLDIKLVESEEIGTVGVGEATIPALHTFHNLLGINEAEFMAATNATFKLGINFEGWKDIGQDYFHSFGSTGNDHWSAGFQHFWLKGRAQGIARTYTDYNPERVAAFANRFAHVQRGGLNYAYHLDAGRYAKFLRAMSEAHGVQRIEGKIGAVLMDGPQGRDGDITALQMQDGSRIDGDLFIDCTGFRSMLLGEALGVGYEDWSYWLPCDRAVAVQTASVREAWPYTRSIAHPFGWQWRIPLQHRVGNGLVYSSKEMSDADAPDVLKKNVEGELLTQPRVIKFLPGQRDKVWHRNCVAVGLASGFVEPLESTSIHLIQRAAIRLMQTFPSGGIQQADVDEFNAQSKRELEHIRDFIVLHYHVNERTDSALWKHVREMDILPSLRHRIELFRETARVFRPSDELFAENSWVQVMMGQGILPGRYHPVADLMGTPELTSFLGDIHTKVSRIVAGLPGHQAYVEQLCAPYRQASVKQLAAVPQGA

SEQ ID NO: 86503 - protein, 538 aa, Pseudomonas sp.
  misc_feature (1)..(538): tr|A0A2N8BHH7|A0A2N8BHH7_9PSED NAD(P)H-quinone dehydrog enase OS=Pseudomonas sp. FW305-25 OX=2070636 GN=C1Y31_0 6230 PE=4 SV=1
MNKPIKNIVIVGGGTAGWMAASYLVRALQQQANITLIESEAIPRIGVGEATIPSLQKVFFDFLGIPEREWMPQVNGAFKAAIKFVNWRKSPDSSRDDHFYHLFGNVPNCDGVPLTHYWLRKREQGFQQPMEYVCYPQAAALDGKLAPCLPDGTRQMSHAWHFDAHLVADFLKRWAVERGVKRVVDEVVDVHLNERGYISSLFTKEGRTLEADLFIDCSGMRGLLINQALKEPFIDMSDYLLCDSAVASAVPNDDAREGVEPYTSAIAMNSGWTWKIPMLGRFGSGYVFSSKFTSRDQATADFLNLWGLSDNQPLNQIKFRVGRNKRAWVNNCVSIGLSSCFLEPLESTGIYFIYAALYQLVKHFPDTSFDPRLSDAFNAEIVYMFDDCRDFVQAHYFTTSREDTPFWLANRHDLRLSDAIKEKVQRYKAGLPLTTTSFDDSTYYETFDYEFKNFWLNGNYYCIFAGLGMLPDRSLPLLQHRPESIEKAEAMFASIRREAERLRTSLPTNYDYLRSLRDGDAGRSRGQRGPTLAAQEIL

SEQ ID NO: 86504 - protein, 498 aa, Thalassomonas sp.
  misc_feature (1)..(498): tr|A0A553FLF1|A0A553FLF1_9GAMM Tryptophan 7-halogenase OS=Thalassomonas sp. M1454 OX=2594477 GN=FNN08_01380 PE =4 SV=1
MNTNAVKNVVIVGGGTAGWVSAALLNRVLGKVLNITLVESEEIGTVGVGEATIPPIITINNALGIAEKDFLQATQGTIKLGIEFENWKKQGDSYMHAFGGIGKNFPFCDFYHYWLKAKDLGETSDFWDFSLNYQAAKQNKFSKAPKIAGTNMPGLTYAYHFDASLYAQFLRKLSESSGVTRIEGMVNSVEVNDENGFIKSITLKDGNTIAGDLFIDCTGMAGLLIEKTLNTGFEDWSHWLPCNKAMAVPCEATKPISPFTRSIAHSAGWQWRIPLQHRTGNGIVYSSKHMSDEQAKAVLLNNLDGKPLGEPKVIPFRTGRRRKQWHKNVVSIGLSSGFLEPLESTSIHLIQTAAIRLIKLFPHQGINDIEVDEFNNQAKIEIERIRDFIILHYKVNERDDSKFWKECQRMDIPETLQHKIDLFKATGKLFREQDDLFTEIAWQQVLIGQGVIPEDQHALADSLSKEQLFELMKNLKILIDRSVEQMPSHADFLTQVSR

SEQ ID NO: 86505 - protein, 418 aa, Pedosphaera parvula
  misc_feature (1)..(418): tr|B9XGA7|B9XGA7_PEDPL Tryptophan halogenase OS=Pedosph aera parvula (strain Ellin514) OX=320771 GN=Cflav_PD398 6 PE=4 SV=1
METATYDALIIGGGPGGSAAATYLAKAGKRVLVLEKEHFPRFHIGESLLPYNQQIFREMGVSPALEAAGFVKKYGAQFHIGNGSKSIGFVFRQGKMTREPEAMQVERAAFDHLLMKHARSSGAEIREGWTVAKYSSDCCGVSIDARDQSGQSQIFKAKFLIDASGRGNVTGNQDGQRQFHPKLKKVAVFGHFTGVKVDPGERGGDTVIVRLENKWFWLIPISREKTSVGCVMDQEEFAAAKQSPAEIFNRIVQSSQPMVQRMSDAKSAGNFQTTTDFSYTNKSFTGQRLIRIGDAAGFMDPIFSAGVYLAMFSGKLAAQLVIKSLEGHHDGSRLMKAYEKRVRSSMRFYWEMVENFYTKPFMDIFFEPREKFNLVAAVNAALAGELEGGWKMQWRMRLFFFIVRLQAKYPLVPRITWA

SEQ ID NO: 86506 - protein, 576 aa, Pseudomonas sp.
  misc_feature (1)..(576): tr|A0A2N8BHG3|A0A2N8BHG3_9PSED N-methyl-L-tryptophan ox idase OS=Pseudomonas sp. FW305-25 OX=2070636 GN=C1Y31_0 6240 PE=4 SV=1
MTQKSPANGHDSNHFDVIILGSGMSGTQMGAILAKQQFRVLIIEESSHPRFTIGESSIPETSLMNRIIADRYGIPELDHITSFYSTQRYVASSTGIKRNFGFVFHKPGQEHNPKEFTQCVIPELPWGPESHYYRQDVDAYLLQAAIKYGCTVRQKTSVTEYHADKDGVAVTTAQGDRFTGRYMIDCGGPRAPLATKFGLREEPCRFKTHSRSLYTHMLGVKPFDDIFKVKGQRWRWHEGTLHHMFTGGWLWVIPFNNHPRSTNNLVSVGLQLDPRVYPKTDICAQQEFDEFLARFPSIAAQFRDAVPVRDWVKTDRLQFSSNACVGDRYCLMLHANGFIDPLFSRGLENTAVTIHALAARLIKALRDDDFSPERFEYIERLQQKLLDHNDDFVSCCYTAFSDFRLWDAFHRLWAVGTILGQFRLVQAHARFRASRDEGDLDHLDNDPPYLGYLCADMEEYYQLFNDAKAEVEAVSAGRKPAEEAAARIHALIDERDFAKPMFGFGYCITGDKPQLNNSKYSLVPAMKLMHWTQTSAPAEVKKYFDYNPMFALLKAYITTRIGLALKSSRPTTTEKR

SEQ ID NO: 86507 - protein, 500 aa, Pseudoalteromonas luteoviolacea
  misc_feature (1)..(500): tr|A0A166UJP9|A0A166UJP9_9GAMM Tryptophan halogenase OS =Pseudoalteromonas luteoviolacea DSM 6061 OX=1365250 GN =N475_04975 PE=4 SV=1
MSSRKIVILGGGTAGWMAANLIAKSWCDKDIHVGVVESPDIGIIGVGEGSTPQFKAFMDFIEVPESQWMPKCNATYKNGIRFVNWSTRAGFEQYSHPFPAQPDDYSAPAFFHNSFVRRKGIDLEGHPDPFFLATYLAEHAKAPIAAESFPFEINYGYHFDSGKLGMLLAEKAREFGVEHIQACVQDVRKNTDGTIAALICDKSREVCGDIFIDCSGFSSLLMQQHLQVGFESFENNLFNDSAVVLPTEQGESIASETVSVARKYGWSWHIPLTNRIGNGYVYSSKYCNKDQAETELRAALGLLDSEVEARHLSMKVGQVKEHWHKNCVAIGLSQGFIEPLEATALHIVQETVQSFIECYQEGEFTCQKQGKHNQMMSQRYQAIRDYIVAHYRVNSRTDTNYWRDNANNNSISRSLFNVLNVWVQGKNLSDELDRQDIDKYYPSVSWHCLLAGYGIYPEQHQLVAGNESANVHDINKIREYIRRCGLNFPDHSVQLARSSV

SEQ ID NO: 86508 - protein, 516 aa, Thalassomonas sp.
  misc_feature (1)..(516): tr|A0A553F999|A0A553F999_9GAMM Tryptophan 7-halogenase OS=Thalassomonas sp. M1454 OX=2594477 GN=FNN08_12800 PE =4 SV=1
MDRPIKKIVIVGGGSAGWLSAGIIAAEHQTEGEHGIEITLIESPDVATIGVGEGSWPSMRQTLKAIGISETEFLLQCDATFKQASKFDNWISGANDSYFHPFSLPNGFFEANIAEFWQAHSQQVTFADATTAQSHLCKQGLAPKQITSPEYAFACNYGYHLDAGKFSQFLQKHCCEKLGVNHVLDHVVNINNHENGDIASVSTKQNGDIAGDLFIDCTGFKSLLLGEHYNIDFISQKHVLFNDTALAVHVPYPEENSPIASHTISTAQTSGWIWDIGLPSRRGVGHVYSSSHISDDEAEQQLRSYIAPTMCSDHNLTEIRKISINPGYRSKFWHKNCVAIGMSSGFIEPLEASALAMIELSAKMVAEQLPANRQVMDITAKRYNEKFSYRWQRIIEFLKLHYVLSNRTEPYWQDNKHSESIPEHLAELLTLWKYQTPYSYDTHHTEELFPAASFQYILYGMGFKTQLPERAKREDKSLIANKIFNDNIAHTHKLINALSTNRELLNKIKQYGLSKV

SEQ ID NO: 86509 - protein, 507 aa, Pseudoalteromonas luteoviolacea
  misc_feature (1)..(507): tr|A0A166V4N0|A0A166V4N0_9GAMM Uncharacterized protein OS=Pseudoalteromonas luteoviolacea DSM 6061 OX=1365250 GN=N475_04445 PE=4 SV=1
MLVNDYVVVGGGTAGWLSACLLASATSEHAAKTVTLIESPDIPIIGVGEGTVPSIRDTLKRIGISESDLFNHCDGSFKQSIKFVNWMDKKKHGENNFYHHLFDYPFPFGDNLCQYWHNQSTSSFAEIVSIQQYLAESMKAPKGICDPEFAGVSDYAYHFDAHKFAQLLKRHAIEKLGVTYVSDTVVDVTHSHDGSIDQLVLKEQGSMGFDFYIDCSGFSSYLLGGKLDVPFVDKQDVIFSNKALTVQVPELEASIPPYTISTAHQAGWIWDIALSNRRGVGFVYCDAYLDKDTAFHKLQTYVGRDLNDFNVRDLDMKIGFRERAWEKNCIAIGLSQGFVEPLEATAILLSDFSANLFCNKLPETTADIAVLSKRFNQRVSYAWQSVIDFVKLHYCISDRQDSEFWQDNRASNSIPDSLKERLELWSQTYPTKDDFFSKFEVFDIENYLYVLCGMNFDFNRYGLTEKKTKEFAAQHQQVFATAEQYKRQLLEQRALLEKVKVNNFSKS

SEQ ID NO: 86510 - protein, 510 aa, Burkholderiales bacterium
  misc_feature (1)..(510): tr|A0A431KZH9|A0A431KZH9_9BURK Tryptophan 7-halogenase OS=Burkholderiales bacterium OX=1891238 GN=EKK53_21370 PE=4 SV=1
MKHICVVGGGSAGWMTALMLATTAYGARLKVTLVESPHVPIIGVGEGSTPWLRNFFDVLGIEESEWMPACNATYKSGITFEGWSTKPGFERYFHPFVSMLDNLTMNAFVDNVHARLEGADVPAHPDRFFVSAALARQARGPRAREDFPFDVWYGYHFDATLLGQFLGRKAVERGVQHLQRHVGEVLRTPQGDIAGLRLDGDEVLEADFFVDCSGFASLLIGQTLQTPFIPYAENLFNDAAIAMPTPLAGPIESQTVSTALRHGWAWKIPLTQRYGNGYVYSSAHCSADEAETELRRHLGLLDADVPARHLKMRVGRMSKIWNRNCVAVGLSQGFIEPLEATALLFVQRTAAMLVEALEQGQLNEAAQAQFNETMRVRFENTRDYIVAHYKTNSRTDTDYWRQNAENMHLSESLQGVLMTWLSRKPLSAALRAGRFGQGYPTVSWYALLAGMGIFPDPQDLEPPSAAQGRHDLASIDDFVQRSARNFPDHRELLAHIPPRAGDKTLQTYLW

SEQ ID NO: 86511 - protein, 494 aa, Paraglaciecola agarilytica
  misc_feature (1)..(494): tr|K6Y684|K6Y684_9ALTE FADH2 O2-dependent halogenase I OS=Paraglaciecola agarilytica NO2 OX=1125747 GN=prnA PE =4 SV=1
MNSEKVKNVVIAGGGTAGWMAAASLSKLLGKSLNITLVESDEIGTVGVGEATIPPIRTLHKLLNIDEQAFMRATNSTFKLGIEFSHWGQKNDSYIHSFGVTGKECWAGEFHHFWLRGKELGINVPFGDYCYELQASKQGKFAFSANSPMNFAYHLDATLYAQFLRDFCADVVTRIEGKIATVNKHTNNGFIRSLTLESGQEVEGDFFIDCTGFKGLLIEGALHTGYEDWSHWLPCDSAVAVQTQSTSDPLPYTRATAHDFGWQWRIPLQNRVGNGMVFCSRYASDEQAKQALLANLEGDPITEPRVIKFKTGRRRKGWNKNCVALGLASGFVEPLESTSIHLIMTGIVRLMRLFPFDGVRQSGIDEYNEKLTSELHSIRDFIVLHYKVTQRDDSDFWRHCQSMEVPDTLAHKIHLFKETGRVFLDDGDIFRVDSWTQVMLGQGLEPKQYHRIVNEMSEEELTRFLAGLRSAIEQRVNQLPSHQQFITRYCNASA

SEQ ID NO: 86512 - protein, 528 aa, Chitinophaga flava
  misc_feature (1)..(528): tr|A0A365XXE1|A0A365XXE1_9BACT Tryptophan halogenase OS =Chitinophaga flava OX=2259036 GN=DF182_28220 PE=4 SV=1
MNNNSINNIVIVGGGTSGWMTAAYLNEVFGESIKITVVESPIIGTIGVGEATFSTIKLFFDFLKLDERDWMPHCSGSYKLAIKFVDWNAERKDFYHPFQRHEIADGFHIGEWWMKHQGDLDAYDRACFTTAALCDNKRSPRYFDGTVYDRKVENYFKNNVAFQKNKLSDLRIQFPYGYHFNANQLAVFLRDMATKKGVVHIGDDVTEVKQKEDGSILSVITKENGEIEGDLFIDCTGFKGLLINKTLKEPFIPFAESLLCDSAVAIQVPRDIVRDGMNPYTTATALKSGWVWNIPLYGRDGTGYVYSSAFISSEAAEKEFREHLGPAADNCSALHIKMRIGRNRNAWVKNCVAIGLSNAFVEPLESTGIFFIQHGIEELVSAFPDKSFNPALMKQYNQAVGDCVDGVRDFLVLHYFASSRYDTPFWKATKHDLKLPGDLEERIKQWKSQLPNSRNINQKYHGFESYSYAVMLQGLGYQPEYCLPVIQHMDSTNALAVFREIKDRSELLCNTLPSLYEYLTSWQEQALM

SEQ ID NO: 86513 - protein, 602 aa, Microcystis sp.
  misc_feature (1)..(602): tr|A0A551YN16|A0A551YN16_9CHRO Tryptophan halogenase OS =Microcystis sp. M_QC_C_20170808_M3Col OX=2486216 GN=EW V84_22695 PE=4 SV=1
MNPTATKSLEYDVIIMGAGFAGLCQARHLMLNIPGIRVAMIDPRPMERTDKDLKIGESLIEVAALFLCKELGLHDYLIENHTPKSGLNFHWPKDTSKTASLDDYYHVWANRQTPVGSFHLQRAKFEQDLLAMNCQMGADFYNGRVKDVDLTQGDDLKTVYAKVGEENITLQAKHVIDAAGRNFIIGRKTDNVLSGPENLLGVNNGSAWLRVKNIDRTIFHSGYHPEGASTSHYYATNHYFGQGHWLWMIPIDKKSMELSIGIIHHHDVIPAKSINNLEKFSSFLNANHTILSRLIDSGEVVDFHYWPKIAHKSKVLFSSDNWYIIGDAAHIFDAFYSYGTTMIAFEVESVTEIIRAKLAGEAAAEQKRSAYNDFNLAYARTVNCLYRDHAYQLGHASVMSWRIYFEYMWWFGVHIPTYIGKWHLDLNFIPRYVKIANGNVDGIFADLCKEFHQLVEEGANIGLMDAYRADQLWGNYGTLKHFDDFLENTKFEPRRCNVFASMKAVYFYIAIWYALFQWKAFGLAGWLTPRHWYYFGRMLSLSVQATIAEVIYKWKTRGIPDNTQMEKMREEFKSYHYQPQDKYSFPVEEVANKAVKIESFAS

SEQ ID NO: 86514 - protein, 506 aa, Novosphingobium sp.
  misc_feature (1)..(506): tr|A0A1E4MYR7|A0A1E4MYR7_9SPHN Tryptophan halogenase OS =Novosphingobium sp. SCN 63-17 OX=1660120 GN=ABT10_1797 0 PE=4 SV=1
MSQRPQQRIVIVGGGTAGWMTAAALGHFLDDGFTVELVESDAIGTIGVGEATIPHINVFNKALGIDEKAFMRATQATYKLGIAFDGWLHPEHSYIHAFGDVGRDVGLCAFQHFWSRAKRLGFAKETGAYTLNTIAARAGRMHDGAPLTAQTVPAMPHAFHFDAGLYAAFLRDHAEARGVKRTEGMIADVRRHGLTGDVTVLRLADGREIAGDLFIDCSGQRGLLIGDALGGTYEDWRRWLPCDRAMAVQSPRLADLVPYTRAIAHPVGWQWRIPLQHRTGNGRVYCSDFITDDAVHDELVSSLEGGAITAPRPIRFTTGRRREAWKANVIAIGLSSGFLEPLESTSIHLIQTGIARLLKFLPGGPVAQVTRDAFNAQFAFEMQRIRDFIILHYWANRREEPFWQACRAVDLPDSLRAKIDLFAASGQIFREGEELFSEVGWFQVMAAQGIIPAASHAMAEAIPEADLRDYLELISALYTREVGQYPSHADYIARHCAAPMAQKVMA

SEQ ID NO: 86515 - protein, 231 aa, Burkholderiales bacterium
  misc_feature (1)..(231): tr|A0A4Q3UEJ8|A0A4Q3UEJ8_9BURK Tryptophan 7-halogenase (Fragment) OS=Burkholderiales bacterium OX=1891238 GN=E ON93_22915 PE=4 SV=1
MGTGYVYSSAFQSEESAEMELRRALACAGDPPARHLKFRVGRPETAWNRNVVAVGLAGGFIEPLESTSIHMIELALKALVRYFPLSGINPAARDRFNNGMNERYSELRDFIVMHYCLSTRRDTPFWREVTQASHVPESLKARLELWRDRHPSAEDFAAERYLFSQESWQAILYGMEAADPRAIANADHWLGDVDGLVQQVDNAVEAAKLDLPSHMIWLQGLRSIAVNHPGW

SEQ ID NO: 86516 - protein, 505 aa, Xanthomonas oryzae; identical to SEQ ID NO: 82966
  misc_feature (1)..(505): tr|Q5H3F4|Q5H3F4_XANOR Tryptophan halogenase OS=Xanthom onas oryzae pv. oryzae (strain KACC10331 / KXO85) OX=29 1331 GN=prnA PE=4 SV=1

SEQ ID NO: 86517 - protein, 505 aa, Xanthomonas translucens
  misc_feature (1)..(505): tr|A0A0K2ZWF2|A0A0K2ZWF2_XANCT Tryptophan halogenase OS =Xanthomonas translucens pv. arrhenatheri LMG 727 OX=11 95923 GN=XTALMG727_2691 PE=4 SV=1
MIAAPLRNLVIVGGGTAGWMAAAALARVLGPDYRITLIESEQIGIVGVGEATVPHIKAFNNLLGINEAEFVRQTQGSFKLGIEFVDWHRQGTSYIHGFGTEIGHSLGLLPFQQYWFKQALAGKAKPLGAYTLNTVAARRGKFMTSASDAPPNSPLGNIAYAYHFDASLYAAFLRRFSEQRGVTRREGIVEQVQLHPESGDVLSVRLASGDTIAGDLFIDCSGFRGLLIEQALHTGYHDFTHWLPCDRALAVPCAKVGPPTPYTRATARAAGWQWRIPLQHRTGNGYVYSSAHISDDEAAATLLANLDGAALADPRPLRFVTGRRKQVWNRNVVALGLASGFMEPLESTSIHLIQSGISKLLELFPREGISPVLVQRYNDRIAFEFDRIRDFLVLHYTATERDDSDFWRQCRAMAITPELQATLDLFGDSGRFYRNGDEMFAEISWVQVMAGQGILPRAYHPLVDQVPAADIERFVASIEQTIGHCVDAMPPHQAFIDRYCAAAPR

SEQ ID NO: 86518 - protein, 514 aa, Novosphingobium sp.
  misc_feature (1)..(514): tr|A0A1E4N4W6|A0A1E4N4W6_9SPHN Tryptophan halogenase OS =Novosphingobium sp. SCN 63-17 OX=1660120 GN=ABT10_0662 0 PE=4 SV=1
MVHAVRNVVIVGGGTAGWLTAAIIAARHQGRMPRDFTVTLVESPDVPIIGVGEGTWPTMRQTLKKVGVSETDFFRECDAAFKQGALFAKWTTGAPDDAYYHPLVLPQRFGQMNLVPHWLAAESNESFCDAVCPQGQVCDHGLAPKTVSTAEYEALTNYAYHLDAGKFAPFMQRHCTEKLGVRYVPADVHDVIQHENGDIKSIVTMQAGEIEGDLFIDCTGTHGLLLDRTLGVGFRDCSHILFCDTALAVQVPYPAPDTPIATHTISTAQSAGWIWDIGLPTRRGVGHVFSSRHISDDEAEAELRAYLGPSAKDLPARKIRIRAGHRETFWKRNCVAVGMAAGFLEPLEASAIMLIELSAKLIAEQMPANREVMDIVADRFNEKTHYRWGRIIDFLKLHYVLSQRRDTAFWRDNMDPAGIPQRLQDLLHLWRYQPPWFHDEFDRVDEVFPPASYQYVLYGMGFRSEVERDHLRPEAQEAQRALRENREMAQKLISRLPRHRDLIEKIAQYGLQPV

SEQ ID NO: 86519 - protein, 504 aa, Comamonadaceae bacterium
  misc_feature (1)..(504): tr|A0A257G1S4|A0A257G1S4_9BURK Tryptophan halogenase OS =Comamonadaceae bacterium PBBC2 OX=2015581 GN=CFE39_037 55 PE=4 SV=1
MNNTEQTDGDRKPVRRIVIAGGGTAGWMVAALMSKTLGKSLDIKLVESDEIGTVGVGEATIPTLLTFHELLEVNEQEFMVATQATFKLGISFENWRNVNEDYVHSFGTTGTDHWTAGFQHFWRKGRERNLAGDYGDYCLELKAALANRFAHLPRNGMNYAFHLDATLYAKFLRKYSEGFGVKRIEGKIVEVKTDASSGNIQSIKLDSGANIEGDLFIDCTGFRGLLIGETLKVEYQDWSHWLFNDSAAAVQTESVGAALPYTRSIAHTAGWQWRIPLQHRVGNGLVYSSRYMDDEQAKQTLMGNLQGQALMQPRVLKFRPGQREKTWHKNCVAIGLSSGFIEPLESTSIHLIQRGIIRLMRLFPVRGICQADVNEYNQQTLDEIEHIRDFVVLHYKVTNRADSPYWNACRTMEVPASLQHRIDLFRETGRVFRIASELFAENSWIQVMLGQGIMPKEHHQSADLMGDAELSRFLGGIKSTVDRTVAQLPSHQTYVQQYCGAAKV

SEQ ID NO: 86520 - protein, 530 aa, Chitinophaga flava
  misc_feature (1)..(530): tr|A0A365XW80|A0A365XW80_9BACT Tryptophan halogenase OS =Chitinophaga flava OX=2259036 GN=DF182_26180 PE=4 SV=1
MSNKVSNITIVGGGTAGWMTASYLNKVFGQNVDITLVESPNISTVGVGEATFSTIKLFFDFLELEEHDWMPHCNGSYKMAIKFVDWNAEKKHFYHPFQRYEIVDGFHIGEWWLKHKDQLDAFDYSSFMVSALCDNKRAPRFLDGRVFDTKVQDLFTPDRAFKKNMLADLKIQYPYAYHFNAALLANFLRELAIGKGVRHIADDVVGVSQAENGFISGITTKEHGEIEGDLFIDCTGFKGMLINKVLNEQFIPFAESLLCDTALAMQVPRDIEKDGMNPFTSATALSSGWVWNIPLYGRDGTGYVFSSAFITPEEAEKEFRKHVGKASDNCNASLIKMRIGRNHNAWVKNCVAIGLANAFVEPLESTGIFFIQQGIEELVANFPDKQCSPELQKRYNKTIGECIDGVRDFLTLHYCASSRYDTPFWKATKHDLKLSDDLKERQAEWKVRLPNPRNINPNYHGFESYSYAVMLQGLGYSPENCLPVLQHMDSTRALEAFRRIRERTNELIRTLPSQYEYLTSVRVGQNAGVM

SEQ ID NO: 86521 - protein, 521 aa, Xanthomonas vesicatoria
  misc_feature (1)..(521): tr|A0A1L5QT13|A0A1L5QT13_9XANT Tryptophan halogenase OS =Xanthomonas vesicatoria OX=56460 GN=BI313_13935 PE=4 S V=1
MPDTTPSNPQQRPVRRVVIAGGGTAGWMAAAALSKLLGRQLQITLVESDEIGTVGVGEATIPSLVTFHRLLEIDEAAFMAATQATFKLGIGFEHWRDVDKHYIHSFGHTGTDHWSAGFHHFWLKGRQRGVARDFGDYCLELRAAQEGRFAHLPNGGMNYAYHLDAGLYARFLRRFGEGFGVQRLEGRIGEVQTDPDSGYLTALTLQDGTRVEGDLFIDCTGFAGLLIGKTLGVGSEDWSHWLFADSALAVQTESVGPPVTYTRARADQSGWMWRIPLQHRVGNGIVYSSRYTDQDSARAVLERNLQGRALTEPRALRFTPNQRHRVWEKNCVALGLASGFLEPIESTNIHLIQRGIVRLLQTFPQVINAVDIAEYNRQAADEIAHIRDFVILHYHATDRRDTPFWRDCAAMDIPDSLRHRMELFRQSGRVFHQGNELFAENSWVQVMLGQGITPQQHHPVADLMGDAELAHFLDSIRQRVDATVATLPPHANFLRHHCPAPPPPAPASRVPFDAALATPAG

SEQ ID NO: 86522 - protein, 490 aa, Sphingomonas aurantiaca
  misc_feature (1)..(490): tr|A0A2T5GIH8|A0A2T5GIH8_9SPHN Tryptophan halogenase OS =Sphingomonas aurantiaca OX=185949 GN=C8J26_3452 PE=4 S V=1
MTARPPIRSIAVLGAGIVGLSAAIAFARVLPGLAVTVIETPDDPAALTDHLAGTLPSIAEFHDRIGLRERDLLAAGATHRLGTRLSDWRADGVPLVLAHGERGGAIAPGTFHQHWLNARRAGKTAAFDAFSVPATLAAADRFVHPSDDPRSPISGFGYAWRLDPPRYRDLLRALARHIGIIPVPGVYAGVERGSDGHVATLLLADGRCVAADLYLDCSGPAAPLRSALDTQWDDWRRWLPVDRLLLGAAPARVATPTDDRIAVPAGWRFVQPLRDRTLVGLGYAADQTSDSSARRVLPAGDTVVPLALGVRAEPWRHNVLALGDAAVVLDPLADANLHLAQSAILRAIDLLPGRDCAPTELAEYNQRSHRQAARVRDFQAAHYLPTGRTRGPFWKSIARLPRPDSLAHTLEQFAHRGRLPFYEDESFDKDDWHGLLLGLGMIPRIADPIASASPPELIAATLKQLADATAALPARLPPYPAYLAQLERGR

SEQ ID NO: 86523 - protein, 497 aa, Pseudoalteromonas sp.
  misc_feature (1)..(497): tr|A0A3Q8WXF8|A0A3Q8WXF8_9GAMM Tryptophan 7-halogenase OS=Pseudoalteromonas sp. Xi13 OX=2490635 GN=EJ103_07200 PE=4 SV=1
MKPIEHVVIAGGGTAGWITAALLNKVLGKVIKITLIESSTIGTIGVGEATIPPIIQLNNALGINEQDFINATNASIKLGIEFENWKTPSHSYMHAFGSFGKDFPFCDFYNFWVKGHISGAEESLWDFSLNYQAAKQHKFAPLNTLPNTQLPGLSYAYHFDATLYAEFLKNLATSRGVEHIDAKIEQVEQCPLSGDIKSLILDNTQQINGDLFIDATGQRALLIEQTLNTGFVDWSHYLPCDSAVAVQSQGTSELKPYTRSIAHSAGWQWQIPLQSRIGNGLVYCSRYLTDDAATQLLIDNLPAEPMTEPRVIKFKTGRRLKQWHKNVVSVGLASGFLEPLESTSIHLIQSAVTRLIKLFPHNGISDALVTEFNKQSVIEIEHIRDFIILHYTLTAREDSPFWRQCKQMDIPDSLAHKLKLFKQTGKVVRENDELFAEVAWQQVFIGQGLIPEDYNSIVDSLSSEQLNDLFSTLKTLITSTVDQLPTHKDFLAKIKKA

SEQ ID NO: 86524 - protein, 498 aa, Xanthomonas vesicatoria
  misc_feature (1)..(498): tr|A0A1L5QQQ3|A0A1L5QQQ3_9XANT Tryptophan halogenase OS =Xanthomonas vesicatoria OX=56460 GN=BI313_08475 PE=4 S V=1
MNQARIRKVVIAGGGTAGWIAACALSHQFRDLLDITLVESDQIATVGVGESTVPPIRTFHRFLNIDEQEFLRAAAGTFKLSISFEHWRRQGERYIHPFGITGQSTLVCAFHHLWLESQRRGMPGAFADYCLETVASRADRFALPREPAVNYAYHLDAALYARFLRTRSEAHGVKRVEGKIQQVTLQPDSGDVAALVLEDGQVLEGDLFIDCTGFRGLLIEQTLHTGYEDWSHWLPCDRAVAVQTEAVGPPVPYTRAIAHEAGWRWHIPLQHRVGNGLVFSSQHMSDDEAHAKLLRDTGATPVKDPWLVPFRTGRRRKAWNKNVVSLGLASGFIEPLESTSIHLTIAAVVRLITLFPANGIAPSQVDIFNDISRTEMEHVRDFVTLHYHATQRDEPLWQQCRDMELPESLRLRLRAWRERAHAWQGTDELFRVDSWTHVLLGQGIVPQQHHPLAAALSDADLRRLLDGIAQPLQRAVEQMPSQQEFISAYCKMDARAWG

SEQ ID NO: 86525 - protein, 509 aa, Sphingomonas aurantiaca
  misc_feature (1)..(509): tr|A0A2T5GK34|A0A2T5GK34_9SPHN Tryptophan halogenase OS =Sphingomonas aurantiaca OX=185949 GN=C8J26_2521 PE=4 S V=1
MIDGLGQHIVILGGGTAGWMTACLIAHRWRARGMRVTLVESPEIGIVGVGEGSTPQLEHFFDTLGIAEDAWMPACDATYKLGIGFEGWSDRAGYERYFHPFPTALDGHTAPQFFYNARARRTGRDVEAHPDRFLLPARLAAAHCAPQPAESFPFEVSYGYHFDAYKVGAFLAGHATGTLGVDHLQRRIANVERIPTGQITALIDTDGGRISGDFFVDASGFRSTIFAALDVPFVSYADALFNDRAVVMPTAHAPGAPIPSQTRATALSAGWAWHIPLTSRNGNGYVYSSRHLTETQAEAELRAHVGTEAGEARHLKMRVGRVRDSWSHNALAVGLAQGFLEPLEATALHFVIATVEAFLDGVDAGGATDAVRNAFNARIAARYDGVRDYIVAHYRLNQRHDDPTGYWAQARGIEVLSDDLKMLMSAWFTGADMVAAIDRAGLARYYSAISWHCLFAGYGTFPEPARLIPPGADIDPVDMTRIDDFLTRCAMNFGSHASRLRAADLKDIA

SEQ ID NO: 86526 - protein, 520 aa, Xanthomonas campestris; identical to SEQ ID NO: 85115
  misc_feature (1)..(520): tr|A0A0H2XDT9|A0A0H2XDT9_XANC8 Tryptophan halogenase OS =Xanthomonas campestris pv. campestris (strain 8004) OX =314565 GN=XC_4056 PE=4 SV=1

SEQ ID NO: 86527 - protein, 515 aa, Burkholderiales bacterium
  misc_feature (1)..(515): tr|A0A3S0C0G3|A0A3S0C0G3_9BURK Tryptophan 7-halogenase OS=Burkholderiales bacterium OX=1891238 GN=EKK52_03900 PE=4 SV=1
MDDRIRDVVVLGGGSAGWLVAGLLAAEHGDSLRITLVESTDVPTIGVGEGTWPSMRDTLRRIGLSEPEFIRRCQVSFKQGSRFDGWARGAAGDAGDRYYHPFMLPAGWGEADLVPAWLATQPDRPFADVVSPSVQVCEAGCAPKQVQTPAYGAVANYAYHFDAGLFGEMLREHAVRQLGVRHVVDHVDAVLSHDHGERAGDLAALRTRAHGDLAADLFIDCSGLRARLIGEHFGVPLKSEREVLFNDAALAVQVPYARPDAPLATCTIATAWAQGWCWDIGLPHRRGVGCVFSRAHASEDEAQAALQAYLDATGAPAERPTPRLIRYDPGYRRQFWVRNCLAIGLSSGFIEPLEASALALVELAAQRLCDELPMTPASMAAVARRYNDDFAYRWARVIDFLKLHYALTQRDDSAYWRAHRDPTTWPQRLRELLPQWRLRPPARHDFGRIDEVFPAASYQYVLYGMGFRPDTQPLPDAKLAAARACFDDAARQARRFVPGLPGHRALIDHIQRAAS

SEQ ID NO: 86528 - protein, 496 aa, Limnobaculum parvum
  misc_feature (1)..(496): tr|A0A2Y9TXM5|A0A2Y9TXM5_9ENTR Tryptophan 7-halogenase OS=Limnobaculum parvum OX=2172103 GN=HYN51_07845 PE=4 S V=1
MLNLRTPKRIVILGGGTAGWFAALTLRRIFSANVEVRVIESSQIGIVGVGEGGLLNIHDALLRNQIDIKEFMAETDATFKWGFSYEGWRTGKADDKFYHLFTSARGEGAQWVEGGFLPYYSALINQGVPLESWIRGFQLIKNNASMEEAIKAVDEDRTDLVTSFHFDSYKIAKYMKKVALSRGVVHEDVLVKDFVRNEEGLVTKLITEKGEVELDFLIDSSGLTRQVMAKMPGARWQTFKDYLLMDSAIPFYMPHPNKNPMLITRAITMDAGWMWQIPLSTRVGAGYVFSSKHKSEADAIDEIQKYLGFEIEPHKTIRFDPGCYEQVWIKNVMSLGLSSGFVEPLEATSIGQMIEQLRNFERVLVSSQGIISENSIREYNEANLASWHGIRDFLRMHYDCTRNDTPLWQEVNKSPMTDRYAEFRKCIQERTPHLIDVENYAINGWGGIFHPVNWMSVAVPLGLVPVSAAGMDLLWLSKDKQQKALDFVKKVQEKGW

SEQ ID NO: 86529 - protein, 535 aa, Gammaproteobacteria bacterium
  misc_feature (1)..(535): tr|A0A1G0GVT6|A0A1G0GVT6_9GAMM Uncharacterized protein OS=Gammaproteobacteria bacterium RIFCSPHIGHO2_12_FULL_4 0_19 OX=1798281 GN=A3F13_08800 PE=4 SV=1
MQNTQTNIKEIVIIGGGTAGWMAATYIAQSLNFKVKITVIESADHGPIGVGEATIPTIKTEFFDRLGIPEEEWMPKLGGTYKLGIKYANWRKAAENGGEHYYHVFGEIPLIDEVPLSSVWIKNYLEGKTKKPFAESCFSSSVAFENYLSPRLMDGTKVQHYAYHFDALMLAKFLKEWAIARGIHHVVDKLTTAEQDEHGQVTCVVGESGKKYHADLFIDCSGFSGFLIDKLYQEPIVSFSDCLLTDRAIAINLPENPERDGIRSYTTATALKAGWVWEIPLYSRSGNGYVYSSQFTTDQAAQDELRKHFGKRADHMDMRSIKFQSRRHQRSWIKNCVSIGLASSFLEPLESSTIYFIYASLYQLIKCFPQKNIDPVLRDKFNHKINFMVDDNKDFIAMHFKTAQREDTDFWKVNKYETKTPDSLDLILRKHKSGLPIKRPTVDNQNIYPTFKSLFQNFWTETNYQCILCGVGYLPNNPYPILNYRDDIMAAGDVLFKNIEKRANELKKLLPTHYQYLKQQVESAKKESEATGIVA

SEQ ID NO: 86530 - protein, 472 aa, Planctomycetes bacterium
  misc_feature (1)..(472): tr|A0A5C6FG19|A0A5C6FG19_9BACT Tryptophan halogenase OS =Planctomycetes bacterium Poly51 OX=2528015 GN=Poly51_0 6530 PE=4 SV=1
MNRIDVAVIGSGFAGSIMARVLASRGLTVAMIDPHLHPRFAVGESSTPIADSILRRLGTTYGLDDLVSLSTWGGWIWDHPDLTCGRKRGFSYFAHEKGMPFSEASLGEQSLLAAASPSDDVADTHWYRADVDLHLCQQATSEGVALAAGFSVVGIERDGNGWKLELQSSDETGERLSMRVDWVIDASGRAAVLAKAFAARDMADRMRTRTHSTFAHLHGVSRWADALDSLGIDGKDPFDCDDAAQHHLLGNGWLWMLRFGNGVTSVGYTAPLESSLDWTGHPSIDAMMKAAWLVHPGIGWHQTERLQRWYDPLCAERAIMLPTAALTMDPMHSTGIAHALAGIERAACVILDGHSADDYAANFHRETMLLDRMISTAYHVMDDFPRFAAACMVYFAGAIACEERLQAGETPAAMWSADDSAFVSAVEVACAAIENREIADFESRVREAIAPWNTAGLMDASVNNRYAYTATK

SEQ ID NO: 86531 - protein, 508 aa, Verrucomicrobiae bacterium
  misc_feature (1)..(508): tr|A0A2A2QFW7|A0A2A2QFW7_9BACT Uncharacterized protein OS=Verrucomicrobiae bacterium Tous-C4TDCM OX=1982332 GN =B9S38_09275 PE=4 SV=1
MVSFTENDAGAAVPEVRRVLILGGGSAGLLAALTLKRLHPALDVQMVRSSEIGVIGVGEGTTAVFPAHLFQTLGISKEEFYREAQPTWKQGIRFLWGPREEFLYDFEFQYDRQFPGMPKPTGYYATGDCTDLSQATALMNRQKAFTTGPLGKPLIKGQYAFHIENHRLVECLEAIATRSGVIITDDTLDHAEMADGQVAALHFKSGERRTADLYVDASGFRAELIGKALDEPFESFSDALFCDRAVIGGWERTDEPILPYTTAETMNHGWCWQIEHETFINRGYVYSSSFVSDDDALAEFFEKNPKVTTKPRVVKFRSGRYRRNWVGNVVAVGNASGFVEPLEATALAQTIYECRWLAESLRVTGCRPDETNVGFYNRIIGIAWDEIRDFLAFHYKFNTRLDTPFWKHCREATSLGNYEAVYQLYREVGPNPVLLFHALPERPNIYGVEGFLAMLVGMQVPYERPHDAAPQERELFDRQRAQIASAAKGGVTVKQALDAIRKPSWQWT

SEQ ID NO: 86532 - protein, 388 aa, Corallococcus sp.
  misc_feature (1)..(388): tr|A0A3A8ICK8|A0A3A8ICK8_9DELT Tryptophan halogenase OS =Corallococcus sp. AB043A OX=2316736 GN=D7W79_06115 PE= 4 SV=1
MDGTRYDVAVLGGGPAGAGLALALRRSTDLRVALFERSTSERFHLGETLPPDSRRLLAQLGVWDAFARQGHLRSMGSCSRWGTSSLAYNDHLRSPWGTGWHLDRARFDGMLADEALRQGADVRTGTAVTGWQPLEGGGYRLFLPVEGDAPRAFVDARFVVDATGRSAVFATSRGARRHTMDRTHGVCGTLPLQPGRGVDALSLVEACEDGWWYSARMPGDQVVFGLMGDRDSLHGLTPKDPEAWRARMAHAPETRQRLEACDFSGASLRAVSANVACLDRLHGEDWLAVGDAACTFDPLSSQGTSQALRSAHQSADAVSRSLQGDTAALRLHEVRVRHQFQEHLRIREGYYRLERRWSGAPYWRNRQQSPAPLPFAAAPNPLSVEKDA

SEQ ID NO: 86533 - protein, 511 aa, Burkholderiales bacterium
  misc_feature (1)..(511): tr|A0A431LJI9|A0A431LJI9_9BURK Tryptophan 7-halogenase OS=Burkholderiales bacterium OX=1891238 GN=EKK53_07785 PE=4 SV=1
MQDPTKPLKTVVIVGGGAAGWMSAAALSAVLKPPYQIRLIESEEIGIIGVGEATIPLIRMFNDLARIDEAQFLKATQGTFKLGIEFVNWGREGERYFHGFGRVGKEPLWPVDFTQYWLRMRALGRALPPEAYVMSAMAAKANRFMLPRPEMQNSPLADLTYAYHFDASLYARNLRMLSEQRGVRRTEGKVVRVLLDESPGATQGHVRAVQLESGEQVQGDLFLDCTGFAGLLTDKALGVGFEDWSHWLPCDRAVAVPSQSTAPLLPYTRATAHRAGWQWRIPLQHRVGNGHVYSSRHMSDDEAAGVLLRHLDGPALAEPRLIRFRTGMRQQAWHRNVVAIGMSAGFVEPLESTALHLIQMGVAGLIEAFPHCGFDPVEIAEYNRRSRERYESVRDFIVLHYHLNQRQDGGFWQACAEMAVPEKLRWRMDLYAASGRLVYVDTDLFREPSWFEVMEGQNLRPRGWLPLTELQGVAETANYLQGVSDTIAHCVSVMPEHAEFIRHYCAAAPVR

SEQ ID NO: 86534 - protein, 510 aa, Burkholderiales bacterium
  misc_feature (1)..(510): tr|A0A431LSI1|A0A431LSI1_9BURK Tryptophan 7-halogenase OS=Burkholderiales bacterium OX=1891238 GN=EKK53_00190 PE=4 SV=1
MSERVRDVVVLGGGSAGWLVAGLLAAEHADLRLTLIESTDVPTIGVGEGTWPSMRDTLRRIGLDEAEFVRRCNVSFKQGSRFDGWARGASGADGDRYYHPFMLPVGYGDVDLVQAWLATAPERPFADVVSPSVQVCEAGRAPKQVQTPGFGAVANYAYHFDAGLFAQMLREHAIQRLGVSHVVDHVDAVLTAEHGDITALQTRSHGPLAGDLFIDCSGLTARLIGEHFGIGLKSEREVLFNDAALPVQVPYAQPDAPLATCTIATAWAKGWIWDIGLPTRRGVGCVYSRAHASEDEAQAALQAYLDATGAPRERPAPRSIRYDPGYREQFWVRNCVAIGLSSGFIEPLEASALAMVELSAQRLCDELPMTRATMDAVARRFNDDFRYRWARVIDFLKLHYILTQRDDSTYWRAHRDPATWPERLRELLPMWRLRAPARHDFGRIDEVFPSASYQYILYGMGFEPDRHPLPPAQLQAAQACFDEAARQARRFVPGLPGHRSLIDHLQHIAR

SEQ ID NO: 86535 - protein, 487 aa, Alteromonadaceae bacterium
  misc_feature (1)..(487): tr|A0A559QW93|A0A559QW93_9ALTE Tryptophan halogenase OS =Alteromonadaceae bacterium 2753L.S.0a.02 OX=1403320 GN =P886_1414 PE=4 SV=1
MSISLAVVGDSVEAWLLAYGFALKLQPQNKKSEKSPITVLQKPLPDVATLHLSPDDLLLFEELGVSERDLIRECNGQFSLGYNYVLNDDKRYGNFFCWGSYGFKHGSLSFHQLWAKARIAGRAESFCDYCFAAHCAAEHRFVHPQTDPRSVLSQLQHSIVIDTSLLKKLLIARCISIGVKTIQPTGEITVRRDKNRVEALDCGGATEVSADFFLDFTGELFTASKSLAGHTQLPFNSVASVRMSCNDPLSYSRLQPLDGGWLRHDCLGDEQVISYLYDRGARSVQSVEDLLLQYCDTAKHIDIVNYPAEVAMAHWQGNVVYSGSYATGPSGFVHSSAHALHRQWQTLLQLLPRDDTDNQEWDVLCAEYNDFSQVLVARLAELHWLHAERSPLNDVKLQGVLQHLIALFQCRGSVMHLRENLMGDETWAKLLIALELFPDDYDPLLDGVEFDAIVDKMAMGKAALRKAAAQLPPLKVYRQHYINKHSV

SEQ ID NO: 86536 - protein, 499 aa, Lysobacter tolerans
  misc_feature (1)..(499): tr|A0A1N6VY30|A0A1N6VY30_9GAMM Tryptophan halogenase OS =Lysobacter tolerans OX=1604334 GN=SAMN05421546_1908 PE =4 SV=1
MSLLPIQNITIVGGGTAGWMATAALSKVLPPHCRIRLVESDEIGTVGVGEATIPMIKLYNSALELDEAEFMRETQGSFKLGIEFVDWGGLGESYIHGFGTIGQDLGLVPFHHYWLKQRQAGKAAELDAYSINTWAARHDRFMHATTDRPNSPLAQIAYAYHFDANLYARFLRKYAEARGVQRIEGKIVDVGLDPESGHVTHVTTDRGDMVEGQLFIDCSGFRGLLIEQALQTGYEDWTHWLPCDRAVAVPCVGSGEITPYTRSTARSAGWQWRIPLQHRIGNGHVFCSQFISEDEATATLLANLDGEALAEPRVLRFVTGKRRQVWNRNVIAVGLASGFMEPLESTSIHMIQTAIARLTAFFPHAGIQQPDVDTFNRHVNEEFLSIRDFLIAHYHVTQRDDTPFWNHCRTMDVPVSLQRKLDLFASNGRVFRENNELFAEASWIQVLYGQGIRPSGYHGLVDALPEEKLAEFLGNVRGVIDNCMKAMPGHRAYIERLLS

SEQ ID NO: 86537 - protein, 504 aa, Luteimonas terrae
  misc_feature (1)..(504): tr|A0A4V6PLW8|A0A4V6PLW8_9GAMM Tryptophan 7-halogenase OS=Luteimonas terrae OX=1530191 GN=E2F49_08205 PE=4 SV= 1
MDHLQRIVIVGGGTAGWMTAAALSRVLGPAYDIALVESEQIGTVGVGEATVPHIKAFNQLLRIDEADFVRSTQGSFKLGIEFVDWLDVGERYIHGFGTEIGHPLGLLPFHQYWLKARAQGRAGPLGDYTLNTLAAQRGRFMVSATDVPAGSPLSNIAYAYHFDAGLYARYLRRYAEQRGVRRHEGMIDHVAQHPESGFVSAVRLQDGTMLEGDLFVDCSGFRGLLIEQTLQTGYHDFTQWLPCDRALAVPTANVGPPAPFTRATARPAGWQWRIPLQHRTGNGYVYSSAHISDDEAAATLLANLKGEALGDPRPLRFVTGRRKQCWNRNVVAIGLSSGFLEPLESTSIHLIQSGISKLLELLPREGFNPVLAERYNAQLAFEFDRIRDFIVLHYNATRRDDTPFWRHCRTMEIPAELRTAIDLFRDSGRFFRNASEMFDTISWVQVMIGQGIVPQGWHPLVDNLPDEEIARFVDSVGRTLNACVDAMPPHQAFIDRHCKASPPA

SEQ ID NO: 86538 - protein, 589 aa, Microcystis sp.
  misc_feature (1)..(589): tr|A0A551YMQ8|A0A551YMQ8_9CHRO Tryptophan halogenase OS =Microcystis sp. M_QC_C_20170808_M3Col OX=2486216 GN=EW V84_22690 PE=4 SV=1
MQMTQDKEYDVVIMGAGFAGLCQARHLKLKIPNIKVALVDPRPEQRTDKDLKIGESTIEIAALFLAKELGLHDYLIENHAPKQGLNFHWPKNPAKTETIDDYYHAGSNRQVPIPSFQINRAKFEQDLLKMDKAMGITFYNGQVVDVELTPGDAIKTVKIKVGDERIDLQAKHVIDAAGRKFIIGRKTDNLLFGPENLMGLNTGSAWVRVKNVDRTIFHSGYDPLNASTSHYYSTNHYFGEGHWLWMIPIDTQTMELSIGVIHHHDVIDSTQVNSREKFHNFLRNNHQILANIIDSGEAVDFHYWPRISHSSKTLFSPDNWYVLGDAAYIFDAFYSYGTTTIALAIEGITEIVRAKLAGEADAEAKRTAYNEFNLAYSRSVNCLYRGHDKQLGHASVMSWRIYFEYMWWFGVQIPMYVGKWHLDLTYIPIFLKTLNSNIDGLFADLNQQFTELADKDVNIGLMDCYRGDQLFKGYHTLKHFDDFLENTKFEPRRCNVFAGLKATCFYAALWYALFQWKAFGLRGCLNPRHIYHFFRLLGLSGQATIGELIYKFKTKGLPANSEIEAMRQEFKTYQYQPTLQPWLTEASHS

SEQ ID NO: 86539 - protein, 504 aa, Novosphingobium sp.
  misc_feature (1)..(504): tr|A0A1E4N2C5|A0A1E4N2C5_9SPHN Tryptophan halogenase OS =Novosphingobium sp. SCN 63-17 OX=1660120 GN=ABT10_1233 5 PE=4 SV=1
MGDSDRKIRRILVVGGGSAGWMAAAMLANALRQNCAITLIESEEIGTIGVGEATIPPIRIFNETLGIDEREFMAATKGSFKLGIEFVGWGREDSRYFHPFGPHGRNFDMVPLHQYWLKARMAGDDTPLDDYSMAWHIARAGRFSHPSPDQRSVLSTFEYAYHFDAGLYARFLRAYAEKRGVTRIEGKIADVGLNGETGYVRDVTMADGRVIEADLFIDCSGFRGLLIEGALKTGYEDWSHWLPCDRAVAMPCAHPKADPNPTPYTRSTAREAGWQWRIPLQHRIGNGYVYCSDFMEDDRAAELLSQRLDGEALGDPRHVRFTAGRRRQHWNKNVIAVGLSSGFLEPLESTSIHLIQANISKILALFPDKDFDPATRDEFNRIAHGEMERIRDFIILHYKLTQRQDSELWRYVSAMDIPDTLALKIEHFRRHGRLIARELDLFAPPSWLAVHVGQGNIPEGLDPLIDYRGIDARDWLGKLRGAMAAEAARMPMHGAVLAQHCAMS

SEQ ID NO: 86540 - protein, 498 aa, Xanthomonas campestris; identical to SEQ ID NO: 83595
  misc_feature (1)..(498): tr|A0A0H2X771|A0A0H2X771_XANC8 Tryptophan halogenase OS =Xanthomonas campestris pv. campestris (strain 8004) OX =314565 GN=XC_1287 PE=4 SV=1

SEQ ID NO: 86541 - protein, 497 aa, Sphingomonas aurantiaca
  misc_feature (1)..(497): tr|A0A2T5GSK7|A0A2T5GSK7_9SPHN Tryptophan halogenase OS =Sphingomonas aurantiaca OX=185949 GN=C8J26_0570 PE=4 S V=1
MTEQRVKKVVIAGGGTAGWLAAAALSRQLGQLLDITLVESEEIGTIGVGEATIPTMRSFHAILGLDEREFMRATQATFKLGISFENWARDGDRYIHSFGDLGKSTWMGDFHHFWLAAKAAGDASEIGDYCLELQAAKAERFALPSEGEINYAYHLDAGLYARFLRARSEANGLKRIEGRIASVDRDGETGFIRALVLDSGERVEGDLFIDCTGFRGLLIESTYAAGYEDWSHWLPTNSALAVQSAATGPAHPYTRAIAHDAGWRWRIPLQHRVGNGLVYASEHLSDDEAHARLLGTIDGAPLTEPRLIRFRTGRRRQVWMGNCVALSLASGFVEPLESTSIHLVMTGVTRLMQAFPFGGVAPAAVTRFNEQAQAELERVRDFIILHYHLNERPEPFWAARRDMPIPDTLVERIALFAEAAQAYQGGEDLFRVASWVQVMLGQRLMPRDHHRLGTIMGGPQLAGVLAKMRGDISDVVAAMPTHQKFLDRHLLRPPRAA

SEQ ID NO: 86542 - protein, 517 aa, Sphingobium sp.; identical to SEQ ID NO: 84574
  misc_feature (1)..(517): tr|A0A2K0Y6N5|A0A2K0Y6N5_9SPHN Tryptophan halogenase OS =Sphingobium sp. SA916 OX=1851207 GN=A8G00_13440 PE=4 S V=1

SEQ ID NO: 86543 - protein, 510 aa, Burkholderiales bacterium
  misc_feature (1)..(510): tr|A0A3S0FU10|A0A3S0FU10_9BURK Tryptophan 7-halogenase OS=Burkholderiales bacterium OX=1891238 GN=EKK53_12450 PE=4 SV=1
MTPKRRILIVGGGTAGWLTAAYLAKALKLAERPHLEVTLLESPDIVSVGVGEGTFPTIRTTLQVLGIDEAAFIRATSATLKQGIRFVDWAHAPVAGQHHSYFHPFEAPYFAEDLNLVPYWLLQDPAARAPFAEAMTLQARVAAAHRAPKRAGEAPYTAPLNYAYHFDAIKLARLLAERAVQLGVRHAEGTVAQVALDDQGAIARLDTDRQQRFEADLFIDCSGFRAELIGRALGSPFTSARGQLFADRALACKVPLGDESVMESCTIATAHEAGWLWEIGLNGMRGVGCVYSSSHIGDDRAAEILRRYCGAGDEDLAARSVPFAPGYREQQWVKNCVAVGLSAGFLEPLEATGLVLIEAAIGMIAEMLPHSGPMHAPARRFNELMRARFENIINFLKLHYCLSQRTEPFWRDNTDPATVPYRLTGLLEEWRLRPPGRFDFVLDTETFAFFNYQYILYGMGFATDLSAGRDDFPRVDEAARVFAKIQRFADRAVADLPSHRALIQQINAGR

SEQ ID NO: 86544 - protein, 503 aa, Duganella sp.
  misc_feature (1)..(503): tr|A0A1H8LVS7|A0A1H8LVS7_9BURK Tryptophan halogenase OS =Duganella sp. CF517 OX=1881038 GN=SAMN05428959_104611 PE=4 SV=1
MTQKNITKVVIVGGGTAGWMTAAALAKVLEGKVRIKLIESDEISSVGVGESTIPMIRRFNQVLGIDEDEFIRATQGTFKLGIEFRDWGKLGDNYMHGFGIFGQDLATLPFYQYWLRLHQAGQAPDLERYSINRMAARQNKFMRADRSHANSPLGDIVHAFHFDAGLYAAYLRRYSEARGVERIEGKVVDSVLRAADGHVEAVRMASGERVGGELFIDCSGFRALLIEQALHTGFDDWRHWLPCDRAWAVPSGAGPELLPYTRATARPAGWQWRIGLQHRTGNGHVYASAFMDDDAAARLLMDNLDGPALAEPKQLRFTAGKRKQVWNKNVVAVGLSSGFLEPLESTSIHLIQSTIARLIAFFPDRGFSAPDIAEFNRQSDFEVERIRDFIILHYHATTRADTPFWDYCRTMPVPDTLRAKIELYRARGRIVRIDNELFSEVGWLQVLHGQGIEAGGHHPLADLLDEGEVAEYLGDVAGVIGQCVARMPSQDAFIAEHCAAPRP

SEQ ID NO: 86545 - protein, 520 aa, Paraglaciecola agarilytica
  misc_feature (1)..(520): tr|K6X4U8|K6X4U8_9ALTE Tryptophan halogenase OS=Paragla ciecola agarilytica NO2 OX=1125747 GN=GAGA_3908 PE=4 SV =1
MSHRSIKNILVVGGGSAGWLTAGIIAAEHQCNKQNSKIKVTLVESPEVNIVGVGEGTWPSMRNSLQRMGLSETDFIRHCGAAFKQGSKFVGWKNGADNDFYYHPFVIPNGYGQANQYSAWKTHGQGHAFADVVCAQSQICQAGLAPKQNATPEYAGVLNYGYHLDAGKFSQMLQQHCVQNLGVTYIQDHVEGVVSHDNGDIKALQTRANGELNADLFVDCSGARSLLLGQHFNVPFIDKKSVLFNDSAMALHVPYSTPDEPIASATISTAQEAGWVWDIGLQDRRGVGYTYSRKHTDDQQALRTLKAYVAQSVGGEVADSLSARKISFEPGHRSHFWHKNCVAVGLSAGFLEPLEASALALVELSATAIAENLPVTAQHMQITRDNFNRRFLLHWENIVEFLKLHYVLSERTEPYWQQMRAPDSVSPRLNDLLTQWRYQPPNRSDFVQNEIMFPSASYQYVLYGMGFETLNDVSSREFDAPQSAIKHLQENQQRLHKLMGGLKSNRQLLKHVVQYGFQKV

SEQ ID NO: 86546 - protein, 517 aa, Paraglaciecola agarilytica
  misc_feature (1)..(517): tr|K6XK53|K6XK53_9ALTE Uncharacterized protein OS=Parag laciecola agarilytica NO2 OX=1125747 GN=GAGA_1883 PE=4 SV=1
MDQAIKSIVIVGGGTAGWITAGTLAAKLQNEHADGFKITLVESPDVKPIGVGEGTWPTMRRTLKAMGIRETDFIRECNVSFKQGAKFAQWVTGAEDDFYYHPLVLPQDFDSTNLARHWMAHPFEQSFSQAVSPQEAVCETGLAPKTIATAEFTSIINYAYHLDAGRFSAFLQRHCIEKLNVHHILDNVSKINAAENGDIASVSTKANGDIAGDLFIDCTGFKSLLLGEHFKVRFKSCKDVLFVDQALAIHVPYDTDDAPIASHTISTGQSAGWVWDIGLQNRRGVGHVYSSAHTTEQRASEELLNYIAQTGGKVNEADIRSIGLNPGHRETFWRQNCVAVGLSAGFLEPLEASSLLLVEISAAMIADQFPATRDAMDIVAKRFNHTFLYRWERIIDFLKLHYMLSKRNDSAFWIDNRDTTTIPQSLQEQLTLWQFQPPWHNDFEHAVEVFPAASYQYVLYGMGFYTKPNELGMSQAYQQKASALRQKNSQQVQQMLKNLPDNRGLINKIHQFGMQRV

SEQ ID NO: 86547 - protein, 516 aa, Sphingomonas sp.
  misc_feature (1)..(516): tr|A0A0Q4K576|A0A0Q4K576_9SPHN Tryptophan halogenase OS =Sphingomonas sp. Leaf30 OX=1736213 GN=ASE89_04865 PE=4 SV=1
MRKRILIVGGGTAGWLTAGYLAKRLGADLAGGVSITLVESQDIGILGVGEGTFPTIRRTLATIGIDEAELIRRCGATFKQGAKFVHWRHAPGQGRPDHYSHPFQVADASDGLDLLPYWLLGHGGAENWDEVSNPQKKAADAMRAPKLATNPDYVGPLNYAFHFDAVALAGLLREHAVRNGVRHLTDTVSEVLLAEDGAIGGVRTERNGMLDADLYIDCTGFRAELIGKAMKVPFRSCRDVLFCNRAIAAQLPYAKPGDPIASYTISTAQESGWIWDIGLDRRRGIGHVYSSDHSDDETAERVLRGYLGAGGDKAEVRHFKFDAGYREVNWVKNCVAVGLSSGFFEPLEATGIAFAEVSAGMIANLFPWGGDYETSARQFNANMLRRYERALDFIKLHYCISERRDTAFWRDNVADASIPDSLLELLDRWRFRPPNELDIDGQVDIFTDASWQYVLYGMGWKTDLSAKAGALRYADDARRAFAEVRRQADYAIRNLPSNRDLVTYAQHHHFGARAAA

SEQ ID NO: 86548 - protein, 484 aa, Ruegeria marisrubri
  misc_feature (1)..(484): tr|A0A0X3TCF5|A0A0X3TCF5_9RHOB Tryptophan halogenase OS =Ruegeria marisrubri OX=1685379 GN=AVO45_15420 PE=4 SV= 1
MPPRVCEAEICVVGGGPAGAATALRLAQLGHDVCLLERHAFPRPHVGESLPPSVLPLLQSLGLRERVEHSGVLLSHGAILYWGGAFERRGTQGGPPGLLVDRGRFDALLLQAAAQAGVRVLQPVRAHRPRRTAQGWDIPLRGETDIPCLRAQVLIDAAGRQAGLGRRFRRCSEPLLALYAYWQAPRGFGPETRIEAGETHWYWGALLPDGTVNAMVLVDPSECTGLSPAGRRDLYLNLLAQSTLLSPCLEGRRIGPVRRCDATSHMETTPPARDLLRVGEASFSLDPLSSQGVQSALGQAMQAAAVAHTVLTQPENGDLALAFHSERQGERVRAHANLAAEYYARQARHRPTGFWTGRAAPPAWLAQDTPDPRREKLPGDVPLHLSPRAALCVSGVQTGPLITPGHVLTHPHLGRPVALLDGVPIAPLLEQMHRATPADQILQGWSASLGPARAGKILNWLWQNRILVPASGQPIPVSSAARMA

SEQ ID NO: 86549 - protein, 515 aa, Duganella sp.
  misc_feature (1)..(515): tr|A0A1H8QH77|A0A1H8QH77_9BURK Tryptophan halogenase OS =Duganella sp. CF517 OX=1881038 GN=SAMN05428959_109141 PE=4 SV=1
MANELIRRIVIVGGGSAGWLSAGLIAAEHRASSPGGLQVTLIESPDVAPIGVGEGTWPSMRDTLRRIGVSESDFFRECDAAFKQGSRFNRWCTGADDDYYFHPFVLPQGYGEANMPEHWLAQHPDVPFADLVSYQPHLCARGKAPKQAATPEFAAVANYGYHLDAGKFGLFLRKHCLEHLGVRYVPDHVTGINSAANGDIASLQTQRHGALEGDLFIDCTGMQSLLLGKHYDIDFVSQKHVLYNDSALAVQIPYPDDNYPIASQTSSTAQSAGWIWDIGLPTRRGVGHVYSGAHIGDDQAEAELRAYIVATGGPADIPAPRKLRFDPGYRAKFWHRNCVAIGLSAGFIEPLEASALALVEMSAAMVSDDMPATRAEMDIVAKRFNEHFTYRWERVIDFLKLHYVLSKRRDSAYWRDNTEADHVPERLGELLTLWRHRAPSRSDFNRIEEVFPSASYQYILYGMGRTTEFTKQHPHEAAMADGYFREAANLTQKMLDALPTNRELIEHIKRHGLRT

SEQ ID NO: 86550 - protein, 506 aa, Burkholderiales bacterium
  misc_feature (1)..(506): tr|A0A4Q3TNA7|A0A4Q3TNA7_9BURK Tryptophan 7-halogenase OS=Burkholderiales bacterium OX=1891238 GN=EON92_02740 PE=4 SV=1
MNPSHIQDIVVVGGGTAGWMAAAAMAKVLGPAYRIRLVESDQIGIVGVGEATVPHIKAFNNLLRIDEADFVRQTQGTFKLGIEFVDWRKRGESYIHGFGTEIGHPLGLLPFHQYWIKARQAGQAQDLGAYTLNTVASRQNKFMVSATDVPAGSPLSNIAYAYHFDASLYARYLRAYSEKLGVRRSEGIVDKVQLHPESGYVESITLQSGEVISGDLFIDCSGFRGLLIEDALHTGYVDFTHWLPCDRALAVPCENAGPPTPYTRATAREAGWQWRIPLQHRTGNGYVYSSAHISDDEAAAKLLANLDGKALAEPRPLRFTTGRRKKCWNRNVVALGLASGFMEPLESTSIHLIQSGISKLLELFPSQGISEVLVDRYNDQLAFEFDRIRDFLVLHYNTTERDDTPFWKQCRDMSIPSELQANIDLFRDSGRFFRNANEMFAEISWIQVMVGQGIMPQGYHPLVDLVPEQEVGRFVASVGRTIAACVDVMPSHQAFIDRYCAAQVPA

SEQ ID NO: 86551 - protein, 516 aa, Burkholderiales bacterium
  misc_feature (1)..(516): tr|A0A3S0E062|A0A3S0E062_9BURK Tryptophan 7-halogenase OS=Burkholderiales bacterium OX=1891238 GN=EKK52_03915 PE=4 SV=1
MNTTQPFKRVLIAGGGTAGWMMAALMSKLLGKQLDIKLVESEEIGTVGVGEATIPALHTFHNLLGINEAEFMAATNATFKLGINFEGWKDVGQNYFHSFGTTGTDHWSAGFQHFWLKGRTLGLAKTYTDYNPETVAAFANRFAHLPRNGLNYAYHLDAGRYAKYLRAMSEACGVQRIEGKIARVLKHGREAGAAREGDLAALQMQDGSRLEADFFIDCTGFRSLLLGEALGVGYEDWSYWLPCDSAVAVQTASVREAWPYTRSIAHPFGWQWRIPLQHRVGNGLVYSSKELSDADAPEMLKRNVEGELLTQPRIIKFLPGQRDKVWARNCVAVGLASGFVEPLESTSIHLIQRAAIRLMQLFPAGGIQQGDVDEFNLQSKRELEHIRDFIVLHYHVNARIDSALWKHVREMDILPSLRHRIELFREAGRVFRPSDELFAENSWVQVMMGQGITPERYHPVADLMGRQELGNFLGDIHLKVARTVAGLPGHQAYVEQLCAPYRSATTAQLAATPLRA

SEQ ID NO: 86552 - protein, 500 aa, Paraglaciecola agarilytica
  misc_feature (1)..(500): tr|K6X3X9|K6X3X9_9ALTE Tryptophan halogenase OS=Paragla ciecola agarilytica NO2 OX=1125747 GN=GAGA_3583 PE=4 SV =1
MLPIPQNITIVGLNVHGLLTALLLRKTYKPAVTGITLVGLKEEDSPPKAYIAGKALNTLLEHFGYSEANWMRQTQATFKLSNRYVGFSEQEFSVANASEVDILHQPLMLELSKLKRQAYQLDLSLDDFFFAAALAKRNLSPKAQDFPFETDYQYQVDANCLFTLLQKIAAEHSITTLPSTLETLQLDQHGTLKHIECEDHILSGDYFFDCTQSAQLLIGNMPGFRQETLPEVRINDRVLTYTLAAECCASEVVTTALDCGFVLQYTLQDAVHFQYHYSSKFIQDPQAVQLLERHIAQQGYKKVLQRHLSASQAYLVSQPWIHNCLAVGPACGLTQGSEDHELSHTFAMLEQFVSSIQSPDDAKDVIKNYNHRIKSRFVYAHSYHSTLQLLNSRRNSPYWQTPQDANALTPIGRSLFSQWLSGEDLSVEPILDINGLTAWYALFSGLGHYPTGELKPHPKARAIQDNIQDMCRKLAGCCLNFQTHDNLIAEGKHHANVTAV

SEQ ID NO: 86553 - protein, 506 aa, Xanthomonas campestris; identical to SEQ ID NO: 86170
  misc_feature (1)..(506): tr|A0A0H2XEI8|A0A0H2XEI8_XANC8 Tryptophan halogenase OS =Xanthomonas campestris pv. campestris (strain 8004) OX =314565 GN=XC_4225 PE=4 SV=1

SEQ ID NO: 86554 - protein, 501 aa, Streptomyces thermolilacinus
  misc_feature (1)..(501): tr|A0A1D3DZX3|A0A1D3DZX3_9ACTN Tryptophan halogenase OS =Streptomyces thermolilacinus SPC6 OX=1306406 GN=J116_0 05385 PE=4 SV=1
MTASYLKAAFGDRIDITLVESGHIGAVGVGEATFSDIRHFFEFLGLKEKDWMPACNATYKLAVRFENWREKGHYFYHPFEQMRSVNGFPLTDWWLKQGPTDRFDKDCFVMASVIDAGLSPRHQDGTLIDQPFDEGADEMQGLTMSEHQGKTQFPYAYQFEAALLAKYLTKYSVERGVKHIVDDVREVSLDDRGWITGVRTGEHGDLTGDLFIDCTGFRGLLLNQALEEPFISYQDTLPNDSAVALQVPMDMERRGILPCTTATAQDAGWIWTIPLTGRVGTGYVYAKDYLSPEEAERTLREFVGPAAADVEANHIRMRIGRSRNSWVKNCVAIGLSSGFVEPLESTGIFFIHHAIEQLVKNFPAADWNSMHRDLYNSAVSHVMDGVREFLVLHYVAAKRNDTQYWRDTKTRKIPDSLAERIEKWKVQLPDSETVYPYYHGLPPYSYMCILLGMGGIELKPSPALALADGGAAQREFEQIRNKTQRLTEVLPKAYDYFTQLR

SEQ ID NO: 86555 - protein, 498 aa, Paraglaciecola agarilytica
  misc_feature (1)..(498): tr|K6Y7J2|K6Y7J2_9ALTE Tryptophan halogenase OS=Paragla ciecola agarilytica NO2 OX=1125747 GN=GAGA_4405 PE=4 SV =1
MSQPFNIVILGGGTAGWMAANLFAHKWADRLANNQLTVTLVESPDIGIVGVGEGSTPTLKRFFSMLGIADADWMRQCNATYKMNIAFKGFSPASGIDCYSHPFVSQIDTFTQRAFLVNARTRRLGLDTHTEPADFLLNGVLAKQNKGPQTPANFPFRMEYGYHFDSHLLGVFLQQHAISLGTEHIQANVDQVKQHENGDIAALCCKDGRELKGDLFVDCSGFSSVLMQKTLGVKFNCYQENLFNDSAVVVPTPIGKHIPVETTSTALSAGWCWKIPLTNRFGNGYVYSSDFISANHAERELKQHLQLGEDIECRHLSMQVGSLAKQWQNNCLGIGLSAGFIEPLEATALHLAQISVEQFILEFEEGGFTNRLQGQYNTKMHHRTERTRDYIVAHYKLNTRNDSEYWRANRNNMHLSESLLQILDVWYKRGDLEAEINRQNLSSHFNAVSWNCLLSGYGAFPPLAAKQPGTGDLYKEQNIESFLQGCALNFSNHAENLR

SEQ ID NO: 86556 - protein, 516 aa, Streptomyces sp.
  misc_feature (1)..(516): tr|A0A212SV77|A0A212SV77_9ACTN Tryptophan halogenase OS =Streptomyces sp. PgraA7 OX=1157641 GN=SAMN02745831_058 19 PE=4 SV=1
MLNNVVIVGGGTAGWMTASYFKAAFGERINITLVESGNIGAVGVGEATFSDIRHFFDFLGLKEKDWMPACNATYKLAVRFENWREEGHYFYHPFEQMRSVNGFPLADWWLREKPTDRFDKDCFVMPSIIDAGLSPRHLDGSLIDQPFVEGADEMQGLTMSEHQGKTQFPYAYQFEAALLAKYLTTYSVERGVKHIVDDVQQVNLDERGWIRNVTTAEHGEIGGDLFIDCTGFRGLLLNKALEEPFISFQDTLPNDSAVALQVPMDMERRGILPCTTATAQDAGWIWTIPLMGRVGTGYVYAKDYISPEEAERTLREFVGPAAADAEANHIKMRVGRSENSWVKNCVAIGLSSGFVEPLESTGIFFIHHAIEQLAKNFPGEDWNPVQRNLYNDSVAHVMDGVREFLVLHYVAAKRSDTQYWRDTKTRKIPDALAERIEKWKTQLPDTETVFPYYHGLPPYSYHCVLLGMGGIDVKPSPALALGDSAAAEREFAEIREKTRHLTSVLPKAYDYFSRMR

SEQ ID NO: 86557 - protein, 506 aa, Paraglaciecola agarilytica
  misc_feature (1)..(506): tr|K6XK47|K6XK47_9ALTE Response regulator receiver doma in-containing protein OS=Paraglaciecola agarilytica NO2 OX=1125747 GN=GAGA_3584 PE=4 SV=1
MQTSLPFKKIIIIGGGTAGWMSACYLAKMWQDYDLEIKIIESDAIGTIGVGEGTTPSIKGFFEQLGIEAKEWMLACNATYKTGIRFVNWSSDPNYKSYFHPFYSQLDEYFQHEFFQNIQLKHRGFDVHAHPDQYLLASELAQQRKAPIEPEHYPFDMAYAYHFDATLLAQFLKKKALQWNVTHQVATINEVKQKDDGSIASVVTESGETIEADFFVDCSGFRSLLLGKTLKVPYNSFADSLLNDSAVTIVTEREDTTPSMTLSTALSCGWAWRIPLTNRFGNGYVFSSRFQSPQDAEEEFRRHLALPESAQFNHLKMRVGHFAKGWEKNVLAVGLSQGFIEPLEATALHFATQSVVDFVSAVDNSTDQAGYSNQTAYNNKLSDRFSCVRDYIELHYLANSRHDTPYWKAARSHTPSRRLQRILTTWHQGKSVPRVLDEEAVSLQLFGHESWLCLLAGKGVFPESEHTIDALPTAMRIDMQKIKHFVETSAKHYPLHDDALAALKQS

SEQ ID NO: 86558 - protein, 507 aa, Duganella sp.
  misc_feature (1)..(507): tr|A0A1H8QGM6|A0A1H8QGM6_9BURK Tryptophan halogenase OS =Duganella sp. CF517 OX=1881038 GN=SAMN05428959_109138 PE=4 SV=1
MQDQNKESNNRQAVRRVVICGGGTAGWMVAAGIAKVLGKRLDIKLIESDEIGTVGVGEATIPTLMNFHNLLEINEQEFMAETQATFKLGISFEEWRNVKENYIHSFGFTGVDHWTAGFQHFWHKGVERGLASDYGDYCLELKASLEHRFAHLPNNGMNYAYHLDASRYAKYLRRLSEPRGVQRIEGKIVRYTKHDGGDVRSIVLESGREIEGDLFIDCTGFRGLLIGDAMEEPMEDWSQWLFCDRAIAVQTEAVADAIPLTRSMAHQAGWQWRIPLQHRVGNGIVYSSRYLDDDTARKQLLANVEGRTLIEPRVIKFKPCQRKQTWKGNVVAIGLSSGFLEPIESTSIHLIQRSVVRLMQMFPSDGVRQTDIEEYNAQCNHEIEHIRDFIILHYHVNNRTDSQFWIDCREMSIPDSLKHRLDLFRETGRVFRVPNELFAENSWIQVMLGQGIMPRSHHQTADLMGDEELKQFLGNIKSKVDRTVVQLPTHQAYVQRYCGRAESVKAA

SEQ ID NO: 86559 - protein, 523 aa, Xanthomonas oryzae
  misc_feature (1)..(523): tr|Q5H5X5|Q5H5X5_XANOR Tryptophan halogenase OS=Xanthom onas oryzae pv. oryzae (strain KACC10331 / KXO85) OX=29 1331 GN=prnA PE=4 SV=1
MTMPDTLPSDPQQRALRRVVIAGGGTAGWMAAAAMSKLLGRHLQITLVESDEIGTVGVGEATIPSLVTFHRLLEIDEAAFMAATQATIKLGIAFEHWRDVDRHYIHSFGHAGTDHWSAGFQHFWLKGQQRGVARDFGDYCLELRAAQEGRFAHLPNGGMNYAYHLDAGLYARFLRRFSEGFGVTRIEGRIGQVETDAESGFLTALTLQDGTRVEGDLFLDCTGLAGLLIGKTLGVGSDDWSRWLFADSALAVQTEAVGPPVTYTRSRADQAGWMWRIPLQHRVGNGIVYSSRYMDQDSARAVLERNLTGRALTEPRPLRVTPNQRHRVWEKNCVALGLASGFLEPLESTNIHLIQRGIIRLLQTFPQVINAVDIAEYNRQAAQEITHIRDFVILHYHATDRRDTPFWRDCAAMDIPDSLRHRVELFRQSGRVFHQANELFAENSWVQVMLGQGIVPQQHHPVADLMGDAELSRFLDTIHTRVEAALVRLPAHADFLQRYCPAPPPPEPAARLPAPPVMAPPAG

SEQ ID NO: 86560 - protein, 496 aa, Paraglaciecola agarilytica
  misc_feature (1)..(496): tr|K6XIM3|K6XIM3_9ALTE FADH2 O2-dependent halogenase I OS=Paraglaciecola agarilytica NO2 OX=1125747 GN=prnA PE =4 SV=1
MQKDSIKHIVIAGGGTAGWMTAAALGKLFGANIKVTLIESDAIPTVGVGEATIPTLHLFHDLLKIKESEFMAATNATFKLGIKFEDWYQRNQSYIHSFGRFDHGCWAAGFQHFWLRGRQLDIASEIGDYCPEHLACRMGKFATAPKQERNHAFHLDAGLYAKFLRDLAEQYGVRRIEGKIDNVNLNHNNGFIQSLSLESGQRVEGQLFIDCTGFRGLLIEQALHTGYEDWSHWLPCDSAVAVQTELNESNVPYTRSIAHDAGWQWQIPLQTRVGNGLVFCSKYISDDEAETQLLDNIRGKTLNTPRVLKFKTGVRRKLWNKNCVAIGLAGGFIEPLESTSIHLIQQSIIRLMQSLPSAHMESPIIDKFNATMRNEIDNIRDFIILHYHATARKDSAFWRYCKDMPIPTSLHERMEQFAHSAHVHQGNGELFGEASWLQVMLGQGITPKAYHPIVDLMPVQELASFLDNVKQQTARRVSSLPNHLAFIRYYCKRAAV

SEQ ID NO: 86561 - protein, 587 aa, Microcystis sp.
  misc_feature (1)..(587): tr|A0A551YMR5|A0A551YMR5_9CHRO Tryptophan halogenase OS =Microcystis sp. M_QC_C_20170808_M3Col OX=2486216 GN=EW V84_22685 PE=4 SV=1
MNTTQALHYDVVIMGAGFAGLCQARHLMLNIPNIQVAMIDPRPENRPDTDLKIGESTVEIAALLICKELGLHDYMIENHPPKAGLNFHWPKNPAETDSIDDYYHVWINRQPPIPTFQINRAKFERDLLKMNKEMGATFYNGRVVDVDLTEGDQLKTVTVKLEDTTIEIKAKHLVDAAGRRFIIGQKTDNLIFGSDQLLGVNNGSAWVRIKDVDRTIFHSGYHPAGTTVSHYYATNHYFGPGHWLWMIPIDRDSKELSLGVIHHHDVIPAATINTQEKFTAFLKANHTVLYKLLQNSELVDFHYLPRVAHKSKVMFSPDNWYVVGDSACIFDAFYSLGTTMIAIAIESITEIVRAKLANDANAEEKRAVYNDFNLAFTDSVNTFMQEHQKQLGHASIMSWRIYFEYMWWFGILVPMYIGKWHLEPSFLKQFTGPFRTFLNGLFVDVYQDGNELVERGVNMGLMDAIRADQLIGSYYTFKHFEDFLENSKLEPQRCNIFTSMKNTFFYVAIWYAMFQWKGFGWRGLLKPRNLAHFSYLLAQSGLSALGEMRHNFLTRGLPDNSEIEEMRQEFKEYRYQGKLQPWSAELS

SEQ ID NO: 86562 - protein, 499 aa, Duganella sp.
  misc_feature (1)..(499): tr|A0A1H8EM28|A0A1H8EM28_9BURK Tryptophan halogenase OS =Duganella sp. CF517 OX=1881038 GN=SAMN05428959_101660 PE=4 SV=1
MDAAYKSAYRRIVVVGGGAAGWMAATALATALPGSAVELVESEEIGIIGVGEATFPSIRAFHKILGIDEAEFLRATNGTYKLGIEFCDWRVRGERYFHTFGDFGALAGPQSLWGQHRRLGDAAPGALGEQCLPSVMASQGRFQVPPEQGQFFNYAYHFDAVLYAGFLRTMALRKGVRRTEGRIVDVARRADGGVGQLRLADGRVVEGDLFIDCSGFASLLLGRTLEEPFVDFSHWLPVDRAWACPAERSGTALAPYTRATALEGGWAWRIPLSNRTGHGHVFASRHIDEERALSQLLAQMDAPALAEPRLLRFATGHRARFWVRNVVALGLSSGFLEPLESTSIFLVQSGLGRLIEALLPGTAPDARTLADYNSGMVRQFERVRDFIILHYRLTARRDSALWRTMATMELPDTLAFKIHAWRQTGALHQYGDEGFDATSWLAIHAGMGHWPEHADPALREVAPEAALLGLRQRREGIAAAVAAMPTHDDYLRAVLAQRA

SEQ ID NO: 86563 - protein, 496 aa, Paraglaciecola agarilytica
  misc_feature (1)..(496): tr|K6WFC0|K6WFC0_9ALTE FADH2 O2-dependent halogenase I OS=Paraglaciecola agarilytica NO2 OX=1125747 GN=prnA PE =4 SV=1
MNTAIKNVVIVGGGTAGWLTAALLQKVVGASINITLVESEAIGTVGVGEATIPPIRLVNQVLGINEAEFLRETKATIKLAIKFENWRRPNESYFHTFGSPGKSMAFCHFHHFVNRAKAFGAKASIWDYDLNYLCATQGKFAHIKAQDTVLDLPYAYHFDATLYAQFLRRYCTKLGVTRIEGMIESVQQHPSGNIAAVTLQDGQRIDGDLFIDCSGFRGLLIQQTLGVGYDDWTHLLPCNRAVAVPSERFETTVPYTRAIAHTAGWQWRIPLQHRNGNGLVYCSSHMSDDEATHTLLNNLDSAPLGDPKVIHFTTGRRRKQWYKNVVAVGLASGFLEPLESTSIHLIQSAIVRLIHLFPHAGIDSAAVDEYNQQSELEYLQIRDFLVLHYHLTERDDSQFWRNMQQMDIPASLRHKMTLFKQNGKLFREQNDLFLESSWLQVMTGQGIEPEDYHPIANTLSEQQLMNMLEQMRSVKHEPLANLPSHDAFLSHYCQAK

SEQ ID NO: 86564 - protein, 510 aa, Sphingomonas aurantiaca
  misc_feature (1)..(510): tr|A0A2T5GRA1|A0A2T5GRA1_9SPHN Tryptophan halogenase OS =Sphingomonas aurantiaca OX=185949 GN=C8J26_0126 PE=4 S V=1
MTDTRPGQITKVVIVGGGTAGWMAAAALSRLVAGGVSVTLVESEEIGTVGVGEATIPSLLDYNRMLGIDEDAFVRATGATFKLGIEFRDWRRLGEAYLHPFGTHGRDIDGVSFHQLWLRQAASGTPDPGPIGDYCLSSVAARRGRFTRPSANPQSVLSTLSYAFHFDAALYARFLRDMAEQDGVVRVEGRVVAVDRDAETGFIEAVRLEGDRRIEGELFVDCSGFRSLLLGETLDVSFTSWKQWLPCDRAWAVPSARQGPLTPYTRATADTAGWRWRIPLQHRVGNGYVYSSAHIDDDDAKQALLAGLDGAAQGEPRQLRFEAGRRERLWDRNCVAIGLSGGFLEPLESTSIHLIQSGITRLMSLFPDRGFGSAERDEYNRVMLREYEQVRDFIILHYHATERSDSPFWDHCRTMTVPESLLAKLGLWSGRARVFREQGELFTPDSWVAVLLGQGVRPDSFDPLTAGLPPSETARFMAHIRDMIDKTAAAMPMHEDFIAQHCAAPSRRSA

SEQ ID NO: 86565 - protein, 500 aa, Altererythrobacter sp.
  misc_feature (1)..(500): tr|A0A418NI14|A0A418NI14_9SPHN Tryptophan 7-halogenase OS=Altererythrobacter sp. Ery1 OX=2306995 GN=D2V04_0979 5 PE=4 SV=1
MRSDFTPMRIVVAGGGTAGWMAAAALAYTMGETIDLTLVESDAIGTVGVGEATIPPLVLFNRLIGISEADFMRETQATFKLGIEFENWRCEGEKYFHAFGTTGRDHWSAGFQHFWAEGNERGHSDSYSDYCLELVAAYARKFAHLPKNGLNYAYHLNATAYAAFLRRIAEKAGAKRVEGKIAQVELDGDSGDITALRLEDGQRLEGDLFLDCTGFRALLIEGALHVGYDDWSHYLPCDRAIAVQTELSGPPVPYTRAIAHDAGWQWRIPLQHRGGNGIVYCSRYLSQDAARERLMSTLEGKPISEPRAIPFTAGARRKQWHRNCVAIGLAGGFLEPLESTSIHLIQRAVVRLMRMMPAGQVSERDIAEFNDQQLTDMIQVRDFLILHYNATDRRDSPFWRQCATMDIPDTLRQKIELFRETGRVFRKNEEIFAENSWVQVMLGQGIKPRNHHPIAKKMSDAELSRFLSSLRENITKTVAALPSHEDYVAQFCGSKQATVA

SEQ ID NO: 86566 - protein, 503 aa, Shewanella baltica
  misc_feature (1)..(503): tr|A3D1M9|A3D1M9_SHEB5 Tryptophan halogenase OS=Shewane lla baltica (strain OS155 / ATCC BAA-1091) OX=325240 GN =Sbal_1121 PE=4 SV=1
MTTAIKRVVIAGGGTAGWMAAAALTKLMGKHLEIVLVESDEIGTVGVGEATIPTLHIFHRLLGLKEQEVMAATNATFKLGISFENWQDINKNYLHSFGFLGKDCWACGFQHFWLKGKQLGMVSEIGDYCAEHLAARQGRFAVLPNQDYNHAYHMDASLYAKYLRKMAEQHGIHRIEGKIKQVLQHHDSGNIKALVLENDETIEGDLFIDCTGFRALLIEQTLNTGFEDWSHYLPCDSAIAVQTQSVGAPIPYTRSIARDSGWQWRIPLQNRTGNGLVFCSKFISDEDATELLLANLEGEPLNKPRVIKFKTGTRRLHWHKNCVAVGLSGGFLEPLESTSIHLIQRSIIRLMQLFPSAGIVQSDIDEFNQQTKLEMDNIRDFIILHYKATEREDSRFWRYCKNMEIPASLKHRIEMFADSGKVYKYGSELFGESSWIQVMMGQGIMPKHYHPIVDVMEEPELEAFLNNIKSTVKRKVESLPAHIDFIQHYCPAEVLANTKPMAM

SEQ ID NO: 86567 - protein, 513 aa, Caulobacter sp.
  misc_feature (1)..(513): tr|A0A2G5QTS1|A0A2G5QTS1_9CAUL Tryptophan halogenase OS =Caulobacter sp. FWC2 OX=69664 GN=CSW62_21170 PE=4 SV=1
MTEAFSTSVAPPAREGALSRIVIVGGGAAGWMAAAALSKVLGPRGPAITLIESEEIGIVGVGEATIPPIRAFNGLLGLDEATFVRETQGTFKLGIEFVDWTRLGHRYFHPFGVYGHDFGVAPFEAVWRRLNRAGQAGPLDSYSVCAQAAAQGRFAPISQAANGPPPMGYAFHFDAALYARMLRTLAEAAGVVRREGKIVDVALRGADGFVEAVTLASGERIAGDLFIDCSGFRSLLLGQALGTGFEDWSRWLPNDRALAVPSANVGPPTPFTRSTAREAGWQWRIPLQHRTGNGYVFSSRHVSVDEATATLLSGLDGEPLAEPRLLTFQAGRREACWVKNVVALGLASGFLEPLESTSIHLIQSGVARLLEMLPTKAFEPADARRYNRLMAADFDNVRDFLVLHFHVTQRDDTPYWRELRTMTPPDSLAERLAIHRATGRIFRESDELFTKTSWLAVMEGQELGAGEDDPLALGVPPDMAAARLARSAEAAAQAAAAMPIHADFIRAHCAAKC

SEQ ID NO: 86568 - protein, 514 aa, Alphaproteobacteria bacterium
  misc_feature (1)..(514): tr|A0A1Q3JHB7|A0A1Q3JHB7_9PROT Tryptophan halogenase OS =Alphaproteobacteria bacterium 64-11 OX=1895709 GN=BGN8 5_02305 PE=4 SV=1
MIHPVQKIVIVGGGTAGWLSAGVIAARHQGRIKAGAFSVTLVESPNVPIIGVGEGTWPTLRTTLERMGVSETDLFRHCDAAFKQGARFAGWTTGAEDDGYYHPLMLPQGFTQVNLVPHWLENEGGRSFCDMVTPQGVLCDDGLAPKTITTPEYQAMANYAYHLDASKFAPFIQKHCTEKLGVRHVLADVKQVKLAENGDIAGLSTEQAGDISGDLFVDCTGFRSLLLGQTLGVGFKDSGDVLFCDRALAMQVPYESEDAPMASHTISTAQSAGWTWDIGLPTRRGVGYVYSSRHISDEAAEEELRRYVGHRAKGLTARKIPIRGGHRETFWKKNCVAVGLAAGFLEPLESSAIVLIELSAKLIAEQMPANREVMDIVSARFNDVNHYRWGRIIDFLKLHYVLTRRPEKFWQDNTDPATVPDRLKNLLHLWKYQPPWFFDEFDRIEEVFPAASYQYVLYGMGFRTEVSPDSNSGTRAMAAGYMREAQDMTRKMRATLPRNRDLVKKIHEYGLQPI

SEQ ID NO: 86569 - protein, 501 aa, Caulobacter sp.
  misc_feature (1)..(501): tr|A0A2G5QHM9|A0A2G5QHM9_9CAUL Tryptophan halogenase OS =Caulobacter sp. FWC2 OX=69664 GN=CSW62_24975 PE=4 SV=1
MAQTNPVRSLLIVGGGTAGWMAATWLAGRLARQNIQITVVESPDIRTVGVGEATVPAIRDYFRDIGVTEAEVMAATQGTVKLGIEFRDWKREGDSFFHPFGLYGMPSRGVAFHQFWLKRRAEGDATPLAAYSLCTQLAMANQMMDPPVSPPNDLGVFNWAVHFDAGLYAQFLRRKATSELGVTHVDGTVVEVSKHPETGFLTGVTLKEGRVLEADLFIDCSGFRSLLLGQQLGVGYEDWTHLLPCDRAVAMPCERDGPLTPYTRSTALAAGWQWRIPLQHRVGNGYVYSSRHISDDEATATLISRLEGRALAEPNLLRFQTGHRHRFWEKNCIALGLAAGFMEPLESTSIVLVQSGVERLGALFPTLDFDPALADEYNRITTLEYERIRDFLLLHYFANRREGEAMWDQVRQVTLPEPLVHKMRMFASRGTMVRYEWESFHDPSWLSMYAGFEITPRAYDPMADYFTKPELDSAFSRMRAAITRARALAMSHEAFLSSLKA

SEQ ID NO: 86570 - protein, 499 aa, Sphingomonadales bacterium
  misc_feature (1)..(499): tr|A0A258I830|A0A258I830_9SPHN Tryptophan halogenase OS =Sphingomonadales bacterium 32-64-17 OX=1970592 GN=B7Y8 8_08565 PE=4 SV=1
MNEAGPTKRRIIIAGGGTAGWMTAAALARTLGPVVAVTLVESEQIGTVGVGESTIPPLVHFNRLLNIPEAEFMRAAQATFKLGIEFENWKDLGHSYFHSFGITGKDHWSAGFQHFWLRGRERGHTEDYDDYCLELKAAYERKFAHLPGEKMNYAYQLDAARYAAFLRGLAEQGGVSRIEGKIAKVDLDGESGNIAALTLESGERLEGDLFVDCTGFRALLIEGALHAGFDDWTHYLPCDRAIAIQTESVGPPVPYTKARAHDAGWQWRIPLQHRTGNGLVYCSSYLENDAALERLLGNLVGKPIAEPNHLRFTTGARRKQWFRNCIAIGLSGGFMEPLESTSIHLIQRAILRLIRMMPSGKVSTRDIAEFNEQQMTDMLQIRDFLILHYKVTNRRDSPFWRQCAAMEIPASLEQKIELFRETGRVFRKNEELFAENSWVQVMMGQGITPQSFHPIATKLGDEELAGLLGGLRESVQKTVAGLPYHEEYVARYCGALAPE

SEQ ID NO: 86571 - protein, 517 aa, Sphingomonadales bacterium
  misc_feature (1)..(517): tr|A0A258IA50|A0A258IA50_9SPHN Tryptophan halogenase OS =Sphingomonadales bacterium 32-64-17 OX=1970592 GN=B7Y8 8_08550 PE=4 SV=1
MANSIKQVVIVGGGTAGWLSGCLLAARRRDLSVTLVESADVPTIGVGEGTWPTMRETLRTIGIPEAEFLRECDASFKQGSRFDGWRIGGSEDSYLHPFTPPPPADMAALLSAWQSQAGSEPFAAAMTAQAAICARDLAPRQRAMPDYVGALNYGYHLDAGKFARLLAHHATERLGLQHIVGHVSGVEADETGAIVAVDLGESRRIAGDFFLDCSGMAALLIDKHYATPWRDLSRISFNDRALAVQVPVEAGSAVASQTIGIAHEAGWIWDIALPTRRGVGCVYASRFMDDDRAQMVLRNYIGAKMPQADLAALEPRKLRFATGHRERFWQGNCLAVGLSAGFIEPLEASAIVLIELSLKALIDNFPASRETMPIHAKRFNRLFRYRWDRVVDFLKLHYVLSHRTEPYWLAQRDPHTIPPSLAEQLALWREQPPSGWDFPEANEIFPAASQHYVLYGMGFAPSPPRAGIVTEQATRSLAEVREGVRRLGAALPSNRAYLDALGAMPASNANQQELLSR

SEQ ID NO: 86572 - protein, 543 aa, Shewanella baltica
  misc_feature (1)..(543): tr|A3D1N2|A3D1N2_SHEB5 Tryptophan halogenase OS=Shewane lla baltica (strain OS155 / ATCC BAA-1091) OX=325240 GN =Sbal_1124 PE=4 SV=1
MQQATHTAINNIVIVGGGTAGWITAALLAAEHNVDKGQLAHSPKLNITLIESPDVATIGVGEGTWPSMRNTLDKIGISETEFIRQCDASFKQGSRFIHWQYDDTEHTKPFGSNQYLHPFSLPHGHQELDLCPFWLPHSDKVSFAQAVSNQDTLTQLGLAPKTIATPEYHFQNNYGYHLDAGKFSQLLMQHCTEKLGIKYIRDHVSQVHSHANGDIESLATKEHGVILGDMFIDCSGTKSLLLGEHFNVPFLSQKAVLFNDSALAIQVPYTEENSPIASCTLSTAQPNGWIWDIGLPTRKGVGYVYSSAHCSDDEAEQTLRAYLANDTSTKPQSASSNALDSRKQECRKLNINPGYHAKCWQNNCIAIGMAAGFIEPLEASALALVEWTANTLATQLPTHRGVMDTIAQRVNERYERHWQQIIDFLKLHYVVSRREVDGYWRDHREAASIPERLQQQLELWRYQAPSSHDISYKEPLFPAASFQYVLYGMGFNTALPTHIKPSQQQVAQRLFSENQQKIHALSQSLPSNRDLLNKVRQFGFPKI

SEQ ID NO: 86573 - protein, 470 aa, Streptosporangium roseum
  misc_feature (1)..(470): tr|D2AY55|D2AY55_STRRD Putative tryptophan halogenase O S=Streptosporangium roseum (strain ATCC 12428 / DSM 430 21 / JCM 3005 / NI 9100) OX=479432 GN=Sros_4161 PE=4 SV =1
MRESTQILIIGGGPAGSTAAGLLAREGFQVTLLERDRFPRYHIGESILPSCRPIFELLGVWDKVEAHGFQPKGGAFFQWGPEEWEVRFSNLGDDTPNAWQVIRSEFDQLLLDHARELGVEVIEGVSVRDIEFDGDRAVAARWYDTKDPERSGRIEFGHVIDASGRGGVLATRHLKNRRFHDVFRNVAAWTYWKNAKPLSKGPSGAIAVCSVEDGWFWAIPLHDGTLSVGLVTGRDLFNDSRGRLNGDIQAVYDEALAKCPTVLELLDGAEQVSGMKVEQDYSYVAENFAGPGYLLSGDAACFLDPLLSTGVHLATYSAMLGAASLSSVLRGEVAEQDAWRFYNTVYHHAYQRLLILVSVFYESYRGKEHHFYNAQRLTSDERDHLNLQAAFDRIITGIADLNDAEQAYRLVQEHLRGGESGDPNPLNNLNRVHEVKQSPFDPANAVGGLYLVTEPRLGLRSNGATPSDPS

SEQ ID NO: 86574 - protein, 506 aa, Xanthomonas campestris
  misc_feature (1)..(506): tr|A0A381M5Z7|A0A381M5Z7_XANCJ Tryptophan 7-halogenase OS=Xanthomonas campestris pv. juglandis OX=195709 GN=CP BF1521_28150 PE=4 SV=1
MIPAPLRNIVIVGGGTAGWMAAAAFARVLGPGVKVQLIESEQLGTVGVGEATVPHIKAFNNLLGIDEAEFVRQTQGSFKLGIEFVDWQRPGTSYIHGFGTQIGHPLGLLPFHQYWIKQHARGKAQPLGAYTLNTVAAVRGKFMTSAGDVPANSPLANIAYAYHFDATQYARFLRTYAEQRGVTRIEGLVEQVQLHADSGHVQSLQLASGQVVSGDLFIDCSGFRGLLIEEALHTGYHDFTHWLPCDRALAVPSENVGPPTPYTRSTACAAGWQWRIPLQHRTGNGYVYSSAHISDDEAAATLLANLDGKPLADPRPLRFTTGRRKQFWNRNVVALGLASGFLEPLESTSIHLIQAGISRLLELFPREGISPVLVQRYNDRLAFEFDRIRDFLVLHYHATERDDSAFWRHCRTMPIPPELQTTLDLFRDSGRFYRNAEEMFAEISWVQVMVGQGILPRAYHPLVDQVPDHDAERFLASVAQTIGHCVDVMPTHQQFIDRYCKATAPR

SEQ ID NO: 86575 - protein, 500 aa, Alteromonadaceae bacterium
  misc_feature (1)..(500): tr|A0A559QKI4|A0A559QKI4_9ALTE Tryptophan halogenase OS =Alteromonadaceae bacterium 2753L.S.0a.02 OX=1403320 GN =P886_2762 PE=4 SV=1
MEHRFIKKMAIVGGGTAGWIAAAALAKALHNRGIEIVLVESPDIGIVGVGESIIPPVISFLKRLGIDEIDFVRETQASYKLGNKFTDWNVKGDSYWHPFGKIGVDIDDRDFFAFVQKARQLGDTTELWRYSPSAVIAEAGRYYSPAAAQPDSLLAGADYAVHLDATLVAKYLRNYCEQRGVERRAATVTDASLTENGFIEALILDDKTRLQADFFLDCSGTSALLTGKVLNTPYLNWNNYLACNSAVIAHSQNQGGMPPFTQITARDNGWSWEIPLRHRIGNGFVYCDEFCDSASAEKQLLSFIQDSPISELKHFNFNPGKREKLWYKNCLALGFAAGFLEPLESTAIYLSAKGIETFISLFPDTSCSPALAQEYNRCMTSEYEHIRDFLVLHYALSNRSDTPFWQKIKTLDVPRTLLAKIALYQAQGRIYRNDADVFKPQSWHALFDGMGLIPEFYDPLIESADFNEVQNIFGQVRELMSKMANGLPRHADFLAKHCPI

SEQ ID NO: 86576 - protein, 503 aa, Alteromonadaceae bacterium
  misc_feature (1)..(503): tr|A0A559QW16|A0A559QW16_9ALTE Tryptophan halogenase OS =Alteromonadaceae bacterium 2753L.S.0a.02 OX=1403320 GN =P886_1415 PE=4 SV=1
MSDNRIRSVVIVGGGTAGWMTAAACGKILKSSCKIRVIESEALPPIGVGEATIPQINLFNKVLGLNENDFVKHTQATFKLGIEFENWTRIGQRYLHPFGSFGRDMEGVEFHHFWLRLYQHGMAKEIEDYSLAAVAARAGRFTRPLDIPNSPLADIHYAFHFDAGLYAKYLRSFAEAHGVARTEGKINGVQQHSNGFIDSVTLESGETIGGDLFIDCTGFKGLLIEQTLKTGYDDWSHWLPCDTAIAVPCESAGELTPYTRSIAHTAGWQWRIPLQHRIGNGHVFSSRFMSADEATAILLNNLDGEPLADPREIKFTGGKRKKFWNKNVVAIGLASGFVEPLESTAIHLIQSAIARLFSLFPTRDFRQHEIDRFNRLSDLEMERVRDFIILHYIATERDDSPFWRYIQEMQIPDYLAKKIEMYQNSGRIYREDEELFNETSWLAVFHGQGIRAKDYHPVVDTVSFEEVQRRVDGIEAVIQRSCQEMPTQRDFIDKYCKADKPQM

SEQ ID NO: 86577 - protein, 508 aa, Sphingomonas aurantiaca
  misc_feature (1)..(508): tr|A0A2T5GIH0|A0A2T5GIH0_9SPHN Tryptophan halogenase OS =Sphingomonas aurantiaca OX=185949 GN=C8J26_3453 PE=4 S V=1
MTDANPGPIRKVVIVGGGTAGWMAAAAAARYLDDGQRQIVLIESDAIGTVGVGEATIPPILGFNALIGVDEREFLRATGATFKLGIEFVGWDTGDDRYMHAFGGHGRDIQGLAFHQLWLKLRDRPGIGGIDAYAPSAVAAYLNRFGLPTGPQTAPLAYAYHFDAGLYAAFLRRRAEAGGVTRIEGRITRVDRDPDTGHVRAVRLDDGRSVDGDLFIDCSGFRSLLLGETMGVPFEDWSHWLPCDRAVAVPTEPSAPLLPYTRATARTAGWQWRIPLQHRTGNGHVYSSAHISDDEATAVLLANLDSRPTAEPRQLRFKAGRRTSMWKGNVVALGLAGGFLEPLESTSIHLIQTGISKLFALFPDRGFSAVERDEYNRLMGDAYTSVRDFIILHYHATRRDGSAFWRHVRTMPIPDSLTRKLALFREKGRVFRYDDELFGISSWVQVLLGQNVIPVGHDPIVDALDADRVADAIRQIRAATIRGAQSLPNHADFVAHHGPFDRKNEFAK

SEQ ID NO: 86578 - protein, 515 aa, Shewanella denitrificans
  misc_feature (1)..(515): tr|Q12KP0|Q12KP0_SHEDO Tryptophan halogenase OS=Shewane lla denitrificans (strain OS217 / ATCC BAA-1090 / DSM 1 5013) OX=318161 GN=Sden_2707 PE=4 SV=1
MKIKRIAIVGAGTAGWLAANHFGVELSAENDVEITVIESKDVPTIGVGEGSVPYLINALKKFGISEAELLYSCDTTFKQGIKFVNWSDNSIKNEDYYHPFDIPYPSGFDMSPYWVAHGQPRPFGDVGIQARICELGLAPKRKSSAEYEGALTYAYHFDALKFAQLLAKNAKERFKVLHEFITVVGARRSANGNITHLVTSDDTELAFDFYVDCSGFSSILIDKVLQVPFVSKADQLLTDTVLVQQLAINEADEIPPYTTATAHSAGWIWDIPLTTRRGTGFVYSSKHMSDDEAIKEYANYLGIEKEHFFPRKIPMKIGYRQKSWSKNCVALGLAQGFVEPLEATSILATDFSAELLARNFPRDFTDFDIVAPYYNKVLTHVWESVVDFIKLHYCISDRNDSQFWLDNKNEAFISEQLKERLAKFAINTPKKSDFFSQFDLFNDKNFLYVLYGMKFNTRPAKISLHEVEHCKMLLRSNDKLVSGAAKELLSHKEWLSGLRTAMDKSLIKPTEALRA

SEQ ID NO: 86579 - protein, 514 aa, Sphingobium sp.
  misc_feature (1)..(514): tr|A0A2K0Y6Q7|A0A2K0Y6Q7_9SPHN Tryptophan halogenase OS =Sphingobium sp. SA916 OX=1851207 GN=A8G00_13670 PE=4 S V=1
MVHPVRNIVIVGGGTAGWLTAGVIAARHRSRIGNGFTVTLVESPNTPIIGVGEGTWPTLRTTLSRMGISETDLFRECDAAFKQGARFARWTTGTPDDGYYHPLMLPQNFGQVNLAPHWLAGEGDESFCDSVCSQGRICDDGLAPKTIATAEYDALANYAYHLDAGKFAPFLQRHCTEKLGVRHVLADVEQVLMKEDGDIRAIRTTQAGEIEGDLFVDCTGFKALLIEGAMKVPFRDCNDVLFCDTALAMQVPYERPDSPMASHTISTAQSAGWIWDIGLPTRRGIGHVYSSNHISDEEAERELRAYIGPLAEGLGARKIAIRSGHRETFWKGNCVAVGLAAGFLEPLEASAIVLIELSAKIIAEQMPACREVMDIIASRFNATTHYRWGRIIDFLKLHYVLTKRTDSNFWRDNVREETIPDRLKELMLLWRYQSPWFLDEFDRVEEVFPAASYQYVLYGMGFRTEVDRPALARDAHLADRARRENTAMTAKLRAGLPRHRDLIDKIVAHGLQPV

SEQ ID NO: 86580 - protein, 506 aa, Xanthomonas campestris
  misc_feature (1)..(506): tr|A0A383SXD3|A0A383SXD3_XANCJ Tryptophan 7-halogenase OS=Xanthomonas campestris pv. juglandis OX=195709 GN=CP BF426_40420 PE=4 SV=1
MLPAPLRNIVIVGGGTAGWMAAAAFARVLGPGFKVQLIESEQLGTVGVGEATVPHIKAFNNLLGIDEAEFVRQTQGSFKLGIEFVDWQRPGTSYIHGFGTQIGHPLGLLPFHQYWIKQRARGKAQPLGAYTLNTVAAVRGKFMTSAGDVPANSPLANIAYAYHFDATQYARFLRTYSEQRGVTRIEGLVEQVQLHADTGHVQSLQLASGQVVSGDLFIDCSGFRGLLIEEALHTGYHDFTHWLPCDRALAVPSENVGPPTPYTRSTARAAGWQWRIPLQHRTGNGYVYSSAHISDDEAATTLLANLEGTPLADPRPLRFTTGRRKQFWNRNVVALGLASGFLEPLESTSIHLIQAGISRLLELFPREGISPVLVQRYNDRLAFEFDRIRDFLVLHYHATERDDSAFWRHCRTMPITPELQTTLDLFRDSGRFYRNAEEMFAEISWVQVMVGQGILPQGYHPLVDQVPDHDAERFLASVAQTIGHCVDVMPTHQQFIDRYCKAAAPR

SEQ ID NO: 86581 - protein, 522 aa, Pseudoalteromonas sp.
  misc_feature (1)..(522): tr|A0A3Q8WY92|A0A3Q8WY92_9GAMM Tryptophan 7-halogenase OS=Pseudoalteromonas sp. Xi13 OX=2490635 GN=EJ103_09290 PE=4 SV=1
MNDTLKSIVIVGGGTAGWLSAGIIAAYLKKHHSLNYHITLVESADIATVGVGEGTWPTMRRTLQNMGVDEAQFINQCNVSFKQGAKFANWHSTKENDFYYHPLMMPQGFADNDLATAWLRQNTDSAAPHNHFANFVCPQHALCEHNLAPKALTTPQYSGVANYAYHLDAGLFATFLKNHCINHLNVTHVVASVLSVNNNANGDIHSLSLDNNTALCGDLFIDCSGLKSLLLGENLKIGFKSCKDILFADSALAVHMPYDDETQVISSHTISTAQTAGWIWDIGLQTRRGVGHVYSSRHISEQEAKEQLFDYLNISPAKRADFNVKKISFEPGHREKFWHKNCVAIGLSAGFLEPLEASALLLVEISANFIAEQLPANRQVMDITAARFNRTFSYRWQRIIDFLKLHYMLSERTDSLFWQQHCAEQSIPQSLQDNLALWRTHIPNDNHFDYSVEVFPAASYQYVLYGMGFKTATTHYGNHPRAIKKAHNLAAKNTKDTAELVSKLPDNRTLLKQIKQYGLQKI

SEQ ID NO: 86582 - protein, 477 aa, Alishewanella sp.
  misc_feature (1)..(477): tr|A0A0T5PL54|A0A0T5PL54_9ALTE Tryptophan halogenase OS =Alishewanella sp. WH16-1 OX=1651088 GN=AAY72_07555 PE= 4 SV=1
MTAAMLARILGEQIDLQLVESDTIGTVGVGEATIPAIQHFNAALGINEAEFLRETKGSIKLGIQFENWGRQGDSYMHAFGPVGRQLGMASFHHFWLAAQAKGDNSSFWDYSLNYQAAKAGKFSPQSQLPNSPLPGLQYAYHFDAGLYAAFLRRYSEQRRVKRIEGLIAKVEQKPSGDIATVVLTDGQVLSADLFIDCSGLRALLIEQTLAAGYDNWQHWLPCDSALAVPSEARYPIVPYTRSIAHGGGWQWRIPLQHRTGNGLVYSSRFLDDEQAKQTLLSNLDAPALAEPRKISFVTGRRKQQWRRNCVAIGLSSGFLEPLESTSIHLIQSAVVRLVQCFPATQDMTALSNEFNRQSQQEFEAIRDFIILHYHLNQRTDHPLWQYCREMALPDALAQRLELFRHSAQIFRQQDELFTEVAWQQVLLGQNLLPASYHPLADSLTKAQLTGFFADLKQVVSKTVTALPSHQSFLQSQS

SEQ ID NO: 86583 - protein, 508 aa, Shewanella baltica
  misc_feature (1)..(508): tr|A3D1I9|A3D1I9_SHEB5 Tryptophan halogenase OS=Shewane lla baltica (strain OS155 / ATCC BAA-1091) OX=325240 GN =Sbal_1079 PE=4 SV=1
MNNSPLKSITIVGGGSTGWMTALYLSKLYNHSSNIIDIRLIESKEIGIIGVGEATVHSLRFFFAAMGLDENELLRETNATLKTGILFRNWMKPVDGKMHEYFHPFEQQKPSGKIDNASAWILNNQINESNSTPFAEATSLSFSLMQNNLSPKTHYLNQYQGIVPYGYHLDATLMAAFLKRKATQAGVEHIEANVTDVLVNDGNITEVVTDLGSFKSDIFIDCTGFKGLLIQSLKNDNWQSFETELPCNKAVAMQREYLPHQLPRAYTTATALSHGWVWEIDLTNRQGTGYVYDGNSLTREQAEAELKAYLGDEQEIIRTVHLDMKIGCRREFWVGNCIAMGLAGGFIEPLESTGLHLINLGARLLATHLTSSNPSQAIRTSYNTAMKGLYTDLRQFIVLHYCLTDRDDNEFWQKAAQSSAFIPALEQKMTLWKDKVCEYVDLANGYSSVFTDENYRYVLYGMQHIPEIHIPCPKTEISRILDNLKTQQFRAKEQSLSHQEFLAKIKKF

SEQ ID NO: 86584 - protein, 501 aa, Shewanella baltica
  misc_feature (1)..(501): tr|A3D2G4|A3D2G4_SHEB5 Tryptophan halogenase OS=Shewane lla baltica (strain OS155 / ATCC BAA-1091) OX=325240 GN =Sbal_1409 PE=4 SV=1
MKVKQAIRKIIILGGGTAGWMAAAALANNPVFAAIELCLVESDNIGTIGVGEGSTPHLKRFMDNLGISEKDWMELCHASYKTGIDFINWNGDGQQYFHPFYFQMDVKPAEVFFINANARRRGHGNAVKPDAFFSSGVLAKRNLSPRPNKALPCTNEYGYHFDATELANYLKDYACKRGVRQIIADVVEVSTTQHQQIETLILANGERLSADFFIDASGFSAKLIHKALGVPFQSFADELLNDSAVTVPVPALMDSTQTQQAKYHTRATALSAGWLWQIPLTHRLGNGYVYSSRHLSANAAAKELLHSINLPESTQVRFLKMRVGVSDKAWHNNVLAIGLAQSFIEPLEATSIMMTQFTLERFMSLFERYQLNKQAETLSRQTLNQAVMQLVLGIKDYIQAHYVTSQRSEAYWVAARKVAISQRLTQLLKAWYQGEDFDLLLYQYDQQLAYFRPSWYALLAGMDYRDPKLKRPFEPISAEITAQAISYCQTLVEQYFQPKHS

SEQ ID NO: 86585 - protein, 515 aa, Altererythrobacter sp.
  misc_feature (1)..(515): tr|A0A418NHM9|A0A418NHM9_9SPHN Tryptophan 7-halogenase OS=Altererythrobacter sp. Ery1 OX=2306995 GN=D2V04_0978 0 PE=4 SV=1
MHGDFARLVIVGGGTAGWLSAAYLAARCPELDITIVEAPDIPTIGVGEGSWPTLRKTLATIGISEVEFLTACDASFKQGSRFDGWANGGPGDSYYHPFTAPIAGDIAELLSAWKGTADELPFSYAMNPQAAICDRDLAPRQRAMPDFAGALNYGYHLDAGKLAVLLARHAVQKLGVTHVRDTAMDVETGEDGFITALRLREGEPLRGDFFIDCTGMAARLIGQELGVEWIDRSDVSFNDRALAVQVPTLPDSPIASQTVATAHEAGWLWDIALPSRRGVGCVYSSRFMDDDAAAEVLAEYVAANVPGADSASLTPRRLQFATGHRAEFWRGNCLAVGLSAGFIEPLEASAIVLIELSLKALADNFPRSRDALTLHAARFNSLFRYRWGRTVDFLKLHYVLSYRREPYWLAQRDPATIPQSLADQLVLWRDHPPSEADFPQINEIFSAASQQYVLYGMGYVLPADSGFTAGDGATRKLTEVRERERALASALPTNRAYFDALAGEPARAQGEIASQ

SEQ ID NO: 86586 - protein, 505 aa, Rhodanobacter sp.
  misc_feature (1)..(505): tr|A0A1M3NZ43|A0A1M3NZ43_9GAMM Tryptophan halogenase OS =Rhodanobacter sp. 68-29 OX=1895823 GN=BGP10_03790 PE=4 SV=1
MGDARIRRLVIVGGGTAGWLTAALLARALGPQLRIALVESAEIGTVGVGEATIPQILHVNRFLGLDEDDMLRAVHGTFKLGVQLNDFTRVGESYLHAFGDLGLPLGLTPFHHYWLRSRGRPGAAGLWAHSLNAAAAAANRFARMDTVPNSPLGGIRYAYHFDALRYGQYLRRHIAPGVVERIEGKVVDVRLRAGDGYIESLLLDGGAMVAGDFFIDCSGFRGLLIEGALKAGYENWQHWLPCDRALAVASAPGGAMRPYTQASARSAGWQWRIPLQTRTGNGHVYCSRFVSDDEAAAQLLASLETEALGDPRPLRFVTGMRKQAWSRNCLALGLAAGFMEPLESTSIHLVQSGVNRLLAMFSDRHCDPMLVDEYNRQTRFEYERVRDFLILHYKATERSDTPFWRQCGAMEIPPGLARRIELFRRTGMIFREGDELFAETGWLQVLLGQRIEPARHHPLADALSDQQLDHFLANVRTLVDRAAATLPPHHEFVARHCGMPAPAEA

SEQ ID NO: 86587 - protein, 496 aa, Sphingosinicella sp.
  misc_feature (1)..(496): tr|A0A2P7QJE4|A0A2P7QJE4_9SPHN Tryptophan halogenase OS =Sphingosinicella sp. GL-C-18 OX=2116704 GN=C7I55_20660 PE=4 SV=1
MTIVVAGGGTAGWMTAAALARFLGRNVRIHLVESEEIGTIGVGEATIPQIRTFNQALGIDETAFVRATEATFKLAIEFVGWSRPGERYMHAFGDIGRESGLLPFHHSWLRGRREGVARELAHYSLNNMAALGERMQTGAARTSALLPEMPYAFHFDAALYAAFLRRFAEEQGVVRTEGRIAGVERDQTSGDVAALALADGRRIAGDLFIDCTGFSGLLIENALGAGYDDWSHWLPCDRAVAVPSARVEAFTPYTRATAHGAGWQWRIPLQHRTGNGIVYASAHLSDDAASALLLANLDSAPLADPRPMRFTTGKRREMWKHNVIAVGLAAGFMEPLESTSIHLIQTAISRILKLLPGREATQAQRNQFNRESDIEYERIRDFLILHYRANRRDEPFWRARQEAAIPASLAAKIALWAGNGHIVREQDELFTEVAWLQVFVGQGVMPAGNHPIADFPSRDGLAEYLGLIDKLIAREVAQMPDHDAFVAALCPARIPA

SEQ ID NO: 86588 - protein, 504 aa, Sphingomonas aurantiaca
  misc_feature (1)..(504): tr|A0A2T5GIJ8|A0A2T5GIJ8_9SPHN Tryptophan halogenase OS =Sphingomonas aurantiaca OX=185949 GN=C8J26_3451 PE=4 S V=1
MRKTRVVVVGGGTAGWMTAAALVRLLPVACSVHLVESAEIGIVGVGEATLPHIRAFVERLGLDEADFMRATHATFKLGIDFRDFGAIGDSYIHPFGSFGRPLDDVGFHHYWLRLAAAGRAGPIGDYSVAVAAAKRHRFAIPDGAPDDLAASFGYAYQFDATLFGPYLRHFAEAHGARRTEARIVSVDRDPLNGDVRALRLDSGEAVEGDLFVDCSGFRSLLLGDAMAEPWEDWSRWLPCDRAVAMPCTSPDGPIEPYTRATAKPAGWQWRIPLQHRVGNGYVYSSAHLSDQAAADALVTSVEGAPLADPRVLKFRAGRRRNSWVGNVVAIGLASGFLEPLESTSIYLAQMAITQLIELFPQNIRADGIATADRTEFNRMVDMEYDRIRDFLILHYHATTRDDSDFWNHVRTMEVPATLADKIELFRQAGRVTQYSEGLFLEPSWIAVYLGQGIVPQAWDQRADRPGLDGLDRAIASLRDHVAATATAMPDHGTFIARRNATIAA

SEQ ID NO: 86589 - protein, 508 aa, Xanthomonas campestris
  misc_feature (1)..(508): tr|A0A2N7V0N6|A0A2N7V0N6_XANCJ Tryptophan 7-halogenase OS=Xanthomonas campestris pv. juglandis OX=195709 GN=C1 H21_20355 PE=4 SV=1
MLPAPLRNIVIVIVGGGTAGWMAAAAFARVLGPGFKVQLIESEQLGTVGVGEATVPHIKAFNNLLGIDEAEFVRQTQGSFKLGIEFVDWQRPGTSYIHGFGTQIGHPLGLLPFHQYWIKQHARGKAQPLGAYTLNTVAAVRGKFMTSAGDVPANSPLANIAYAYHFDATQYARFLRTYSEQRGVTRIEGLVEQVQLHADTGHVQSLQLASGQVVSGDLFIDCSGFRGLLIEEALHTGYHDFTHWLPCDRALAVPSENVGPPTPYTRSTARAAGWQWRIPLQHRTGNGYVYSSAHISDDEAAATLLANLEGTPLADPRPLRFTTGRRKQFWNRNVVALGLASGFLEPLESTSIHLIQAGISRLLELFPREGISPVLVQRYNDRLAFEFDRVRDFLVLHYHATERDDSAFWRHCRTMPITPELQTTLDLFRDSGRFYRNAEEMFAEISWVQVMVGQGILPQGYHPLVDQVPDHDAERFLASVAQTIGHCVDVMPTHQQFIDRYCKAAAPR

SEQ ID NO: 86590 - protein, 503 aa, Sphingomonas aurantiaca
  misc_feature (1)..(503): tr|A0A2T5GFR7|A0A2T5GFR7_9SPHN Tryptophan halogenase OS =Sphingomonas aurantiaca OX=185949 GN=C8J26_4027 PE=4 S V=1
MTEHPIRRVVIAGGGTAGWMAAAAIARTMGGTIALTLVESDAIGTVGVGESTIPPMITFNRLLGINEAEFMRETQATFKLGILFDDWKDRGESYFHSFGITGKDHWSAGFQHFWLHGLTKGHDQPYDDYCLELRAALQGKFAHLPDDRMNYAYQLDSTRYAQFLRKMAEADGTRRVEGKIAQVELNGESGDIAALVLDSGARIEGDLFLDCTGFRALLIEGALHAGFDDWTHYLPCDSAIAIQTESVRPALPYTRAMAHDAGWQWRIPLQHRTGNGLVYCSRYLDRDAALDRLLGNIEGETLTEPNMIRFVTGARRQQWHRNCIAIGLSGGFMEPLESTSIHLIQRAVLRLLRLFPAGAVSPRDVTEFNDQQHTDMLQIRDFLILHYKATNRRDSAFWRQCAAMPIPESLEQKIELFRETGRVFRKNEELFAENSWVQVMLGQGIVPQSYHPIATKLLDEELARLLAGLRDGTNATVAGLPEHADYVARYCGAAPARPSTVVA

SEQ ID NO: 86591 - protein, 534 aa, Sphingomonas aurantiaca
  misc_feature (1)..(534): tr|A0A2T5GFU2|A0A2T5GFU2_9SPHN Tryptophan halogenase OS =Sphingomonas aurantiaca OX=185949 GN=C8J26_4030 PE=4 S V=1
MATDTGPGATNDQPITTIVVVGGGTAGWLAACLIAARADRGAEQPLSVTLIESPDVATIGVGEGTWPTMRRTLERIGISETDFLLACDGAFKQGSRFDGWRTGAADDSYLHPFTAPVDGDPRDIVAAWAEHGGRFADTVGAQGVICHRALAPRQRAMPDYAGTLNYAYHLDAGKLASMLMRHATERLGVRHIRDHVVGIDGTADGDIAAVRTRASGAIAGDLFLDCTGHAALLIEGYYGIGTVDRGGTLFNDRALAVQVPVAANSPIASQTNATAHAAGWIWDIGLPTRRGVGCVYSSAHLSDDAAADTLTRYLRATVPDAALPSFRQLTFRSRHRETFWHRNCLAVGLSAGFLEPLEASAIVLIELSLDALLDNFPSHRGAMDIHSMRFNTLFRYRWDRIVEFLKLHYVLSERDEPYWRDHRAPASIPPRLAELLQLWRHQPPSRADFPMVDEIFPAASYQYVLYGMGFPAPTRGPIATPDRARTQTLLAQVDQRRRMLAAGLPTNRAYLDALRHATAPAPAPAPAPAMEPIA

SEQ ID NO: 86592 - protein, 538 aa, Pseudomonas sp.
  misc_feature (1)..(538): tr|A0A2V3CH72|A0A2V3CH72_9PSED Tryptophan halogenase OS =Pseudomonas sp. RW409 OX=2202895 GN=DK261_18420 PE=4 S V=1
MNKPIKNIVIVGGGTAGWMAASYLVRALQQQANITLIESAAIPRIGVGEATIPSLQKVFFDFLGIPEREWMPQVNGAFKAAIKFVNWRKSPDHSRDDHFYHLFGNVPNCDGVPLTHYWLRKREQGFRQPMEYACYPQPGALDGKLAPCLADGTRQMSHAWHFDAHLVADFLKRWAVERGVNRVVDEVVEVRLNDRGYISTLLTKEGRTLEGDLFIDCSGMRGLLINQALKEPFIDMSDYLLCDSAVASAVPNDDAREGVEPYTSAIAMNSGWTWKIPMLGRFGSGYVFSSKFTSRDQATADFLNLWGLSDNQPLNQIKFRVGRNKRAWVNNCVSIGLSSCFLEPLESTGIYFIYAALYQLVKHFPDTSFDPRLSDAFNAEIVHMFDDCRDFVQAHYFTASREDTPFWLANRHELRLSDAIKEKVQRYKAGLPLTTTSFDDSTYYETFDYEFKNFWLNGNYYCIFAGLGMLPDRSLPLLQHRPESIEKAEAMFASIQREAERLRTSLPTNYDYLRSLRDGDAGLSRSQPGPTLAAREIL

SEQ ID NO: 86593 - protein, 520 aa, Xanthomonas campestris
  misc_feature (1)..(520): tr|A0A383SWM5|A0A383SWM5_XANCJ Tryptophan 7-halogenase OS=Xanthomonas campestris pv. juglandis OX=195709 GN=CP BF426_38670 PE=4 SV=1
MTDTTPADPQQRPVRRVVIAGGGTAGWMAAAALSKVLGRHLQITLVESDEIGTVGVGEATIPSLVTFHRLLEIDEAAFMAATQATIKLGIGFEHWRDVDRHYIHSFGHTGTDHWSAGFQHFWLKGRQRGVARDFGDYCLELRAAQEGRFAHLPNGGMNYAYHLDAGLYARFLRRFSEGFGVQRIEGRIGSVETDAHSGYLTALTLDNGMRVEGDLFLDCTGFAGLLIGKTLGVGTDDWSQWLFADSALAVQTESVGAPVAYTRSRADQAGWMWRIPLQHRVGNGIVYSSRYMDQDSAAQVLQHNLSGRALSQPRALRFTPNQRHRVWEKNCVALGLASGFLEPLESTNIHLIQRGIIRLMQTFPQVINDVDIAEYNRQAAAEITHIRDFVILHYHATDRRDTPFWRDCAAMDIPDTLRHRVELFRQSGRVFHQANELFAENSWVQVMLGQGITPKQHHPVADLMGDAELRHFLETIRTRVDAALLRLPAHADFLRRYCPAPLPEPATRLPTDTALVTGTR

SEQ ID NO: 86594 - protein, 532 aa, Sphingomonas aurantiaca
  misc_feature (1)..(532): tr|A0A2T5GK45|A0A2T5GK45_9SPHN Tryptophan halogenase OS =Sphingomonas aurantiaca OX=185949 GN=C8J26_2523 PE=4 S V=1
MPIAGRPTPPRACSAMAAPDGFEAGTQTMANHPLRIVIAGGGTAGWMAAATFARFLETGYEIDLIESDAIGTVGVGEATIPQIHLFNDALGLDEDAFLRATGGTFKLGIEFIDWFKPGRRYLHAFGDVGRDVGLLPFHQYWLRARSLGLAGDLGAYSLNTHAALANRMQRGPARTARTLPSMPYAYHFDAALYARYLRRYSETRGVNRIEGKIVRVTRDGDSGDVSGLVLENGTTVAADLYIDCTGFRGLLIEEALGTGYEDWTHWLPCDRAIAVPSARGEKFTPYTRSTAHAAGWQWRIPLQHRTGNGVVYSSAHMSEDEATATLLRGLDTPAMADPRTITFRTGRRKRMWNHNVVALGLAAGFMEPLESTSIHLIQSAIARLLKLLPGRVIAEADRTEFNRQSDFEYERIRDFIILHYKATERDDTPFWRQCRDMAVPDTLAAKIALWRGNGHIVREHEELFTEVGWLQVLAGQGIVPDGHHPLADAISTADLGEFMDTIDKLNAREAHQMQDHAAFVAQHCAAAPSLAA

SEQ ID NO: 86595 - protein, 506 aa, Xanthomonas vesicatoria
  misc_feature (1)..(506): tr|A0A1L5QTS0|A0A1L5QTS0_9XANT Tryptophan halogenase OS =Xanthomonas vesicatoria OX=56460 GN=BI313_14980 PE=4 S V=1
MIPAPLRNIVIVGGGTAGWMAAAAFARVLGPTFNVQLIESEQLGTVGVGEATVPHIKAFNNLLGIDEAEFVRQTQGSFKLGIEFVDWQRPGTSYIHGFGSQIGHPLGLLPFHQYWIKQHARGTAQPLGAYTLNTVAAARGKFMTSAGDVPANSPLANIAYAYHFDASLYARFLRGFAEARGVRRIEGMVDQVQLHPESGHVVSLQLASGQVIAGDLFIDCSGFRGLLIEDALHTGYHDFTRWLPCDRALAVPCEKVGPPTPYTRSTARAAGWQWRIPLQHRTGNGYVYSSAHISDDEAAASLLANLDGRPLGDPRPLRFTTGRRKQFWNRNVVALGLASGFLEPLESTSIHLIQSGISRLLELFPREGISPVLVQRYNDRLAFEFDRIRDFLLLHYHATERDDSAFWRHCRHMPITPELQTTLDLFRDSGRFYRNAEEMFAEISWVQVMVGQGILPTGYHPLVDQVPDTDAEGFLSSVAQTISHCVDVMPTHQQFIDRYCKAAPAR

SEQ ID NO: 86596 - protein, 517 aa, Alteromonadaceae bacterium
  misc_feature (1)..(517): tr|A0A559QW23|A0A559QW23_9ALTE Tryptophan halogenase OS =Alteromonadaceae bacterium 2753L.S.0a.02 OX=1403320 GN =P886_1413 PE=4 SV=1
MQNKPISKIVIVGGGTAGWMTAAALANFIDTSQTQITLIESDQIGTVGVGEATLPHLRYFNQVLGIDEQDFLRATNATYKLGIEFIDWGNIGESYIHPFGDYGVPVADIPFHQFWCALTQGGYKHSINEFSVPVVAAYQNKFDYPARDVTSLLATYGYAFHLDASLYAKYLRNYAEAKNVLRIEGRINSVECDGSGAISTLHLEDAPSLSGDLFIDCSGFRSLLLGETLGVNFDDWSEWLRCDRAVALPCGGDEQPLPYTKARAHRSGWQWRIPLQHRTGNGHVYCSDFISDDEALSVLKSNLDGEPLAEPNFLKFKAGHRVKCWEKNCIAVGLAAGFLEPLESTSIYLIQVAITKLLELFPRRDFNASVVDEFNSQVNLAFERVRDFLILHYHATQRDDSDFWNYCRTMPIPEELQHKMTLFKKRGFVVQYDDGIFLEPSWVAVYLGQNIVPAHYDARVDNFDLSLIRNECDKLQQRILTAVNTMPMHGEVLQKHLKHSAEQPAPPASFNLYGRNS

SEQ ID NO: 86597 - protein, 508 aa, Pseudoalteromonas sp.
  misc_feature (1)..(508): tr|A0A3S8ZCZ5|A0A3S8ZCZ5_9GAMM Tryptophan 7-halogenase OS=Pseudoalteromonas sp. Xi13 OX=2490635 GN=EJ103_01095 PE=4 SV=1
MNKAIKTIAVIGGGTAGWLSAAIIASYHQGNKGDGLKVMLVESSDIPTIGVGEGTWPTMKNTLQQIGLREVDVFKACNATFKQGGKFVNWTHGNNDFYYHPFTVPLGYGRIDLAPYLDNVENFAQQTNFQHDICEANLAPRGIAQGEYQANCNYAYHLDAGAFAELLKQHCKSKLGIEHIIGTVDQVKLDESGAIDTLTLTDQTRTINADLYIDCTGFSSLLLGQALNVPFKKMDHVLFNDSALAMQVPYEEGDESLASHTIATAQNAGWIWDIGLTHRRGVGHVYSSKFLSDEEAEQNLRNYLGDAAKGLTARKISFESGYREKFWHKNCVAVGMSAGFVEPLEATAIMLVEISSRFVAEHMPADTQVMHIVAKRFNEQMDYRWQRIIDFLKLHYMLTKRPEPYWQAHIQPQSIPQSLQEDLLLWGTRGPLIQDFHGALELFPAASYQYVLYGMGFKPDFTKQAYLYSNDAQANQIIERNSQLTQQMLQTLPPHRAYIEQWLAANPV

SEQ ID NO: 86598 - protein, 515 aa, Altererythrobacter sp.
  misc_feature (1)..(515): tr|A0A4Q2KSX0|A0A4Q2KSX0_9SPHN Tryptophan 7-halogenase OS=Altererythrobacter sp. AY-3R OX=2268576 GN=ETX26_068 60 PE=4 SV=1
MHGDFTRLVIVGGGTAGWLSAAYLAARCPELDITIVEAPDIPTIGVGEGSWPTLRKTLATIGIGEVEFLTACDASFKQGSRFDGWVDGEPGDSYYHPFTPPVAGHMAELLSAWKGRADDLPFSYAMNPQASICDRDLAPRQRAMPDFAGALNYGYHLDAGKLAALLARHAVQKLGVTHVRDTVTDVETGEDGRITALRLRGGEPLRGDFFIDCTGMAARLIGQELGVEWIDRSDVSFNDRALAAQVPTLRDSPIASQTVATAHESGWLWDIALPSRRGIGCVYSSRFMDDDAAAEVLTEYIAANVPGADTASLAPRKLQFATGHRAEFWRGNCLAVGLSAGFIEPLEASAIVLIELSLEALADNFPRSREALALHAARFNSLFRYRWGRTVDFLKLHYVLSRRAEPYWLAQRDPATIPQSLADQLVLWRDHPPSEADFPQINEIFSAASQQYVLYGMGYDLPADSGLPAGDGARRKLVEVSGRERALASALPTNRAYFDALADEAAGAQGETASQ

SEQ ID NO: 86599 - protein, 500 aa, Altererythrobacter sp.
  misc_feature (1)..(500): tr|A0A4Q2KM43|A0A4Q2KM43_9SPHN Tryptophan 7-halogenase OS=Altererythrobacter sp. AY-3R OX=2268576 GN=ETX26_068 45 PE=4 SV=1
MKNGFTPMRIVVAGGGTAGWMAAAALAHTMGEAIELILVESDAIGTVGVGEATIPPLIQFNRLIGLNEAEFMRETQATFKLGIEFENWRRDGDKYFHAFGTTGRDHWSAGFQHFWAEGGERGCAESYSDYCLELVAAYARKFAHLPKNGLNYAYHLNATAYAAFLRRVAEKAGAKRVEGKIAEVQLDADSGNLTALRLEDGQRLKGDLFIDCTGFRALLIEGALHVGYDDWSHYLPCDSAIAVQTELSGPPVPYTRAIAHDAGWQWRIPLQHRGGNGIVYCSRYLSQDAARKRLMSTLEGKPISEPRAIPFTAGVRRKQWHRNCVAIGLAGGFLEPLESTSIHLIQRAVVRLIRMMPAGQVSERDVAEFNDQQLTDMVQVRDFLILHYKATDRQDSPFWRQCATMEIPDTLRQKIELFRETGRVFRKNEEIFAENSWVQVMLGQGIEPQNHHPIAKKMSDAELSRFLSSLRENVCRTVAALPKHEDYVAQFCAADKATVA

SEQ ID NO: 86600 - protein, 521 aa, Xanthomonas campestris
  misc_feature (1)..(521): tr|A0A2N7V095|A0A2N7V095_XANCJ Tryptophan halogenase OS =Xanthomonas campestris pv. juglandis OX=195709 GN=C1H2 1_19430 PE=4 SV=1
MTDTTPSDPQQRPVRRVVIAGGGTAGWMAAAALSKVLGRHLQIVLVESDEIGTVGVGEATIPSLVTFHRLLEIDEAAFMAATQATIKLGIGFEHWRDVDRHYIHSFGHTGTDHWSAGFQHFWLKGRQRGLARDFGDYCLELRAAQEGRFAHLPNGGMNYAYHLDAGLYARFLRRFSEGFGVQRIEGRIGNVETHAHSGYLTALTLDNGTRVEGDLFLDCTGFAGLLIGKTLGVGTDDWSQWLFADSALAVQTESVGAPVPYTRSRADQAGWMWRIPLQHRVGNGIVYSSRYMDQNSAAQVLQRNLSGRALTQPRALRFTPNQRHQVWEKNCVALGLASGFLEPLESTNIHLIQRGIIRLMQTFPQVINDVDIAEYNRQAAAEITHIRDFVILHYHATDRRDTPFWRDCAAMDIPDTLRHRVELFRQSGRVFHQANELFAENSWVQVMLGQGITPKQHHPVADLMGDAELRHFLETIRTRVDAALVRLPAHADFLRRYCPAPPLPEPATRLPADAALTTGVR

SEQ ID NO: 86601 - protein, 497 aa, Shewanella denitrificans
  misc_feature (1)..(497): tr|Q12ML3|Q12ML3_SHEDO Tryptophan halogenase OS=Shewane lla denitrificans (strain OS217 / ATCC BAA-1090 / DSM 1 5013) OX=318161 GN=Sden_2030 PE=4 SV=1
MKSEISKVVIAGGGTSGWMTAAMLAKMFKKTLDIHLVESEDIGTIGVGEASIPPLKLFNNALGIPEAEFIHATQASIKLGIEFEHWGQQGERYMHAFGNIGKDLGLTPFHHFWLKSQQTNTSDFWQFSVNYQAAKQNKFAPLESLANNQMAGITHAYHFDANLYAKLLRQYSQQAGVNRHEGKIVTTKLDTQGNIESLELSDGRVIMGDLFIDCSGFAALLIGQALKVDYDNWQHWLPCDSAYAVPSTNSGPLKPYTQSIAHAAGWQWRIPLQHRTGNGLVYCSQYMSDEAAKQLLLQNLEGEALAEPRKISFTTGRRVKQWHKNCVSIGLSSGFLEPLESTSIHLVQSAITRLIKCFPNQGIKDIQVAEFNRQSQKEFEQIRDFIILHYHLNQKNNDAGLWQYCREMTIPESLQRKIDLFRTSGTVFREQDELFTEAAWVQVLLGQGITPEDYHPLANAISGADLTDFLGNMKSIISASVSRLPSHEHFLASLLLR

SEQ ID NO: 86602 - protein, 491 aa, Alteromonadaceae bacterium
  misc_feature (1)..(491): tr|A0A559QIN1|A0A559QIN1_9ALTE Tryptophan halogenase OS =Alteromonadaceae bacterium 2753L.S.0a.02 OX=1403320 GN =P886_2068 PE=4 SV=1
MGAIKKVVIAGGGTAGWIVAAALSKKLGDVLDITLVESEDIGTIGVGEATIPPIRVFHRLLQIDEQEFMRATSATFKLGISFENWKNGDDTYIHSFGKTGRETWLADFIHFWLKAKEIGFAGDFGDYCYELQAAQKNKFGLSKNSEINYAYHLDATRYAQFLRKMSEASGARRLEGKIASVQQNNDTGYIESLTLENGEIIEGDLFIDCTGFHGLLIEKTLHTGYEDWGHWLPCNTAVAVQTESVGPAVPYTRSIAHHAGWRWRIPLQHRVGNGLVYSSDYMSDDEAVSTLLSSVEGKTLTEPRLIKYRTGRRRKIWNKNCVALGLSSGFIEPLESTSIHLFIMGITRLMQLFPFSGIEPSLVDEFNAETSKELEMVRDFIILHYKVTERNDSSFWQYCRNMDVPEKLARRIELFKSSALAFQREGELFRVDSWTQVMLGQGITPQSYHHLVELMSASELQNMLTGLDGSIAKAVEMLPTHQEFVDNYCKA

SEQ ID NO: 86603 - protein, 521 aa, Xanthomonas campestris
  misc_feature (1)..(521): tr|A0A381M4U2|A0A381M4U2_XANCJ Tryptophan 7-halogenase OS=Xanthomonas campestris pv. juglandis OX=195709 GN=CP BF1521_30770 PE=4 SV=1
MTDTAPSDPQQRPVRRVVIAGGGTAGWMAAAALSKVLGRHLQIVLVESDEIGTVGVGEATIPSLVTFHRLLEIDEAAFMAATQATIKLGIGFEHWRDVDRHYIHSFGHTGTDHWSAGFQHFWLKGRQRGLARDFGDYCLELRAAQEGRFAHLPNGGMNYAYHLDAGLYARFLRRFSEGFGVQRIEGRIGNVETHAHSGYLTALTLDNGTRVEGDLFLDCTGFAGLLIGKTLGVGTDDWSQWLFADSALAVQTESVGAPVPYTRSRADQAGWMWRIPLQHRVGNGIVYSSRYMDQNSAAQVLQRNLSGRALTQPRALRFTPNQRHRVWEKNCVALGLASGFLEPLESTNIHLIQRGIIRLMQTFPQVINDVDIAEYNRQAAAEITHIRDFVILHYHATDRRDTPFWRDCAAMDIPDTLRHRVELFRQSGRVFHQANELFAENSWVQVMLGQGITPKQHHPVADLMGDAELRHFLETIRTRVDAALARLPAHADFLRRYCPAPPLPEPATRLPADAALVTGVR

SEQ ID NO: 86604 - protein, 569 aa, Streptomyces thermolilacinus
  misc_feature (1)..(569): tr|A0A1D3E0M1|A0A1D3E0M1_9ACTN Tryptophan halogenase OS =Streptomyces thermolilacinus SPC6 OX=1306406 GN=J116_0 16130 PE=4 SV=1
MKQGGLSVAVFEKEDFPREHIGESFAHPLIPVLEETGVLDKVLASDCWVKKFGGIFQWRGQDPHVAFFDHSNTVRDGAHRWAIHVNRSEFDKILLDHAAELGAEVFEGTAVSDCAPLPDGQGQEVTLKDGRTVRAGFFVDASGRRNSIVTKKRREWLSGYRNIAIWQHYLGGRTTQTLDGDWNIFREQDMSPIGCFAFRDGWCWYIPVPKVIDGKRVTTHSIGIVTDPAILRQPGADFTDPEVFLRTVKQVPKLGELIQDVTPVGDKMLTATNYSMINDKFADYDGRWILLGDASYFVDPLFSSGVAFATNQARAAAALIRETRREGLGEAEVRGLWRDYDTEWHGMAASFALSIDQWYYAIGKDNPDSVYWNSRGTDGPAGPDHETTFHALLNTAFTPDLLQVLSRGEGLAALDVDGPFMTAYAEANDLELDADTKVALKENVTVLTGPALDIPGFKAAIPPEPDLMPEEEQKAIAAYWDDPVRNGDLVDSPLDRTLAAHRFGFADDPEGPQVRGLDERDGAADLWERLRGGPVLWRDLVRGLHDGQERLLKRLLHAGMLDLGTRTTA

SEQ ID NO: 86605 - protein, 513 aa, Pseudoalteromonas profundi
  misc_feature (1)..(513): tr|A0A3A3EXQ4|A0A3A3EXQ4_9GAMM Tryptophan 7-halogenase OS=Pseudoalteromonas profundi OX=1774956 GN=D4741_18135 PE=4 SV=1
MQQNEVKKVVILGGGSAGWLSAGLIAAQPHLTHNAQITLIESPDIATIGVGEGTWPTMRQTLKTIGISESEFIQRCDASFKQGSRFDGWCDDEGDAHYYHPFSLPVAYQQLNIAPYWFANKDAVSFSHAVASQTYLCDHHKAPKNHLHSAYQGEANYGYHLDAGKFAMQLQQHCTTKLNVEHIVSHVECINSDEDGYISSLQTRDHGTIAGDLFIDCSGTHAKLLHQHYGIELIKQHDVLFNDRAVAVQVPYLNPQQDILSYTKATAQDAGWIWDIGLQSRRGLGMVYSSRFASSEDAKQALSQYIAKTQPGTAQNELTFREISFTPGYRRRFWYKNCLAIGMSAGFIEPLEASALVMVELGLNNLLANFPTHRAAMPTLAKRFDEQCHYRWQRIIEFLKLHYVLSKRTSPYWQAHKEANSIPLQLQENLALWQYQSPWLNDFDRAQEVFSAASYQYVLYGMKQLPQFPVLAMPTAIIEHFSANQQQAKRGLQQLPTNRELLNHIQQFGIQPI

SEQ ID NO: 86606 - protein, 510 aa, Shewanella sp.
  misc_feature (1)..(510): tr|A0KZX5|A0KZX5_SHESA Tryptophan halogenase OS=Shewane lla sp. (strain ANA-3) OX=94122 GN=Shewana3_3120 PE=4 S V=1
MKIKRIAIIGGGTAGWLAANHLGAELCHDPEIEITLIESLDVPTIGVGEGSVPYLAKGLKRFGISEAEMLLTCDATFKQGIKFVNWLDPKHGENHYYHSFDTPYPAGVDVSNFWLANAAGRPFDDVGIQARICELGLSPKRKGSGDYEGALSYAYHFNALKFAGLLANNAKSRFNVKHQFATIKGAEVCQSGRITHLVTADDTSLAFDFYVDCSGFASILIDKTLKVPFVSKANELLTDTVLVQQVALGADEEINPYTTATAHRAGWIWDIPLTTRRGTGFVYSSRHMSDDEALGLYADYLNVDSAQFNPRKIPMKVGYRETFWHHNCVALGLAQGFVEPLEATSILVSDFSAELLARNFPRHLEDIDVLTPHYNQVTTYVWERVVDFIKLHYCISDRTDSDFWLDNKNSETISQELYQRLARFALKPPHASDFFGRFELFDHKNFLYVLYGMKFNTAAPVLSAQEVKHCEALMTGNDQLVVKAASMLLKHRDWLEGLKQAFEQARSTKV

SEQ ID NO: 86607 - protein, 416 aa, Kangiella sediminilitoris
  misc_feature (1)..(416): tr|A0A1B3BDZ2|A0A1B3BDZ2_9GAMM Tryptophan halogenase OS =Kangiella sediminilitoris OX=1144748 GN=KS2013_2279 PE =4 SV=1
MNRPSPDYDVIIIGAGPAGSLASSLLVQQGYSALVIEKETFPRFSIGESLLPQSMIYLEEAKMLKAVEEAAESLGFQYKNGAAFIANDQYSDFNFSEKFSAGPGHTYQVKRAHFDQLLANEAENQGADFKFGCLLTSLQLEPEPVLTIQTEKGISEQLTARFILDASGFARVLPRLLDLSQPSDFPVRSSVFCHIKDNISDTDYDRNKILIETHPELDDVWFWLIPFSDGTSSLGCVAKPEYFEQLTTADTPEALLDQAIAETSRFQTLLASSTKTSDTRQVTGFSSNVKQLYGRNFALLGNAGEFLDPIFSSGVTIAFKSAKLATDILNKQFTNQPYCWQTEFAEPLQQGVNTFKAFVNSWYQGDFQNIIHFKDAPTEVREMICSILAGYAWDKDNPFVQQPERRLQVVGGLCAS

SEQ ID NO: 86608 - protein, 516 aa, Sphingomonas aurantiaca
  misc_feature (1)..(516): tr|A0A2T5GR98|A0A2T5GR98_9SPHN Glycine/D-amino acid oxi dase-like deaminating enzyme OS=Sphingomonas aurantiaca OX=185949 GN=C8J26_0127 PE=4 SV=1
MTKRILIVGGGTAGWLTAGYLAKRLGADLPAGVAITLVESRDIGILGVGEGTFPTIRRTLATIGIDEADLIRRCGATFKQGAKFVHWRHAPGQGPTDHYSHPFQVADSSDGLDLLPYWLLGHGGTENWDEVSNPQKKAADRHRAPKLASNPDYVGPLNYAFHFDAVALAGLLREQAVKNGVRHLTDTVNEVLLDADGAIGGVRTERNGMLDADLYIDCTGFRAELIGKAMRIPFRSCRDVLFCNRAIAAQLPYARPDEPIASYTISTAQEAGWIWDIGLDRRRGIGHVYSSDHSDDEAAERVLRGYLGAAGEKADVRHFKFEAGYREVNWYKNCVAVGLSSGFFEPLEATGIAFAEVSAGMIANLFPWGGDYETSARQFNANMLRRYERALDFIKLHYCISERRDTAFWRDNVADASVPDSLLEMLDRWRFRPPNELDIDGQIDIFTEASWQYVLYGMGWKTDLSAKAGVLRYGDDARRAFAEVQRQARYAIANLPSNRDLVAYAQSHSFGGRAAA

SEQ ID NO: 86609 - protein, 505 aa, Xanthomonas campestris
  misc_feature (1)..(505): tr|A0A383SCB3|A0A383SCB3_XANCJ Tryptophan 7-halogenase OS=Xanthomonas campestris pv. juglandis OX=195709 GN=CP BF426_06950 PE=4 SV=1
MSQAPIRKVVIAGGGTAGWIAACALSHQFRDLLEITLVESEQIGTVGVGESTVPPIRSFHRFLQIDEQEFLRAVAGTFKLSISFEHWRRQGERYIHPFGITGQSTLVCAFHHLWLESQRRGMPGSFGDYCLETVASRVDRFALLREPAVNYAYHLDAALYARFLRTRSEACGVRRMEGRIQQVTLQPDSGDVASLVLEDGQVLEGDLFIDCSGFRGLLIEQALHTGYEDWSHWLPCDRAVAVQTQALGPPVPYTRAIAHEAGWRWQIPLQHRVGNGLVFSSKHLSDDEAHARLLRDVAAPALKDPWLVPFRTGRRRKAWNRNVVSLGLASGFIEPLESTSIHLTIAAVVRLITLFPADGIAPSQVELFNDISRAEMEHVRDFIILHYHATQRDEPLWRQCRAMELPASLALRLRAWRERAHAWQAADELFRVDSWTHVLMGQGIVPAQHHPLARAMSDHDLRRLLDGIAQPIRHAVDQMPPQQAFIDAYCKAGERVWGLRSPGVA

SEQ ID NO: 86610 - protein, 261 aa, Burkholderiales bacterium
  misc_feature (1)..(261): tr|A0A257H376|A0A257H376_9BURK Tryptophan halogenase (F ragment) OS=Burkholderiales bacterium PBB4 OX=2015566 G N=CFE44_09455 PE=4 SV=1
NDRAVAVQTESVGEALPYTRSIAHASGWQWRIPLQHRVGNGLVYSSRYLDELQARSTLLENLQGTVLTQPRFLKFCPGQRHQTWHKNCVAIGLSSGFIEPLESTSIHLIQRGIVRLMQLFPTRGLSHADIEEYNQQARVEIEHIRDFIICHYHVTHRRDSPYWNACRSMEIPKSLQHRIDLFRENGRVFRVPNELFAENSWVQVMLGQGIMPRYHHQAADLMGDAELSRFLGNIQSSVDKTVAQLPSHQTYVQKYCGVAKD

SEQ ID NO: 86611 - protein, 427 aa, Streptomyces rapamycinicus
  misc_feature (1)..(427): tr|A0A3L8R3V6|A0A3L8R3V6_STRRN Tryptophan halogenase OS =Streptomyces rapamycinicus (strain ATCC 29253 / DSM 41 530 / NRRL 5491 / AYB-994) OX=1343740 GN=D3C57_133765 P E=4 SV=1
MSSALFGVPDEYDVIVIGGGPAGATTAGLLAKRGRRVLILDRERFPRYHVGESLIPAFMRPMQEMGITERMDARGFERKYGGTLVWGNKQVPWNFSFIEGGAHEYAFHTRRADLDALILDRARELGAFVIEDATVKEPVEVDGRISGVRFSLRGLDGLHEVRARLVVDASGQARVLGRRLTEVEWHDELRNVAVWTYFDNCERLPGDEYTNILIEGLDGGWFWAIPIDKGTISVGYVTRSATAGENGHSLEDLFHTERQRTTKLKKMLAGARQSAGFRTARDWSYHSNRFYGDGWVLVGDAAAFVDPLFSTGVALATLAGSTLAKIVDRIVEHPRIEEKALDRYATAYSGFFDEIRTFVERFYDQSKYKEFYYSLAQEMVDPERKNEPSADFVTLISGLSGRHPLFHISLDDLIADAAAPASGTPHA

SEQ ID NO: 86612 - protein, 508 aa, Massilia albidiflava
  misc_feature (1)..(508): tr|A0A411WWN1|A0A411WWN1_9BURK Tryptophan 7-halogenase OS=Massilia albidiflava OX=321983 GN=EYF70_10385 PE=4 S V=1
MQEMIKRIVIVGGGTAGWMSAAALSKILGGRIAIELVESDAIGTIGVGESTIPMIRRFNAVLDIDENDFIRETQATFKLGIEFRDWGRVGERYMHAFGRVGQDLATVDFHQYFLRMHAAGKADGLAPYSINAMAAAVGKFMRADPRHGNSPLADITHAFHLDAGLYAAYLRRYSEARGVVRSEGEVVEAVLRSGDGNVEAVRMADGRLVAGDLFLDCTGFRALLIEGALDTGFESWTRWLPCDRAWAVPCAAGPDLLPYTIATARSAGWQWRIGLQHRTGNGHVYASSFMDDDAAAAALMSSLDGEPLAEPRQLRFTAGRRRKIWNRNVVAIGLSGGFLKPLESTSIHLVQSAIARLVAFFPTAHPEQADIDEFNRQSAIESERIRDFLVLHYHATARSDSPFWEHCRTMPIPDTLQAKIELYRAGGRLSRHDMELFTEVAWLQVLHGQGVRPRGHHALADLLDEEEVAAYLGDIAEVTRNCVAVMPAHAAFIKAHCAAGDPARQANR

SEQ ID NO: 86613 - protein, 512 aa, Salinimonas sediminis
  misc_feature (1)..(512): tr|A0A346NN74|A0A346NN74_9ALTE Tryptophan 7-halogenase OS=Salinimonas sediminis OX=2303538 GN=D0Y50_11830 PE=4 SV=1
MADNTFLEHIVIVGGGTAGWMAAAALSRVLEQHSCAITVIEPSGIAPVGVGEATIPPIRLFNQMLGVDEATFLRETQGTFKLGIEFENWREQGHSYFHPFGRYGADLDTVAFHQYWRKLHQQGYQPTLADFSLATLAARANKFRLPDNDRHSVFSNISYAYHFDATLYAAWLKKYALARGVKVIDDTVDKVLLHPKTGFIEALSLRHSALLKADFFIDCSGFKGVLIEQALHTGYDNWQSLLPCDRAITVTTARLDPLPPFTRSIAQPAGWQWQIPLQHRTGNGHVYCSQFMSDDEALTCLLRQLPGAPISEPRRLSFTTGKRKKFWNKNCLALGLAAGFMEPLESTSIHLIQTALAKLMKAFPDKTFDPVDIDEYNRMAETEFVRIRDFLVLHYHANQRQDGAFWQHCASQSIPDTLAHKYALYKSRGRVFRYDEELFSDSSWVAVFEGQGVIPRRYDPLADTFAHDRLLRTCEKMRATLQAGVQAMPGHDAFLQHYCKPPNVVNTPIGYR

SEQ ID NO: 86614 - protein, 503 aa, Sphingomonas endophytica
  misc_feature (1)..(503): tr|A0A147I4H2|A0A147I4H2_9SPHN Tryptophan halogenase OS =Sphingomonas endophytica OX=869719 GN=NS334_07960 PE=4 SV=1
MAEKQSGGRVERVVILGGGTAGWMTATALARTYGRRLAITLLESEEIGTVGVGEATIPTIHWFNDLIGLDEAGFLRATQATFKLGIEFVDWARPGHRYFHPFGRYGAALPGVDFHHRWIKARRDGLDLPLAALSLATQAAGQGRFARPQGDARSILSTLGYAYHFDAALYAAHLRSIAEGAGVRRVEGRLATVERDSATGFISALTTQRGERLAGDLFIDCSGFRALLIGGEMASPFEDWSHWLPCDRAVAVPCARVAATTPFTRSTARAAGWQWRIPLQHRTGNGYVYASRYVGDDEAAATLLANLDGEALAEPRFLRFTAGLRRRPWVGNVVAIGLSSGFLEPLESTSIHLIQSGIAKLLTLFPDRDMDAGLATRFNRLLAADMDGVRDFLILHYHATQGRDDPLWRACRTMELPASLVEREAHYVRAGRLMLDPEELFREASWLAVLDGQGFVAGDHHPLADTIDAATNIAQVRGIAEVIARAAPTLPLHDVALEAITSG

SEQ ID NO: 86615 - protein, 506 aa, Xanthomonas arboricola
  misc_feature (1)..(506): tr|A0A429YCW2|A0A429YCW2_9XANT Tryptophan 7-halogenase OS=Xanthomonas arboricola pv. pruni OX=69929 GN=EJL05_0 9790 PE=4 SV=1
MIPAPLRNIVIVGGGTAGWMAAAAFARVLGPGFKVQLIESEQLGTVGVGEATVPHIKAFNNLLGIDEAEFVRQTQGSFKLGIEFVDWQRPGTSYIHGFGTQIGHPLGLLPFHQYWIKQHARGKAQPLGAYTLNTVAAVRGKFMTSAGDVPANSPLANIAYAYHFDATQYARFLRTYAEQRGVTRIEGLVEQVQLHADSGHVQSLQLASGQVVSGDLFIDCSGFRGLLIEEALHTGYHDFTHWLPCDRALAVPSENVGPPTPYTRSTARAAGWQWRIPLQHRTGNGYVYSSAHISDDEAAATLLANLDGKPLADPRPLRFTTGRRKQFWNRNVVALGLASGFLEPLESTSIHLIQAGISRLLELFPREGISPVLVQRYNDRLAFEFDRIRDFLVLHYHATERDDSAFWRHCRTMPITPELQTTLDLFRDSGRFYRNAEEMFAEISWVQVMVGQGILPRGYHPLVDQVPDHDAERFLASVAQTIGHCVDVMPTHQRFIDRYCKATAPR

SEQ ID NO: 86616 - protein, 501 aa, Sphingomonas sp.
  misc_feature (1)..(501): tr|A0A2T5GXW7|A0A2T5GXW7_9SPHN Tryptophan halogenase OS =Sphingomonas sp. PP-CE-3G-477 OX=2135660 GN=C8J45_1031 8 PE=4 SV=1
MTEHPIRRVVIAGGGTAGWMAAAAIARTMGSTIELTLIESDAIGTIGVGESTIPPMITFNRLLGINEAEFMRETQATFKLGILFDDWKDRGERYFHSFGITGKDHWSAGFQHFWLHGLTKGHAQPYDDYCLELRAALQGKFAHLPDDRMNYAYQLDSTRYAKFLRKMAEADGTRRLEGRIAQVELNGESGDIAALVLESGARIEGDLFLDCTGFRALLIEGALHAGFDDWTHYLPCESAIAIQTESVRPALPYTRAMAHDAGWQWRIPLQHRTGNGIVYCSRYLDRDAALDRLLGNIEGKTLTEPNVIRFVTGARRQQWHRNCIAIGLSGGFMEPLESTSIHLIQRAVLRLLRLFPSGAVSPRDVAEFNDQQHTDMLQIRDFLILHYKATNRRDSAFWRQCAAMPIPASLEQKIELFRETGRVFRKNEELFAENSWVQVMLGQGIVPRSYHPIATKLRDDELARLLGGLRDGTNATVAGLPEHAEYVARYCGTAPAPAVAA

SEQ ID NO: 86617 - protein, 436 aa, Rhodopirellula europaea
  misc_feature (1)..(436): tr|M2B0C1|M2B0C1_9PLAN Tryptophan halogenase OS=Rhodopi rellula europaea 6C OX=1263867 GN=RE6C_03635 PE=4 SV=1
MSTPKMKDFYDCVVIGGGPAGGAAASIVADSGVSTLLIERDPVPRFHVGESLMPECYWPLERLGLIDQVKRSGWQTKKSVQFVTHTGKESAPFFFREHDERECSTTWQVERGEFDKMLYDRASELGADCFDQTRLIDVQTEPGDTDDQPVARAVVVRTADGTEKTIGCKVVVDATGQQAFLAGKMGLKEINPDLKKAAIWTYYRDAVRGEGDNDGATIILNTKSRDSWFWFIPQSRGITSVGCVGDNDYLLKGRGTPEETFEEELANCPGLQPRLANATRVGKITTAKEFSYMTRRHSGPGWVLIGDALGFIDPVYSSGVYFALEMGVRAGDAIVEGLKKNDLSAEQLGQWTDDFKEGASRVRQLVHAFYNRDFSIGRFMKEHPEHRGNVTDLLIGRVFHEDAGKMFPALDRSIEMARANAMSKADSMAETKPMST

SEQ ID NO: 86618 - protein, 512 aa, Massilia albidiflava
  misc_feature (1)..(512): tr|A0A411WUP3|A0A411WUP3_9BURK Tryptophan 7-halogenase OS=Massilia albidiflava OX=321983 GN=EYF70_05430 PE=4 S V=1
MNQHIKHIVIVGGGAAGWITAGRIAARHARDSGITVTLVESPTIGPIGVGEGTWPTMRSTLMKMGISETDFMRECEATFKQGAKFARWVDGTADDFYYHPLMLPQGFGQLDLVPYWQTACAGRSFSDTVCLQEQVCEHGLAPKMITTPEYASVANYAYHLDAGKFVGFLTRHCTTKLGVTHIQGDVTAVNSTPNGDIAAIVTAQQGEIAGDLFIDCTGFNSLLLGKHLGVPFVDRGDVLFIDKAIAAQVPYEREDAPIASHTISTGQAAGWIWDIGLVTRRGIGYVYSSRHTSDEQAEAALRAYIGPAGKSVGTRSIPIRSGHRQLFWKNNCVAVGLAAGFLEPLEASALVLVELSADMLAEQLPATRDTMDIVARRFNETFLYRWDRIIDFLKLHYILSKRTDNAFWTDNRAPETIPDSLKDLMRLWRHRPPGNCDFTSNNEVFPAASYQYVLYGMGFRTDPEFLRPSPGEQRAAQEHLSQNSAAVRKALKMLPAHRELIAKIHAYGLPAV

SEQ ID NO: 86619 - protein, 505 aa, Niveispirillum lacus
  misc_feature (1)..(505): tr|A0A255YSS5|A0A255YSS5_9PROT Tryptophan halogenase OS =Niveispirillum lacus OX=1981099 GN=CHU95_20355 PE=4 SV =1
MMKSKAHDIVIVGGGTAGWMAAAILAKSTKGRLGRITLIESTEIGTVGVGEATIPPIQFFNQLLGIDERDFVARTQASFKLGIEFRNWHRKGQSYIHPFGTYGGNMDAVSFHHYWLRLRALGDGTDIGDYCPAIAAARQGRFAPEMPDGPPGGPVLAYAYHFDAALYAAYLRDYATRAGVTRIEGRITSIRQRAEDGYVTHLDLADGSSVTGDLFIDCSGFRSLLLGQTLGVGFKDWSRYLPCDRALAVPCEGGEAITPYTRSTAHTAGWQWRIPLQHRIGNGHVYSSAFMSDEEAEAILLGNLDGKVQADPRPLRFTAGRRERCWERNVVAIGLASGFLEPLESTSIHLVQTALFRLLALMPTDIKDQVTRDEFNRLTEAEYEHIRDFLILHYHATDRDDSDFWNYVRTMPVPDSLRHKMELFRARGRVARVDGQLFVEASWVAVFLGQGIEPIAYDPMADVVREPDLRQRLSRHLDHVRRSVAAMPLHRDFINRHCKASATAA

SEQ ID NO: 86620 - protein, 504 aa, Niveispirillum lacus
  misc_feature (1)..(504): tr|A0A255Z0X9|A0A255Z0X9_9PROT Tryptophan halogenase OS =Niveispirillum lacus OX=1981099 GN=CHU95_11175 PE=4 SV =1
MKPLNRIVIAGGGTAGWITAAMLSFMTKGTSTAVELVESDEIGTIGVGESTIPPFVVLLRSLGIDEQDFIKSTNASFKLAIRFEDWFKKNQHYYHPFGTLGGLIDNHEFYQCWLRAKAAGHPSELQDFAAATVMADQMKFLLPFKAPRTMIASASYALHVDAKRVAQYLRRYAEERGVTRTEGRINRVRTHPDGSIAGLDLSNGKVVDGDFFIDCTGFRALLIGQTLGVGYVSWADELLCDRAVAVQTENTDDDADVHPYTLSQAQDCGWRWRIPLQHRAGNGYVYSSRFLSDDEAVATLMRQVKGRPLIEPNIIPFKTGMRAKMWEKNCVALGLAAGFIEPLESTAIHLVYRAVDYLFRFFPDADCDPSLQAEFNRRVAAEYEEVRDFIVLHYCTTQRDDTPFWRAAQRTPIPASLRARMELFKATGILRQGLEELFGAASWQSVYEGMGVRPARYQPFVDKLPMSVITETLDRSAPLLKAQVAGLPHHAQFLRDHCRAERDF

SEQ ID NO: 86621 - protein, 506 aa, Roseomonas sp.
  misc_feature (1)..(506): tr|A0A317FFI6|A0A317FFI6_9PROT Tryptophan halogenase OS =Roseomonas sp. CQN31 OX=2184016 GN=DFH01_12860 PE=4 SV =1
MRVVIAGGGSAGWMAAAALSQYFGTRLSVSLVESEEIGIVGVGEATIPQIRLFNAGLGLDERAFLRETMGTFKLGIEFVGWRRDGMRYFHGFGEVGRAIGLVPFHHYWLRYRREGGTLPLDRFSPNTMAARENRFGVPAGGFAARLPASAYHFDATRYAAFLRRYAEARGVIRREGKIVNVRLDSESGFVRGLDLADGGQLEGDLFIDCSGFRGLIIEQALASGFEDWSHWLPCDRALAVPSTGDGKLEPYTRSTAREAGWQWHIPLRHRTGNGHVYSSSFTSDDEAHRVLLANLPGDRLADPRPLSFLTGKRREIWKKNCIALGLASGFLEPLESTSIHLIQAGIARLLSLFPDPQCDPVLVREFNRQLDWEFTAVRDFLILHYHVTERDGSEFWRYCRAMAIPDSLQEKLEMFRTSGRIVRQNMELFDVPSWLQVMWGQGLRPAGHHPMVDAASAADLAGYIAMNERETSEQVAALSDHASYLVRLVGDEGSVPSEQPTARAAR

SEQ ID NO: 86622 - protein, 431 aa, Rhodopirellula europaea
  misc_feature (1)..(431): tr|M5SL42|M5SL42_9PLAN Tryptophan halogenase OS=Rhodopi rellula europaea SH398 OX=1263868 GN=RESH_02469 PE=4 SV =1
MKDFYDCVVIGGGPAGGAAASILADSGVSTLLIERDPVPRFHVGESLMPECYWPLERLGLIDQVKRSGWQTKKSVQFVTHTGKESAPFFFREHDERECSTTWQVERSEFDKMLYDRASELGADCFDQTRLIDVQTEPGDTDDQPVARAVVVRTADGTEKTIGCKVVVDATGQQAFLAGKMGLKEINPDLKKAAIWTYYRDAVRGEGDNDGATIILNTKSRDSWFWFIPQSRGITSVGCVGDNDYLLKGRGTPEEIFEEELANCPGLQPRLANATRVGKITTAKEFSYMTRRHSGPGWVLIGDALGFIDPVYSSGVYFALEMGVRAGDAIVEGLKKNDLSAEQLGKWTDDFKEGASKVRQLVHAFYNKDFSIGRFMKEHPEYRGNVTDLLIGRVFHEDAGKMFPALDRSIEMARANAMSKADSMAETKPMST

SEQ ID NO: 86623 - protein, 510 aa, Inhella sp.
  misc_feature (1)..(510): tr|A0A437LE65|A0A437LE65_9BURK Tryptophan 7-halogenase OS=Inhella sp. CCP-18 OX=2499851 GN=EOD73_14070 PE=4 SV =1
MNERLRTVAVLGGGSAGWLVAGLLAAEHPDLQITLIESSEVPVIGVGEGTWPSMRDTLRRIGLSETEFVRRCQVAFKQGSRFDGWQRGASAADGDRYYHPFMLPVGHGDVDLVSAWLATAPERPFADLTSPSVQVCEAGRAPKQAQTPEFGAVANYAYHFDAGLFGQLLREHATQTLGVRHCVDHVDAVLPHENGDIAALQTRTHGALAADLFIDCSGLSARLIGQHFGVPLKSEREVLFNDAALPVQVPYAEAQGPIATCTIATAWAKGWIWDIGLPTRRGVGCVYSRAHASEDEAQAALQAYLRATGAPDERPAPRSIRYDPGYRERFWVRNCVAIGLSSGFIEPLEASALALVELSVQRLCDELPMSRASMDAVARRFNDDFGYRWARVIDFLKLHYLLSERDDSAYWRAHRDPASWPERLRELLPMWRLRAPARHDFGRIDEVFPAASYQYVLYGMGFRPDAGPLSPDKLQAAHACFAEAHRLAQRYLPALPSHRGLIDHLHKTPT

SEQ ID NO: 86624 - protein, 515 aa, Sphingomonas bacterium
  misc_feature (1)..(515): tr|A0A3D0WDC5|A0A3D0WDC5_9SPHN Tryptophan halogenase OS =Sphingomonas bacterium OX=1895847 GN=DEP91_10715 PE=4 SV=1
MAGPIRNIVIVGGGTAGWLTAGVIAARHKARIEAGTFSVTLVESPNVPIIGVGEGTWPTLRSTLAKMGVSETDFFRECDAAFKQGAKFQRWTTGAADDAYYHPLMLPTNFQHLNLVPHWLAGEGDESFCDAVCPQGRICDDGLAPKTIATREWDAVANYAYHLDAGKFADFLTRHCTGKLGVRHVLADVQQVVQGEDGDVTHLVTEQAGEIAGDLFVDCTGFKALLIGGAMGVPFRPLKDVLFCDTAMAVQVPHETPDAPIASHTVSTAQSAGWIWDIGLPTRRGTGHVYSSAHVDDETAERELRAYLGPVADGLSVRKIPIRAGHREVFWKRNVVAVGLAAGFLEPLEASAIVLIELSAKLIAEQMPARREVMDTIARRFNETTAYRWGRIVDFLKLHYVLTKRIDTDFWRDNVRVESIPDRLAHLLELWRWQSPWFNDEFDRVDEVFPAASYQYVLYGMGFRTEVEPVTLGTDARLAERARRENRVQTERLRAGLPRHRDLIDRIKAQGLSAI

SEQ ID NO: 86625 - protein, 391 aa, Xanthomonas alfalfae
  misc_feature (1)..(391): tr|A0A1S1XP10|A0A1S1XP10_9XANT Tryptophan halogenase (F ragment) OS=Xanthomonas alfalfae OX=366650 GN=BHL63_019 90 PE=4 SV=1
LESQRRGMPGSFGDYCLETVASRVDRFALHGEPAVNYAYHLDAALYAKFLRARSEACGVKRVEGRIQQVTVQPHSGDVASLVLEDGHVIEGDLFIDCSGFRGLLIEQTLHTGYEDWSHWLPCDRAVAVQTEALGPPVPYTRAIAHEAGWRWHIPLQHRVGNGLVFSSKHLSDDEAHAKLLRDVAAPAVKEPWMVPFRTGRRLRAWNKNVVSLGLASGFIEPLESTSIHLTISAVVRLLALFPAEGIAPSQVQLFNDVSRAEMEHVRDFVTLHYHATQRDEPLWQQCRQMELPESLALRLRAWRERAHAWQGADELFRVDSWTHVLMGQGIAPEQHHPLTRAFSDHDLRRLLDGIAQPIQHAVQQMPSQQDFIERYCKAGEQVWGMRSPVPA

SEQ ID NO: 86626 - protein, 425 aa, Streptomyces scopuliridis
  misc_feature (1)..(425): tr|A0A2T7T5B1|A0A2T7T5B1_9ACTN Tryptophan halogenase OS =Streptomyces scopuliridis RB72 OX=1440053 GN=Y717_3519 0 PE=4 SV=1
MSSTLFGVPEEFDVIVIGGGPAGSTTAGLLAERGHRVLVLDRERFPRYHVGESLIPAFMRPMKELGLTERMDARGFERKYGGTLVWGNAQVPWNFSFIEGTTHEYAYHTRRADMDSLILDRARELGAFIIEEATVKEPIETEGRVTGVRFTLRGTDGMHEARAKLVIDASGQARLLSRKYADVTWHEELRNVAVWTYFDNCERLPGDEYTNILIEGLDEGWFWAIPIDKGTISVGYVTRSEEANKDGKSLEDLFKDEMAKSTKLKKMLEGANQSAGWRTARDWSYTSQSFTGNGWVCVGDSAAFVDPLFSTGVALATLAGSTLSKIVDKIIQHPEIEEQALKRYVTAYRGFFDEIRTFVERFYDRTKYKEFYHSLAQEMVDPDRERTPSANFVQLISGLSGKHPMLTLTIDDLIDEGAEPAAEQS

SEQ ID NO: 86627 - protein, 491 aa, Sphingomonas bacterium
  misc_feature (1)..(491): tr|A0A3D0WAV5|A0A3D0WAV5_9SPHN Tryptophan halogenase (F ragment) OS=Sphingomonas bacterium OX=1895847 GN=DEP91_ 02885 PE=4 SV=1
VIVGGGTAGWMSAAYLARRLSHLPIAITVVDSVEIGTVGVGEATVPAIRDFLAAVELGEPDVLAATEGTIKYGIRFAGWGGEGYGFFHPFGLYGVPANGVAFHHYWLKLKAAGHDLPLGDYCLATQLAERGLFLPPSSQPGSDLGVFNFALHFDATKFAHLLRRLSLANGVGHVDGRIVDVTRGEAGVRSVRLADGRMIEGDLWIDCSGFRSLLLGEAMGVPYVDWRHWLPCDRAIAIPCRSAGVHRPFTTATAHDAGWRWHIPLQHRVGNGIVYSSAHLSDEAAEGRLRATLEGEPIAEPNRLRFVTGHRAEFWAGNVVGVGLSAGFLEPLESTSIVLIQSALERFVALFPDRGGDPRLAATYNRQSVLEFERIRDFILLHYWANRRTGEPFWDALRSLDLPGSLAERVEAWRAGGVFVRREWDTFQDPSWLSMYAGFDDLPVRASPIADQLGEDELLPAFARMREAIDRAARTAEPHADFLARQGRRAA

SEQ ID NO: 86628 - protein, 498 aa, Sphingomonas endophytica
  misc_feature (1)..(498): tr|A0A147I7F1|A0A147I7F1_9SPHN Tryptophan halogenase OS =Sphingomonas endophytica OX=869719 GN=NS334_04485 PE=4 SV=1
MTPPRVVILGGGSAGWITAHLMRHAWPDAAITLVEAPDIATIGVGEGSTPTLKRFFEVIGIAEAEWMPRCHATYKAGIRFDGWSPAAPWPSYRHPFITQVDVHTREAFVLNCRNRRLGHDVPVHPDAFLLGARLSAEGKAPIAPPHFPFRMEYGYHFDAALLGAFLRDVAVARGVVHRAARVEQVTRHANGDVAALVTDAGEAIAAELFVDCSGFAGRLIEQVLDVPFHGFGDHLFNDAAVVAPTPPVAAPATETVATALSNGWCWSIPLQHRVGNGYVYASAFQSAEAAETELRARLGLVDADEVRHLRFRVGRRARHWERNVVAVGLSQGFIEPLEATALHLVLNTVEQFIGHYARGKGTAKDRGAFNETINARIEGVRDYIVAHYKLTTRTDSDYWRANAANVALPDPLLDILDTWFRRGDLAEALRRQGNASHFGELSWHCLLAGYGAFPPVSEAPRDDVDFHAQRDVAAFLAGCALNYPAQREVLAAQSARPA

SEQ ID NO: 86629 - protein, 507 aa, Sinorhizobium sp.
  misc_feature (1)..(507): tr|A0A2A6P0N3|A0A2A6P0N3_9RHIZ Uncharacterized protein OS=Sinorhizobium sp. BJ1 OX=2035455 GN=CO676_28060 PE=4 SV=1
MMLDLTNARRIGIIGGGTVGWLAAIALRRIFDVDVDVTVVEAPTVFPLGPGEGGSLNLTDTLCRNGIDVDVFIGEADATHKLGVLYENWRGGGISDHYYRMFGGSGIPEIECRVEGFFPLLSARIAAGENLHTYIPGFELIRRGASQNEIDELLATGESGLYPSYHFNDAEFERCLRRVGLARGITSRATVVHGMRLDDRGHVSALQLGGEELEVDFAVDASGFARVGLGTVFNMHWCSFANVLPTDHAIIFELEPREPPLQCVTRATAMKAGWMWEAPLNRSIRAGYVFSSRHADAAMALAELEHQYGYRVEAKHELSPAQGYFSTAWINNFVALGTASGFVEPLEAAPAAHTFEQLRNLECVLANGSGIVPAQAIEAYNSANARCWTGVRDFLRLHYDCKGIDTPFWRDLAGAELPEGYADLRACFQKRTPRFIDIQPYVASGWQSLFQQIDWISVAAPLGVVPPAAACAELRRLSAESQTEVQAYVDRLKGTITKISSTRGWMH

SEQ ID NO: 86630 - protein, 503 aa, Porphyrobacter sp.
  misc_feature (1)..(503): tr|A0A1D7NNM8|A0A1D7NNM8_9SPHN Tryptophan halogenase OS =Porphyrobacter sp. LM 6 OX=1896196 GN=BG023_112350 PE= 4 SV=1
MAIQRIVIVGGGTAGWMAGAALSRLKTGRPVEIILIESEAIGTVGVGEATIPPFIGFNQLLGINEREMLAEVGGTFKLGIQFENWGKIGDSYIHPFGAYGYTMGGISFHHIWHAMARAGDKRPIQVFNVETMAAYFGKFARTEDYKGADLPPVNYAYHLDAGRYAAYLRRYAETRGVVRHEGKVQDVALDGESGFVTGVTLDDGREFSGDLFIDCSGFRGLLIEQALKTGYDDWSNYLPCNRAVALPCQREDGSPPPPFTRATAHRAGWQWQVPLQHRNGNGHVYCSSFMEDQEALDILLGNIAGKPQAEPNFLRFVTGRRKKFWNKNVVALGLAAGFMEPLESTSIHLINTGIDKLVSLLSLDGITQAQEDAFNRLTGREYARIRDFLILHYNATQRTDSDFWNYVRTMEVPVTLTEKIEIFKANGQIFREEDELFTETSWAAVMMGQGIHMDGHNPMADTLEPGKTRQEIDEMEKSIRFMVQNMPGHGDYLKHYCPAPMAA

SEQ ID NO: 86631 - protein, 500 aa, Henriciella sp.
  misc_feature (1)..(500): tr|A0A399RQR2|A0A399RQR2_9RHOB Tryptophan 7-halogenase OS=Henriciella sp. JN25 OX=2305466 GN=D1223_02240 PE=4 SV=1
MSDTQTNLVKRVVIAGGGTAGWIAAAGLSHHLGPALEITLIESDTIGTVGVGEATIPTQRTFHAHLGLREADFMKATGATFKLGIEFEGWLKPGHRYIHSFGTLGRHTWVAPFHHLWLHAKSRGFGGSLDDYCLELKAARADKFYTAPDKSVLNYAYHLDATAYARFLRAFSEQKGVRRVEGLIEHVEQSSETGFIEALKLQSGERIEGDLFIDCTGFRGLLIEQALKTGFDDWSDWLPMNAAVAAQSEATGPAIPYTRAIAHEGGWRWRIPLQHRVGNGIVFDSNYLDPDEAEKKLRDAIDGPLRTDPRLIRFRTGRRKRAWNKNCVALGLSGGFLEPLESTSIHLIQRGVADLVALFPYHGVTEDLANLFSRKMNRELEQVRDFLILHYKLTEREDSDFWRGRKAMDIPDTLAERIALFRESAYAYHNCDELFLTDSWVQVMMGQGLYPTGWHAVGHMFPDDKLKGALDGQRAQIERAVQQLPAHEDFVRQYCPVTPA

SEQ ID NO: 86632 - protein, 502 aa, Henriciella sp.
  misc_feature (1)..(502): tr|A0A399RT81|A0A399RT81_9RHOB Tryptophan 7-halogenase OS=Henriciella sp. JN25 OX=2305466 GN=D1223_04320 PE=4 SV=1
MKSGPVQKVVIAGGGSAGWMTAAALANATQGSCEITLVESEEIGTIGVGEATIPPVKYFNARLGIDEATFLRETSGTFKLGIEFINWTRDGHAYFHPFGQYGAEFDEVPFYQYLIRELIAGRESSVDGYSMAWAAAKAGRFEHPARDRRLIQSTFDYAYHFDATLYARFLRRYAEQRGVTRVEGRMVDAMQDGETGFVRSVTLEDGRAFNGDLFIDCTGFFGLLIEKTMKTGFEDWSHWLPCNRAVAVACKADEPLLPYTKSTAKTAGWQWRIPLQHRVGNGYVFCDDYLSPQDAESELLASLEGEPFAEPRHLRFQTGRRKKFWNGNVVAIGLSAGFMEPLESTSLHLIQYGIMRLLAMFPGRDMSPLLAEEYNALTAAEYERIRDFLILHYKATERRSDGFWRHCSEMDVPERLAYKIDHFRSHGMIVSDERELFTNPSWIAVYLGQGVVPERAPALSGMRAAVPVAERLGQVRSAMKEAVAAMPDHRAFIERYCKSALQ

SEQ ID NO: 86633 - protein, 515 aa, Burkholderiales bacterium
  misc_feature (1)..(515): tr|A0A257H7H4|A0A257H7H4_9BURK Tryptophan halogenase OS =Burkholderiales bacterium PBB4 OX=2015566 GN=CFE44_012 85 PE=4 SV=1
MTKTVRHVVVLGGGSAGWLTAGLLAAELGGPEPDAVKISLIESPDTPAIGVGEGTWPSMRDTLKRIGVGEADLVRECDAAFKQGSRFDGWVHGGSQDRYYHPFSLPQGYGDVDLVGGWMQGGAQEPFAQCVSPQVQLCDAHLAPKQVTTPEFAAIANYGYHFDAVKMGHFLRKHAVAKLGVQHIQDEVTEVCAHDNGDIAALRTRGQGDIAGDLFIDCSGLASLLLGQHFGVALQSQQKVLFNDSALAVQVPYAHSQAPLASATIATAHAEGWTWDIGLPTRRGVGLVYSSAHTSTEAATRALFAHLERSGGPSDLPAPRQIRFTPGFRERFWHRNCVAVGLSSGFIEPLEASALAMVELSAAMIRDEMPANRADMDIVARRFNDAFSYRWARIIDFLKLHYVLSQRSDSDYWREHRSAQSLPDRLGELLQLWKHRAPYRNDLHRIEEVFPAASYQYVLYGMGFRPAIPALRPGPLEQAQVAFQKAATLSKRFMGGLPRHRDLIQHIHAHGMPAA

SEQ ID NO: 86634 - protein, 521 aa, Xanthomonas arboricola; identical to SEQ ID NO: 86498
  misc_feature (1)..(521): tr|A0A3S0A249|A0A3S0A249_9XANT Tryptophan 7-halogenase OS=Xanthomonas arboricola pv. pruni OX=69929 GN=EJL05_0 1275 PE=4 SV=1

SEQ ID NO: 86635 - protein, 507 aa, Inhella sp.
  misc_feature (1)..(507): tr|A0A437LE48|A0A437LE48_9BURK Tryptophan 7-halogenase OS=Inhella sp. CCP-18 OX=2499851 GN=EOD73_14085 PE=4 SV =1
MNTTPRTFHRVVIAGGGTAGWMMAALMSKLLGKRLDIRLVESEEIGTVGVGEATIPALLTFHNLLGINEAEFMAATNATFKLGIHFEGWKAIGENYFHSFGSTGNDHWSAGFQHFWLKGREWGLSRNYTDYNPETVAAFANRFAHVQRGALNYAYHLDASRYAKFLRGMSEAHGVQRIEGKIARVLQHEVDAGAARAGDIAALQMEDGSRVEGDLFIDCTGFRSLLLGETLGVGYEDWSYWLPCDRAVAVQTASVREAWPYTRSIAHRFGWQWRIPLQHRVGNGLVYSSKELSDADAPEVLRQNVEGELLTQPRVIRFLPGQRHKVWERNCVAVGLAGGFVEPLESTSIHLIQRHAIRLMQLFPAGGISQADVDEFNLQSKRDLEHIRDFIVLHYHVNARNDSALWKHVREMDLLPSLRHRIELFQQTGRVFRPSDELFAENSWIQVMMGQGITPERHHPVADLMGREELQKFLGDIELRARRLVDSLPGHQDYVAQLCAPFRAQGA

SEQ ID NO: 86636 - protein, 454 aa, Amycolatopsis sp.
  misc_feature (1)..(454): tr|A0A429D6R5|A0A429D6R5_9PSEU Tryptophan halogenase OS =Amycolatopsis sp. WAC 04169 OX=2203197 GN=DMC61_11240 PE=4 SV=1
MDDYDVIVVGGGPGGSTVAGLTAAEGHRVLLLDKDRFPRYQIGESLLPATIHGICAVLGVRDEIERAGFVRKRGGTFKWGSGAEPWTFSFAASDRMAGPTSYAYQVERTRFDALLLDGARRLGAEIRQGHRALGTLRAGERIGGVRYLDDTGHERHATARFVVDASGHGSRLHHDVGGIREYSPHFRNLALFGYFEGGRRMPAPDAGNILCVSFPDGWFWYIPLSDTLTSVGAVVKQESADRVQGDPDASYAALIEDCPLVKDFLRDARRATEPPYDRLRVRKDYSYDRTVLWAPGMVLVGDAACFIDPVFSSGVHLATYSALLAARSINSTLAGFADEKRCFAEFEARYRREFALFRDFLITFYRLDSGEDDYFRHARRLTGHHGTADEAFAELVGGVSSQDFSRAMFGDVLAEGVQLQLRGLLGEAAGDEPPMFPGGLVPTADGRRWRVPDA

SEQ ID NO: 86637 - protein, 516 aa, Xenorhabdus beddingii
  misc_feature (1)..(516): tr|A0A1Y2SQ14|A0A1Y2SQ14_9GAMM Tryptophan halogenase OS =Xenorhabdus beddingii OX=40578 GN=Xbed_01551 PE=4 SV=1
MVKSVLIVGGGMAGWMTAAYLAKAFAQNVKITVVESKKIKKIGVGEATFSTIRHYFDYLGLDETEWLTECAGSYKLGIRFENWDGKDQHFYHPFERWKVVKGFPISEWWLRKDIKDQNFDYATFLTPHLCEAKRSPRRLDGSLFVQSSDGGLGQSTLAEQRDQFPYAYHFDADNVASFLQRYAINRGVDHIEGDVAHIEIDKYDGSIGFLEIKEHGKLNADLYIDCTGFKGLLINQTLNEPFISFSDVLKNNRAVALRVPREDISDIDPYTTARTMSNGWRWTVPLYKRNGYGYVYCDKYQSPEEAEAELRKSIPYENSDCVANHIPMRIGRSHRSWVKNCVAIGLSSAFFEPLESTGIFFIQHGIEQLVRFFPGSNNNERLIEEYNTRVNHAVDGIKEFLLLHFSLAQRNDTVYWKEWKKVKLPKALVKKIMLSKNHLLDKETIYPFYHGFEEYSWNTMILGLCSETIMSRPALSLIPPDEADEILLQHYTKAENMINSLPTCHEYLRHLHNSKK

SEQ ID NO: 86638 - protein, 550 aa, Sphingomonas sp.
  misc_feature (1)..(550): tr|A0A2T5GXZ2|A0A2T5GXZ2_9SPHN Tryptophan halogenase OS =Sphingomonas sp. PP-CE-3G-477 OX=2135660 GN=C8J45_1032 1 PE=4 SV=1
MALLHPTEQAGMRKQGNRQQTMANETLAGEDPAITQIVIVGGGTAGWLAACLIAARADRDTARPLTVTLVESPEVATIGVGEGTWPTMRRTLERIGITETDFLLACDAAFKQGSRFDGWRTGAVDDSYLHPFTAPVDGDPRDLVSAWLEYGGRFADMVGAQGAICHHDLAPRQRAMPDYAGTLNYAYHLDAGKLASLLTRHATERLGVRHVRDHVVGIDGTEDGDIAAVRTRASGAIAGDLFLDCTGHAALLIGDHYGIATIDRGRELFNDRALAVQVPVAAGSPIASQTNATAHAAGWIWDIGLPTRRGIGCVYSSAHLSDDAAADTLTRHIRATAPDAPLPTFRQLKFQSRHRAKFWDRNCVAVGLSAGFLEPLEASAIVLIELSLDALLDNFPSHRGVMDIHAARFNALFRYRWDRIVEFLKLHYVLSERDGPYWRDHRDAASIPPRLVELLALWRHQPPSRADFPMIDEIFPAASYQYVLYGMGFPVPTRGAIATADRSRTEALLAQVDQRRRMLAAGLPTNRAYLDALRHATAPAMELPAMEPIA

SEQ ID NO: 86639 - protein, 542 aa, Hapalosiphon sp.
  misc_feature (1)..(542): tr|A0A0M0SQV0|A0A0M0SQV0_9CYAN Tryptophan halogenase OS =Hapalosiphon sp. MRB220 OX=1704290 GN=AMR41_08565 PE=4 SV=1
MLTQNTTNVVIVGGGTAGWMTASYLSKALQRNISITLIESSNITKIGVGEATFSSIKSFFDFLGLQEHEWMPKCNATYKMAIKFVNWNTNKKHFFHPFERLDIVDGFSISEWWMKLKKHSEPFDYSCFAAPTLCDSQRSPRYLNGEVFDSRVKQLFSDEHFSEKRLITLADAEGQYPYAYHFDANLIAKFLKDYAMQRGVKQIVDDVIDVKLTTEGSIDCVHTKGNRRISGDLFVDCTGFRGLLINKALGEPFISFSESLLCDSAIAMQVPTNIKKDGINPYTKATALSSGWVWEIPLYGRNGAGYVYSSAFISKEDAEQEFRQHLGPVCQHQQASHIKMRIGRNRNSWVKNCVAIGLSSGFVEPLESTGIFFIQHGIEELVSHFPSNSLNEELIKSYNQAIAKCIDGVRDFLILHYHASDRTDTPFWKATKHDIQLPDELSQRFKLWKKRLPNKKNINPYFHGFETYSYSVMMLGLNHVPENSLPIMEYMDDHKATVQFRAIKEKTEFLNSTLPSQYEYLTYVMKSQEQSEYLNENLLDAV

SEQ ID NO: 86640 - protein, 497 aa, Sphingomonas sp.
  misc_feature (1)..(497): tr|A0A2T5GZB2|A0A2T5GZB2_9SPHN Tryptophan halogenase OS =Sphingomonas sp. PP-CE-3G-477 OX=2135660 GN=C8J45_1022 7 PE=4 SV=1
MTDPIRKVVIVGGGTAGWMAAAAAARFLDDGQRQVVLVESDAIGTVGVGEATIPPILGFNQLIGVDERDFVRATGATFKLGIEFVGWDTGADRYMHAFGGHGRDIQGLAFHQLWLKLRDRPGIGGLDAYSPSAVAARLGRFGQPSGTAPLAYAYHFDASLYAAFLRRHAEAGGVTRIEGRIIGADRDPENGHVRAVRLEDGTAVDGDLFIDCSGFRSLLLGETMGVEFEDWSHWLPCDRAIAVPTEPTTPVLPYTRATARPAGWQWRIPLQHRTGNGHVYASTHMSDDEATALLLANLDSAPTADPRQLRFKAGRRAKMWEGNVVALGLAGGFLEPLESTSIHLIQTGISKLFALFPDRGFSAVERDEYNRLMGDAYTSIRDFIILHYHATRRDDSAFWQHVRTMPVPDSLTRKLALFREKGRIFRYDDELFGIPSWVQVLLGQNVIPVGYDPVVDALDADRVADALRQTRAATLRAAEALPSHADFVARYAAFVGV

SEQ ID NO: 86641 - protein, 492 aa, Salinimonas sediminis
  misc_feature (1)..(492): tr|A0A346NRG3|A0A346NRG3_9ALTE Tryptophan 7-halogenase OS=Salinimonas sediminis OX=2303538 GN=D0Y50_18250 PE=4 SV=1
MQQSHIPHIVIAGGGTAGWMAAAALTRVLGKQVKVTLVESSQIGTVGVGEATIPTLVFFHKLLKVSEQEFMAATHATFKLGINFEHWKNTDHSYLHAFGVTGKDCWAAGFQHFWLRGLAEGLSTDFGDYCLERQAAAAGRFAHLPNNGLNYAYHIDAARYAQFLRELAEREGLTRIDAKIQQVNLRDHDGHISSLTLDNGQTVEGDFFIDCTGFQGLLIEQAMHTGYEDWSHWLPCDSAVAVQTEASGAPLPYTRCIAHEAGWQWRIPLQHRVGNGMVFCSHYASDSQIKEKLLNNIEGAPLNEPKIIHFRTGRRRKQWNRNCLALGLASGFLEPLESTSIHLIQQGIVRFLRMFPTNGEVIEQDIAEFNRQADFDIEHIRDFIILHYHVTERNDTAFWRHCAQMDVPESLRHRIDLFRRTGRVFREGNELFDDSWQQVMIGQGLMPQRYHPLVDTMSKAELETLLTQTKQHIKRTVDKLPAHQQYLKQYCG

SEQ ID NO: 86642 - protein, 490 aa, Sphingomonas sp.
  misc_feature (1)..(490): tr|A0A2T5GZB8|A0A2T5GZB8_9SPHN Tryptophan halogenase OS =Sphingomonas sp. PP-CE-3G-477 OX=2135660 GN=C8J45_1022 8 PE=4 SV=1
MTERTPVRSIAVLGAGIVGLSAAIAFARALPGLAITLIKTPADPAALADRMPSTLPSIAAFHDRIGLGERDLLAAGTLHHIGTRLSDWRSDGGRVVLARGDRGGPIGTGAFHQHWLNARRAGKVAAFDAFSPAAALAAADRFVHPADDSASPLSGLAYALRLDPPRYRDLLRALARHLGLAPVPGAFAGVERRADGGVEALMLADGRRIVADLYLDCAGPAAPLRSAIDTRWEDWGRYLPVDRLLLGTGPTRAPSPTDDLIAVPAGWRFEKPLRDRTLVGLAYAAAQTPDSSARRILPAGEEVVDIAPGVRPEPWLHNVLALGDATVTLDPLADANLHLAQAGILRAIDLLPGRDCAAGELAEYNARAYRQASRIRDFQAAHYHAATRTGGDFWKHVRRLPRPDSLDHTLDQFAHRGRLPFYEDESFEPDEWRGLLLSLGMIPRTPDPIASTTPLETVRTALTRIAEANAALPSRLPPYPAYLAQLERRR

SEQ ID NO: 86643 - protein, 505 aa, Unknown
  misc_feature (1)..(505): tr|A0A2A4X335|A0A2A4X335_9GAMM Tryptophan halogenase OS =SAR86 cluster bacterium OX=2030880 GN=COB20_09165 PE=4 SV=1
MDNNNIRHIVIVGGGTSGWMSAAALSRIIGTRDCKITLVESDQIGTVGVGEATIPPIVEFNNLLGINADEMLRATQGTFKLGIEFINWGRIGDSYMHPFGVFGRTIMNVSFWHYWKKAYDLGLSPSLDAYSLNWLAAKQNRFLRSGNVPNSPLSKVPHAYHFDASLYARFLRKFSTNLGVNRVEGLVKQVIQNPESGFITGIKLQDGKFIDGDFFLDCTGFRGLLIEKCLQTGYEDWTHYLPCNSAQAVPSKAISPKRPYTKSIAHPIGWQWQIPLQHRTGNGIVYSTEFASDEQAQQALLANLPSTALAEPRPLRFVTGKRKKSWNKNCLAVGLSSGFMEPLESTSIHLIQSTIMRFLSLFPRRTNFDTEMDRFNKSADLELYTVRDFLILHYKATERDDSELWNYCRNMAIPDSLQEKLELYQSGSWIERDNKELFGVDSWLSVFNGQHIRAESYSPLVDSLPKDKLESILRETREVIAQCAAAMPPHEDFIRKHCADPILHQ

SEQ ID NO: 86644 - protein, 504 aa, Sphingomonas sp.
  misc_feature (1)..(504): tr|A0A0Q4Q3R0|A0A0Q4Q3R0_9SPHN Tryptophan halogenase OS =Sphingomonas sp. Leaf67 OX=1736230 GN=ASE90_02515 PE=4 SV=1
MSAPLLRRIVIVGGGSAGWMTAAALSSLLDPKDVAITLVESDAIGTVGVGEATIPDILAFNQMLGVDEAEFMAATQATFKLGIEFVDWGTRGDRYVHPFGQHGVDMQGIDFHQYWLRAREHGAPQPIEEYSLCAVAARAGRFALPDPNPRSVLSQIRYAYHFDATLYARFLRRYAEKRGVVRIEGIVGAVGQGADGAITRLTLADGRVVAGDFFFDCTGFRALLAGEALGSGFVDWSHWLPCDTALAVPSEHAGPPTPYTRATARDAGWQWRIPTQRRVGNGHIFASAFTTEEAASATLLAGLDAPALADPRRIRFRAGCRETFWSGNCIAIGLAAGFLEPLESTSIYLIQEGISRFISLFPRGDIPEILRTEYNRHMRTEFEQVRDFIILHYAATTRDDTPFWNHCRTMRLPDTLLHKIELFRETGRVFRYNDELFTRPSWVAVMLGQGIVPTSSDPIVATLPERDVARSLASMRDAMAAAVARMPTHGDFLARYCPAPAMAA

SEQ ID NO: 86645 - protein, 496 aa, Colwellia sp.
  misc_feature (1)..(496): tr|A0A2N1I7B8|A0A2N1I7B8_9GAMM Tryptophan halogenase OS =Colwellia sp. 12G3 OX=2058299 GN=CXF71_14925 PE=4 SV=1
MNNKAIKRVVIAGGGTAGWMTAAALSKLFGKNLNVVLVESDDIPTVGVGEATIPTLHIFHRLLGINEQEFMAATNATFKLGISFENWRDVNKDYIHSFGFLGQNCWAADFQHFWLKGKQRGIVSDIGDYVPEHLGAREGKFAVEADQASNHAYHLDAGLYAEFLQKIAEKHGLKRIEGRIDKVVLDEDSGFISSLELGNGKVVEGDLFIDCTGFRGLLIEQALNTGYEDWSHILPCDSAIAVQTKTVTKPVPYTRSIARDAGWQWKIPLQNRTGNGFVFCSKYMSNEEATQTLLANIEGELLNEPRVIKYKTGTRRKHWNKNCIAIGLSSGFIEPLESTGIHLFQKAIIRLMQMFPSQGIKQAEVDEFNRQSKDEVNSIKDFIILHYNLTDRKDTEFWRYCSNMDIPETLKHRMSLFKESANVFKKEEELFGETSWVQVMMGQGLMPEQYHPIVDLMGDNELQSFLDNIKSTVKRKVDNWPDHLDFIKQYCKATAK

SEQ ID NO: 86646 - protein, 503 aa, Cellvibrio sp.
  misc_feature (1)..(503): tr|A0A2T6FFW9|A0A2T6FFW9_9GAMM Tryptophan halogenase OS =Cellvibrio sp. 79 OX=1954207 GN=B0W54_11695 PE=4 SV=1
MSDNRIKSIAIVGGGTSGWMTAAALAKVLKNNYCDITLIESDEIGTVGVGEATIPQIQLYNQLLELDENEFIRKTQGTFKLGIQFVNWTRLGDKYIHAFGEVGKDMDSIHFYHYWLKMSQLGEVEELGNYTLSGVASDKGKFMRSVDAGNSPLSNIAYAFHFDAGLYARYLREYAETRGVIRKEGKVRNAILHPDTGFIESLQMESGEKIAADFFIDCSGFRGLLIEQALHTGYEDWSHWLPCDRAWAVPCESVGDPIPYTRSTAHSAGWQWRIPLQHRIGNGHVFSSQFMDENQACSILMSNLDGKALAEPRLLKFLTGKRKKIWNKNCLAIGLSSGFMEPLESTSIHLIQSSIARLMSFFPNKYFDQEDIDEFNRQADFEVEKIRDFLILHYHATERNDSEFWNYCRTMPIPDALTQKIEQFKKNGRIYRNSSEMFNDLSWLEVMHGQGIKPRAYHPLVDRMSKEDIAKRLDGIKRVIDKSVDYMPTHAQFIADNCKAEKM

SEQ ID NO: 86647 - protein, 508 aa, Cellvibrio sp.
  misc_feature (1)..(508): tr|A0A2T6FHR1|A0A2T6FHR1_9GAMM Tryptophan halogenase OS =Cellvibrio sp. 79 OX=1954207 GN=B0W54_15950 PE=4 SV=1
MKIKRIAIVGGGNAGWISANHLGLELSRDPEIEITLIESKDIPVIGVGEGTIPIIRDSLQSFGISEGDILTQCDATFKTGIKFSNWMAENTQRENNFYYHVFDSPYPGGYDATHYWLGNKAIADFSKLSTSYWISEKNRCPKRNDSPAYKGFVNYAYHFDAAKFATLLANNAKRKFGIKHIFETVEQVTMHADGSIKGLQYESGKYEEFDFYIDCSGFSALLLGEILAVPFVDKGAQVPTDSALVLQVPTEQNEQIFPYTKSVAHGAGWIWDIPLTTRRGTGFVYSSQHMTDDEAIGVFSKYHGKNLESSSVRKIPMKAGFRERFWEKNCVALGLAQGFVEPLEATSLFVTDFCAAMVAKKFPVNTEEIPIYAKSGNEIAQIIWARILDFIQLHYVISDRRDTQFWRDVTSNIATSDLLKERLELWKFSIPQRTDFASTFDFFNAENYLWVLYGMNYPTRAPVVNEQVGRIAEKIISGHIENASRFADSLISQRAWLTQLKEFAVKNK

SEQ ID NO: 86648 - protein, 606 aa, Fischerella thermalis
  misc_feature (1)..(606): tr|A0A2N6KLS5|A0A2N6KLS5_9CYAN Tryptophan halogenase OS =Fischerella thermalis CCMEE 5268 OX=2019662 GN=CEN50_0 1770 PE=4 SV=1
MLMNNTQSQVYDVVIMGAGMAGICQARHLLLNIPNIKIALVDPRPEERADKDMKVGESTVEISTLMICKELGLYDYMIENHPPKFGLNFHWPKDPAKTENTDDYFHLWATRQPPLASVLINRPKFERDVLKMNKEMGVEFYNGRVVDVDLTSGDELNSVQVKVGDQQLELKTKHVIDAAGRKFIIGRKTDNLVFGPENLYGVNNGSAWMRVRNVDRTIFHSGYDPENATCSHYYATNHWMGHGHWVWMIPTDTESMELSIGLVHHHEVIPAQSVNTKEKFSAFLEANHNVVYQLLKSGEEVDFHYLPRLAHKSKQMYSRDNWYVIGDAAAMFDPFYSMGMTMMSFQIENVTEIIRAKFAGEADVERKRVVYNNFAVNMIARNNHLVSHHEKQLGNASIMSWRIFLENMWWFGVLIPMYIGKWHLDLPFLHKFGKQGRGAVVAETLEEAYKLFDKLLEKKQNLGFMYTHRTDELPFGYSITKDVSKYIGLSKYEPKHCNIYAEMRNTYFFVALWYLKLLWKGFGLSGLLAPKNVKRVLTLLKISAQSYVDELIFDYQTRNIPTNSAVAKQREEFKNYQPRTELQPWQNLATVDANDTKLPELVKVGS

SEQ ID NO: 86649 - protein, 202 aa, Pseudoalteromonas tunicata
  misc_feature (1)..(202): tr|A4CBM5|A4CBM5_9GAMM Tryptophan halogenase, putative OS=Pseudoalteromonas tunicata D2 OX=87626 GN=PTD2_18110 PE=4 SV=1
MVGEVIGEPHIIPFVTGIRKQSWHNNCLALGLAQGFLEPLESTAIHLVSKTLALFVRMFPDKQCNSIQMAEFNRRVRADYQEIRDFLVLHYCTTKRSDSAFWQDCQTMAIPESLQQKIDFFKVAGGLIPEVEALFQPTSWYAVFEGMQVRPAGFNPTLHALNSQKLAQSLAQGQAALARSVVKQPSHQAFLTDYCQAPKIES

SEQ ID NO: 86650 - protein, 376 aa, Myxococcaceae bacterium
  misc_feature (1)..(376): tr|A0A4Q6A402|A0A4Q6A402_9DELT Tryptophan halogenase OS =Myxococcaceae bacterium OX=2484252 GN=EOO71_02150 PE=4 SV=1
MSDAHCDVAILGGGPAGAGVALALRTQTRRSVTLVERASDDTPRIGETLPPDARLPLAKLGVWSGFLRDGHLASRGTASAWGSATVGYHDTLMSPLGSAWHLDRARFDASLRAQVAERGGTVRFGTTLTGCESLGVEGFRLHLSHPSEGPSTLRARFVVDATGWKAEFATSQGARRQVVDRGFALYGDFRLREGAAFSTHALVESRPEGWWYSALLPGGRVVVALIGDGESLRGVRPGTPGSWLSLLAHTTATRERLAVCDFTGEALRAVPATVGGLDRLHAEHWLAVGDAACTLDSLSSQGISTALGSALMAAEALEQHLQGHPEALGAYGARVRQGFVEHLRTRDHFYREERRWPDAPFWRNRREALASSALAA

SEQ ID NO: 86651 - protein, 504 aa, Erythrobacter sp.
  misc_feature (1)..(504): tr|A0A547PCN6|A0A547PCN6_9SPHN Tryptophan 7-halogenase OS=Erythrobacter sp. JBTF-M21 OX=2584124 GN=FGU71_08005 PE=4 SV=1
MAIQNIIIVGGGTAGWMAAAALSRLKQNRELGITLIESEQIGTVGVGEATIPPFVEFNELLEIDEREMLASVQGSFKLGIQFENWGKIGDSYIHPFGAYGYAMGGISFHHIWHRLANSGDNRPIQVFNVETMAAHFGKFARSEDYQKTRDDLPPVNYAYHLDAGQYAMFLRKYAEQRGVVRKEGKICDVQLDSESGFVTSVKLEEGGVIEGDLFIDCSGFRGLLIEEALETGYEDWSHWLPCNRAVALPCKRDDGSPPPPFTRATAHKAGWQWQVPLQHRNGNGHVYCSDFMEDQEALDILTGNIRGKPQAEPNFLRFKTGYRKKFWNKNVVALGLSAGFMEPLESTSIHLVNTGINKLISMLSLDGITQTQQDAFNRLTLREYSRIRDFLILHYNATSRDDTDFWNYVRTMDVPDSLTEKIELFKANGQIFREEDELFTETSWAAVMMGQGIAMQGHNAMADAIDHARTRKEIDEMEQSIRYLVQHMPGHGDYLANYCPAKAA

SEQ ID NO: 86652 - protein, 503 aa, Sphingomonas sp.
  misc_feature (1)..(503): tr|A0A430DDS1|A0A430DDS1_9SPHN Tryptophan halogenase OS =Sphingomonas sp. S-NIH.Pt3_0716 OX=1920124 GN=BRX37_03 320 PE=4 SV=1
MHVDFPTSDRVVKRVVVAGGGTAGWVTATALVRHLGPLIDITLVESDAIGTIGVGESTVPTFRGFHQLMKIREDRFMAEAQATVKLGIEFKNWGQVGDRYIHPFGTIGLQWSWMADFHHFWLHARAQGFGGELGEYCLEWVAGEANRMSLSSSVAPSYAYHIDAARYARFLRSLAEPAGVKRVEGKIRNVELAPESGHIAALVLESGTRIEGDLFIDCTGFRSLLLGEALGVGFEDWGQWIRTDRAVAVQSTSDGPAQPYTSAIAHEAGWRWRIPLQHRDGNGFVFASDFMSDDEAHARLLAEIEGEPIVDPWLVRFKTGTRTKAWHKNCVGLGLAGGFIEPLESTSIHLMMAAVTRLIEDFPFHGFDDALLDHFNRKSRLEFENIRDFIILHYHVTQRDDSPFWDHCRTMEIPDSLKERLALWQENGRAYQLGHELFRVDSWSSVLLGQGMHPRGYHHVAAMMPEPQLREELARMRKEIAGVVAEMPSHREFLRRYCPAELV

SEQ ID NO: 86653 - protein, 520 aa, Pseudoalteromonas tunicata
  misc_feature (1)..(520): tr|A4CBD8|A4CBD8_9GAMM Putative tryptophan halogenase O S=Pseudoalteromonas tunicata D2 OX=87626 GN=PTD2_17675 PE=4 SV=1
MSHRVNQVVIIGGGTAGWLTAAVLSSQLQSTNKEAVQVTLVESPNIPILGVGEGTWPNLRATLKQIGVSEAEFMKGCDATFKQGALFCNWMKSVNEQTHQYYHPLNTVFHSSYEFSLAPYWLLGHSERSRYDHAVATQSLVCEAGLGPKEKTTPEYQAVQEYSYHLNANKFARFLTKHCTEKLGVKYIQANVLKANRDGDDYVTSVTTDSEQYDAICGDLFVDCSGTTPVLFEQTYHIPWVDISDVILNDTAIAMQVPYADPERDIASHTIMTAQDNGWIWDIGLYNRRGVGHVFSSKHTDIKTAEKQLRDYIGQEAEGLTARVIPLKLGYREKFWHKNCVAIGMSAGFVEPLEASAIYLYDAAAKMLADQFPRTRESMQYVEEKFNRSFNMRMIRTIDFIKLHYCISDRDDSAYWRDNCSNKTIPKALQQRLLHWKEHPPTKYDFDNAWEPFNLDSYLYVLYGMKYQTSLAHNQDGFIYSDKAKAKFRDVSMMADKLVTHLPKHRDLLKKVYQFGFTKI

SEQ ID NO: 86654 - protein, 520 aa, Erythrobacter sp.
  misc_feature (1)..(520): tr|A0A547PA23|A0A547PA23_9SPHN Tryptophan 7-halogenase OS=Erythrobacter sp. JBTF-M21 OX=2584124 GN=FGU71_03385 PE=4 SV=1
MQPGNDSDIAQIVIVGGGTAGWMAAAAFSRYFDNGRRTITLVESEQIGTVGVGEATIPPIANFNKMLDIAENDFLRATNGTFKLGIEFVNWGQQGDRYFHPFGGYGQDLHGIAFHQLYLREKALAQAGLAAGRETVGDIAGYSMSSMAARHGKFARVKPGSQSLAGQIGYAYHFDASLYAKFLRSLAEKQGTIRREGQISAVHRDSETGDVTSVELDNGEKIEGELFIDCSGFRGLLIEGALETGYDNWSHWLPVDRAIALPCANPATLDPYTRSTAHGAGWQWRIPLQHRTGNGHVYCSDYMEADEAETILRANIEGEPLGDARHLRFTTGMRSKAWNHNVVALGLASGFIEPLESTSIHLVQNGIARLFALFPDKKISPVERDEYNRGMHELYEDVRDFVILHYKATQRDDTEFWRYVRDMDVPETLAKKMELWKLHGRVFRENAELFTMPSWIAVMLGQNIWPDKYDPMADTLDDAKVAGAMKQMREAYRNTALQMPAQVDFLKQSNSWAAAQDMSG

SEQ ID NO: 86655 - protein, 496 aa, Sphingomonas sp.
  misc_feature (1)..(496): tr|A0A418WLA7|A0A418WLA7_9SPHN Tryptophan 7-halogenase OS=Sphingomonas sp. K2R01-6 OX=2320861 GN=D3876_11635 P E=4 SV=1
MAEQIVRRVVIAGGGTAGWIAAVALSKQLGTLLDITLVESDQIRTVGVGESTVPTAHTFHHLIGIDEQEFMRETGSSFKLGINFENWGEIGDRYIHSFGTLGKSTWMADFHHLWLHARGEGLAGELEDYCLELQAAEQGKFATSDQFKVNYAYHLDAGYYARYLRRLSEAAGVRRVEGKIASVEQHPQTGFIQSLLLESGERIEGDLFIDCTGFRGLLIEQTLKAGFEDWSHWLPNNSALPVQTRSVGPAMPYTSAIAHDAGWLWRIPLQHRVGTGLVYCSDYLSDDEALARLHQMIEGEILIEPWSIRFKAGRRLKVWEKNCIALGLASGFVEPLESTSIHMIMIAVTRLIQLFPFNGCDDALQRRYNDLSQNEIEKIRDFIILHYHLTERDDSPFWRQVRTMEIPDTLAQRLALFGENAHAYQITEELFRIDSWVQVMLGQRLRPAGHHQLGRLMRPEQLRQALLDLKTNIGKAVAGMPSHQDFLNRYCPAAMA

SEQ ID NO: 86656 - protein, 481 aa, Novosphingobium sp.; identical to SEQ ID NO: 82733
  misc_feature (1)..(481): tr|A0A257YMY6|A0A257YMY6_9SPHN Tryptophan halogenase OS =Novosphingobium sp. 12-63-9 OX=1970403 GN=B7Z36_01545 PE=4 SV=1

SEQ ID NO: 86657 - protein, 515 aa, Thalassotalea agarivorans
  misc_feature (1)..(515): tr|A0A1I0HV21|A0A1I0HV21_THASX Tryptophan halogenase OS =Thalassotalea agarivorans OX=349064 GN=SAMN05660429_02 940 PE=4 SV=1
MSEKIRHIVIVGGGTAGWLTANHLAKQLQPSSNTDVTITLVESPNIPTVGVGEGTVPMMRQSLQYLGISETDFLQQCDATFKQGIKFVNWEHNPADKGEHSYHHIFDYPAPADIDSTLYWLNSNTHQSFVDAVSIQGRVCDNNLAPKLITTPEYQGAVSYAYHLDAAKFAKLLTKHATDMGVKHVKATVEQVETAPLGDISAIITKELGAISGDFFVDCTGFQSLLLGKTLDVSFIDQSDVLFADRALAVQVPYVAPSDEIPSYTIASAQDAGWIWDIGLTTRRGTGYVFSSKYCSDEQAKYTLAQYLGDDALVEGARFIDMNIGYREKFWFKNCAAIGLSQGFVEPLEATGLLVFDATARMLAEQFPTFKEQMPLMADCFNERVKASWLHVIDFIKLHYCISKRDDTPFWRDNRSLASIPLSLQQKLERWALQPPHAYDFENKFSVFNKENYLYVLYGMHFDTDATHLAYKAGQEEHAKAYFQQLEQHCQTALDRLPKHRELLEKIKRFGLQKV

SEQ ID NO: 86658 - protein, 495 aa, Cellvibrio sp.
  misc_feature (1)..(495): tr|A0A2T6FFC4|A0A2T6FFC4_9GAMM Tryptophan halogenase OS =Cellvibrio sp. 79 OX=1954207 GN=B0W54_20230 PE=4 SV=1
MTAPIKKIVIAGGGTAGWMAAATISHHLGSVLDIRLIESEEIGTVGVGEATVPPMQTFHKLLNIDEQDFLRATQGTFKLGINFENWGQKGDQYIHSFGVTGKELWMADFIHFWLKAKGMGLENDYGDFCFELQAARLGKFAITENPRTNYAYHFNASLYAKFLRKYSEARGVKRTEGKIVGVATHSDDGFIKSVTLESGEVVEGDLFIDCTGFRGLLIEQTLHTGYEDWSQWLLNDSAIAAQTKNPLPALPYTRAVAHQAGWQWHIPLQSRIGTGFVYCSKYISDDDARRTFFDNLPGKLINEPHVLKFKTGRRKRSWNKNCVALGLSSGFIEPLESTSIHLIMNGALRLVRFFPSNGIKESSVAEYNEQTRNEIERIRDFVILHYKATIRDDTPYWRYCRDMDIPDTLAHRIKLFREAGIAYKAEGEIFQLDSWSQVMIGQRIIPEDYHQYVDAMNHQDLCKYMQVFSADIKKRAMQLPSHEDFVRQYCAEDQA

SEQ ID NO: 86659 - protein, 499 aa, Thalassotalea agarivorans
  misc_feature (1)..(499): tr|A0A1I0E2X4|A0A1I0E2X4_THASX Tryptophan halogenase OS =Thalassotalea agarivorans OX=349064 GN=SAMN05660429_01 683 PE=4 SV=1
MSTDKRIRKIVIAGGGTAGWMAAAGLSKLMGKNGNLEVKLVESDDIPTVGVGEATIPTLHIFHRLLGINEQEFMAKTNATFKLGISFENWRDVKKDYIHSFGFLGKDSWAAGFQHFWLKGQQLGIAKPIGDYCTEHLASREGRFAVLPKQDLNHAFHLDAALYAKFLQEIATKHGVERVEGKIDKVNLDEETGYIQSLDLANGKHVEGDLFIDCTGFRGLLIEQALHTGFDDWSHLLPCDSAIAVQTTSNDKFPPYTRSIAHDAGWQWRIPLQNRTGNGLVFCSKYMTDQQAIDTLLANVEGELLNEPRVIKYKTGTRRKHWNKNCIAIGLSSGFIEPLESTSIHLFQRGIIRLMQLFPYDGINEADVDEFNQQTMTEIYNVRDFIILHYHLTERTDSAFWRYCKNMPIPETLKHRMDLFGKSGRVYKKADELFGENSWIQVMMGQGLMPERYHPIVDMMPEEDLKGFLQNVEMGVRKKVDSWPNHHDFIQHYCQANID

SEQ ID NO: 86660 - protein, 740 aa, Saccharophagus degradans
  misc_feature (1)..(740): tr|Q21LR3|Q21LR3_SACD2 Tryptophan halogenase OS=Sacchar ophagus degradans (strain 2-40 / ATCC 43961 / DSM 17024 ) OX=203122 GN=Sde_1104 PE=4 SV=1
MHGVKKIVIAGGGTAGWMCAAALSKLLGKNLDITLVESDEIGTVGVGEATIPTLHIFHELLGINEREFMSATNATIKLGISFENWKDLKEDYLHSFGFLGTDCWAAQFHHFWLKANQLGMAQPIGDYCVEHLATRVGRFGVHPNQERNHAYHLDASLYAKFLKGIADKFGVKRREGKIVDVKVGAKDGNIQSLSLDSGEVIEGDLFIDCTGFRGLLIEDALHTGYDDWSHWLPCDRAIAVQTTAKKSPALYTRSIAHDAGWQWQIPLQSRMGNGMVFCSKYWTDEQALAVLKENLTGECLNEPRVIPFRTGTRRLHWNKNCVALGLASGFIEPLESTSIHLIQRSIVKLMLLFPKDEIKQADRDEFNRQTREELEHIRDFIVLHYRVTDRTDTPFWRHCKQMAIPDTLQHRLSLFDETGRLYKYDKDLFGEASWVQVMLGQGVSPKSYHPIVDLMGRDELNRFMSSNLTSVQQSVDAFPLYSDFLKKYCPYKDEGLDLRKKNTIESVKFSFNKESLPVITPMGLNSTPIVLLDSVTNDGGAALRQIAKTLDFEFDTNTMYPGVRAQLPREYVLGVLDKMDGAIRQTYKIPPTLKTNVVQASFSLLTQEEKSLTPFQKVPHFDSTNPYFFAILHYLSTGDHGGTGFFRHEPTNLESIDVETKALYMNAINQSAKSTGFGSEGYIKAANDEFDLYHQVDYRTDRLVSYPGSLLHSTVVKPELDIGWDVDTGRLTANIFIVYE

SEQ ID NO: 86661 - protein, 505 aa, Rhodanobacter sp.
  misc_feature (1)..(505): tr|A0A0Q9P2A5|A0A0Q9P2A5_9GAMM Tryptophan halogenase OS =Rhodanobacter sp. Soil772 OX=1736406 GN=ASG75_13250 PE =4 SV=1
MNDPRIRRIVIVGGGTAGWMAAALLAKALGAGVAIRLVESAEIGTVGVGEATIPQIRHINRFLGIDEDDMLRFAHGTYKLGVQLNGFGRLGDSYLHAFGDLGLPLGLTPFHHYWLRAVQERSRADTPDLWAYSLNAAAAAENRFAPLEAVPDSPLGGIRYAYHFDASRYAQYLREHIAPGAVQRTEGKVVDVRLHAEDGFIESLQLDNGEIVEGDFFIDCSGFRGLLIEGTLNTGYENWQHWLPCDRALAVASAPGGPMRPYTQASARTAGWQWRIPLRHRVGNGHVYCSRFISDDEAAAQLLANLETEALGDPRPLRFVTGMRRLAWSRNCLALGLAAGFMEPLESTSIHLVQSGISRLLAMFPDRHCEQQLVDEYNRQTRFEYERVRDLLILHYKATERTDTPFWQQCGAMEIPPALARRIELFRRTGMIFREADELFTETGWLQVLLGQRIEPQRHHPLADALTTEQLDGFLADIRTLVGRAKNTLPPHHEFVARAAGGLAA

SEQ ID NO: 86662 - protein, 503 aa, Cellvibrio sp.
  misc_feature (1)..(503): tr|A0A2T6FGZ9|A0A2T6FGZ9_9GAMM Tryptophan halogenase OS =Cellvibrio sp. 79 OX=1954207 GN=B0W54_14335 PE=4 SV=1
MNTNKIKRVVIAGGGTSGWITAALLSRQLGKVLDITLVESEEIGTIGVGESTVPPMKAFNKIMGIDEQEFMRETAATFKLAIWFENWCLKGDQYIHPFGVTGQPGWACEFHHFWLRSQKMGLKSALGEYCVEWVAADQGKFFTSPNSKINYAYHIDAALYAKFLRKIAEGYGVKRVEGKIERVNQNADSGFIESLNMASGEVIDGDLFIDCTGFRGLLIEQTLHTGFEDWAHWLPCDTAVAVQTENVGPVQPYTSAIAHDAGWRWNIPLQHRSGNGYVFCSRYMSVDEATSQLLAAVPGKQTRDPWTVKVRTGRRRKAWNKNCVAIGLAGGFVEPLEATSIHIIMSTAARLSHLFPFNGIDQSLVDQFNKETKEEIEEIRDFIVLHYNTTERQDTPFWRYCKNMEIPESLKLRIDLFKDVGHAISNNGGLFRLDSWVHVLMGQRVVPRSYHRAADVMDDDYLQNFLNNFKTSVKNPVAAMPDHQTFLDQYCPAQVDVWGRPKG

SEQ ID NO: 86663 - protein, 507 aa, Cellvibrio sp.
  misc_feature (1)..(507): tr|A0A2T6FNS5|A0A2T6FNS5_9GAMM Tryptophan halogenase OS =Cellvibrio sp. 79 OX=1954207 GN=B0W54_06155 PE=4 SV=1
MKIKRIAIVGGGTAGWLAASHLGAELSADKELEITVIESADVPTIGVGEGTVPYIMNGLKRFGISEAELILSCDVTFKQGIKFVNWLNPNIHGEGNYYYHPFDVPYPAGFDVTPYWVSHAKNLPFDYVGIQSRICELGLSPKKISSEQYSGVLNYAYHFNATKFFKLLSKNAQEKFNVVHKVATIVGADKDDSGNIMNLIADTGEKFAFDFYVDCSGFSSLLLGKELGVPFISKATELFIDTALVQQVPLDGQEELNPYTTATAHKAGWIWDIPLTTRRGTGFVYSSNYMEHEEALSLYANYLGIPPDSFLPRKIPMNVGYRKNFWSNNCVALGLAQGFVEPLEATSILVADFSAELLVRNFPRHSEDIATLTPYYNKVVTHVWDRVIDFIKLHYFISDRNDSPFWLDNQSSEGLSETLRERLEIWKIRPPQKSDFFSRFDLFGADNFLYVLYGMKYKTRELIITPGEINRSRRLIEENESLVEKSASMLLKQKDWLMRLNAAVSRV

SEQ ID NO: 86664 - protein, 519 aa, Saliniradius amylolyticus
  misc_feature (1)..(519): tr|A0A2S2DZN9|A0A2S2DZN9_9ALTE Tryptophan 7-halogenase OS=Saliniradius amylolyticus OX=2183582 GN=HMF8227_0024 4 PE=4 SV=1
MNQSIQRILVVGGGTAGWLSAAYLAKSLRVADPNSPYRISLVESPDIPTIGVGEGTWPTLRNTLRHLGISETRFLRQCCASFKQASKFIDWQQSPKNGQHNHYYHLFDLPGMHWPFSPAGYWAAGLAGDTPYADAISVQAKVCEAGLAPKQITTPDYQGLLNYAYHLDAGKFAELLTEVATGELGVTHIQANVTEVQKHNNGDIAAVGTDRAGLLEADLFIDCTGFQSLLLGQSLEVPFKSLSDVLFTDRAVVAQVPHTNEDTELASCTLSTAQQAGWIWDIGLTNRRGVGHVYSSNHTDKTTAEESLRRYIGSGHDALNYRHLSMQVGHREKFWHRNCVAIGLSAAFMEPLEASAIFLIEAACYMVADQFPKNRQVMDTIAGQFNDSFRTRWQKVVDFIKLHYVLSGRTDNAFWLDNKDPSSIPDSLKQKLELWRHQLPSRYDFSFAFEPFTQESYEFILFGMTPGKLPEAGPLDPDLASRAREQFERIQTAWTQVNSDLPSHRALLNRVQQQGFYPS

SEQ ID NO: 86665 - protein, 508 aa, Thalassotalea agarivorans
  misc_feature (1)..(508): tr|A0A1I0DYK3|A0A1I0DYK3_THASX Tryptophan halogenase OS =Thalassotalea agarivorans OX=349064 GN=SAMN05660429_01 656 PE=4 SV=1
MQKRINHVVILGGGSAGWLTAGILAAEHQAKIKLGELSISLIESPNIPTVGVGEGTWPTMPQTLKKIGISELTFLSTCHATFKQGSKFINWHHSNKASSYTHPFEVVPGAVEGEQAKFWFNQDRGTSYAQATSLQHSMIEAGLAPKTNRLGEYDAYFNYGYHLDAGKFATLLQQHCTTKLGVQHVLAEVASIKLEESGDISRLVLANNAEVAADLFVDCSGFKGLLIGECLGVGKISADDALFANRAVTVQVPYADANQKIPSCTLSTAQESGWIWDIGLTNRRGVGYVFSDNHSNVDQAHQALEAYLKTDFSSQLVVNDIKFTSGYREKFWHKNCVAIGLSAGFIEPLEASALVLVELSATFLAEHLDQASQNMGAVEAQFNQVFSYRWQRVIEFLKLHYLLSERTEAFWQDNKAAQTIPDRLQHLLNEWQTRPPTTSDFPQAGEVFQAASYQYVLYGSGFIPKMMPKQLPQYEQHIRAQKQNIAHNKQQLLQGLPSNRALITSLIQ

SEQ ID NO: 86666 - protein, 533 aa, Bdellovibrio bacteriovorus
  misc_feature (1)..(533): tr|A0A1Z3N9P8|A0A1Z3N9P8_BDEBC Tryptophan halogenase OS =Bdellovibrio bacteriovorus OX=959 GN=B9G79_11820 PE=4 SV=1
MKTLSEHIENAFDLSYLNFPKCPPTDIKTIGILGGGTAGYLAALALAKYHPEVEVTVIESSKIPVIGVGESTTTEIVPFLHRGLEIDPVEFFREVEPTLKFGIHFEWGCPGDYKFNFSFFAGHQYESYYYENDIKNSNWPSVLMNANKIPVIRNKNGSLTSFLPSIPFSYHIDNKNLIRFLNKEVKSRGIEIVDAEVHEAKLDAQGNVASLESKEGHSLSYDLYIDCSGFRSKLLGQTLKTEFMPFTDTLITDRALTFDLPNKDVVDCYTSVITMNNGWCWKIPMRTEDHYGYVFSSKFCDEETALAEARARFGHFEKYKMVEFRSGRHKQAWVKNVFSLGNAYGFIEPLESTAIQTAVHSINVLCRLMPKSLEDQISINGINNEIAVTWDTFRWFVGMHYKFNKKLDTPFWKHCREKTNIGNAQTVVDLFNQRPPLSAGNFGSNSQFTATEALVFNSYSYDTLIFGQKEVHKPLTAPEMSKEEYFSKLKSYEELTSRSLSLFELFKGDHLMEDGILEQLFNDTDTWIMEADV

SEQ ID NO: 86667 - protein, 487 aa, Marinovum sp.; identical to SEQ ID NO: 82342
  misc_feature (1)..(487): tr|A0A2D7K4D5|A0A2D7K4D5_9RHOB Uncharacterized protein OS=Marinovum sp. OX=2024839 GN=CMH03_10310 PE=4 SV=1

SEQ ID NO: 86668 - protein, 519 aa, Thalassotalea agarivorans
  misc_feature (1)..(519): tr|A0A1H9YA93|A0A1H9YA93_THASX Tryptophan halogenase OS =Thalassotalea agarivorans OX=349064 GN=SAMN05660429_00 144 PE=4 SV=1
MSKVNSINRIVIMGGGTAGWMTAAALSKLLPKTHYTVTLVESEQIGTVGVGEATLPHLRFFNQRLGIDEKAFMRATNATFKLGIEFSHWAQIGDAYIHPFGDYGEGHNGVDFYQYWLAEGIADIHDLDNFSLPVALCNAKKFAFPSDDLSNISSTYSYAYHIDAGLYATFLRQFSEQHGARRIEGKVVDVKRRALSGNIESLILENGAVIEGDLFIDCSGFSSILLQKVLGVAFEDWSEFLPCNRAVAVATKAVDSNVLPYTKAMARDAGWQWNIPLQNRQGNGYVYCDKFISETQAIDTLQQHLNGEQINDINSLSFTAGKTKCAWKNNVVAVGLSSGFLEPLESTSIYLIQSSIMKLIEFLPQSQNINQCRTEFNRFMGMEMDRIRDFLILHYCATEREDSEFWRYVKHMQLPDSLGQKMAMYKSTGYIEKYQYGLFLTPSWQAVYHGQRVRPNQIDTRTTQLSDADRKALLQHYKEQVLRCVDGAHEHSQVLQKFLGSSQQSPAPATFSLYGARRA

SEQ ID NO: 86669 - protein, 508 aa, Cellvibrio sp.
  misc_feature (1)..(508): tr|A0A2T6FND7|A0A2T6FND7_9GAMM Tryptophan halogenase OS =Cellvibrio sp. 79 OX=1954207 GN=B0W54_05335 PE=4 SV=1
MNSDAHISPRIKKIIIVGGGTAGWMTAATLAKVLGKEQYSIQLIESDAIGTIGVGEATIPHIGIFNKILGIDEQDFMRKTQATFKLGIEFTNWGNIGESYIHPFGSYGVNIDSLHFYNYFLKMARQEGSLNPEEYSIGALAARRNKFMHPLNATHSPLGNIRYAYHFDAGLYAKYLRNYAEGKGVERIEGAITQVKLQEDNGFIDSVLLEDGRVYNGELFIDCSGFRGILIQEALGTGYEDWSNLLPCDSAIAVPTANLHPPASFTRSTAHEAGWQWRIPLQHRTGNGHVYSSRFMTDDQAGRILLDNVEGDLLTEPRVVRFKTGMRRKFWNKNCVAVGLSSGFLEPLESTSIHLIQASIKKLLEFFPDKEFDQRNIDAYNEILQRNLLFIRNFIVLHYKVTNRNDSDFWNYCRTMPIPESLEKRIALYRQEGKIYHDSNELFSEDSWFAVMFGQGLVANKYHPLADVVSGQRLKKMFSEIQTVIGNSVNAMPMHTDYIAKYCAQSAS

SEQ ID NO: 86670 - protein, 498 aa, Saccharophagus degradans
  misc_feature (1)..(498): tr|Q21LS1|Q21LS1_SACD2 Tryptophan halogenase OS=Sacchar ophagus degradans (strain 2-40 / ATCC 43961 / DSM 17024 ) OX=203122 GN=Sde_1096 PE=4 SV=1
MNNNIKKILIVGGGTAGWMAAAAMGKLLKSRLCDIELIESEEIGTVGVGEATIPQLQLFNKLLEIDEDEFVRETSGSFKLGIQFVNWGEIGSSYIHAFGDVGKNMEGIPFYHYWLRAFNSGLATHIDDYTLSSLACHQERFMRSVDAGNSPLSNIAYAYHFDATKYAKYLRKYAESKGVVRTEGKVVETVLHDDGFIKGVRLESGEFKEADLFVDCSGFRGLLIEEALKTGYEDWSHWLPCNAAVAVGCESSGDPLPYTRATAHSAGWQWRIPLQHRIGNGHVFCEKYMGEDEATSILLNNLDGAPIGTPRTLRFKTGHRKKFWNKNCVTLGLASGFMEPLESTSIHLVQTALAKLFSFFPNKNFDEVDIDEYNRQTQFEYERIRDFLILHYCATNRNDSEFWNYCRTMDLPEALVQKMDQFKCNGRIFRHNYELFSDLSWFEVMLGQGIMPSGYSPLVDVFSDEELKRRMDSIKGVVQRSVEKMPKHQEFINLHCKV

SEQ ID NO: 86671 - protein, 501 aa, Pseudoxanthomonas sp.
  misc_feature (1)..(501): tr|A0A0Q8FEA1|A0A0Q8FEA1_9GAMM Tryptophan halogenase OS =Pseudoxanthomonas sp. Root65 OX=1736576 GN=ASD77_03645 PE=4 SV=1
MQTPEPVATPRPVKRVVIAGGGTAGWMAAAALSKTLGKVLDITLVESEEIGTVGVGEATIPTLVVFHRLLDIKEQDFMSAVQGTVKLGISFENWKDVDHRYIHSFGISGKDHWSAGFQHFWLRGRAEGLASEYSDYCIELQAALQDRFSHLPRYHVNYAYHMDAALYARFLRDFSARHGCKRVEGKIVDVATDAEGCISSIKLERGEVIEGDLFIDCTGFRALLIGKALGVGYTDWSQWLFNDSALATQTTAVRDAVPYTRAIAGTAGWQWRIPLQHRVGNGIVYSSRHISDDEAREQFLSSVEGEVIKQPWPIRFQPGQRQQCWAKNCVALGLAGSFIEPLESTTIHLIQRGIVRLLQTFPHTITQPAIDEYNARLDEELQHVRDFVIMHYKVSDRRDSPYWREIAEMEIPSTLRHRIDLFRETGTVFHVPGELFGENSWIQVMMGQGIVPKRYHPTADVMSPADLQRFLDDIRRNVLDTARQMPAHMDYLRSYCPAPKP

SEQ ID NO: 86672 - protein, 503 aa, Brevundimonas sp.
  misc_feature (1)..(503): tr|A0A1V1V2G9|A0A1V1V2G9_9CAUL Flavin-dependent tryptop han halogenase RebH OS=Brevundimonas sp. SH203 OX=34516 7 GN=rebH_2 PE=4 SV=1
MDQRADDVRHVAIVGGGTAGWMAAAALARAFHRPGGLKVQITLIESEAIGTVGVGEATIPPIRQFVESLGLSEDDFIRSTAATAKLGIAFKDWSGPGSEYFHGFGDYGPVIAGPPWRQYLFRLKAEGRIENLDAWSMPTAMARACKFAPPVDDSRSVLSHYSYAYQFDAGLFARRLRTLAEALGVQRREGRIEGVDRDGENGLVRALRMQDGGEVAADLFIDCSGFRGLLIEQTMQAGYEDWTRWLPCDRAVALPCASTRAPEPLTTARARDAGWQWRIPLQHRVGNGYVYCSDHVDDQTALDDLLGQIESAPLAEPNRLRFVTGRRREAWKGNVVALGLASGFVEPLESTSINLIQTGIGRLLELFPDRTFDPALIREYNRRSAQEFERIRDFIVLHYHLAGREGAMWDRCRRTPPPDTLAAKIDLFRARGEIALLEDESFREDSWTAVFTGSGVWPKRLSPLVEIEPLEAVERQATQFSQLIARAVASLPDHSHHFTGYAR

SEQ ID NO: 86673 - protein, 497 aa, Sphingomonas jeddahensis
  misc_feature (1)..(497): tr|A0A1V2ETW7|A0A1V2ETW7_9SPHN Flavin-dependent tryptop han halogenase RebH OS=Sphingomonas jeddahensis OX=1915 074 GN=rebH_2 PE=4 SV=1
MTPRRIVVAGGGTAGWMAAAAIARTLGRAATVTLVESEAIGTIGVGESTIPPIVGFNRLLGINEAEFMAATNATFKLGIVFDDWRDGDDRYLHAFGLTGKDHWAAGFQHYWLAGRARGHHAPFGDYSLEHQAALAGKFAHLPDDRLNYAYQLDSGLYAKFLRAMAERDGTTRVEGKIASVELDGETGDIAALMLDGGRRVDGDLFLDCTGFRALLIEGALHAGFDDWTHWLPCDSAIALQTASIGPAVPYTRAIAHDAGWQWRIPLQHRVGNGYVWCSRYLGRDEALDRLLANVEGEVLTEPNHLRFTTGVRRRQWHRNCIAVGLSGGFMEPLESTSIHLIQRAVLRFLRMLPAAGPISPRDVAEFNDQQHADMVQVRDFLILHYKVTDRRDTAFWRQCAAMPVPDSLKQKIELFRDTARVFRRNEELFAEHSWMQVLLGQGIEPKTWHPLADKLTDEELARLLGTLHDQVSRTVAGLPPHADYVAQLCANARSQAA

SEQ ID NO: 86674 - protein, 589 aa, Fischerella thermalis
  misc_feature (1)..(589): tr|A0A2N6KSU9|A0A2N6KSU9_9CYAN Tryptophan halogenase OS =Fischerella thermalis CCMEE 5273 OX=2019663 GN=CEN49_1 8340 PE=4 SV=1
MNTTAQQLEYDVVIMGAGYAGVCQARHLLLKIPNIRLAIIDPRSQDPSQVNHRPGESTLEAASMFLFSELGLHDYLLEEHTHKAGLNWHWPKDVDKTESLDDYYNIWVNRQLTIPSFHLNRLKFDLDVLEMNKQMGAHFYNGRVVDVDLTPGDEDNTVKVKLHNDYIHLKAKHLIDAAGRKFIIGRKTDNLLLHPKELPVHIKPSSGWVLVRNVDRTIFDNSVYSTESLESRYYATNHWMGKGHWLWMIPVDSQSKELSVGLLHHPDIIPSELVNTKEKFYAFIKANHNLVYKVLQSGEHVEFNYWPRIAHTSKKLFSRDNWYVIGDAASNFDALYSTGTTMSCIAIESVTEIIRAKLANEQDAEKKREAYHHFNLALARFMNLAVSSQEKQVGNASIMSWRLYGNYMVWFNTLLPIYVGKWHLDLLFSRLALIFFKLNGSFWVDTYKQLSYLAERGTNIGFMDQLRADQLIGGYHPDKFFDNFLENAKLEPSKLNVFAGLRAYCFYIVVWFVMWQWKGFGPIGLLRPRNIFQIVRLLLTGVVMAIAELTHKLKLLGQPTNSIVAKTREEFKSYRYQSRLQNWVGSSEL

SEQ ID NO: 86675 - protein, 606 aa, Fischerella thermalis; identical to SEQ ID NO: 86648
  misc_feature (1)..(606): tr|A0A2N6KXC6|A0A2N6KXC6_9CYAN Tryptophan halogenase OS =Fischerella thermalis CCMEE 5273 OX=2019663 GN=CEN49_1 0050 PE=4 SV=1

SEQ ID NO: 86676 - protein, 609 aa, Fischerella thermalis
  misc_feature (1)..(609): tr|A0A2N6KX73|A0A2N6KX73_9CYAN Tryptophan halogenase OS =Fischerella thermalis CCMEE 5273 OX=2019663 GN=CEN49_1 0045 PE=4 SV=1
MTTNNTQSQVYDVVIMGAGIGGVCQARHLLLNIPNIKIALVDPRPEERTDRDMKVGESTVEISTLMICKELGLYDYMIENHPPKFGLNFHWAKEAGKTENTEDYYHIWTVKQPPLASVLINRPKFERDLLRMNQDMGAEFYNGRVVDVDLTPGDELNTVHVKQGDRYLELKTKHVIDSAGRKFLIGCKTDNLITGPENLYGINNGSVWMRVRNVDRTIFHSGYDPYVCTCSHYYAANHWMGHGHWVWMLPTDTQNMELSIGLLYHHDIISPHSVNTKEKFYAFLEANHNVVYRLLKSGEEVDFHHWPRIAHKSKQMYSQDNWYIIGDAAAIFDPFYSQGLTMMSFQIESVTEIIRAKLAGEANAKEKCALYNKFALNMIDRTNVLVSRHEKQIGDASIMTWRMYLENIWWFKMLIPMFVGKWHLDLDFLKNVVAKPGRLYVVQIMNAVYEHLDELVERKANIGFLHTHIADQLPFGFTMSNDFDNFLHLTKYEPQRANIYVSIQWSHFFVALWYLKFLWKAYGLKGVLSPHNLKHVFALFKAFLEAAWDHLIFRIKTKNIPGNSIIANIRQEFKNYRAPAKLEPWLEEVTEASNGNVTTQSRELVKAEV

SEQ ID NO: 86677 - protein, 500 aa, Gammaproteobacteria bacterium
  misc_feature (1)..(500): tr|A0A1G0I334|A0A1G0I334_9GAMM Tryptophan halogenase OS =Gammaproteobacteria bacterium RIFCSPHIGHO2_12_FULL_63_ 22 OX=1798290 GN=A3E01_10540 PE=4 SV=1
MVPERVKRVLIVGGGTAGWMTAAFLSQALGKGVRIELVESDEISTVGVGEATIPPINNFNTALGIDEDEFIKQTQATFKLGIQFKNWGALGDSYIHGFGTMGHVTGVVDFHHYWLKMFQAGKVDRIEDYSINLLACEKNKFMRGTDKYPNSPLKDIGHAFHFDAGLYARYLRVYAEQHGVARTEGKIVGVQQHPESGFVTSVTMENGNVIEADLFVDCSGFRGLLIEQTLKTGYDDWSHWLPVNRALAVPCESVAPLTPYTRSTARSAGWQWRIPLQNRIGNGHVYCSDYISDDEAASVLMANLDGKALAEPRPLRFVTGKRKKFWDKNVVAIGLSSGFMEPLESTSIHLIQKGVSRLVSFFPDKGFEQPDIDEFNRQSTQEFEQIRDFIILHYTATERDDTPFWNYCRTMPIPDTLQQKIDLFKSNGRLFRINNELFTEISWFQVMFGQRIRPQGYHPLVDAKPEDLIERMVADVKRVMHGVVDHMPTHEAFIAQNCKA

SEQ ID NO: 86678 - protein, 505 aa, Sphingomonas rubra
  misc_feature (1)..(505): tr|A0A1I5URM6|A0A1I5URM6_9SPHN Tryptophan halogenase OS =Sphingomonas rubra OX=634430 GN=SAMN04488241_11420 PE= 4 SV=1
MNRQTGKREGGIRRVVIAGGGTAGWMTAAAVARTMGAAIELVLVESDAIGTVGVGESTIPPLVTYNRLLGINEADFMRETQATFKLGILFDEWKERGSRYFHSFGLTGKDHWSAGFQHFWLYGRHKGHQHPYDDYCLELLAAMAGKFAHLPDDQMNYAYQLDSTLYARFLRRLAEADGTRRVEGKIARVELDEESGDIARLVLDSGTHIEGDLFIDCTGFRALLIEGALHAGFEDWTHWLPCDAAIAVQTENVAPPVPYTRAMAHDAGWQWRIPLQHRTGNGIVYCSRYLDREQALERLLGNIEGTVLTEPNALRFVTGMRRRQWHRNCVAIGLSGGFMEPLESTSIHLIQRAVLRLLRLFPVAGISERDVTEFNDQQLTDAVQIRDFLILHYKATDRRDSAFWRQCAAMPIPDTLHHKIELFRETGRVFRRNEELFAENSWVQVMMGQGIVPQSWHPIAAKLRDDELDRLLGTIRDTMRRTVAGLPDHAAYVAQYCGARRGSAR

SEQ ID NO: 86679 - protein, 494 aa, Novosphingobium sp.; identical to SEQ ID NO: 82741
  misc_feature (1)..(494): tr|A0A257YPL1|A0A257YPL1_9SPHN Tryptophan halogenase OS =Novosphingobium sp. 12-63-9 OX=1970403 GN=B7Z36_01530 PE=4 SV=1

SEQ ID NO: 86680 - protein, 521 aa, Acinetobacter lwoffii; identical to SEQ ID NO: 83693
  misc_feature (1)..(521): tr|N9H0V1|N9H0V1_ACILW Uncharacterized protein OS=Acine tobacter lwoffii NCTC 5866 = CIP 64.10 = NIPH 512 OX=98 1327 GN=F925_03092 PE=4 SV=1

SEQ ID NO: 86681 - protein, 509 aa, Saliniradius amylolyticus
  misc_feature (1)..(509): tr|A0A2S2E794|A0A2S2E794_9ALTE Tryptophan 7-halogenase OS=Saliniradius amylolyticus OX=2183582 GN=HMF8227_0238 5 PE=4 SV=1
MSNQENSLYSGDRRIRNIVIVGGGSAGWMTAAALAKVMGHHTSITLIESADIGTVSVGEATIPNIRAFNQLLELNEDELLAKTQGTFKLGIEFVDWYEKDHAYMHPFGPYGQNLSGVPFHHYWLGSSEHAGAPITDWCLEATAAYQGKFERYTRQRGRPVPTNYAFHFNAVAYAAYLADYAVDRGVKRIIDHVDEVRTSKDSGFIQSLMLSSGQEIAGDLFIDCSGFKGLLIEQTLHTGFEDWHHWLLCDSAIAQPCAIGDHYPPYTRSLAQEAGWQWQIPLQNRWGNGHVYASAFLEQDKALNVLHANMPDTPTGDPNYLHWRTGRRRQAWNKNCIAIGLSAGFLEPLESTGLHLVQSAISRLLSLFPDRHFDDTLRNKFNQYSREELERIRDFIILHYKATRRTDTDFWAYCANMDIPDSLSEKIELYRHSGRIFRENLELFSEISWFSVLNGQGIKPNAIHPLTEGMQVAERDSLLSQLKTQTQQQAQAMSCHQAYIKQHCSMESQ

SEQ ID NO: 86682 - protein, 503 aa, Gammaproteobacteria bacterium
  misc_feature (1)..(503): tr|A0A1G0HZS9|A0A1G0HZS9_9GAMM Tryptophan halogenase OS =Gammaproteobacteria bacterium RIFCSPHIGHO2_12_FULL_63_ 22 OX=1798290 GN=A3E01_06395 PE=4 SV=1
MTPEPVRNIVIVGGGTAGWMTAAALSKVLEGQCNIRLVESDEIGIIGVGEATIPHIGEFNRALEIDEDEFMRATQGTFKLGIEFLNWGAIGDRYMHGFGFVGQATQALPFHHFWLRLAKLGKASPLDAYSINTVAAYQAKFMRARTDMVGSPVADIAHAYHFDAGLYARFLRGYAEKRGVIRTEGKIAQVLQRADDGFIEAVVLESGERIDGQFFIDCSGMRGLLIEQTLHAGFDDWSQWLPVNRALAVPCESVDPLLPYTRSTAHTAGWQWRIPLQHRIGNGHIYCSSFMEQDEATSILMKNLDGKPLAEPRPLKFTTGRRKSFWTKNCVAVGLSSGFLEPLESTSIHLINTAISRIISFFPQSGFDAADIAEYNTQTHWEYERIRDFLVLHYKATIRDDSEFWNYCRTMPVPDTLQRKIDLFRSNGRIQRDGLELFAEPSWLQVMVGQRIVPQAYHPFADLRPEAEVESYVKHIEQVIAKCVRVMPTQADYIAKHCAANSA

SEQ ID NO: 86683 - protein, 508 aa, Brevundimonas sp.
  misc_feature (1)..(508): tr|A0A1V1V0I5|A0A1V1V0I5_9CAUL Flavin-dependent tryptop han halogenase RebH OS=Brevundimonas sp. SH203 OX=34516 7 GN=rebH_1 PE=4 SV=1
MRRPTLSQSPSDIQNIVIVGGGTAGWMAAAALAHTFEGAGKSVTLVESEAIGIIGVGEATIPEILKFNARLGIDEADFLRETKATFKLGIEFDGWRRDGERYFHPFGAFGVDMEGIAFHHFWLKACAEGQVEPLETYSMAWQAARRGRFAHPQGGPQSPLSSLGYAYHFDAALYAGFLRRFAEGLGVVRREGRIVAVQQAENGDVSGVTLEDGGVVSGDFFIDCTGFIGLLIEKTLNAGYDDWSAWLPCDSAVAVPCERVEPLSPYTRSTAREAGWQWRIPLQHRVGNGYVYASSHLSHQEAEDALMSRLEGPALAPPRRLRFVTGRRRQCWKRNCVAVGLSSGFLEPLESTSIHLIQSAITKLIALFPARTTDEALRREFNALMEEEFTTVRDFLILHYKVTQRDGPFWDQVRTMPIPDRLAEKIALFEETGRVIRRDHDIFGESSWLAVAVGQGLAPRGRHPVSDVIGRDANLGRLAAIKDSIWRTADALPSHTDMLAATMDRRAS

SEQ ID NO: 86684 - protein, 508 aa, Burkholderiaceae bacterium
  misc_feature (1)..(508): tr|A0A5C8B8L1|A0A5C8B8L1_9BURK Tryptophan 7-halogenase OS=Burkholderiaceae bacterium OX=2030806 GN=E6Q34_02220 PE=4 SV=1
MNTEARGTDLIQNVVIVGGGTSGWVTAAALATVLRGKYNIRLVESDEIGIVGVGEATIPMIQRYNQILGIDENEFLRETQGTFKLGIEFVNWGKLGDRYMHGFGTIGQEMWTVRFDQYWQKYNMQGKAGKLEEYSITRMASKKNKFMPADLSVPNSPLNQITYAYHFDASMYAKYLRKFSEARGVIRTEGKINQVLQREGDGFIEAVVLENGTRVEGDLFIDCSGFRGLLIEQTLQTGYEDWTHWLPCDRALAVPCESAPVLTPYTRSTAHKAGWQWRIPLQHRIGNGHVFCSQFTSEDEAAATLLGNLDGKALADPRLIKFTTGMRKQAWNKNVVAVGLASGFLEPLESTSIHLIQTAIARLINFFPSRAFNPVDIKEYNRQSRFEFERIRDFIILHYKWNQRDDAVFWKNCAEMPIPDSLTHKMEMYRASGRLLRVDDELFAEIGWLQVFEGQNMPVEGYHPLVDLQTEEGTLEYLQSVREVIAKCVDVMPDHAAYIAKHCAAPRM

SEQ ID NO: 86685 - protein, 501 aa, Opitutae bacterium
  misc_feature (1)..(501): tr|A0A2A2XZU1|A0A2A2XZU1_9BACT Uncharacterized protein OS=Opitutae bacterium AMD-G3 OX=1982317 GN=CAK89_07900 PE=4 SV=1
MIQDVLILGGGTAGFFMAASLKTHHPRLRVRVVRSPTLGIIGVGEGSTTDLLRFIHGFLNVPPAEFYRAVQPSLKLGIKFLWGKEDYHYTFSGALRQKLEPSGVPIGFACGGTLADADAVTSLMAAGKVFPRSPDGPWPVVNPTVGYHIENAELVAWLEGHAAKLGIEVIDGDLASVEQAGGEIQALHLNDGQRLAADFFVDASGFRAELIGKALGTPFSSYADSLFCDKAVVGGWTRTSEPILPYTTAETMDAGWAWQIEHPRRINRGYVYCSKFISDAEAEAEFRAKNPKVGPTRVVPFVPGRYAHQWVGNVFAVGNAAGFVEPLEATSLLCIAHECRFLTIAFTEGGLRRNNSMRETTDRLCGRLWDEIRDFLAVHYRFNRRADTPFWRHCRDHVALHGAQRLVEFYQENGPTFCLEVELLSPAQSIFQLEGFWLHLLAMGVPHGRADRLTPAEQAQWSALRATHRAVAERGMTVEETLQVLHDPRWRWTPGFYKDVV

SEQ ID NO: 86686 - protein, 520 aa, Saccharophagus degradans
  misc_feature (1)..(520): tr|Q21KW9|Q21KW9_SACD2 Tryptophan halogenase OS=Sacchar ophagus degradans (strain 2-40 / ATCC 43961 / DSM 17024 ) OX=203122 GN=Sde_1398 PE=4 SV=1
MRELTKRVVIVGGGAAGWLTAGILAAKHGKIGSGADVSITLIESPDVATIGVGEGTWPTMRETLSTMGVSESKFITACDVSFKQGSQFINWRNNCEGDNYFHPFSIPNRYYDMDLADLWNSTGRQTDFAYFAGSQALLCDEGLAPKQKITPEFAAVVNYGYHLDAGKFGEFLKQHCTQVLGVEYIQDHVISVDGERDTNIIAINTRVNGAIIGDFFIDCTGSNSLLIGGHYSVPLIAKDKVLFNDRALAVQVPRQIENQAIASCTRSTAQKYGWIWDIGLPTRQGIGYVYSSRYGTKEEIYTGLVDYISKSCGVESVDDLNIRELEFTPGVRSEFWVKNCVAVGMSSGFIEPLEASALAMVELAAKKIRDDFPYTASQMEPICRRYNESFHYKWDRVIDFLKLHYVLSDRRDSEYWLANTESVKECPRLEELLDKWKYRSPNKHDFPEVDEVFPAASYLYILSGTYFERYSDSHKNEKLRSAAMALVEENKAQAKKLLNGLPTNKELLESIAAVGLPKKQ

SEQ ID NO: 86687 - protein, 504 aa, Chania multitudinisentens
  misc_feature (1)..(504): tr|W0LJW3|W0LJW3_9GAMM Uncharacterized protein OS=Chani a multitudinisentens RB-25 OX=1441930 GN=Z042_23765 PE= 4 SV=1
MLNFRNAKRFVVLGGGTAGWFAAIAMRRLFSPNIEVRVIESSKIGIVGVGEGGLLNLAHAFERYQIPVDRFMAETDATYKWGFCYEGWRTGKEDDRYFHLFAGGGKAEWTEYGFLPGFSALIAQQLPLPSYIRGFQAVAHNAPQQEAKQMVAEGRTDIQTSYHFDSYKTANFLKTIALERGVIHQDAIVDRVELDEAGNATALIIGEESLPVDFVIDASGFARKIVGNTLNAEWVSFKEHLLMDSAIPFYMPHPFENPILVTRALAMNAGWMWQIPLVGRVGAGYVYSSKHISDEQALAEIEQKLGYKIEPHKTLKFDPGCFKEVWHGNIMALGLSSGFVEPLEATSIGQMLEQLRNFERVLRAGQGIVSEKSIKEFNQANLRSWEGIRDFLRMHYDCPRRDNPFWCDVAASAMPDDYREIKQCWQERTPRMLDIENYAINGWSGVFHVINWMFVAAPLGLISEQAAQKEVAALPQASKEKVVQLLQELPSLLGPDWRPRSSLK

SEQ ID NO: 86688 - protein, 505 aa, Cellvibrio sp.
  misc_feature (1)..(505): tr|A0A2T6FGP0|A0A2T6FGP0_9GAMM Tryptophan halogenase OS =Cellvibrio sp. 79 OX=1954207 GN=B0W54_13690 PE=4 SV=1
MSHQPIKNIVIVGGGTAGWMAAASLSQFLAHKSINITLIESTSIGTVGVGEATIPSIVQFNHSVGLDELEFIRATRASFKLGIQFTNWRKPGDQFFHPFADYGIDFSGVEFQHYFYRFKKNNPAEDLHDYSIGSQLAKHNHFAQPRETPNNPLADFSYAYHFDAALYAKVLRELSISRGVVHIDQKIEQVNLRESDGFIESLLLDSGNIIAGDLFIDCTGFKGLLIEESLHTGYEDWQQWLLCDAAVAVQSTNTEEPTPYTRVTALDAGWMWQIPLQHRTGNGYVFCSRFLDKKIAEETLMQRISGNPITAPKSFAFKAGRRKKVWNKNCYALGLASGFIEPLESTSISLIQTGITHLLTFFPDMSFNPAMIAEVNRRHQHEMERIRDFIVLHYKLTQRTDTEFWRYCQAMEIPSSLEHKIELFKSCGHILQHEPEAFEKSSWLSIYHGFGIIPERTDNRINGFNDDDIATQLTKIKQTLDHAGKNAISHAEFIRRHCTAPDFEA

SEQ ID NO: 86689 - protein, 532 aa, Sphingomonas jeddahensis
  misc_feature (1)..(532): tr|A0A1V2ETN4|A0A1V2ETN4_9SPHN Flavin-dependent tryptop han halogenase RebH OS=Sphingomonas jeddahensis OX=1915 074 GN=rebH_1 PE=4 SV=1
MVNERHNKPDYMDATVERQVASIVIVGGGTAGWLAAATIAARADPAAPAPLSVTLVESPDVPTIGVGEGTWPTIRRTLSRIGIPEAEFLAACDASFKQGSRFDGWRTGAPDDSYLHPFTAPIDADARGLVAAWAASDEPRFAAAVTPQARACALDLAPRQRAMPDYAGALNYAYHLDAVKLAALLQRHATRRLGVAHVRDHVVGVDRCENGDIAAVRCRDHGAIAGDLFIDCTGHAALLIGGAFDVPFIDRGHELFNDRALAVQVPVAPDSAIGATTNATAHDAGWIWDIGLPTRRGVGCVYASAFLSDDEAAASLRAYLARTAPGADLEALAPRRLAFRSGHRARFWERNCLALGLSAGFLEPLEASAIVTIELGLDALLDNFPATRASMAAHARRYNDLFRYRWDRIVDFLKLHYVLSERDQPYWRANRAPASIPDRLAELLAIWRHQPPSAQDFAAVNEIFPAASYQYVLYGMGMAPPPPGPVRIDGHDAAATSIRQITQRARALAASLPTNRAYLDALRAERPHGIVA

SEQ ID NO: 86690 - protein, 470 aa, Pseudoalteromonas tunicata
  misc_feature (1)..(470): tr|A4CBM6|A4CBM6_9GAMM Uncharacterized protein OS=Pseud oalteromonas tunicata D2 OX=87626 GN=PTD2_18115 PE=4 SV =1
MNNNIKKIVIVGGGTAGWMAAASLAKYVNNSAEICLIESSDIATVGVGEATIPNIVQFNRNLGIDETAFIKATQATFKLGIQFENWHPQNKQFFHPFADYGLKIDQVDFHHYLYRAQQTECSSQLADFSFACQLAKQYKFAQPHANPSTPLADYAYAYHFDAGLYGQFLKKHSINAGVNHLIGTIEQVNLHPDTGFINNVALTDGQIVEGEFFIDCSGFEGLLIEKALHTGYEDWSHWLFCDSALAVQTTRVNPPEPFTRSIAQSAGWQWHIPLQHRSGNGYIYSSRFESDEQAKALLQTNINGEPLGEIRKITFKPGRRKQIWHKNCFALGLASGFLEPLESTSISLVQTAIAKLLTFFPDCSFNQADINEVNRLHNLELENIRDFLILHYKLSARCDTPFWQACQNMAQQSHCHNPHNYTRSRSRCSGVGRAPSPQSHSPSMLVRIQVLAAFEHIERRRVYALYLPRI

SEQ ID NO: 86691 - protein, 498 aa, Cellvibrio sp.
  misc_feature (1)..(498): tr|A0A2T6FIB8|A0A2T6FIB8_9GAMM Tryptophan halogenase OS =Cellvibrio sp. 79 OX=1954207 GN=B0W54_17105 PE=4 SV=1
MKTNNIKKVVIAGGGTSGWMTAAAITKLLGKNLDVTLVESDEIGTVGVGEATIPTLLTFHKMLAINEQDFLSAVGGTFKLGISFENWLNIGEKYIHSFGNAGTDCWACGFQHFWLRGMQEGKAQDYARYSLETQASLADRFAHLPNNKMNYAYHFDASLYAKFLRGIAEEYGIKRVEGKINSVQLNDDSGFIESITLESGRVIEGDLFIDCTGFRALLIEGALHTGFEDWSHYLPCDSAVAVQTYKVAPPVPYTRAIAHPSGWQWKIALQHRVGNGLVYCSRYLSDDAAKKLLLENVEGETLFEPRVIKYRPGQRRKYWNKNCISVGLSSGFIEPLESTSIHLIQRAVVRLLQNFPQDEIVQKDADEFNKQMTAEIINIRDFIILHYNATQRTDSPFWRYCKDMPIPDSLKHRIDLFRETGRVFFAAFELFGENSWVQVMMGQGIVPKQYHPIVDMMSDKEMDVFLNGITSNVDNLVRQMPSQEEYLKHYCPQRNIDM

SEQ ID NO: 86692 - protein, 505 aa, Sphingomonas parapaucimobilis
  misc_feature (1)..(505): tr|A0A0A1W7B3|A0A0A1W7B3_9SPHN Putative tryptophan halo genase OS=Sphingomonas parapaucimobilis NBRC 15100 OX=1 219049 GN=SP5_059_00300 PE=4 SV=1
MVEGQARSILIVGGGTAGWLTAAYLARFLGPETRITLLEDPAIGAIGVGEGAFPTMRSTLRFLGIDEAQFVRAAGATFKQGIRFDDWRHAPDGGRRHRYVHPFEPPFQADGVDLVAHWLAQDPAARAPFAEAVTIQHRVAAAGRGPKQAGEGAFDGPLSYAYHFDAHRLVALLADCAMGLGVGHLEGRLTGAVVGADGLIAHVMTDRQGMMTADLYVDCTGQRAELISGALGEPLASVRDQLFTNRALACRLPYDATRGHALPTMTIASAHRAGWTWDIGLAEGRGIGTVYSDAHMDDEAALATLAAYLERDPDRLEPRLLTFEPGYRQRPWIGNCVAIGLAGGFLEPLESTGIVLIEAAVAMLAELFPHRGPIAAPAARFNALMTARYRTIVDFLKLHYCLSSRDEPFWHDNGAAGTISDRLRDLLEQWRYRPPGRFDFTLDVESFAHFNYQYILYGMGFADGDARPTRASGEAERLFRKLQMFGDRAVADLPSHDELVAAMRG

SEQ ID NO: 86693 - protein, 518 aa, Sphingomonas rubra
  misc_feature (1)..(518): tr|A0A1I5UQ64|A0A1I5UQ64_9SPHN Tryptophan halogenase OS =Sphingomonas rubra OX=634430 GN=SAMN04488241_11417 PE= 4 SV=1
MTEREVSKVVVVGGGTAGWLSACLLAARLRDTAATTVEVTLVESPDVPTIGVGEGTWPTMRRTLAQIGLDETDFLLACDGAFKQGSRFDGWRTGVGDDRYYHPFVPPLAGEPRDVVAGWQAHAADQRFAEAVGAQPRICGLDLAPRQRGMPDYAGALNYAYHLDAGKFAALLADHATGRLGVRLVRDHVTDVVTDVDGDIAAVRTRASGEVAGDLFIDCTGQTALLIGRTLATGLVDRSAELFNDSALAVQLPVAAGSPIAAQTVATAHPAGWIWDIGLPTRRGVGCVYASRYMDDEAARTVLDAYLARTAPDIDIAALPARKLSFRSAHRERFWVRNCLAVGLSAGFLEPLEASAIVLIELSLDALIANFPARRDTMDVHARRFDALFRYRWDRIVEFLKLHYVLSERTEPYWRDQRDPATIPPRLAELLAVWRDQPPSSFDLPHADEVFPPASYQYVLYGMGFPPPAKARDAGAGIIGGLVQVEQRARALAAGLPTHRAYLDALRRERGAVIMERH

SEQ ID NO: 86694 - protein, 475 aa, Marinovum sp.
  misc_feature (1)..(475): tr|A0A2D7D065|A0A2D7D065_9RHOB Uncharacterized protein OS=Marinovum sp. OX=2024839 GN=CMH04_04285 PE=4 SV=1
MEVKNIVIVGGGSAGWMTAAAIAYKCPNINLTLVESKKIGNVGVGESTLGHINNYMNLLDLKDEDWMKECSATYKTSIQFTDFKENGYTFQYPFGEYKAYSNGLSDFFDIQYAHPEISDLDFARSHSINALMAENNKMWGDKINEYGYDPKWDVAYHMDADAFGQYLKKRYCGSVRHIVDDVIRFQKNEDGYIERITTEGHIVLAADMFIDCTGFASLLIEKTMGIEFEKFKTLPNDSAVAARIPYKNEEDKRNKMSCVTDCKALSSGWLWDIPLWSRLGTGYVYSSQFQTTVSAEEEFRQETSWDGEVRHIKFRHGKHKKAWHKNVVAIGLSYGFIEPLESTGLLTTHENIMNLVHHLCLRDGYVNSLDATMFNTSCNESITGLSDFVAIHYGMSTRSDTPYWQYVTNDIEYNGVEGMGMTYIATGMGVKKHIHRLEKLPEKSKTELQEHIKDLEHLVEQMSHHYDYLKSNIYK

SEQ ID NO: 86695 - protein, 518 aa, Colwellia sp.
  misc_feature (1)..(518): tr|A0A2N1I7A9|A0A2N1I7A9_9GAMM Tryptophan halogenase OS =Colwellia sp. 12G3 OX=2058299 GN=CXF71_14940 PE=4 SV=1
MNEPLKKIVIVGGGSAGWLTAGVIAAEHSTNQDSGIEIILVESADVAPLGVGEGTWPSMRSTLQKMGISETEFLLECDASFKQGSKFTNWMNNTNEHYYHPFTLPNGFNEINLSSYWQPFSDKISFADAVCEQSHLGAHGLAPKQITTAEYSFASNYGYHLDAGKFGQFLQKHCTVKLGVKHVIDHVTKINSSATGDIASITTKMQGDIFGDLFIDCTGTSSLLLAQHYKIPFISKKHILFNDSAMAVHVPYENSDSPIASFTSSTAQTAGWVWDIGLPSRRGVGYTYSSVHISHDKAEQELRNYLVPSMGEDTANSVMIRRIPLNPGHREKFWHKNCVAIGMAAGFIEPLEASALALIELSAKMISEQLPANRQTMDIIAKRFNDKFLHRWENVVDFLKLHYVLSQRTDSAYWLDNKNENSIPKSLQELIKLWRYQPPYNYDATHTEEMFPPASFQYILYGMNFVTDPLGHKKRVSHAEKADKLFNDNIKKTQKLLSILPTNRELINKIKKYGLPKI

SEQ ID NO: 86696 - protein, 504 aa, Rhodanobacter sp.
  misc_feature (1)..(504): tr|A0A0Q8DVS0|A0A0Q8DVS0_9GAMM Tryptophan halogenase OS =Rhodanobacter sp. Root627 OX=1736572 GN=ASD68_09065 PE =4 SV=1
MGNNRIRKVVIAGGGTAGWIAASALAYQLKDQIELTLVESSKIATVGVGEATVPPVRNFHRFMNIDEQEFLRAVAGTFKLAISFENFVRPGHRYIHPFGNTGKGTLVAGFQQYWLESVRRGMKSDLGNFSLEAMAALEDKFALTENPEINYAYHMDAALYVDFLRKKFERYGINRIEGMIKEVRQNPDSGYVEALVLDDGQVIEGDLFIDCTGFRGLLIEQTLKTGYEDWNHWLPCDRAIAVQTQSVDPSPVPYTRAIAHEAGWRWHIPVQHRVGCGLVYDSRYMSDDEARAKLLHDVGAEPVRDPWQVKFRTGRRLKAWNKNVVALGLASGFIEPLESTSIHLAMSAVMLLVELFPSEGIPDSLVKRYNDVCRGELEHVRDFITLHYHANQREEKMWKDCREMTLPDSLQIRIDAWRDRAHVWKDQGELFATTSWMHVLLGQEIMPNQHHPVTREISDADLRRLLDSIRGPIDRTLPLLPLQQEFIDRYCKSPDGIWDMHRLG

SEQ ID NO: 86697 - protein, 589 aa, Fischerella thermalis
  misc_feature (1)..(589): tr|A0A2N6KLR1|A0A2N6KLR1_9CYAN Tryptophan halogenase OS =Fischerella thermalis CCMEE 5268 OX=2019662 GN=CEN50_0 1805 PE=4 SV=1
MNTIAQQLEYDVVIMGAGYAGVCQARHLLLKIPNIRLAIIDPRSQDPSEVNHRPGESTLEAASMFLFSELGLHDYLLEEHTHKAGLNWHWPKDVDKTESLDDYYNIWVNRQLTIPSFHLNRLKFDLDVLEMNKQMGAHFYNGRVVDVDLTPGDEHNTVKVKLHNDYIHLKAKHLIDAAGRKFIIGRKTDNLLLNPKELPVHIKPSSGWVLVRNVDRTIFDNSVYSTESLESRYYATNHWMGKGHWLWMIPVDSQSKELSVGLLHHPDIIPSELVNTKEKFYAFIKANHNLVYKVLQSGEHVEFNYWPRIAHTSKKLFSRDNWYVIGDAASNFDALYSTGTTMSCIAIESVTEIIRAKLANEQDAEKKREAYHHFNLALARFMNLAVSSQEKQVGNASIMSWRLYGNYMVWFNTLLPIYVGKWHLDLLFSRLALIFFKLNGSFWVDTYKQLSYLAERGTNIGFMDQLRADQLIGSYHPDKFFDNFLENAKLEPSKLNVFAGLRAYCFYIVIWFIMWQWKGFGPIGLLRPRNIFQIVRLLLTGVVMAIAELTHKLKLIGQPTNTIVAKTREEFKSYRYQSRLQNWVGSSEL

SEQ ID NO: 86698 - protein, 524 aa, Streptomyces sp.
  misc_feature (1)..(524): tr|A0A515YJ32|A0A515YJ32_9ACTN Tryptophan 7-halogenase OS=Streptomyces sp. RLB3-6 OX=2594457 GN=FNV61_45885 PE =4 SV=1
MANNVVIVGGGTAGWMTATYLRAAFGDDVGITLVESKNVPTIGVGEATFSTVRHFFSYLGLAEHEWMPECHASYKLAIRFENWRAEGHHFYHPFERPRNVQGFSLADWWLHTRPGEQFDRDTSLLAALCEAKSSPRHLDGAMFTSGFGATDEPAKAAEDGRETQFPYAYHFDAALLARFLTRFGTERGVRHVLDDVLDVVLDDHGDISHVVTREHGALTGDLFIDCTGFRGMLINKALGVPFESFRESLPNDSAVALRVPVNGEKAGMRPCTTATAQDAGWIWTIPLFGRIGTGYVYAGDYCTPEEAERTLREFAGPAADGLAANHIKMRIGRCAQSWVRNCVAIGLSSGFVEPLESTGIFFIHNAVEQLVKHFPGGRDDEHRRRTYNRQVAAVMDGVREFLVLHYYAAARDDNAYWRDAKKRPLPDGLAERIEAWGHQLPDAESVFPRFHGFEPYSYTAMLLGLGGLPVRPPAALSRMDDTAARREFALIRDQAQALAQRLPSQYAYLAHQQNASTGRPASAA

SEQ ID NO: 86699 - protein, 512 aa, Pseudoalteromonas sp.
  misc_feature (1)..(512): tr|A0A3D5EQY2|A0A3D5EQY2_PSEAS Tryptophan halogenase OS =Pseudoalteromonas sp. OX=53249 GN=DG048_25010 PE=4 SV= 1
MSKIINNIVIIGGGAAGWLTAGLLAKEHPHLHITLIESADIGISGVGEGTWPSMRNTLQRIGVKETDFLYQCDASFKQGSKFINWRGEQQGDNYYHPFMIPEGYYEYDVHTAWKQLFSHQKYADAMNMQSFICQAALAPKQINTPQYAGVTNYGYHLDAHKFARFLTQHCVNTLNVKHIVDNVICANNDEQGYIKSVSTQHNGAITGDLFIDCSGSQGLLIAKHYQIPFLDQSHILFNNTAVAAQIPYESQSQNIASATLSTAQSAGWIWDIGLPTRRGIGYTFSDKYCDEASAIETLKSYAAQTIGTQQADTIETRTLRFTPGYREIFWHKNCVAIGMSQGFIEPLEASALAMVELSISMLSEQMPVDQDHMQLLSTRFNKRFKYRWEQVINFLKLHYVLSNRDDNGYWHANRNPNSIPLELQNLLTLWQYQAPSRFDLVENEEIFSSASYQYVLYGMGFETSLTTKLDGQKCHKAEQLYQLNRNKIAQYLQKLPTNRLLLEQLQGSKVAT

SEQ ID NO: 86700 - protein, 512 aa, Couchioplanes caeruleus
  misc_feature (1)..(512): tr|A0A1K0FSJ1|A0A1K0FSJ1_9ACTN Tryptophan halogenase OS =Couchioplanes caeruleus subsp. caeruleus OX=56427 GN=B G844_02570 PE=4 SV=1
MTASYLKAAFGDRVNVTLVESKNVPSIGVGEATFSTIRHFFNYLGVDEGEWMPECHATYKLAVRFEDWREPGHVFYHPFERNRIVDGFPLTDWWVQKKPTERFDRDSFLLASMCDAKSSPRYLDGSLFDSIFDLSDGGRTTLSEQNTQFPYAYHFDAALLAKFLTRYGVARGVRHVLDDVVDVVLDDQGAIDHVRTRQQGDVHGDLFVDCTGFRALLVHKALEEPFISFQDHLPNDSAVALRVPSDMAAEGLRPATTATAKDAGWIWTIPLFERVGTGYVYASEYATPEEAERTLREFVGPAADDVAANHIRMRIGRSQRAWVKNCVAIGLSNGFVEPLESTGIFIIQNGIEQLVKNFPVGHAETDDGLRKAYNRQAAHVMDGLREFMVLHWYASGRADNQYWKDTKTRTIPDGLAERLEQWKVKLPDQDSIYPHYHGFESYSYRAIILGLGGLPVPSLPVLGKLDGTAADREFQQVADQAAALLEKLPSQYEYFAHLHGLPPARRTATAGR

SEQ ID NO: 86701 - protein, 514 aa, Saliniradius amylolyticus
  misc_feature (1)..(514): tr|A0A2S2E190|A0A2S2E190_9ALTE Tryptophan 7-halogenase OS=Saliniradius amylolyticus OX=2183582 GN=HMF8227_0089 8 PE=4 SV=1
MSNPIERIVIVGGGSAGWLTACVLASEYQFDHSIAITLVESPSIQHIGVGEGTWPSMKQTLARIGISENDFLNHCQASFKQGSQFINWGCGRTPDHYHHPFTPPATQSERNTAAFWQPYQQTHSFAEFFSIQPKVIEQGLAPKQISTPEYAFIANYGYHLDAGKFVQMLTEHGKRKLNIHHLLDDIVEIQSQPGSDEIAAVVGQRHGAISGDLFIDCTGFRSLLLGQHYGIDFIEQDSVLFNDRAIAAQVPYPLPDAPIASATLSTAQEAGWVWDIGLQNRRGVGYVYSSSHSNESQAEQVLSQYIKQSGVSEVPEFRSISIRPGYRERFWHKNCVAVGMAAGFIEPLEASALVMVEMAAQYLAEQLPQNQSAMPLVASHYNDCFTRRWQQIMEFLKLHYVLSNRTDTQYWRDNKSTDSIPDTLQEKLTLWQTSCPSHYDFGYIQELFPAASYQYIYYGMGGQTRFRPTASLQEQHQAMQQRLRDNEVKSRQWLSRLPSNRQLLNQIQAQGLAT

SEQ ID NO: 86702 - protein, 509 aa, Xanthomonas oryzae
  misc_feature (1)..(509): tr|A0A0K0GFN9|A0A0K0GFN9_XANOP Tryptophan halogenase OS =Xanthomonas oryzae pv. oryzae (strain PXO99A) OX=36009 4 GN=PXO_03613 PE=4 SV=1
MIPAPLRNIVIVGGGTAGWMAAAAFARVLGPTFTVQLIESEQLGTVGVGEATVPHIKAFNNLLGIDEAEFVRQTQGSFKLGIEFVDWQRPGTAYMHGFGTQIGHPLGLLPFHQYWIKQHARGKAQPLGAYTLNTVAAARGKFMTSAGDVPANSPLANIAYAYHFDATQYAHFLRRYSQQRGVTRIEGLVEQVQLHPESGHVQSLQLASGQTVHGDVFIDCSGFRGLLIEEALHTGYHDFTHWLPCDRALAVPCEKVGPPTPYTRSTARAAGWQWRIPLQHRTGNGYIYCSAHISDDEAAATLLANLDGKPLADPRPLRFTTGRRKQFWNRNVVALGLASGFLEPLESTSIHLIQSGISKLLELFPREGISPVLVQRYNDRSAFEFDRIRDFLLLHYHATEREDSAFWRHCRSMPITPELQTTLDLFRDSGRFYRNAEEMFAEISWVQVMVGQGILPQGYHPLVDQVPDRDAEGFLASVAHTIAHCVDVMPPHQQFIDRYCKAAALPCGG

SEQ ID NO: 86703 - protein, 374 aa, Burkholderiaceae bacterium
  misc_feature (1)..(374): tr|A0A5C8AUV7|A0A5C8AUV7_9BURK Tryptophan 7-halogenase (Fragment) OS=Burkholderiaceae bacterium OX=2030806 GN= E6Q34_09805 PE=4 SV=1
INTVASLMGKFSVGRPDLPNSPLSDLSYAYHFDAGLYAKYLRRYSEQRGVKRTEGKIVKVNVKPENGFIESVTMENGDVISGDFFIDCSGMVGLLIEQALHTGYEDWSHWLPCDTAIAVPCSLGGSSQAHTRSTAHEAGWQWRIPLQHRIGNGHVFSSKFMDKEKATHILLNNLDGQVLAEPRQIKFTTGKRKKAWNKNCLAIGLSGGFMEPLESTSIHMVKTGLMRLLSFFPNKDFDQVDIDNYNRLTDKDYAQIRDFLILHYKVNTREDSEFWKYCREMEVPESLQIKLDLFASNGRILRENEELFPEDSWLQVMHGQGMRPRRYSPVVDQRSKDEIAGFLYNTQMVIRKCVDAMPTHLDYIRANCMAREAA

SEQ ID NO: 86704 - protein, 502 aa, Micromonospora deserti
  misc_feature (1)..(502): tr|A0A2W2CXX8|A0A2W2CXX8_9ACTN Tryptophan halogenase OS =Micromonospora deserti OX=2070366 GN=C1I99_17100 PE=4 SV=1
MTDNEVDSGFDVVVVGGGPCGSTVSTLIAMQGHRVLLLEKERFPRYQIGESLLPSTVHGICRILGVEEELRQANFMPKRGGTFRWGSNPEPWTFSFAISAKFAGDAATAYQVERMRFDQILLDNARRKGVEVREETSVVDVLTDPETDRVCGVRYTGPDGVRREVRSRFVVDASGNKSRIHTRVGGQRRYSEFFRNLALFGYFEGGKRLPAPNQGNILAVAFDAGWFWYIPLTPDLTSVGAVLLPEALDRAQGDREQALLDLIQQCPLIAEYLANARRVTTGPYGEVRVRKDYSYIQEKFWRPGLVLVGDAACFIDPVFSSGVHLATYSALLAARSINTVLRGGADETACFEEFEVRYRREYARFHDFLVAFYDMHQDENSYFWKAKKVTNNAASEVESFVELVGGGASQEAALVSAGTYAQRRDAAYQELADLVAQPVQQAGEDRDLLRATLARSVSREGARIQIQAELGESADENVPVRDGGLVPSTDGLHWSTPPRPAS

SEQ ID NO: 86705 - protein, 504 aa, Burkholderiaceae bacterium
  misc_feature (1)..(504): tr|A0A5C8B9E3|A0A5C8B9E3_9BURK Tryptophan 7-halogenase OS=Burkholderiaceae bacterium OX=2030806 GN=E6Q34_01465 PE=4 SV=1
MNNRIKKITIVGGGSAGWMAAATLATYLGKASQICLVESEEIGIVGVGEASVPHIRQFNGQWLGIEETEFVRRTQATAKLGIQFKDWGKIGDSYVHGFGAIGRAIGPLPFHQFWLKLFLSGRASPIGDYSPQTVMAPRNKFVPRDHRATADSPFADIAYAYHFDATLYARYLREIAEQRGVQRFEGKVVAVKQSQANGHENFVEAVVLENGQVIEGDLFIDCSGFRGLLIEETLKTGYHDWSHWLPCDRAQAVPSESVNPLTPYTRATAQAAGWQWRIPLQHRVGNGYVYCSKHISDDEANATLLRNLDGKALAEPRLLRFTTGMRKQFWNKNVIAIGLAGGFLEPLESTSIYLAQTGITRLLSLFPHQDFDPELRQRYNNETAFEYERVRDFLILHYHATQRDDSPFWNHCRTMEIPESLRAAISLFRKDGRYFRHGEDFFALPSWVQVMLGQGIIPQHYHPIVDEMPEDRLIAQVEGMRDLLQHATASMPTHAEWVERYWRA

SEQ ID NO: 86706 - protein, 497 aa, Massilia sp.
  misc_feature (1)..(497): tr|A0A0J1DBZ8|A0A0J1DBZ8_9BURK Tryptophan halogenase OS =Massilia sp. WF1 OX=1406431 GN=AB595_12840 PE=4 SV=1
MQQQHKPIRRIVIAGGGTAGWMTAAALSRTLGKVIDIKLVESDEIGTVGVGEATIPTLVHFHRLLDIDEREFMAATQATFKLGISFESWRDRGKDYIHSFGSTGTDHFTAGFQHFWMKGRSKGLARDYGDYCLELKASLEGKFAHLPNDGLNYAYHLDAGRYARFLRRFSEHFGVERIEAKIAKVDTDPASGDISALVLDSGTRIEGDLFIDCTGFRSLLLGQTLGVGYEDWSQWLFNDSAIAVQTERMGPALPLTRSMAHDWGWQWRIPLQHRVGNGIVYASRYIDDARAQATLLGNIEGKALTEPRVIRFKPGQRKQTWSHNCVAIGLSSGFLEPIESTSIHLIQRSIVRLLQNFPSQGIRKSEVDEFNAQAWSEIESIRDFIILHYKVTERRDTPYWKDAAEMAVPAPLQHRIDMFRETGRSFRVLNELFAENSWIQVMLGQGIMPEQHHPSADLMGDEELNGFLEGIRKHVERTAAQLPSHQEYVERYCGATL

SEQ ID NO: 86707 - protein, 518 aa, Alteromonadales bacterium
  misc_feature (1)..(518): tr|A0A2N0WTZ2|A0A2N0WTZ2_9GAMM Tryptophan 7-halogenase OS=Alteromonadales bacterium alter-6D02 OX=2058087 GN=C W748_02165 PE=4 SV=1
MTQQTVQQVVVVGGGTAGWLTAANLAKRFNSTQPGSIQVTIVESPDIPTIGVGEGTWPTMRKTLANLGISETEFLVKCNASLKQATKFVNWRETPAAGDSNHYYHLFTSVYDASDFNLAPYWQRGDLGSSTYAQSVSVQGEVCERKLAPKAITHKEYEGAQNYAYHLDAGLFADLLKQHAVEVLGVKHIAANVSQVNLDKDEYIASVTTDRSGVIEGDFFIDCTGFKCLLLGDALGVKFKKVDNALLTDHAVVMQVPYQDEQQEIASCTISTAQEAGWIWDIGLSNRRGTGYVYSSKFTSHEQAEQTLRDYVGPESEGLMTRVIPMNIGYREKFWHKNCLAVGLSAAFIEPLEASAIFLMEAASNMLCDLFPRDRQAMAVVEKKFNQSFQFRWNKTIDFIKMHYVLSQRTEPFWLANQHQETIPETLTELLERWRYHPVSDYDFDNVYEPFPMESYQYVLYGMGFKQDLSFNAGRYSKSAQAIQNFNNVQHIAQQVESKLPSNRDLLNKVNQYGFQKL

SEQ ID NO: 86708 - protein, 609 aa, Fischerella thermalis
  misc_feature (1)..(609): tr|A0A2N6KLP1|A0A2N6KLP1_9CYAN Tryptophan halogenase OS =Fischerella thermalis CCMEE 5268 OX=2019662 GN=CEN50_0 1775 PE=4 SV=1
MTTNNTQSQVYDVVIMGAGIGGVCQARHLLLNIPNIKIALVDPRPEERTDRDMKVGESTVEISTLMICKELGLYDYMIENHPPKFGLNFHWAKEAGKTENTEDYYHIWTVKQPPLASVLINRPKFERDLLRMNQDMGAEFYNGRVVDVDLTPGDELNTVHVKQGDRYLELKTKHVIDSAGRKFLIGRKTDNLITSPENLYGINNGSVWMRVRNVDRTIFHSGYDPYVCTCSHYYAANHWMGHGHWVWMLPTDTQNMELSIGLLYHHDIISPHSVNTKEKFYAFLEANHNVVYRLLKSGEEVDFHHWPRIAHKSKQMYSQDNWYIIGDAAAIFDPFYSQGLTMMSFQIESVTEIIRAKLAGEANAKEKCALYNKFALNMIDRTNVLVSRHEKQIGDASIMTWRMYLENIWWFKMLIPMFVGKWHLDLDFLKNVVAKPGRLYVVQIMNAVYEHLDELVERKANIGFLHTHIADQLPFGFTMSNDFDNFLHLTKYEPQRANIYVSIQWSHFFVALWYLKFLWKAYGLKGVLSPHNLKHVFALFKAFLEAAWDHLIFRIKTKNIPGNSIIANIRQEFKNYRAPAKLEPWLEEVTEASNGNVTTQSRELVKAEV

SEQ ID NO: 86709 - protein, 510 aa, Pseudoxanthomonas sp.
  misc_feature (1)..(510): tr|A0A0Q8EZF1|A0A0Q8EZF1_9GAMM Tryptophan halogenase OS =Pseudoxanthomonas sp. Root65 OX=1736576 GN=ASD77_14580 PE=4 SV=1
MDSPTTPEGRIRKVVIAGGGTAGWLAGCALAHQFRDRLDITLVESEQIGTVGVGESTVPPIRTFHRFLQIDEQEFLRAVAGTFKLSISFENWRRPGERYIHPFGITGQGTWAAAFHHFWLDSLRRGMTSELGDFCLETVASRGDLFSLQTQPQVNYAYHFDAGLYAKFLRRIAEGHGLRRVEGKIREVRQHAHDGAVQSLVLEDGQVIEGDLFIDCTGFRGLLIEQTLHTGYEDWNEWLPSDRAVAVQTESVGPPVPYTRAIAHEAGWRWHIPLQHRVGCGLVFSSRHMSDDEARAKLLRDVGAPALRDPWLVPFRTGRRLKAWNRNVVSLGLASGFIEPLESTSIHLAISAVVRLIQLFPFDGIASSLVDLYNDVSRAEMEHVRDFIILHYHATQRDEPMWKACREMALPDSLEIRLRAWRERAHAWQDADELFRVDSWTHVLLGQGIQPGSPHPLARALADDDLRTLLQSIRQPIERAVAQMPSQQAFIERYCKAAPEVWPSPRAVTA

SEQ ID NO: 86710 - protein, 513 aa, Novosphingobium sp.
  misc_feature (1)..(513): tr|A0A158S291|A0A158S291_9SPHN Tryptophan halogenase OS =Novosphingobium sp. KN65.2 OX=1478134 GN=SPHV1_2360023 PE=4 SV=1
MQRPTKKIVIVGGGTAGWLTAGVIAAKHRSRMPGGFSVTLVESPNTPIIGVGEGTWPTLRTTLARIGVSETDFFRECDAAFKQGAKFARWTTGAPDDAYYHPLMLPQSFAQLNLAPHWLANGESSFCDAVCPQGRICDDGLAPKTIATPEFEALANYAYHLDAGKFAPFLQRHCTQKLGVRHVLADVQRVEMTDDGDIKSVVTEQAGEIEGDLFVDCTGFKALLIGEALGVPFKDCSDVLFCDTALAVQLPYESETSAIASHTISTAQSAGWIWDIGLPTRRGIGYVYSSDHTSGDEAEQELRAYLGAAGKDLPLRKIPIRSGHRETFWKRNCVAVGLAAGFLEPLEASAIVLIELSAKLIAEQMPACREVMDAIARRFNATTDYRWGRIIDFLKLHYVLTQRTDSAFWLDNLRPETIPERLQELLLLWKYQGPWFHDEFDRVEEVFPPASYQYVLYGMGFRTEVEPEALAGDASLAARAMRENAAQTQRLRAGLPRHRDLIRKIVDHGLQPV

SEQ ID NO: 86711 - protein, 466 aa, Sphingomonas faeni
  misc_feature (1)..(466): tr|A0A2T5UCG3|A0A2T5UCG3_9SPHN Tryptophan halogenase OS =Sphingomonas faeni OX=185950 GN=C8J25_101659 PE=4 SV=1
MSQTVAILGANLCGWMAAAALARRLPRDRYSVVVIDDGTTGDGLGDFAPVIAVPPALGGFHADLGIEPTALVRATGGSHALGVAFGGWRKDGAAAFLSYGETGAPLQGIAFHQLAGRLRKDGIHVRLADYAVSAVAAQVGRFALEAPIAHALHLLVDPYTAVLRAAAMNFGASCTNAPFADAQIDASGIVETLKLADGTDIAPLLVLDCSGSSARIASRTAPAFEDWSAWLPCDRTYTQTLPATGAPPPYTQVDAQGSGWTATWPLGGADVRLTCAASGEGTPFRAGRRVEAWRGNCIAMGAAAGLIEPLHPTALTVLLRSLAQLIQLWPAERRAPVEAKAFNRFTANAMTGARDFVIAQKAAARGSNAIGDVRSEPVLPDAIEAKRTLFAARGRLPMFDDEPFEEEDWAAMFDAMGLVPRRYDARADALPLATIQQHFADHRARIIAQVRALPPYAHAMAELAAA

SEQ ID NO: 86712 - protein, 504 aa, Sphingomonas parapaucimobilis
  misc_feature (1)..(504): tr|A0A0A1W3E7|A0A0A1W3E7_9SPHN Putative tryptophan halo genase OS=Sphingomonas parapaucimobilis NBRC 15100 OX=1 219049 GN=SP5_010_00070 PE=4 SV=1
MNDRSAEAIRLVVIVGGGTAGWMTAAALAHAMPRGLSITLVESDAIGTVGVGEATIPPIRLFNQTLGIDEAEFLRETRGSFKLGIEFVDWGRKGHRYFHPFGTHGKSFDLVAVHQHWLAAGGPDSGIAFDDLSMAWGAGQRGRFAQPMADPRSVASTFDYAYHFDAGLYARFLRRYAEARGVVRVEGKISGHALEGARGHVASVTLDDGRVLAGDLFVDCSGFRGLLIEEALGTGYEDWTHWLPCDRAVAAPCETGGDGLTPYTRSTAREAGWQWRIPLQHRTGNGYVYCSRHISDDQAAATLMANLDGKALGDPRFLRFTTGRRKLMWNRNVVAIGLSSGFMEPLESTSIHLIQAGIAKLLAYFPTRAFAAAGIEEYNRVAITEYERIRDFLILHYKLTERTDAPLWRECAGMPIPDTLAMKIAHFRESGRLVARDMDLFGPASWAAVHLGQFNMPEGLDPLLAYADPAQSRGFVGKLASAIGQMAESMPSHADWLKKIGATA

SEQ ID NO: 86713 - protein, 503 aa, Pseudoalteromonas sp.
  misc_feature (1)..(503): tr|A0A4Q6YXN1|A0A4Q6YXN1_9GAMM Tryptophan 7-halogenase OS=Pseudoalteromonas sp. CO342X OX=1777270 GN=EXT47_098 50 PE=4 SV=1
MKNQKIVILGGGTAGWMAANMMAKSWADKAIEITVVESSSIGTIGVGEGSTPQFKGFMDYLGISEAEWMPACNATYKNGIRFIDWSTKPGFSSYFHPFPAQPDDYSAPAFFHNSFVRRKAIDVEGHPDHFFLATHLADLNKSPIAAESFPFEINYGYHFDSALLGQLLARKAAEFNVKHIDATITDVRKHLDGDIAALITSDGTEIAGDIFIDCSGFKSLLLQHTLGVGFESFESNLFNDAAVVIPTKQLDTIRSETQSVARQFGWSWHIPLTNRIGNGYVYSQRYCDADQAETELRAALGLLDSEVEARHIKMKVGQVKAHWSKNCIAIGLSQGFIEPLEATALHIVQETVQSFIECYQDADFTDGNRDKHNRALSERYQAIRDYIVAHYRVNSRTDTNYWLDNANNNHLSRSLYQILQTWVSGNNLSDELVRQNVDQYYPSVSWHCLLAGYGIYPEQAQLKSGNALANQHNIEKVNDFIRRCGLNFKDHRMELESFAANVH

SEQ ID NO: 86714 - protein, 500 aa, Novosphingobium sp.
  misc_feature (1)..(500): tr|A0A257YPZ8|A0A257YPZ8_9SPHN Tryptophan halogenase OS =Novosphingobium sp. 12-63-9 OX=1970403 GN=B7Z36_00050 PE=4 SV=1
MTTPHHPRRIVIAGGGTAGWMTAAALARTLGPVAQVTLVESEQIGTVGVGESTIPPLVAYNRILGIAEADFMRATQATFKLGINFENWRVAGESYFHSFGGTGKDHWSAGFQHFWMNGLTRGHTVPYSEYCLELKAAEASRFAHLPEDRMNYAYQLDSGLYARFLRGMAEADGTRRIEGKIAQVQLDGETGDIAALLLDSGERIEGDLFIDCTGFRALLIEGALRVGYDDWSNWLPCDSAIAIQTSSVRPPVPYTRAIAHEAGWQWRIPLQHRQGNGVVYCSDFLGHDAALEKLLSTVEGEKLVKPNHIRFRTGARRKQWHRNCVAVGLSGGFMEPLESTSIHLIQRAILRIVRMLPAGTISQRDIDEFNDQQFTDMEQIRDFLVLHYKVTDRRDTPFWRHVAAMDVPESLTHKIELFRETGRVFRKNEELFAENSWVQVMLGQGIMPQSHHPVAAKLRDDEMAHLLTTLREQVARTVAALPSHADYVARYCGADIPAAA

SEQ ID NO: 86715 - protein, 519 aa, Cellvibrio sp.
  misc_feature (1)..(519): tr|A0A2T6FIL2|A0A2T6FIL2_9GAMM Tryptophan halogenase OS =Cellvibrio sp. 79 OX=1954207 GN=B0W54_17120 PE=4 SV=1
MNNPIKKIMIVGGGSAGWLTAGLIAAEHLVDKMRGIELVLIESPDVPIIGVGEGTWPSMRTTLKKIGVSETDFFRECDASFKQGSKFIDWVKPGGGAYYHPFNLPDGGNEFNLAEQWLPFRDTVTFADAVCPISHISERNLAPKLITTPEFVGNSNYGYHLDAGKFSVFLKQHCIEKLGVTYIQDHVVKINSAENGDIASLSTKMNGDLSADLFIDCTGFASLLLGEHYQIPLKQEHRVLFNDSALAVQIPYPDADAPIASCTLSTAQDCGWIWDIGLPTRRGVGHVFSSAHTSDEQVLKNLQAYLEPAIGKAAAEKMMPRKLTFNPGYRQELWHKNCVGVGISAGFIEPLEATALVLIELSAQMIAEQLPATRGVMDTVAKRFNRKLFDHWQRIIEFLKLHYVISERRDTDYWRDHLDESTQPDGLRELLELWRHHVPWRNDIRSDEMFPWASYQYILYGMGFQTNVPAVAKRGAAMNAENAGRMFSENSKKTNALVKNLPTNRALLVKLREYGFQKI

SEQ ID NO: 86716 - protein, 499 aa, Pseudoalteromonas sp.
  misc_feature (1)..(499): tr|A0A2D5T1Q1|A0A2D5T1Q1_PSEAS Tryptophan halogenase OS =Pseudoalteromonas sp. OX=53249 GN=CMK64_07855 PE=4 SV= 1
MQNKINHVVIVGGGTAGWMTANLLAKVLGKSINVTLLESNDIATVGVGEATIPPILHFNQAIGVNEHAFMQASKATIKLGIQFENWLKPEHNYMHAFGSIGKNFPFCDFHHFWLKQQNNNAQVDNLTYWDYSLNYQAAKHNKFQKLKNIPNTNLPGIAYAYHFDAGLYAKFLTEHGKQQGVKHVIGTVKQVNQNHETGFIESLLLDDDTQLNGDLFIDCTGMHALLIENTLSTGYEGWSHWLPCDRAMAVPSENAETLVPYTRSIAHHVGWQWQIPLQHRTGNGLVYSSKHMSDDEAKKTLLGNLPGKPLSEPRVIKFRTGRRRKVWNKNVISIGLSSGFLEPLESTNIHLVQSVATRLLKFFPHNGISQTLVDEFNRLCKTEVEGIRDFIILHYKLNARSDSAFWRQCQQMDVPDTLNTKIELFKQTGKVHCEPNDLFTEIAWQQVMLGQGVTPADTHPLVDGLSNEQIEDMMNSLRTLVDKTVETMPTHQDFLPTLI

SEQ ID NO: 86717 - protein, 495 aa, Cellvibrio sp.
  misc_feature (1)..(495): tr|A0A2T6FKJ3|A0A2T6FKJ3_9GAMM Tryptophan halogenase OS =Cellvibrio sp. 79 OX=1954207 GN=B0W54_11360 PE=4 SV=1
MASRSVKKILVVGGGTAGWMTAAYLARWLENTNIQVALIESEQIGTIGVGEATVPGIHQFIRDLDIKESEFIRATNATFKLGIEFSGWAGEGQHFFHPFGGYGVPIEDRSFHKTWWSAKNQGYALGLDKFSLCTQLARAGRFAQPSFEPESSLAWYSYAYHFDASLFAKFLRSYAEQRNVTRIEGKVNHIQLDASSGFIQSVTMESGLVVESDLFIDCTGMPALLIHKTLGVGYEDWSKWLLCDSALAVQTKSAAEPDPFTRSSARTAGWQWHIPLQHRVGNGYVYSSQFTSPEQAHRELLGNLAGELTTDPRLIHFTTGMRRDFWYKNCVAIGLSSGFLEPLESTSISLIQTGIAKMAAFLVNFEINETRVAEANRLNRLEYERVRDFIILHYKLNGRSNPFWQHVREMAIPASLEEKIASFRASGDIKEEEQESFKADSWISMFYGLGLAPQGLAPLADPEKAPAILNNMAGAIAKGCHYASSHADFLKTLGN

SEQ ID NO: 86718 - protein, 505 aa, Cellvibrio sp.
  misc_feature (1)..(505): tr|A0A2T6FGX1|A0A2T6FGX1_9GAMM Tryptophan halogenase OS =Cellvibrio sp. 79 OX=1954207 GN=B0W54_13695 PE=4 SV=1
MSNYRVNHILIAGGGTAGWMTAAKLNQHFSQTTVKITVIESSEIGTIGVGEATIPTLRRFYQSLGMSDLEVIRKTAATVKLGIEFKDWHKPGSSFIHPFGIFGHEANGIRFHHYWMKLRELGDNSALEEYSLGIAMARANKFTFPLENPESPLSIFDWALHFDASLFGKLMRDYALAQGVEHIDAKINHVNIHADNGFIRSLTLDDDRELAADLFIDCTGFRGLLIGDALKTDYVDWSQWLLCNRAMAVQSELVGEAMARTVSKAHTAGWQWKIPLQHRQGNGHVYCSEFVSDEQAKETLLQHIDGKVLHSPRKFHFTPGRRSRAWNKNCIAIGLAAGFLEPLESTSIALIETGIEKICSSFLRPFFDQEVVDQFNQRTAAEWERIRDFIIVHYKLNQRNDSEFWHYCRNISMPDSLQQKITAYHERGDLLHYPYEIFHPDSWLAIYSGFGFYPQNYHKNVERLNPKYLQQSLALMRQSITEAVAGFPSLNDFMLQNQAQYSVGE

SEQ ID NO: 86719 - protein, 508 aa, Pseudoalteromonas luteoviolacea
  misc_feature (1)..(508): tr|A0A167D6I5|A0A167D6I5_9GAMM Uncharacterized protein OS=Pseudoalteromonas luteoviolacea H33 OX=1365251 GN=N4 76_21605 PE=4 SV=1
MKLIVVGGGTAGWLTACHLAKSLENSPEYSVTLIESPNIPIIGVGEGTVPSIRDSLKTIGISEQEIFQKCDATFKQSIKFINWRHREKSESIHFYHHLFDYPLPSGVDLYPLWKVEGQQEPYASFVAPQYSVCENGLAPKLITTPEYKGITSYAYHFDAHKFADLLRNHGVKRLNIEHIKADVESINKDSEGYIESLICQDESIITGDLFVDCTGFNSFLMGQQLGIPFVDKSDLLFTDKALTMQVPTTENEDIPPYTLSTAHQAGWIWDIALTTRRGVGFVYSSRHMDEETARLKFRAYLGESITDEQFTPRKIDMKVGRREKFWHKNCVAIGLSQGFVEPLEATAILISDLSARLLAQRVPKNRQEMEALSTRFNNRLVYGWDKVLEFIKLHYALSDRKDSAFWTDNRDLSLCSNNIKDMLALWSHQPPVKEDFFSKFEVFDYENYLYILFGMDFQTGSEHRQGQNLSMEMKCREQVKSASKHFCDNLEEHRTLLNKIAEFGIQKS

SEQ ID NO: 86720 - protein, 412 aa, Nonomuraea sp.
  misc_feature (1)..(412): tr|A0A2W2F1J6|A0A2W2F1J6_9ACTN Tryptophan halogenase OS =Nonomuraea sp. KC333 OX=2070368 GN=C1J01_14105 PE=4 SV =1
MEQTPDRTVDVVVIGAGPAGSSTAALLAEAGYQVLVIEREKFPRYHIGESLIPGCLPVVKDLGLTDRLEAMAFTKKYGGTLLWGKDEGTWEFRFADGTVYEYSYQVRRADFDSLLATRARELGAQVVEEATVKQVEFEGDRATGVAFTRKGKDEVERVKASIVVDASGQGRVLARQLGLVEWHEDLRNVAVWSYFQGHTLLEGNKAGDILIEHRPDGWFWFIPLSDGTVSVGYVTRTSDLKESGLTPEQLFAREREASVEIRKLMASAEEVSAYRTIRDWSYTCTDFHGPGWVLVGDAAAFIDPLFSTGVTLAMRGARSVSKAVEEALRRPESEAKVLDIYEARYREFLSSILAFVRFFYDKNKHKEEYWAEAQELIDPNQVQAPHEDFSTLLSGLADLITADFSLDISFDD

SEQ ID NO: 86721 - protein, 517 aa, Sphingomonas parapaucimobilis
  misc_feature (1)..(517): tr|A0A0A1W4X7|A0A0A1W4X7_9SPHN Putative tryptophan halo genase OS=Sphingomonas parapaucimobilis NBRC 15100 OX=1 219049 GN=SP5_034_00630 PE=4 SV=1
MQVVETEVRRVVVVGGGSAGWIAACRLAAQARRIGSGVQVTLVESRHVPTVGVGEGTWPTMRNTLARIGITETDFIRSCDAAFKQGARFVGWTDGTADDGYYHPLNPPAGATEIDLAPHWLHGAAETASFADWVDYQAMLCDAGLGPKTIVMPEYAGHANYAYHLDAGKFATLLREHGVGTLGIDHVLGDVVRPEMSDHGDIVHLELADGRIVPGDLFVDCTGFAARLIGGVYQVPFRRCGDVLFADRAMALQVPYEDEDAPITCHTVSTAQGSGWIWDIGLWTRRGVGHVYSSAHSSDDAAEAALRRYVGPAAQGLNVRRITIDAGHRTRFWQNNCVAVGLSAGFIEPLEASALMLIEASMDAIADRLPRTRAAMDVMARQFNATFTHHWMRIIEFLKLHYVLTRRTDTDFWRDNVAASSIPDGLAEQLELWRHHSPGPQDFTHAREVFSWPSYQYVLHGMGFASRQPRIDPAAPDTALAQRFVTRMARARDDLRTRAPRHRDLLRAIREHGLQRV

SEQ ID NO: 86722 - protein, 517 aa, Cellvibrio sp.
  misc_feature (1)..(517): tr|A0A2T6FIL1|A0A2T6FIL1_9GAMM Tryptophan halogenase OS =Cellvibrio sp. 79 OX=1954207 GN=B0W54_17595 PE=4 SV=1
MNKPVLSIVVVGGGTAGWITAGRIAAHHRTNANSPIQVTLVESPNIPIIGVGEGTWPTMRSTLMKLGISETDFIRECDASFKQGAKFARWTTGASDDFYYHPLMLPQGFGKTNLVAHWQKNRTQLNNESFSATVCFQEAICEQGLAPKMISTPEFSSVANYAYHLNAGKFSQFLQRHCCEKLGVRHILADVIHVNSNDHGDITSVTTAQAGNIAGDLFVDCTGFSSLLLGQHLQVPFIDHSDVLFIDTALAAQIPYEHENSPIASHTISTAQSAGWIWDIGLRHRRGIGHVYSSRHTNEERAMEELQRYIGPAFNQASVRKIPIHCGHRKIFWKNNCVAVGLSAGFLEPLEASALVLVELSATFIAEQLPARREVMDITAKRFNETFQYRWQRIIDFLKLHYILSKRTDSEFWIDNRDKSTIPPSLQELMELWRYQAPGDLDFSSNNEVFPAASYQYVLYGMGFETDFSNHAHLLMDKEFAHSQFIKTQKAIAHASSNLPGNRELLNKIYEYGLQTI

SEQ ID NO: 86723 - protein, 502 aa, Sphingomonas parapaucimobilis
  misc_feature (1)..(502): tr|A0A0A1W9P2|A0A0A1W9P2_9SPHN Uncharacterized protein OS=Sphingomonas parapaucimobilis NBRC 15100 OX=1219049 GN=SP5_073_00160 PE=4 SV=1
MSGDAPIGRIAIIGGGTAGWMAAAALARVLGPEGPAITLVESEEIGTVGVGEATIPPIQAFNALLGIDEDDFIRATQGTFKLGIEFVDWLRPGHRYFHPFGVYGIDKGAIPFEAMWQRLRLAGEALPLEAYSICAAAARSGRFMRPQPGNTPLAHIGYAFHFDAALYARFLRGHAEAAGVRREEGRVVSVERGGPRDFIEAVMLADGRRIAADLFIDCSGFRGLLIDDAMGAGFEDWGHWLPNDRAVAVPTANAGPPAPFTRSTAHGAGWQWRIPLQHRTGNGLVYASRHLSDDEAVATLLAHLDGAPLADPRPLHFRTGRRDRFWIGNCVALGLAGGFLEPLESTSIHLIQAGIARLLEMLPTQAFEPADTRRYNRLMAAEFDSVRDFLILHFHATERRDTAYWRELASMDIPETLAERLAIYARTGRVYREADELFTKTSWLAVMDGQGLIASGHDPLAQGMPMDELRARLDRIAAVTQAAAGHMAAHADFLARHCSARN

SEQ ID NO: 86724 - protein, 515 aa, Sphingomonas parapaucimobilis
  misc_feature (1)..(515): tr|A0A0A1W2L9|A0A0A1W2L9_9SPHN Putative tryptophan halo genase OS=Sphingomonas parapaucimobilis NBRC 15100 OX=1 219049 GN=SP5_003_00010 PE=4 SV=1
MVQPVQNIVIVGGGTAGWLTAGVIAARHQGRRPHGFTVTLVESPNVPIIGVGEGTWPTLRTTLKRMGVSETAFLRECDASFKQGARFNRWTTGAADDGYYHPLMLPQSFAQVNLAPHWLMVDDDAVSFCDAVTPQGRICDAGLAPKTIATPEYEAIANYAYHLDAGKFADFLRRHCCEQLGVRHVLADVEEVLLTESGDIRSVRTAQAGEVTGDLFVDCTGFRSLLLGEAMGVPFQPLNDVLFCDTALAIQVPYDDPEAPIASHTISTAQSSGWIWDIGLPTRRGVGHVFSSSHIDRDDAERELRAYLGEAGRDLPVRELKIRAGHRTRFWERNCVGVGLAAGFLEPLEASAIVLIELSAKLIAEQMPACREVMDTVAKRFNDTTLYRWGRIVDFLKLHYSLTKRTDSDFWRDNCRPETMPDRLQELMELWRYQAPWMHDEFDRVEEVFPSASYQYVLYGMGQRTDIAPGSLIAETVAAERARRENDVQTGRLLAGLPKHRDLIRKIVERGLPTI

SEQ ID NO: 86725 - protein, 494 aa, Cellvibrio sp.
  misc_feature (1)..(494): tr|A0A2T6FEC2|A0A2T6FEC2_9GAMM Tryptophan halogenase OS =Cellvibrio sp. 79 OX=1954207 GN=B0W54_22770 PE=4 SV=1
MNTIRNIVIAGGGTSGWLAAAAISKVLGKNLNITLIESPDIGRIGVGEATIPTLRVFHKLLGINDQELMAQVQGTFKLGIEFSHWANKGDKYFHSFGLTGKECWACQFQHFWFAGKKYGINVPFGDYCPESKAARLEKCSGEHDGINYAYHFDANLYADYLKAFSTKLGVKHVEGFIERVNISPENGYITSLLLKDGQEIAGDLFLDCTGFKAMLIDGALNTPYVPYGHYLPCDSAVALQTENVRSPRPYTQAIAHDFGWQWRIPLQHRSGNGLVFSSRHVSDDEAIHTLLNNLEGRPVTEPRVIKYKTGRRIKSWNKNCIAVGLASGFIEPLESTSIHLAMSAIYRLLRYFPQHEISLSNVDEFNRQSSEEMDRARNFVVLHYHATQRDDTDFWRYCKNMEIPEILARRIQLFKDTGAITLEDKELFLNDSWVQVMMGQGIMPTAYHPIVDMMEEKELKGFLAFLKDDVHKKVTAMPSHQEFINQFCKARPPV

SEQ ID NO: 86726 - protein, 523 aa, Alteromonadales bacterium
  misc_feature (1)..(523): tr|A0A2N0WTX9|A0A2N0WTX9_9GAMM Tryptophan 7-halogenase OS=Alteromonadales bacterium alter-6D02 OX=2058087 GN=C W748_02170 PE=4 SV=1
MAQDNNHILIIGGGTAGWLSAAILAKSLNSQSKDGVKLTLVESPDVPIIGVGEGTWPNLRGTLQRIGVSETDFIRECDVTFKQGAEFVNWSHTPTPQQPHSYYHPLSTVNHSSYNFSLAPYWLQQDVATRLPYDRAVATQARLCDHGLAPKQIVMPEYSAVQEYAYHLNANKFADFLKRHCIEKLGVNFVSANVTEVVLDHDEFISHVTTDSAEQPHLEADFFIDCSGNRGLIIKQTYNIDWQDISDVIFNDTALAVQVPYPNDDREIKTHTIATAQDAGWIWDIGLRNRRGVGHVFSSKYTTEAKAKQQLIDYIGTDYSDDLMIRTIKLNHGYHKKFWHKNSVAIGMSAGFVEPLEASAIFLFDAAANMIAAQFPRDKAQMPYVEQKFNQHFTMRMERTVEFIKLHYCISQRRDSQYWIDNCDDKSIPDNLKQRLSYWKSLPPTKYDFDNAWEPFNLDSYLYVLYGMGFETDAANVATKYTEKDAAQAMFNDINKASDLLIDKLPKQKELVDKVLQYGFAKV

SEQ ID NO: 86727 - protein, 498 aa, Pseudoalteromonas sp.
  misc_feature (1)..(498): tr|A0A3D5EF33|A0A3D5EF33_PSEAS Tryptophan halogenase OS =Pseudoalteromonas sp. OX=53249 GN=DG048_05435 PE=4 SV= 1
MESKKITKVVIAGGGTAGWITAALLNKVLGKVLDITLIESAEIGTVGVGEASIPPILHLNGALGITEKEFIKATGATIKLGIEFENWRSQGHSYMHAFGEIGKDFPFCEFYHFWLKANQANNAPDFWDFSLNYQAAKAHKFAHLKHIPNTQLAGLHYAYHFDATRYGEFLKELAQSRGVKRIEGKIESVNQCHQSGHITSLLLKNGEQIDGDLFIDCTGLSALLIEQTLNTGFEDWSHWLPCDSAVAVQSESANDAIPYTRSIARDSGWQWQIPLQHRVGNGLVYSSRFLSDEAAKQQLLDNLPAKVLTEPRVIKFKTGRRLKQWHKNVVSVGLSSGFLEPLESTSIHLIQSAAIRLIKFFPHQGIKQSLVDEFNQQSKTEFERIRDFIILHYKITERDDSAFWRFCKGMDIPSSLKKKIELFKTSGKLVREDDELFAEVAWQQVMIGQGLIAEDHHPLTNALSDEQLNELFSNLKTLINSTVEQLPSHSQFLEKVQN

SEQ ID NO: 86728 - protein, 532 aa, Bdellovibrio bacteriovorus
  misc_feature (1)..(532): tr|A0A150WEM6|A0A150WEM6_BDEBC Tryptophan halogenase OS =Bdellovibrio bacteriovorus OX=959 GN=AZI86_17355 PE=4 SV=1
MSSIANAVDTAFDLSYLNFPKYPPTQIKSIGVLGGGTAGYLTALALKKLHPQIKTSVIESSKIPVIGVGESTTTEVVPFLHRTLGIEPERFFREVKPTLKLGIKFDWGCPGDYHFNFNFFAGHQQESYYYEDSINNANWASVLMDANKIPVIRNEDGELSSFLASIPFSYHIDNKHLIRFLNTVVRERGIDIVDAEVTKVNLDEKEFVSSLETNEGQKFTYDLYIDCSGFRSRILGQALKTDFIPFTDTLINNRALTFDTPNNGVIGPHTRCTTMNNGWCWTIPMREENHHGYVHSTLYCDEATALAEVRAKYGNIEKYKMVEFRSGRHTQAWNKNVFAIGNSYGFVEPLESTAIQTAMHSIMTLCKLMPNNFEDYASIAGINSEIAATWDTFRWFLGIHYKFNKQLDTPYWQWCRENTNIGDAQMILDLFHQRPPLSASNFGTQSPYSTLEALVFNSYSYDTLIYGQKLLKDPKKPKMTKEEYLSRVDSYHELTKHALTLKELFDSNALFDQEILSQLFEDPDTWIVETEA

SEQ ID NO: 86729 - protein, 498 aa, Xanthomonas campestris; identical to SEQ ID NO: 83595
  misc_feature (1)..(498): tr|B0RQE8|B0RQE8_XANCB Tryptophan halogenase, probable OS=Xanthomonas campestris pv. campestris (strain B100) OX=509169 GN=XCCB100_1333 PE=4 SV=1

SEQ ID NO: 86730 - protein, 495 aa, Pseudoalteromonas sp.
  misc_feature (1)..(495): tr|A0A3D5EPK7|A0A3D5EPK7_PSEAS Tryptophan halogenase OS =Pseudoalteromonas sp. OX=53249 GN=DG048_25005 PE=4 SV= 1
MRQQSIKQVIIAGGGTAGWMTAAALAKLLNKDIKVSLVESDDIGTVGVGEATIPPIRTFHKLLGIDEKLFMKATQATFKLGISFENWHKPQSDYIHSFGMTGKECWAGEFHHFWLHAKKMGNKDDFGDYCYELQAAKQGKFGISPHNPINYAFHMDASRYAAFLREFAENLGVKRFEGKIERVNKHADNGFIKSLLLDDGTEITGDFFIDCTGFKGLLIEQALHTGYEDWSHLLPCDSAVAVQTKGTPEIAPYTRSIAHQSGWQWQIPLQNRVGNGLVYCSRYLSDHDATQLLLNNLSSKTLTEPKIIKFKTGRRRKGWNKNCLALGLASGFLEPLESTSIHLIMTGIIRFMRLFPFTGITQHAIDEYNKQLQSELESIRDFIVLHYKVTDRDDSEFWQHCKTMETPKSLAHKVALFKETGRVFLDDGDIFRVDSWVQVMLGQGIMPEQYHHVASLMNDQELSRFMQGIKQQIAQRLQQLPTHRAFIEQYCPVDT

SEQ ID NO: 86731 - protein, 520 aa, Pseudoalteromonas sp.
  misc_feature (1)..(520): tr|A0A4Q6YWM0|A0A4Q6YWM0_9GAMM Tryptophan 7-halogenase OS=Pseudoalteromonas sp. CO342X OX=1777270 GN=EXT47_101 75 PE=4 SV=1
MNLKEISKVVIVGGGTAGWIAACHIAKKLNPNENDNISITLLDSPDIPTIGVGEGTVPVIKDTLKYFGIKESDFIGQCDVTFKHSIKFVNWCHNPSAVEEDFYHHLFDFPNIRPFDVTPHWLLNKELASKKYADLVSVQSYICEKALPPKRLSDKEFSGLFNYAYHLDAGKFTELLRQHAIHKLGVKNLKCNVTKANLNEEHFIESLELDNGERVKGDFFVDCSGFQSLLIEQSLGGKFIDKGSELLADTALAVQVDYDTPNATIKPYTTSTAQKYGWIWDIGLTTRRGIGYVYSSKYQTEESARSTLLNYIEDSKMLSQVRKLPMKVGYQQTPWINNCVAMGLSQGFVEPLEATGLLMFDVTARMFAEAFPRDVENIKLRQKRFNEDVTQMWESTTDFIKLHYYLSKRDDSAFWIDNRNENSLSNELKEKLQLWRAKIPSQFDFRSNLDLFRVSNYLYVLYGMNYYTHLSIQPPSGEASALSKLLEDIQKGVSYCSNNLRGHRETLEHIKRSVVHVGQK

SEQ ID NO: 86732 - protein, 554 aa, Unknown
  misc_feature (1)..(554): tr|A0A2E5AVU9|A0A2E5AVU9_9BACT Uncharacterized protein OS=bacterium OX=1869227 GN=CL660_07000 PE=4 SV=1
MKVEEPDHFIEFENFDPYKGKIESVVIVGGGSSGWMTAAALAKLCPHLEVALVESKDIKTIGVGESTLGHFNQYLELLDLKDEDWMPHADATYKNGIQFTNFREGKEEVFQYPFYTDYDLTYAPHGLNTWAHLANMFPEDFPPESFAEFYCANTFLCNENKQTRNRDGVIRQFDFRRHTAYHLDATKFGLYLRDNICLPNGVQHIIGEITGFQTMYEKPNDQTISYLIMDGVNAIQADLYIDCTGFKSKLLGGFQGIPFIPAENKLANDKAWAARIPYLEETREKEMHNVTDCWAMPNGWTWNIPLWNRIGKGYVYSSRFVRKEQARKEFIEHLRHTVGKKRADEAKLFHIDIEHGRRQRAWVNNVVGIGLSYGFVEPLESTGLLTTHENILRLVTTLNQRNGYVTRTEKEGFNWICNYTLDNFIDFVAMHYAFSMRTDTPYWRWCTQQNFYNPESVTQNVPVHQSIEQFVSSTLGEGWHPNMNGIPFIAAGHGIKSSSYLRRTDYLLGELMSDKDHLVDKRKKYMQWKDYMEKYIAQLPTHYEFLRDEIYGTP

SEQ ID NO: 86733 - protein, 546 aa, Unknown
  misc_feature (1)..(546): tr|A0A2E5AX61|A0A2E5AX61_9BACT Uncharacterized protein OS=bacterium OX=1869227 GN=CL660_09360 PE=4 SV=1
MKVENIVIVGGGSSGWMTAAALLKCCPWTNVILIESDKPTVGVGESTLGHFNKYLRALDLEDKDWMPKCNATYKNSIQFTDFREKGTVFQYPFGKYDYTDTVEGMKDWFDLARQRPEDFPPESFAEFFNKENSALVKHNKQWDNRDNRWRNFDWLTDVAYHLDAEKFAEYLRDEYCDNFDDRFTHIRGEVRGSVKDINAGGSPAVSNRYIKQLAVRLNEDKRTVGVIGDLFIDCTGFKSVLLEEYMGTRFIKFNDLANDKAYFARIPYLTQDEREKHMHNVTDCQAAENGWLWSIPLWNRIGVGYCWSSRFAMETETRTEFETWIEQKYSVSPDQYEVGTIDIKHGYHEKAWNLNVVAIGLSYGFVEPLESTGLLTTHENILRLVDVLSRRRGYVTQIERNWYNYAAQREVIGFSKFVAMHYALSQRTDNPYWRWCSQRNEYVVEQFDGVVRVNDNYERLGSSLDLDQTMDVNMNGMNYIAAGQGMMLGRDWYADRDPDELTFVENSHLQYQKEVNDFVESDDCPTHYEYLRDYIYGGDELRAELI

SEQ ID NO: 86734 - protein, 520 aa, Alteromonadales bacterium
  misc_feature (1)..(520): tr|A0A2N0WUG3|A0A2N0WUG3_9GAMM Tryptophan 7-halogenase OS=Alteromonadales bacterium alter-6D02 OX=2058087 GN=C W748_00940 PE=4 SV=1
MAENTNRTIKKVVIVGGGTAGWLAANHLGKQLINEHSGVEVCLIESPNIPTIGVGEGTVPLMRQTLQELGISETEFIRECDVTFKQGIKFVDWVDNPVANKPSYYHHVFDYPNITELDLTPYWLDGLAGDKSYADALSIQGAVCDAGLAPKLITTPEYQGLTAYAYHLDAGKFAAILTKNATKKLGVKHIFADVLKVNVAESGDITSVTTDSAGEIAADIFVDCTGFKALLIGEALGSKFISKQNTLFADHALAIQVPYDEPAAPIPSYTISTAQQAGWIWDIGLNERRGIGHVYSSAHTSHEQAEQDLRQYIGPAAEGIDARLIPMNIGYRELFWKNNCVAIGLSQGFVEPLEATGLLVFDATSKMLATQFPAKHDDIATVAKQFNRNVQATWDNVISFVKMHYCLSKRDDSAFWLDNRDKNSIPDTLLEQLELWRNYVPTQYDFSNRFDIFNRENFLYVMYGMHYPTQIDAIKSRFQEDEVAKQHFKMMAQRTQGALANLPLHRELLLKIARYGLQKR

SEQ ID NO: 86735 - protein, 501 aa, Pseudoalteromonas sp.
  misc_feature (1)..(501): tr|A0A4Q6YW58|A0A4Q6YW58_9GAMM Tryptophan 7-halogenase OS=Pseudoalteromonas sp. CO342X OX=1777270 GN=EXT47_177 65 PE=4 SV=1
MKTHVPMKTIQSLTILGGGTAGWMCAAYLAKHQPNLSITVIESSSIGRIGVGEGSTPHLQLFMQNLGVKERDWIPACQASYKTGIYFDNWNGDNGSYFHPFFSEMDAKTAEVYFVNANARRRGSEYIDKPEHYFLAAVLADKQQAPLPQRPLPRALEYGYHFDAQKLADWLRAFSLARGVKHIQSTVSSVQHHAKEIIALTLESGEQVKSDFYVDASGFNALLIEKTLEVPFISFADQLLNDSAVAIAGAKINPLPSSTSAIAMPCGWRWQIPLQGRTGHGYVYSSAHTTPEEAEAQLRQAAQLDKGQATHLTMKVGMMARCIEGNVFAIGLAQSFIEPLEATALMVTGYSIELLNRLLSQQLKAQAINQQLSELVLGIKEYVLAHYATSKRADSPYWQDAKIAALSLNELDELLTHWRSGGDFDAWLNQHRMHSPYIRPSWYCLLGGMDHRDSTCQMPFDQAPQHIEQAAKAYLTKLSDEHFTAHTTALEQLQRAQAFRA

SEQ ID NO: 86736 - protein, 536 aa, Sphingomonas parapaucimobilis
  misc_feature (1)..(536): tr|A0A0A1WBK4|A0A0A1WBK4_9SPHN Uncharacterized protein OS=Sphingomonas parapaucimobilis NBRC 15100 OX=1219049 GN=SP5_080_00150 PE=4 SV=1
MTSSSDHQIRRVVIVGGGTAGWMAAAAFARLLNNGYTHVTLVESEEIGTVGVGEATIPPIITFNQMLGLDENDFLAKTAGTFKLGIEFVDWGAKGERYIHPFGRHAQDLQGVHFHQLYLRERSRRALPDIAEWSMSAVAAKAGKFGRAKPDARSPIRELFYAFHFDASLYARYLRDYAERGGVTRVEGRIEAVNLRPEDGYVEAVTLADGRRIEGDLFIDCSGFRGLLIEEALGTGYESYAQWLPCDRAVAAPCALPNPTEPDPFTRSTAREAGWQWRIPLQHRMGNGLVYCSEYLDAETAEAQLLGNLEGELLGDPRHLRFTAGRRRQSWNRNVVALGLSSGFLEPLESTSIHLVQAAIQRLVALFPDKRFDPAERDEFNRQMHDLYEDVRDFIILHYKATRRDDTPFWNRVRTMEVPDSLARKMALWAGKGRLFREGYDLFSNPSWVAVCLGQGLVPERWEPAADALDEDLVAQALDQMHAGYADTAARMPSHGDFLRMTAPSPLAPAMAARSGTEGFDFARASGAVQSKAPLL

SEQ ID NO: 86737 - protein, 506 aa, Xanthomonas campestris
  misc_feature (1)..(506): tr|B0RZ29|B0RZ29_XANCB Putative tryptophan halogenase O S=Xanthomonas campestris pv. campestris (strain B100) O X=509169 GN=XCCB100_4345 PE=4 SV=1
MIPAPLRNIVIVGGGTAGWMAAAAFARVLGPSFNVQLIESEQLGTIGVGEATVPHIKAFNNLLGIDEAEFVRQTQGSFKLGIEFVDWQRPGTSYIHGFGTQIGHPLGLLPFHQYWIKQQRRGKAQPLGAYTLNTVAATRGKFMTSAGDVPANSPLASIAYAYHFDASQYARFLRGYAEQRGVTRLEGLIEQVQLDAHTGSVQSVQLASGQVVSGDLFIDCSGFRGLLIEEALHTGYHDFTHWLPCDRALAVPCEKVGPPTPYTRSTARAAGWQWRIPLQHRTGNGYVYSSAHISDDEAAAALLANLDGTPLADPRPLRFTTGRRKQFWNRNVVALGLASGFLEPLESTSIHLIQSGISKLLELFPREGISPVLVQRYNDRLAFEFDRIRDFLVLHYHATERDDSAFWRHCRTMPITPELQTTLDLFRDSGRFYRNAEEMFAEISWVQVMVGQGILPQGYHPLVDQVPDTDAEGFLASVAQTISHCVDVMPTHQQFIDRYCRADPVR

SEQ ID NO: 86738 - protein, 505 aa, Sphingomonas faeni
  misc_feature (1)..(505): tr|A0A2T5UCE2|A0A2T5UCE2_9SPHN Tryptophan halogenase OS =Sphingomonas faeni OX=185950 GN=C8J25_101658 PE=4 SV=1
MTLGSPVRRIVIVGGGTAGWMAAAALARLIPTGASVTLIESDTIGTVGVGEATIPPIRAFNAMLGIDEAAFLAATAGSFKLGIEFVDWGAIGERYLHPFGGFGFDIEGVRFHQHWRRRRAAGVVEDIDAYSLCAVAARAGRFAPPSPDPASILSQMAHAYHFDAGLYARFLRGRAERDGVTRIEGEIGDVVLDGPTGHVRHVMLGGDRRIEGDLFLDCSGFRGLLIEQTLGAGYEDWTRWLPCDRAVAMPTANIGTAIAPYTRSTAQASGWQWRIPLQHRTGNGYVYSSAHCSDDEAAATLLDGVDGPPLADPRVLRFTAGRRRKQWIGNVVALGLASGFTEPLESTSIHMVQTGISKLLALFPDQGFSPVEIDTYNRLAETQFDQVRDFLVLHYHATRRTDSPFWREAGARAIPDSLAEKIALWRRRGRLFRWEDDLFAEASWVAVLLGQGIVPEGWDRLADAVDARDVDARFDRLRAMFADAAARMPRHEDYLARTSPTRVRA

SEQ ID NO: 86739 - protein, 494 aa, Unknown
  misc_feature (1)..(494): tr|A0A2E5AXK2|A0A2E5AXK2_9BACT Uncharacterized protein OS=bacterium OX=1869227 GN=CL660_09365 PE=4 SV=1
MKLDRICIIGGGSAGWMTASMLSRHFEGTGIEITVVEADIPRIGIGESTTQFFNTFIRYLDLKDEDWMPHCNATYKHSVKFTNFNQDGSFHYPFGTRGTNIPLTEYYNWRRGRNIDSMTFCRVFSDVIDPIEVNRLYPPFLERFVGYHVDALLFGNFLRDHYAIPKGVKHIKGTVTNIQSCVDGVSRVFLGTDDRYVDGDLFIDCTGFRALLMNELNVKWEDWSTLLKNDSTWAVRKPYTNKKTEMQPYTECTGLSSGWVWNVPTWDRIGTGYNYCSQYITDEDALAEFKEHLGVDIPENMFRLLKWPTGIREKVWSHNVVSIGLSAGFIEPLESGGLYSVHEFLFKLIQVLPRASNKWNGFQREQFNHSVRKKFTSFRDFVVKHYTMGYRDDTPFWKDYTDMDALGEFPDLLTRDWEQIQALNCVSEGEAYLLGGYEYDIMPEHYEMLSKRNGYNIPDFEEPILRRTFMDQTLGRYPNAYEYYEKYLYNEQGN

SEQ ID NO: 86740 - protein, 501 aa, Pseudoalteromonas sp.
  misc_feature (1)..(501): tr|A0A2D5SXT3|A0A2D5SXT3_PSEAS Tryptophan halogenase OS =Pseudoalteromonas sp. OX=53249 GN=CMK64_00765 PE=4 SV= 1
MKVDNAINSVVILGGGTAGWMTAISLAKYAQTQPLKITLIQSNEIETIGVGEATLPNIVDFNYQLGIDEKEFIEQTEASFKLGIEFKDWYKPGHAFFHPFADYGMKVKGVDFHHFYHKAKQQGLDAELADFCLSTQLASKGKFYIPQKIDNDLEDFGYAYHFDAGLYAEFLKKKSIVMGVQHLIATVEKVTTDSESGFIQSLTLNSGEVIESDLFIDCSGFTGKLIEQTLEVGYEHWNEWLLCDRAVAVHSQGHDEVTPFTVSKAKSAGWQWRIPLQHRVGNGYIYSSQHISDEDAKQSLLADLDGDAITEPRVIKFHPGRRDKIWHKNCFAIGLSSGFIEPLESTSISLIQSAISKLLTFFPDKSFHQADIDEVNRLHNLEVERVRDFIILHYKLTQRDDSDFWLKCQSMDIPESLRHKIALYQSRGHINQQECESFEQSSWLSMFAGFCMTPDRVDPRTMHVNDTALLSDLRKIKQFIEEVANKAPTHREFINTLKLKR

SEQ ID NO: 86741 - protein, 454 aa, Streptomyces sp.
  misc_feature (1)..(454): tr|A0A429CNF3|A0A429CNF3_9ACTN Tryptophan halogenase OS =Streptomyces sp. WAC 05977 OX=2203208 GN=DMC63_00245 P E=4 SV=1
MDDYDVIVVGGGPGGSTAAGLTAAEGHRVLLLDKDHFPRYQIGESLLPATIHGICAMLGVRDEIERAGFVRKRGGTFKWGTGAEPWTFSFAASDRMAGPTSYAYQVERTRFDALLLDGARRLGAEVRQGHRVLGTIQVGERIGGVRYLDDAGHERQATARYVVDASGHGSRLHHDVGGIREYSPHFRNLALFGYFEGGRRMPAPDTGNILCVSFPDGWFWYIPLSDVLTSVGAVVKHESADRVQGDPEVAYSALIEDCPLIDEYLRDAHRATEPPYDRLRVRKDYSYDRTVLWSPGMVLVGDAACFIDPVFSSGVHLATYSALLAARSINSTLAGFSDEKRCFAEFEARYRREFGLFRDFLITFYQLDSDEDDYFQQARRLTGHHGTADAAFAGLVGGVSSQDFSRAMFGDVLAEGVQLQLRGLLGEAAGDEPPMFPGGLVPTADGRRWRVPDA

SEQ ID NO: 86742 - protein, 503 aa, Pseudoalteromonas sp.
  misc_feature (1)..(503): tr|A0A2E4CQB7|A0A2E4CQB7_PSEAS Tryptophan halogenase OS =Pseudoalteromonas sp. OX=53249 GN=CMK68_12950 PE=4 SV= 1
  misc_feature (476)..(476): Xaa can be any naturally occurring amino acid
MIKKIAIVGGGTAGWLAANHLGHALLHSGIEITLIESPNIASIGVGEGTVPSMRNSLQKFGISESDFINECDVTFKQSIKFVNWLDKHKHGANFYHHLFDHPHIFGEQLTQQWLADGNGNDYAEFVSKQHVCCENNLAPKTIATPQYAGINGYAYHFDAKKFASFLGSHATQHFSVKHLFAEIKDITCDQQGFITHLIDSEGNALEFDFIIDCSGFSAAFIGQKLGVGFVDKSDSLLTDTAITLQVPTQSDDEIPPYTIATAHQAGWIWDIALTERRGVGFVYSSKYMSDEQAHEKLHRYLGNKFEHLTPRKIPMKVGHREKMWHKNCVAIGLSQGFVEPLEATAILIADFSAGLLAKRFPRSRDDIKLVADDYNQHVNYVWQQTFDFIKMHYCISDRTDSAFWRDNKKTDQLSEKLKNNLTRWQRFTPVREDFASKFDLFDLENYLYVLFGMHYVPAKQQSKQNDNQHVAEFKQXRVKQLLNELPKHRELLDKIKKFGLQKN

SEQ ID NO: 86743 - protein, 532 aa, Sphingomonas faeni
  misc_feature (1)..(532): tr|A0A2T5U942|A0A2T5U942_9SPHN Tryptophan halogenase OS =Sphingomonas faeni OX=185950 GN=C8J25_102114 PE=4 SV=1
MSMAGRLTPPRICPAVAAPDGFEAGTRTMVNHPLRIVIAGGGTAGWMAAATFARFLETGYEIDLIESDAIGTVGVGEATIPQIHLFNDALGLDEDAFLRATGGTFKLGIEFVDWFKPGHRYMHAFGDVGRDVGLLPFHQYWLRARSLGLAGDLGAYSLNTHAALAERMQRGPARTARTLPSMPYAYHFDAGLYARYLRRYSETRGVNRIEGKIVRVTRDGESGDVSGLVLENGTTVAADLYIDCSGFRGLLIEEALGTGYEDWTHWLPCDRAIAVPSARSEAFTPYTRSTAHTAGWQWRIPLQHRTGNGVVFSSAHMSEDEATATLLAGLDTPVMADPRTIAFRTGRRKRMWNRNVVALGLAAGFMEPLESTSIHLIQSAISRLLKLLPGRVVADADRTEFNRQSDFEYERIRDFIILHYKATARDDTPFWRQCRDIAVPDTLAAKIDLWRGNGHIVREHEELFTEVGWLQVLAGQGIMPAGHHPLADAISTSDLGEFMDTIDKLNAREAGQMQDHAAFVAQHCASPAGLGA

SEQ ID NO: 86744 - protein, 496 aa, Erythrobacter sp.
  misc_feature (1)..(496): tr|A0A109LVX8|A0A109LVX8_9SPHN Tryptophan halogenase OS =Erythrobacter sp. AP23 OX=499656 GN=ASS64_08800 PE=4 S V=1
MSETQPPRVVVLGGGSAGWITACLLHHRWHARGGEVTVVESPEIGIIGVGEGSTPQLKALFDHLGIEEAEWMAACDATYKLGIRFSGWSEREGHASYFHPFPGPVDLHTEPRFLHNCALRRRGFDVPAHPDDWFLAEVLAEQRRTPHPQDSFPFAPSYGYHFDAHKLGAFLREWAIARGVVHKSLKVTEVELGSAGDVAALLCEGGERIDGDVFVDCSGFRSLIAQQKLGAKFLPFAENLFNDRAVVMPTPHREAFKPQTDSIAMRAGWRWSIPLTTRVGNGYVYSSKYVSDEEAEAELRQAIGMEHEGDVRVLQMRVGRVEDSWTRNCLAAGLAQGFIEPLEATALHIVIATALDFAEAYEKGGFGPAHRDTFNRSIAAKYEGIRDYIVAHYRLNQRSDTQYWRDNATNHALSDNLKGLMTAWFTHEDLREINLRQHDGNPHYANMSWHALFAGYGTFPPQAKMVPLPAGLAGADRAKTRAMLAACASNFADYKL

SEQ ID NO: 86745 - protein, 493 aa, Alteromonas sp.
  misc_feature (1)..(493): tr|A0A4Q8UA90|A0A4Q8UA90_9ALTE Tryptophan 7-halogenase OS=Alteromonas sp. KUL42 OX=2480797 GN=EYR97_01180 PE=4 SV=1
MKALPANIVIVGGGTAGWMSACYLARAVELARQQHPSKQQPVNITLLESADISTVGVGEGSTPYLRHFFDYLGVDENTWMQTCSATYKMGISFENWNNADVDNSYFHPFFSALDIPTADQYFDAVNQRRRGINTDVNPSHYFTAAQMVEDGILPNTLSTATHIDYAYHFDAGQLGDFLKQYAKAKGVKHHIGTIASVHADAQTIHAVQLEDGQQLQAELFVDCSGFRGLLGKQAQKRVFKSYSDTLFNDAAVAIASPVLPSPEAKLQTRSIGLEHGWQWEIPLTSRTGNGYVYSTQFCSSSDAEAELRQVLGEQVNDSEARHLRMQVGRLEEHWQGNCVCIGLSQGFIEPLEATALMLVQYALHHFVDCWQADHPHKYQQYNVEMNRMFDGIRDYIAAHYYLNTRTDTAYWQACRHDIKVPDTLAYLLKEWDSGANFETALNQVDSKLVYLRPSWYCIFAGMQRFSSPLSSMASPNEKALYAMKASLSGALSK

SEQ ID NO: 86746 - protein, 505 aa, Rhodanobacter sp.
  misc_feature (1)..(505): tr|I4W7N1|I4W7N1_9GAMM Tryptophan halogenase OS=Rhodano bacter sp. 115 OX=1162282 GN=UU5_11235 PE=4 SV=1
MSDDPHDSRIRHVVIVGGGTAGWMTAALLAKALGRRVQIRLIESEQIGIVGVGEATIPQIRHINAFLGIDEDDMLRATHGTFKLGVQLNNFGRLGDSYLHAFSDIGLPLGLIGFHHYWLRKRASDPANDLWSYSLNTQTANEHRFGRMDKVGSSPLGGIKYAYHFDAGLYGQYLRQRCDPQVVQRIEGKVVDVQLREVDGFIESVRLESGERIAGDLFIDCSGFRGLLIEGALHTGYESWQHWLPCDRAMAVASARTEPLWPYTRATARTAGWQWRVPLQHRTGNGLVYASQHLSDDEASAMLLANLDGEALGTPRPLRFTTGMRRKAWQRNCVALGLAAGFMEPLESTSIHLIQSGISRLLAMFPDRHCDPVLVDEYNRQTRFEYESIRDFLILHYKATERDDTPFWRQCASMDIPPTLARKIELFRGHGQIFREHEELFTEVAWLQAMIGQHIEPQAYHPLADALDETQLDAFLGDIRTLVGRAAGSLPDHARFVADHCLTRT

SEQ ID NO: 86747 - protein, 522 aa, Alteromonas sp.
  misc_feature (1)..(522): tr|A0A4P6B3A0|A0A4P6B3A0_9ALTE Tryptophan 7-halogenase OS=Alteromonas sp. KUL42 OX=2480797 GN=EYR97_13970 PE=4 SV=1
MTTATPITHIVVVGGGSAGWLTAGRIAAQHQCATRKDIKVTLVESPNVPIIGVGEGTWPTMRSTLIALGISETTFIKECDATFKQGAKFAKWTTGGEDDFYYHPLMLPQGFSQGNLGPYWQTVAPDLNESFSQAVCVQEAICEAGLAPKSIRHAEFAGTANYAYHLDAGKFTTFLTKHCTENLGVNHVLADVSQVQSADNGDIEALHTQQGVLIEGDLFVDCTGFRSLLLGEHYKVPFIPCDDVLFIDRALAVHVPYDNAQSPIASHTISTAQDAGWVWDIGLQSRRGVGHVYSSRHQSKDDAYTRLDTYVRQTSALDGIDDLNVKDITIQSGHRQRFWQNNCVAVGLAAGFLEPLEASALVLVELSASMIAEQLPANRAVMDIVAKRFNDTFSYRWARIIDFLKLHYMLSKRYDSAFWRDNRDSQTIPDSLKELLELWQYHPPSDKDFTSNNEVFPAASYQYVLYGMGFTSELGAHQQWVNADFARQQLTQNRKARAMAVEKLPQHRELINKIHQFGLQAV

SEQ ID NO: 86748 - protein, 502 aa, Alteromonas sp.
  misc_feature (1)..(502): tr|A0A4Q8TWH2|A0A4Q8TWH2_9ALTE Tryptophan 7-halogenase OS=Alteromonas sp. KUL42 OX=2480797 GN=EYR97_16450 PE=4 SV=1
MTAAALSKLLNPNVFSITLIESDAIGTVGVGEATLPHLRFFNQRLGIDESEFIKATNATIKAGIEFSNWGNSGDTYIHPFGDYGKPLKSVEFHHYFYALKKYNDQLNLDDYSLPVVACKSGKFNFPTSDPSLLTSSYSYAYHIDAGLYAQYLRGFAEQKGVTRIEGKVNSVSLRKSDGSISGLKLNNGELINGDFFVDCSGFRGRLIEQSLKAGYEDWSHWLPCDRAIAVQSEHNGRPLPYTKAIAREAGWQWQIPLKHRMGNGYVYASQYVNEERALQTILANLPGKPTSEPNYLKFTTGKRKLSWLKNCVAIGLSSGFLEPLESTSIYLIQAAIMKLVELLPQRENMAAKSAEYNRYFSNEMDKIRDFLILHYHATFREDTPFWNFCKHMKIPLSLEEKMELYKEIGVIEDYQYGLFLTPSWLAVYNGQGVIPSFSDIRVNEITLAQANKYMATLYADIKQAVAGMPTHEQIVARLHEETICNEPSQLNQAVRFSLYGQR

SEQ ID NO: 86749 - protein, 499 aa, Sphingomonas faeni
  misc_feature (1)..(499): tr|A0A2T5TXU1|A0A2T5TXU1_9SPHN Tryptophan halogenase OS =Sphingomonas faeni OX=185950 GN=C8J25_1127 PE=4 SV=1
MNHTSEPPRTRVIVAGGGTAGWIAAAAIVRQLGPLVDVTLVESDEIGTVGVGESTIPTARSFHAFLGIDEAAFMRATQATFKLGIAFENWRQVGDRYFHPFGSVGRSVAIADFQHFWLEARARGFGGAYGDYSLEQQAAGAGLFGHDEQHSLAYAYHLDATAYARFLRTLAEPCGVQRVEGRIERVERDGEGGNIAALVLASGERIAGDIFIDCTGFRALLTEGALGTGFEDWSEWLSTDRALAVQTETVAPPVPYTRAIAHDAGWRWQIPLQKRTGNGLVYSSAHMSDDEAHATLIGALDGRPLFEPRSLRFRSGMRRQAWNRNCIALGLAAGFIEPLESTSIHLIMNAVIRLIQLFPFRGDDHVALAARFNAQSRHEWEHVRDFIILHYHVTQRDDSRFWRDCARMTIPDSLAERIALFANTAGAWQGQDDLFRIDSWVSVMLGQGVEPRAHHRIARIIKEQELQTSFADLSRGITSTMRALPRHCDFLARYCLADG

SEQ ID NO: 86750 - protein, 513 aa, Alteromonas sp.
  misc_feature (1)..(513): tr|A0A4P6B5H1|A0A4P6B5H1_9ALTE Tryptophan 7-halogenase OS=Alteromonas sp. KUL42 OX=2480797 GN=EYR97_18725 PE=4 SV=1
MTSLDLDNTHAKPSRFANSNEGASKSVKKVVIAGGGTAGWMAATALSRLLGKSISVTLVESKDIGIVGVGEATIPPIRTFHKLLGIDEKAFMKASQATFKLGIEFQNWRESDHSYIHSFGITGRECWAGEFHHFWLRAKEYGFADDFGDYCPELIAAKQGKFATSDAMPLNFAYHFDAVAYGRFLKQLAIQAGVTHIEGDIKQVEQCPTSGNITALRLTDNTHISGDFFIDCTGFKGLLIEETLHTGYDNWQHYLMCDRAVAMQTELTDAPLPYTKSVANHAGWRWQIPLQQRMGNGLVYCSRYMSDDEAIDTLKSQVTGNPINTPRVIRFTPGKRRMGWNKNCVALGLASGFIEPLESTSIHLIMTGLVRLMRLFPFDGVTQSAIDEYNTKFASEMDAILDFIVMHYKVTNRTDSPFWQQCQRMDIPQSLTHKLRLFEETGRVFLDDGDIFRVDSWTQVLMGQGLMPKQYHKVADEMSEEALKQFMAGLKQQVTQRVNSLPSHHAFLSQYLG

SEQ ID NO: 86751 - protein, 506 aa, Massilia sp.
  misc_feature (1)..(506): tr|A0A0J1D846|A0A0J1D846_9BURK Tryptophan halogenase OS =Massilia sp. WF1 OX=1406431 GN=AB595_19225 PE=4 SV=1
MESHKRINRITIVGGGSAGWMAAAALATYLGKGATIRLIESEEIGIVGVGEASVPHIRMFNGQWLGIDEAEFVKRTQATVKLGIQFNDWGRIGDSYIHGFGAIGRSLGPLPFHQFWLKLHLAGRAGPIGDYSPQTVMAPQGKFAPGDRNAAPNSPLADIAYAYHFDATLYARFLRELAEQRGVQRIEGKVVGVQQRAGDGFIESVTLESGRLVDGELFIDCSGFRGLLIEQTLDTGYEDWSHWLPCDRALAVPCESVAPITPYTRSTARAAGWQWRIPLQHRTGNGYVYSSKHLSDDEATATLLANLDGKPLGEPRPLRFTTGMRKKLWNKNVVALGLASGFLEPLESTSIYSAQSGITRLLSLFPTRDFNPLLAERYNRDSVFEFERIRDFLILHYHATERKDTPFWDYCRTMAIPDSLREAMDLFRADGRYFRNGEDFFALPSWVQVMLGQRIVPQGYHPMVDEMPEDRLLDHVDSMRALLAHAVAAMPTHQEWIDRYWKAPAA

SEQ ID NO: 86752 - protein, 544 aa, Mastigocladus laminosus; identical to SEQ ID NO: 85766
  misc_feature (1)..(544): tr|A0A4D9C7M2|A0A4D9C7M2_MASLA Tryptophan 7-halogenase OS=Mastigocladus laminosus UU774 OX=1594576 GN=BLD44_02 7740 PE=4 SV=1

SEQ ID NO: 86753 - protein, 510 aa, Sphingomonas parapaucimobilis
  misc_feature (1)..(510): tr|A0A0A1WA25|A0A0A1WA25_9SPHN Uncharacterized protein OS=Sphingomonas parapaucimobilis NBRC 15100 OX=1219049 GN=SP5_073_00250 PE=4 SV=1
MSDPYRPTHVVIAGGGTAGWLAATALARQLGPLVDVTLVESDEIGTVGVGESTIPTARSFHAFLGLDEAEFMRATQATFKLGIAFENWGPDGARYFHPFGTVGRSVAIADFQHFWLEARRHGFGGAYTDYSLETRAAEAGRFGRDEAGTLAYAYHLDATAYARFLRGIAEPAGVRRVEGRIARVERDGAGGDIAALHLASGNRIEGDLFLDCTGFRALLIEGALETGFEDWSEWLACDRALAVQTEAVSPPVPYTRAIAHRAGWRWRIPLQTRVGNGLVYSSADMSDDEATATLLGGIEGKPLFEPRTLQFRAGMRRRAWSANCVALGLAAGFIEPLESTSIHLVMIAVMRLIQGFPFQGQDCAALRTRFNAQSRHEWEHIRDFIILHYAQTGRTDSVFWQRCSTMSVPDTLAQRMALFVESAGAWQGQDDLFKIDSWISVMLGQGMVPKAHHRISGMLSPHALRDSFDGLDQQLSRQVQQIPDHLAFMNGYCATQARPDLRIDPGDAAH

SEQ ID NO: 86754 - protein, 505 aa, Xanthomonas albilineans
  misc_feature (1)..(505): tr|D2U8F8|D2U8F8_XANAP Putative tryptophan halogenase p rotein OS=Xanthomonas albilineans (strain GPE PC73 / CF BP 7063) OX=380358 GN=XALc_0046 PE=4 SV=1
MIAAPLRNLVIVGGGTAGWMAAAALARMLGADNRITVIESEQIGTVGVGEATVPHIKAFNTLLGINEAEFVRDTQGSFKLGIEFVDWLRPGIAYVHGFGSEIGHRLGLLPFQQYWFKQALAGKASPLGDYTLNTVAAKRGKFMTAASDVPPNSPLANIAYAYHFDAALYAQFLRRYAEQRGVIRYEGIVEQVLLHPESGDVASVRLVSGEVIAGDLFIDCSGFRGLLIEQALHTGYHDFSHCLPCDRALAVPCAKIGPPTPYTRATARAAGWQWRIPLQHRTGNGYVYSSAHVSDDEAAATLLANLDGPALAEPRPLRFVTGRRKQAWNRNVIALGLASGFMEPLESTSIHLIQSGISKLLELFPREGISPVLVQRYNERIAFEFDRIRDFLVLHYHASERADSAFWQQCRGMSIPAELQATLDLFRDSGRFYRNGEEMFAEISWVQVMVGQGILPRAYHPLVDQVPVADLERFMLSVAQTIGHCADAMPPHQAFIDRYCAAAPG

SEQ ID NO: 86755 - protein, 498 aa, Pseudoalteromonas sp.
  misc_feature (1)..(498): tr|A0A2E4CRP1|A0A2E4CRP1_PSEAS Tryptophan halogenase OS =Pseudoalteromonas sp. OX=53249 GN=CMK68_15505 PE=4 SV= 1
  misc_feature (383)..(383): Xaa can be any naturally occurring amino acid
  misc_feature (394)..(394): Xaa can be any naturally occurring amino acid
  misc_feature (407)..(407): Xaa can be any naturally occurring amino acid
  misc_feature (414)..(414): Xaa can be any naturally occurring amino acid
  misc_feature (422)..(422): Xaa can be any naturally occurring amino acid
  misc_feature (426)..(426): Xaa can be any naturally occurring amino acid
  misc_feature (430)..(430): Xaa can be any naturally occurring amino acid
  misc_feature (443)..(443): Xaa can be any naturally occurring amino acid
  misc_feature (454)..(454): Xaa can be any naturally occurring amino acid
  misc_feature (461)..(461): Xaa can be any naturally occurring amino acid
  misc_feature (467)..(467): Xaa can be any naturally occurring amino acid
  misc_feature (471)..(471): Xaa can be any naturally occurring amino acid
  misc_feature (473)..(473): Xaa can be any naturally occurring amino acid
  misc_feature (478)..(478): Xaa can be any naturally occurring amino acid
  misc_feature (480)..(480): Xaa can be any naturally occurring amino acid
  misc_feature (485)..(485): Xaa can be any naturally occurring amino acid
  misc_feature (488)..(488): Xaa can be any naturally occurring amino acid
MESKKITKVVIAGGGTAGWITAALLNKVLGKVLDITLIESAEIGTVGVGEASIPPILHLNGALGITEKEFIKATGATIKLGIEFENWRSQGHSYMHAFGEIGKDFPFCEFYHFWLKANQANNAPDFWDFSLNYQAAKAHKFAHLKQIPNTQLAGLHYAYHFDATRYGEFLKELAQSRGVKRIEGKIESVNQCHQSGHITSLLLKNGEQIDGDLFIDCTGLRALLIEQTLNAGFEDWSHWLSCDSAVAVQSESANDAIPYTRSIARDSGWQWQIPLQHRVGNGLVYSSRFLSDEAAKQQLLDNLPAKALTEPRVIKFKTGRRLKQWHKNVVSVGLSSGFLEPLESTSIHLIQSAAIRLIKFFPHQGIKQSLVDEFNQQSKTEFXRIRDFIILHYXITERDDSAFWRFXKGMDIPXSLKKKIEXFKTXGKLXREDDELFAEVAWXQVMIGQGLIAXDHHPLTXALSDEXLNEXFXNLKTXIXSTVEXLPXHSQFLEKVQN

SEQ ID NO: 86756 - protein, 511 aa, Pseudoalteromonas sp.
  misc_feature (1)..(511): tr|A0A2E2LXU3|A0A2E2LXU3_PSEAS Tryptophan 7-halogenase OS=Pseudoalteromonas sp. OX=53249 GN=CMK69_06525 PE=4 S V=1
MDIKKVAIVGGGTAGWLAANHIGKEMLNRKGISVTLIESPDIPPIGVGEGTVPDIRNTLKSFGIREDEFIRQCDATFKQSIKFINWMDKKKHGEGNFFHHLFDVPSSYDAKHLTSYWLNNKEKSQSYAQGLSSQHVICEAGLAPKNITNAQYEGELAYAYHFNAGKFAQLLACNAKEKFSVEHIHTHVTQVKLGDDGAIAALITDNNEELEFDFYIDCSGFESLLMSKALKIPFVDVSESLLINSALVVQVPTKADDAIPPYTLATAHQAGWIWDIALTNRRGVGFVYSDKHMTDEQAHEKLDRYLGDSKQDLTYRKIPMRVGYRKKFWHKNCIVLGLAQGFLEPLEATSILLTDFSAKFLTLRFPSSTEQLEQLETRFNHAMGYAWERTIDFIKLHYCISDRTDSAFWVANKSDDTISESLKEKLSLWEEFIPVRDDFFSQFEVFYLENFLFVLYGMHFNTKAPPCTSAEHEHCLVRLQQRAEIDQYLINKLPNHRALLDKIKQYGLQSI

SEQ ID NO: 86757 - protein, 500 aa, Alteromonas sp.
  misc_feature (1)..(500): tr|A0A4P6A9T5|A0A4P6A9T5_9ALTE Tryptophan 7-halogenase OS=Alteromonas sp. KUL42 OX=2480797 GN=EYR97_01780 PE=4 SV=1
MTQPLRIVIAGGGTAGWMAANLFANIWKNSPVEISLIESEDIGTIGVGEGSTPTLKRFFQTLSIAEHEWMPQCQATYKVNIKFNGWNGDVHASYSHPFISQLDVFSERAFHINALTRRLGLNVETRPEKFLMAGYLAKKQLAPIPSHNFPFAIEYGYHFDSMKLGQFLRNFGKKLGVKHIIGNIESVETHANGEISALTCTDGRRIEGNLFVDCTGFNSLLLQKTLGVKFNAFGKNLFNDAAVVLPTAPLQTMPVETESTAMSNGWCWQIPLRNRTGNGYVYSQQYQSKEDAERELRQRLNLLDCDVEAKHLKMRVGQCEKHWHKNCLALGLAQGFIEPLEATALHLVQVSIEMFIDTFTKGHFSAQYQDTYNKDISERFERIRDYIVCHYKLNGKRDSQYWVDNRDNMHLSESLLSLLDVWYRKGDIVEEIKRQGIGKHFSTTSWHCLLAGYGVFPPIALQQPDSLKEKGDLFEENKLASFFSRCSLNFEKQKLLFQIA

SEQ ID NO: 86758 - protein, 512 aa, Sphingomonas haloaromaticamans
  misc_feature (1)..(512): tr|A0A1S1HDL6|A0A1S1HDL6_9SPHN Flavin-dependent tryptop han halogenase PrnA OS=Sphingomonas haloaromaticamans O X=653954 GN=prnA_2 PE=4 SV=1
MAKRIIIVGGGTAGWLTAAYLIRSLGRSGWSITLVESPDIGIIGVGEGTFPTIRETLSAIGVDEREFLREADGSFKQGVRFSGWTGGPTPGNDTDDYFHPFNLPYGGDEGLLPYWIKAAGEARRPSYADAVTVQGHVIRAGCAPKRASDPGFDGPMNYAYHFDAARFADYLRKVATANGVERIEATINEVRQAEDGRIAAVVPGDGRAAIEGDFFIDCSGFRALLIGKALGSPFRHVGDVLFNDRALAMQVPHGDADTPIRPYTLATAHEAGWTWDIGLGARRGIGYVYSSRHSDDEAAERVLRAYVGKAADGLSPRQLRFESGYRSVQWIGNCAAVGLSAGFFEPLESTGIMLIEVAARMISDFLGSPAIDEAAMAAAARQYNRLMLARFDAIVEFLKLHYCISGRRDTAYWRDNSDAASIPEGLRDKLAQWRHRPPSRFDFVVDHETFLPASWQFILYGMGFRTDPAAVSSSHRDDEQAGAAFVRVFQAARQAVAELPPHRALLEQLRAA

SEQ ID NO: 86759 - protein, 506 aa, Xanthomonas albilineans
  misc_feature (1)..(506): tr|D2UGW8|D2UGW8_XANAP Putative tryptophan halogenase p rotein OS=Xanthomonas albilineans (strain GPE PC73 / CF BP 7063) OX=380358 GN=XALc_3150 PE=4 SV=1
MTQIRKVVIAGGGTAGWIAGCALAHQFRDLLEITLIESEQIGTIGVGEATLPPLRQFHRFVQIDEQEFLRAVAGTFKLSISFEHWGQAGERYMHPFGITGQSTLVCAFHHFWLEAQRRGLHSELGDYCLESVAARADRFAREAPSPLNYAYHLDAGLYARLLRAHAERHGLRRVEGKICQVRQHPENGAITALQLEDGQLIDGDLFIDCTGFRGLLIEQTLHSGYEDWSHWLPCDRAVAVQAEAVAPPVPYTRTIAHAAGWRWQIPLQHRVGCGLVYSSAHLSDEAARAQLLREVAAPTLKEPSLVPFRTGRRRKTWNKNVIALGLASGFIEPLESTSIHLTITAVMRLLALFPSDGITPSLEALYNAASRAEMEHVRDFVILHYHATRREEPMWRACREMPLPASLQQRLDAWRARAHVWQDTDALFRGDSWAYVLLGQGVMPNAHHPLAHALPDQELQRFLAAIRAPIERSVAQMPSQAQFIAQYCKAPPQVWAGSPMTALANA

SEQ ID NO: 86760 - protein, 501 aa, Sphingomonas faeni
  misc_feature (1)..(501): tr|A0A2T5U9B1|A0A2T5U9B1_9SPHN Tryptophan halogenase OS =Sphingomonas faeni OX=185950 GN=C8J25_102186 PE=4 SV=1
MAEQRIRKVVIAGGGTAGWLTAAALSRQLGQLLDITLVESEEIGTIGVGEATIPTMRAFHSILGLDEREFMRATQATFKLGISFENWARDGDRYIHSFGDIGKSTWMGDFHHFWLAAKADGDSSEIGDYCLELQAAKAERFALPSEGQINYAYHLDAGLYARFLRARSEANGLKRIEGRIASVDRDSETGFIRALVLKSGERVEGDLFIDCTGFRGLLIEGTYAAGYEDWSHWLPTNSALAVQTAATGPAHPYTRAIAHDAGWRWRIPLQHRVGNGLVYASDHLSDDEANGRLLATIDGAPLTEPRLIRFRTGRRRQVWMGNCVALSLASGFVEPLESTSIHLIMTGITRLMQTFPFGGIAPALVKRYNDQAQAELERVRDFIILHYHLNERPEPFWAARRDMPIPDTLVERIALFTEGAQAYQGGDDLFRVASWVQVMLGQRLTPRDHHRLGSIMGGPQLAGVLTNIRRTIADAVAGMPTHQQFLDRYLAAPVTASHGMR

SEQ ID NO: 86761 - protein, 513 aa, Sphingomonas sp.
  misc_feature (1)..(513): tr|A0A1M2ZLZ6|A0A1M2ZLZ6_9SPHN Tryptophan halogenase OS =Sphingomonas sp. 66-10 OX=1895848 GN=BGN95_17210 PE=4 SV=1
MKPIQNIVIVGGGTAGWLTAGVIAARHRGRIPQDFTVTLVESPNIPIIGVGEGTWPTLRSTLKKIGVSETDLFRECDAAFKQGARFARWTTGAQDDGYYHPLVLPQGFERLNLVPHWLSGNGQQSFCDAVCPQGRLCDDGLAPKAITTPEYEGAANYAYHLDAGKFAPFLTRHCTEKLGVRHVRADVSRVALDESGDIRAIVTEQAGEIAGDLFVDCTGFRSLLLGEAMNVPFRDCSDILFCDRAMAVQVPYEHEDSPVRSHTVSTAQTAGWIWDIGLPTRRGTGHVYSSRHISDDEAERELRAYLGPAADDLAVRKIVIRSGHREQFWVRNCVAVGMSAGFLEPLESSAIVLVELSAKLIAEQMPLCREIMDIVASRFNATTHYRWGRIIDFLKLHYVLTRRTDSAFWRDNVLPETIPERLRELLLLWKYQSPWFLDEFDRVEEVFPAASYQYVLYGMGFRTEVSPGMVAYDARHADRAMRENAMLTERLRTTLPRHRDLIRKIHEHGLQPV

SEQ ID NO: 86762 - protein, 500 aa, Sphingomonas faeni
  misc_feature (1)..(500): tr|A0A2T5UCA5|A0A2T5UCA5_9SPHN Tryptophan halogenase OS =Sphingomonas faeni OX=185950 GN=C8J25_101660 PE=4 SV=1
MSARIQVVIVGGGTAGWMTAATLAMSFAGRLADVTLIESEDIGTVGVGEATVPHIRFFNQRLGIDEADFIRRTNATFKLGIEFRDWGRIGDSYIHPFGDFGHDIDGLPFHQYWAHAARGGVDGLPTLEDCSLPIVVARDNRFTPPLEDPRSIGSTYSYAYQFDATLYAAYLRDYAEARGVVRIEGRVDAVEQKDDGIGAVRLADGRRIAGDLFIDCSGFRALLIDGALKVKYEDWSHWLPCDAAWAVPTANAGALTPYTRATAREAGWQWRIPLQHRTGNGHVFSTRFTDPEAARAVLIDNLEGEAVAEPRMLRFRTGRRHRQWVGNCVAIGLSAGFLEPLESTSIHLIQLAIGKLIELFPSGGVFDPADAAEFDRAMALEYDRVRDFLVLHYCATERDDTPFWRYMRTMTLPSSLTEKIAEFRERGIVASYREGMFLPASWLAVYYGQRIMPGRVNPLIANTPTATSRDHVARVAAACASAAKAMPLHEAYIARIKAAA

SEQ ID NO: 86763 - protein, 498 aa, Erythrobacter sp.
  misc_feature (1)..(498): tr|A0A125QKQ6|A0A125QKQ6_9SPHN Tryptophan halogenase OS =Erythrobacter sp. AP23 OX=499656 GN=ASS64_08780 PE=4 S V=1
MRFVIAGGGTAGWMTAAALARFAPPGTQITLVESEAIGTVGVGEATIPQIHLFNNALGIDEAEFVRETKASFKLGIEFDGWLREGDAYMHAFGAVGRGVGLLPFQHYWLRARQLGMAKPLMRYSLNELAARTMRMQRGRRTPQAPEMPYAYHFDAGLYAAYLRRRAEANGVVRHEGRIERVEQHPESGAISALALDGERVVEGDFFVDCTGFRALLIGDALDTGYEDWSHWLPCDRAIAVPCSNGGDFTPYTKSIARKAGWQWRIPLQHRIGNGMVYSSAHWSEEEAVETLLANLDGEPQGDPRPLRFTTGKRQATWHRNCLAVGLAAGFMEPLESTSIHLIQSTISRFLAVLPSDEIDPSMVDWFNAQCDFEWSRIRDFLILHYTANAREGEPFWDELRQIDLPRSLHAKLDQWRATGFIHRENEELFTEVGWFQVLVGQGVEARSYNPIADGLPGNDLQMLLDGTEAALVEEVRQMPRHLDFVHQFVNSPSEEVTA

SEQ ID NO: 86764 - protein, 512 aa, Pseudoalteromonas sp.
  misc_feature (1)..(512): tr|A0A2E4CJY6|A0A2E4CJY6_PSEAS Tryptophan halogenase OS =Pseudoalteromonas sp. OX=53249 GN=CMK68_05425 PE=4 SV= 1
MSKIINNIVIIGGGAAGWLTAGLLAKEHPHLHITLIESADIGISGVGEGTWPSMRNTLQRIGVKETDFLRQCDASFKQGSKFINWRGEQQGDNYYHPFMIPEGYYEYDVHAAWKQLFSQQKYADAMNMQSFICQAALAPKQINTPQYAGVTNYGYHLDAHKFARFLTQHCVNTLNVKHIVDNVICANNDEQGYIKSVSTQHNGAITGDLFIDCSGSQGLLIAKHYQIPFLDQSHILFNNTAVAAQIPYESQSQNIASATLSTAQSAGWIWDIGLPTRRGIGYTFSDKYCDEASAIETLKNYAAQTIGTQQADTIETRTLRFTPGYREIFWHKNCVAIGMSQGFIEPLEASALAMVELSVSMLSEQMPVDQDHMQLLSTRFNKRFKYRWEQVINFLKLHYVLSNRDDNGYWHANRNPNSIPLELQNLLTLWQYQAPSRFDLVENEEIFSSASYQYVLYGMGFETSLTTKLDGQKCHKAEQLYQLNRNKITQYLQKLPTNRLLLEQLQGSKVAT

SEQ ID NO: 86765 - protein, 507 aa, Novosphingobium sp.
  misc_feature (1)..(507): tr|A0A158S5X3|A0A158S5X3_9SPHN Putative Tryptophan halo genase OS=Novosphingobium sp. KN65.2 OX=1478134 GN=SPHV 1_40005 PE=4 SV=1
MTQNRFSIVIVGGGTAGWMSAAALARFAPPGYAVTLVESEAIGTVGVGEATIPAIRLFNKALGIDEAQFLRETSASYKLGIAFDGWLREGHSYMHAFGTVGRHLGLLPFRHYWARARASGVARPLAHYAANELAARTGRMATGISGPGIPELPWAYHFDAGLYAAFLRRLAEGMGVVRHEGRVARVIRNDAGDIAAVETDAGQALAADFFIDCSGFTGLLIEKELQTGYEDWRHWLPCDRAVAAPCEAAGPFTPYTRSIARSAGWQWRIPLQHRIGNGLVYCSEYLSDDAATGLLLSHLEAPAQAEPRALRFTTGRRAKAWNRNVLAVGLASGFMEPLESTSIHLIQSTIMRFLTVLPSGPASPAIVNEFNRRTAEEFERIRDFLILHYRANARVGEPFWDRCRDMAVPDTLAARIAEFEEACQIQPAGDELFQEPAWLQVMAGQGIEPKGWNPIADALSDDDLSGFLGAIEQACIETVRPMPRHMDFLAATCAAAPSRSPELETLR

SEQ ID NO: 86766 - protein, 513 aa, Massilia sp.
  misc_feature (1)..(513): tr|A0A0J1GCM5|A0A0J1GCM5_9BURK Tryptophan halogenase OS =Massilia sp. WF1 OX=1406431 GN=AB595_12825 PE=4 SV=1
MSEAIKHIVIVGGGSAGWLVAGVLAAEHPLRVTLVESPAVPAIGVGEGTWPSMRDTLHRIGVSESDFFRECDASFKQGSRFDGWRTGKLDGAAGDYYFHPFVLPQGHGEANLAGAWRQSHPDVPFADLVSFQPHLCVHGRAPKQAATPEFAAVANYGYHLDAGKFGVFLRDHCVTKLGVRHVVDHVEAIRPHPDGDIGALVLHGGGVVEGDLFVDCTGMQSLLLGKHYGVPLLHQRHVLFNDSALAVQVPYASGDAPIASQTTSTAQPNGWIWDIGLPGRRGIGHVYSSAHSSDDEAERQLRAYVAATGGPADMPSPRKLSFEPGYRERFWHRNVVAIGLSSGFIEPLEASALALVELSAAWLADDMPATRAQMDTVASRFNEAFTYRWQRVIDFLKLHYVLSKRSDTAYWIEHRAAASIPDRLQALLQLWRTRPPSRRDFSRIEEVFPSASWQYILYGMGFATETAPRASDRPDLADGFFREAARLTARMLPALPSNRELLDHIRQHGLQRI

SEQ ID NO: 86767 - protein, 496 aa, Thalassotalea agarivorans
  misc_feature (1)..(496): tr|A0A1I0BUZ9|A0A1I0BUZ9_THASX Tryptophan halogenase OS =Thalassotalea agarivorans OX=349064 GN=SAMN05660429_01 063 PE=4 SV=1
MNKDNVNKVVICGGGTAGWITAALMAKVLGKTLDITLVESEQIGIVGVGEATIPPMIQFNQALGIDEKTFLKATKGTIKLGIEFDGWKTEQDSYMHAFGGIGKNFPFCDFQHFWVKAHQQGMTKELGDFSLNYQAAKENKFAPLPNITGTNLPGIHYAYHFDAGLYAMFLREFSEKHGVKRVEGIIDTVEQCQQSGHITAITLKDGTDIQGDLFVDCTGMRALLIEQTLNTGFEDWSHYLPCDKAMAVACESVSPTTPYTRSTAHRAGWQWRIPLQHRIGNGIVYASKHMSDEDAKALLLANLDGQAIGEPRVIPFKTGRRRKQWNKNVVSIGLSSGFLEPLESTSIHLIQTAAIRLLKFFPHQGIKQSEVDTLNQLSVFELERIRDFIILHYKVNERSDSDFWQQCQRMEIPESLAKRITLFKETGKIYRDVDELFTEVAWQQVMIGQGIIPQDHHPLVDGLTQKQMEDLIDSLKTLIARDVAKMPTHDEFLKQL

SEQ ID NO: 86768 - protein, 387 aa, Unknown
  misc_feature (1)..(387): tr|A0A3N5GG23|A0A3N5GG23_9BACT Tryptophan 7-halogenase (Fragment) OS=bacterium OX=1869227 GN=EHM82_05430 PE=4 SV=1
MAKSIVVVGGGSAGWMTASYLKKALKGIDVTLIESANIKSVGVGEATFSTIKLFFDFLGLDESEWMPSCNATYKLAIKFANWTKNGGYFYHPFQRYEVVDGFNMGEWWLKLKRHEEPFDYACFAIPELCDLKRSPRFFDGRVFDDKVQDCFTGSHRENKNVLADHKVQYPYAYHFDASLLAEYLKGYATRLGARQIIDEVAEVRLREDGSIDHLVTREHGEVRGDLFVDCTGFRGLLINQALDEPFVSFSDSLLCDSAVAMQVPRDIETEGIEPFTSATALSAGWVWNIPLYGRIGTGYVYSSKFISKEEAEAEFRRHLGPAADSVKAAHIKMRIGRCRNSWVKNCVAIGLSSGFVEPLESTGIFFIQHGIEELVSHLPGDTIDEEA

SEQ ID NO: 86769 - protein, 496 aa, Colwellia sp.
  misc_feature (1)..(496): tr|A0A2N1IGJ7|A0A2N1IGJ7_9GAMM Tryptophan halogenase OS =Colwellia sp. 12G3 OX=2058299 GN=CXF71_07520 PE=4 SV=1
MNNTPIKNVVIAGGGTAGWMAAAALSKLLGKAINVTLVESDDIPTVGVGEATIPTLHIFHQLLGINEAEFMAATNATFKLGISFESWRDVNKDYIHSFGYLGQDCWACGFQHFWLKGLKKGIVSDIGDYCPEHLASREGRFAVLANQDLNHAYHLDAGLYAKFLQKIADKFGCQRIEGKINKVNLDEKTGNITSLNLENGKVVEGDLFIDCTGFRGLLIEDALHTGYDDWSHYLPCDSAIAVQTETVNKPVPYTRSIARDSGWQWRIPLQNRTGNGFVFCSKYMTDEEAKKTLLDNVEGKLLNEPRVIKYKTGARRKHWNKNCIAIGLSSGFIEPLESTGIHLFQKAIVRLLQMFPSQGINQSDVDEYNDQTKKEADNIRDFIILHYHLTDRRDTRFWRYCAMMPIPDSLAHRMKLFKESGRVFKKANDLFGETSWVQVMMGQGLMPEQYHPIVDMMSDDELKTFLDKIKNGVHKRVANWPDHNDFINHYCKSSNG

SEQ ID NO: 86770 - protein, 504 aa, Erythrobacter sp.
  misc_feature (1)..(504): tr|A0A120GBV5|A0A120GBV5_9SPHN Tryptophan halogenase OS =Erythrobacter sp. AP23 OX=499656 GN=ASS64_09955 PE=4 S V=1
MAIEHIVIVGGGTAGWMAAAALSRIRDGRPVAITVIESEQIGTVGVGEATIPPLVEFNQALGIDEREFLAEVQGTFKLGIQFVNWGQVGESYIHPFGAYGYDIGGINFHQVWHSLRGRGDKRPLQLFNLETMAAYYGKFSRTEDYARDDLPPMNYAYHIDATAYARYLRKYAEKRGVVRREGIVEQVALDPESGHVAKLTLSDGEEIEGDFFVDCTGFRGLLIEQALETGYEDWTHFLPCDRAVALPCNRDDGSPPPPFTRATAHKAGWQWQVPLQRRNGNGHVYCSQFMEADEAHDILVQNLAGKPTAEPNHLRFVTGRRKKVWNKNVVALGLASGFMEPLESTSIHLINTGVNKLIATMSLDGITEAQANTFNRLTVKEYERIRDFLVLHYKATRRDDSPFWDYCRTMDVPDSLTEKIELFKANGQVFREEDELFTTTSWTAVMMGQGISMEGNSPMAAAVADTSAQEIDEMAKSIQWLVQQMPGHHQYLQRYCPARQPAPA

SEQ ID NO: 86771 - protein, 503 aa, Streptomyces sp.
  misc_feature (1)..(503): tr|A0A515YGX8|A0A515YGX8_9ACTN Tryptophan 7-halogenase OS=Streptomyces sp. RLB3-6 OX=2594457 GN=FNV61_41285 PE =4 SV=1
MESRKEQVDVVVVGGGPGGSTVATLLARRGHSVVLLEKEKFPRYQIGESLLPATVHGVCKLLGVTEEMEAAGFMYKRGGSFRWGTNPVPWNFLFSISPEYSGPTSNAYQVERARFDEILLRNAARCGADVREECDVTGSLQADDGRVTGVSYRDADGGEHEISATYVVDASGNRSSLWRATGGERKYSEHFQNVAVFGYFNGGGRLPEPNSGNILCEAFDEGWLWYIPLTDDLTSVGAVISRENASQIQGDREAALMKFVDRSSYVKDMLTDATRVNDDSMYGEVRIRKDYSYANTRFHAPGIVLIGDAACFIDPVFSTGVHLATYAGVLAARSINSVLEKSVSEERAFAEFDGRYRREYSVFYEFLSSFYHMDQAEDSYFWRARKVTNLPQSSFEAFVSLVAGGSSKERVLTDGAQVAERFARSAEDISRAAERTGGMETDSGQRMNHLFSAPVVREVMEEMNALQANSGEGTEVVEPPLLEGGLVPTPDGLGWAEPVSVPV

SEQ ID NO: 86772 - protein, 494 aa, Sphingomonas faeni
  misc_feature (1)..(494): tr|A0A2T5UCB8|A0A2T5UCB8_9SPHN Tryptophan halogenase OS =Sphingomonas faeni OX=185950 GN=C8J25_101657 PE=4 SV=1
MTDALRSVTIVGGGTAGWMAAVAFGRLLGPAGTRVTLIESDDIPTVGVGEATIPPIRTFHAMLGIDEDAFLRATGGSYKLGIRFEGWTRPGESYVHPFGQIGTDIAGVPFAAQWLRARHAGLAVPLGAYSLEARAAEAGRFSRPIANGDSPLSRIGYAYHFDAGRYAAFLRTQSEAYGVVRHEGLVKRVERGPAGIAAVHLADGSRISGDLFIDCSGFRALLIEGAMEAGWIDWSEWLPCDRAVAVPSVADAVPLPLTRAIAERAGWRWRIPLQHRTGNGHVFSSRHMSEDEATAMLLAGVEGETLADPRVIRFATGHRNRFWSGNCIALGLAAGFMEPLESTSIHLVQSGLQHLLRMLPVGRPAAATVERYNRIMTAEFSRIRDFLVAHYHLNARAEPFWRDRATAAIPEGLAEKLALFHAGGRIFREADELFNETSWLAVLTGQNAPVSGYDPICDGIPIETAANRLAQIERVVATSLTHMPSHAHALARLA

SEQ ID NO: 86773 - protein, 516 aa, Colwellia sp.
  misc_feature (1)..(516): tr|A0A2N1IG81|A0A2N1IG81_9GAMM Tryptophan halogenase OS =Colwellia sp. 12G3 OX=2058299 GN=CXF71_07505 PE=4 SV=1
MNNSIKKITIVGGGSAGWLTAGILASEFKTQGDLAVEITLIESPDVPTVGVGEGTWPSMRQTLKKIGVSEADFLMECDATFKQASKFDNWINGTNDSYFHPFTLPSGFFETNIAEFWQQHSKQVSFADATTVQSHLCKNGLAPKQISTPEYAFACNYGYHLDAGKFSTFLQKHCCEKLGVKHILDHVVKINSHENGDIASVSSKLHGDIDGDLFIDCTGFKSLLLGEHYGVEFISQKHVLFNDTALAVHVPYPHENSPIASHTISTAQTSGWIWDIGLPSRRGVGHVYSSAHISDDEAEQQLRSYISPSLGKNQKLADIRKISINPGFRSKFWHKNCVAIGMSSGFIEPLEASALALIELSAKMVADQLPANRQVMDITAKRFNEKFSYRWQRIIEFLKLHYVLSSRQETYWQDNRCENSIPEHLNELIALWKYQTPYGYDTHHTEELFPAASFQYILYGMGFKTDLALRQKREDKKEIANKFFNDNIAHTHKLMNAMSSNRELLNKIKQYGLSKV

SEQ ID NO: 86774 - protein, 516 aa, Thalassotalea agarivorans
  misc_feature (1)..(516): tr|A0A1I0ASX0|A0A1I0ASX0_THASX Tryptophan halogenase OS =Thalassotalea agarivorans OX=349064 GN=SAMN05660429_00 806 PE=4 SV=1
MTNISHIVIVGGGSAGWLSAGIIAAKLKQSVASGFTVTLIESNTIASVGVGEGTWPTMRSTLKNMGISETEFIKQCDVSFKQGAKFARWRTGKQDDYYYHPLVLPQGFEQLDLVPHWQASDSPLSFSEMVCPQESLCEQGLAPKLITTPEYRAVANYAYHMDAGKFATFLQQHCVENLDVHHIVDDVVGVNKTDSGDISSLATAKHGQIKGDLFIDCTGFKALLIGEHLNVPFVSCNETLFVDQALAIQVPYQQENSAIASHTISTAQSAGWIWDIGLPTRRGVGHVYSSRHVGEDHAYQQLMQYLSGQVDKPESLDVKKIPIEAGHRAQFWKNNCVAIGLSAGFLEPLEASALLLIEISAQMVVDQLPTNRQVMDIVAKRYNETFTYRWARIIDFLKLHYCLSERTDNPFWIEHRDPSTMSERLQEQLMLWKHQFPSDADFESALEIFPAASYQYVLYGMGFRTHQNPLGRSQQSIDRAQMAFKKNIAETQQMSNVLQSNRDLLEKIYKYGLQTI

SEQ ID NO: 86775 - protein, 533 aa, Colwellia sp.
  misc_feature (1)..(533): tr|A0A2N1IEP0|A0A2N1IEP0_9GAMM Tryptophan halogenase OS =Colwellia sp. 12G3 OX=2058299 GN=CXF71_09770 PE=4 SV=1
MYIMNKLTKTVVIVGGGIAGWLTAGRLAAKHKSNTEQGLKVILIESANIPAVGVGEGTWPTMRSTLRALGISESDFIRECEASFKQGAKFAKWFDGTEDDFYYHPLVLPQGFGKTDLAAHWLAKQAQTKQNHSHVNSFSNDVCFQEAICEQGLAPKTIRHAEFADVANYAYHLDSAKFAVFLQKHCQKKLGVTHIVDDVTGVNCADNSANNDTTNKGDILSVSTENNGDIAGELFVDCTGFSSLLLGKHYQVPFKKCDDILFIDTALAVQVPYDSADSPIASHTISTGQEAGWIWDIGLQHRRGVGYVYSSKHSTEAEARAVLATYVGDKFASLNVRKIPIVSGHREKFWQNNCVAVGLSAGFLEPLEASALVMVELAAQMISEQLPASREVMDVVAKRFNETALYRWDRIIDFLKLHYILSERTEPFWSDNRDPTTIPQSLQDLMTEWQYRAPADHDFTSNNEVFPAASYQYVLYGMHFKSDYCHTPYALDDGEFANSQFMKNKQLIDKALSSLPSNRELLDKIKSYGFSRI

SEQ ID NO: 86776 - protein, 493 aa, Cellvibrio sp.
  misc_feature (1)..(493): tr|A0A2T6FI53|A0A2T6FI53_9GAMM Tryptophan halogenase OS =Cellvibrio sp. 79 OX=1954207 GN=B0W54_16780 PE=4 SV=1
MINKKMKVVIAGGGTAGWIAAAALAHQMGELLDITLVESQEIGTIGVGEATIPPMRTFHRLVGINEQEFMRATNATFKLGIQFENWKQIGDKYFHSFGMTGKQTLITDFIHFWLRGQKLGIAQEFGDYCLEYKAALMDRFSINDQTKINYAFHLDAGRYASFLRTRAEARGVKRVEGKIAEVQQHPDSGDIAALKMESGQDIPGDLFLDCTGMRGLLIEQTLQTGFEGWEQWLPCDSAIAIQTESTAPAVPYTRSIAHHAGWRWKIPLQHRVGNGLVFSSRYMSDDEAINMLLSSVEGKVLIEPRVIKFKTGKRKKTWNKNCIAVGLSSGFLEPLESTSIHMIMTAITRLLQLFPHGEIRQPIVDEFNIQAESEITRIRDFIILHYKATERDDSPFWRYCKDMDVPEDLMHRINLFKDYGRCYPVEGELFRLDSWTQVMLGQGIFPSSYHPVVELMPERDLQNFLNNIAADVDKSIATMSSHHDFIKKYCASN

SEQ ID NO: 86777 - protein, 520 aa, Cellvibrio sp.
  misc_feature (1)..(520): tr|A0A2T6FE97|A0A2T6FE97_9GAMM Uncharacterized protein OS=Cellvibrio sp. 79 OX=1954207 GN=B0W54_23895 PE=4 SV= 1
MINENVKHVVIVGGGTAGWITAGVLAAKCVKEHGRDLTITLIESPTIGNIGVGEGTWPSLRTTLQTMGISETEFIRQCDATFKQGACFKKWIDNSEGDAYYHPLMLPSSLGPLNSIIRKLNSDPTKGQNSGDLSYSTMLCSQETVCERGLAPKNITTPEYRGILNYAYHLDTNKFSIFIKEHCISKLNINHVVNDIVGTTLGADGEIGSLRLVDGTELTADFYIDCSGFAGLLIDKHFNVPFLDRSDILFCDRAVAVQCPYEHQDAPIASHTVSTATGSGWIWDIGLQKRHGIGHVYSSGHMNQDEAERDLRKYVGKQMDQLDVRHIKYKPGHREKFWMKNCVAVGLAAGFVEPLEASSILLVEIAAFWIAEKLPHKKSGFVHCEKQFNETFRYRWDTIIEFLKLHYCISQRTDTDFWRDNTHPDSIPDGLLEKLDLWRGQCPSVVDFLSRADVFPFESYCYILYGMKFKTATHAVSAAQLIMLEKKIHEQQLAMANVVNSLPANRSLINKIREHGLQRI

SEQ ID NO: 86778 - protein, 506 aa, Cellvibrio sp.
  misc_feature (1)..(506): tr|A0A2T6FGN4|A0A2T6FGN4_9GAMM Tryptophan halogenase OS =Cellvibrio sp. 79 OX=1954207 GN=B0W54_13685 PE=4 SV=1
MNNTTAADSRIRSIVIVGGGTAGWMAAAALANRFKQGVTKITLIESAEIGIIGVGEATVPYIKEFLQDLNINEVDFMRATKATYKLGIDFDGWHKPGEKFIHPFAGYGARIARIPFHHYWAKMRTQKKAQALDDYCLAAQMARHNKFALPKANNDIELSSFNYAFHFDAGLFAHYLSGIAQTLGVKRIQANVQQVNQCPDSGFIRSVGLDTGEIIEGEFFIDCSGFNGLLIEQTLKTGYETWNQWLRCDRAVAMPCTSKIAPASATRSLAMDAGWQWRIPLQHRVGNGYVYCSDYISDDLAAEKLRENLEGEALADPKFIRFTTGMRKQAWNKNVFCLGLASGFMEPLESTSIYLIQSSLTLLLNHFPNNQYNQALVDTVNNNLRIRQEKLRDFLILHYHLNQRHGQALWDECRTMSIPDTLAARIEYFKKTCQPQVDELDFFGTNSWLAMFSGFNIQSDYYHPVVDDFDTHLVEKELQAIATNINNTVKNLPSHLDFIKRNIVGE

SEQ ID NO: 86779 - protein, 511 aa, Thalassotalea agarivorans
  misc_feature (1)..(511): tr|A0A1I0E1L5|A0A1I0E1L5_THASX Dehydrogenase (Flavoprot ein) OS=Thalassotalea agarivorans OX=349064 GN=SAMN0566 0429_01686 PE=4 SV=1
MVNESNSIVIVGGGTAGWITAGVIAAQHKGQVSVTLVESPDIPTIGVGEGTWPTMRKTLEQMGISETTFVRQCDASFKQGSLFKDWHSIGHQYYHPFTLPTGYQEINLAPYWLPHKQRMPFAFATSPQAAICEQGLAPKQIGTKEYAFFNNYGYHLDAGKFSELLKQHCVESLAVKHVLANVATITNDASGDIDHLVLDSGETISGKLFVDCTGQHSLLLGKHYNVSYLDQSKYLFNDTAIALQLPYKTEQENIASATISTGQSCGWIWDIGLPTRRGTGLVYSSAHADEQTAMDVLMAYAKERVTEQQFSQLSPRKISIAPGYRKEFWHRNCVAVGMSAGFIEPLEASALALVELSAKMISEQLPKTREAMTIVANRFNKKFEQRWQQIIDFLKLHYVLSERDDSAYWRDHRDPAGIPESLQEQLILWKTQSPYTYDSMYTEELFPSASNQYILYGMDFTTDIDPTSLANVERADRLINENLQRTRQMMAALPTNRELLQQVKAQGFAKI

SEQ ID NO: 86780 - protein, 493 aa, Thalassotalea agarivorans
  misc_feature (1)..(493): tr|A0A1I0E195|A0A1I0E195_THASX Tryptophan halogenase OS =Thalassotalea agarivorans OX=349064 GN=SAMN05660429_01 693 PE=4 SV=1
MSNKPVKKVVIAGGGTAGWMAAAAFGKLMGKQLDITLVESDEISTVGVGEATIPTMVFFHRLLNVSEKEFMQATNGTFKLGINFENWRDVNEDYLHAFGVTGKASWAAGFQHFWRKGKDKGFSGDFGDYCLERVAAEAGKFQHLPNNGLSYAYHIDAGLYAKFLRQLSEACGVKRVEGKIEQVNTDADTGFITSLTLAKGDVIDGDFFIDCTGFRGLLIEQALHTGYEDWSHWLPCDSAIAVQTQATQAPIPYTRSIAHQAGWQWRIPLQNRVGNGLVFCSKYLSDENAKQLLLENIEGDTLNQPRVIKFRTGRRLKTWNKNCLAVGLSSGFLEPLESTSIHLIQQSIVRFIKLFPAAGVQQCDIDEFNYQTNFDVEKIRDFIILHYKVTHRNDSEFWRYCRNMEVPASLAHRIALFKETGRMFREGDELFDDSWQQVMIGQGLIPEAYHPIVDSLSDEELKRMLLQLKNNIARTVDNMPSHEQYLAQFCPAH

SEQ ID NO: 86781 - protein, 495 aa, Streptomyces sp.
  misc_feature (1)..(495): tr|A0A515YEM3|A0A515YEM3_9ACTN Tryptophan 7-halogenase OS=Streptomyces sp. RLB3-6 OX=2594457 GN=FNV61_36235 PE =4 SV=1
MSTGEEFDVVVVGGGPSGSTVASFVAMQGHRVLLLEKESFPRYQIGESLLPATVHGICGLLGVSEEIERAGFMRKHGGTFRWGSSPEPWSFAFAISPRMAGPTSHAYQVERMKFDDILLKHSRKLGVEVREECSVVEVTEDEERVRGLVYTDSTGARHTVGARFVVDASGNKSRIHRDAGGDRIYSDFFRNIAIFGYFEGGKRLPAPRDGNIFCAAFDEGWFWYIPLSDRITSVGAVVSREFADSVQGDPADALSRLIAKCPRIDDMLADAERVTEGVYGQVRVRKDYSYSNSRYWRPGMVLVGDAACFVDPVFSSGVHLATYSALLAARSINTVLAGDLGEDESFAEFEARYRHEYGLFYEFLVSFYDMNSDHESYFWQAKKVTAFAESELEAFVELVGGVASLDGTFVDAESARARFKHTAGELERSVSQVDRTRGDDSTPMYQSDIMGSVMEQGTQIQVQAVLGGDLDPEAALFPGGLVPSADGLRWAAAAE

SEQ ID NO: 86782 - protein, 456 aa, Thalassotalea agarivorans
  misc_feature (1)..(456): tr|A0A1H9YBN4|A0A1H9YBN4_THASX Tryptophan halogenase OS =Thalassotalea agarivorans OX=349064 GN=SAMN05660429_00 145 PE=4 SV=1
MPYTIEIDVHNHSHLMGYGLIQALLSALFIVDKTNNQVTVNILKPADTETVDGVVLLDQHWLHLLAKFDVTEALLLTDADADFVSAQRFENLQTGQYFYQASSEYGIGFEGFAFNQYFSASNLTQHSFDSFCLSALLAKHQKFAHPSKDPTNVASTIEYQLNCDLNQLCDLLAQRLDKQNVNISKQSQPHDLRFACGLTDKVNSLRQRRVVLDRSKVSLPDTYYYQHALGHIIISPSHSNVEVCIVASEENIDALTDYVCRHVIKHEQITWQETNASHHMETTVMSSDGIKLGLSAYANCYHHIGHMTNLRWDLNRLWQYPIFNGYSQALATSFNAQTVLGNSTMNTFYALPAYLWNDVQSVLSQHELDALTYDLEVFTHTGQLPEIEGRQVESKQWIALLMNLGIKQHSVDAIVSHMPTQQIDRQLSQLAQFFSQQSNAFPSKQDYRQTYLKQHQ

SEQ ID NO: 86783 - protein, 508 aa, Colwellia sp.
  misc_feature (1)..(508): tr|A0A2N1IGC3|A0A2N1IGC3_9GAMM Tryptophan halogenase OS =Colwellia sp. 12G3 OX=2058299 GN=CXF71_07485 PE=4 SV=1
MSQSTANRQNKIKKIVIVGGGTAGWMTASALSKILGSNYCDIQLIESDQISTVSVGEATIPQISLFNKILGIDENDFVKKTQGSFKLGIEFIDWTKKGGGYMHPFGDHGTNMDAIQFHHYWLKMHQQGKGPDLEEYSLAAVAARQGKFMRPQNRGNSPLSQINYAFHFDATLYAKYLRDFSVERGVTRTEGKVVNVSVRDSDGFIDSVYLENGERVAADLFIDCSGFKALLIEGALKTGFDDWSDVLPCDRAVAMPCMPKEADVLHPYTQAKAQKAGWIWRIPLQHRVGNGYVYPSKFVSDEEAVKILTEQMEGEPIGEPNFLRWTTGVRKKSWNKNCIAIGLSAGFVEPLESTGLHLIQSSIAKLMALFPHQGFDQIDIDTYNQQTKTELEYIKDFIVLHYKATDRDDSEFWRDCQQMKVSDRLQAKMDLYQKNGRIYREDNELFNETSWLAVMHGQGLTPSGYHPLVDVLSEEEIERRLQHIYSVIQKSVETMPMQKDFIDKYCKA

SEQ ID NO: 86784 - protein, 495 aa, Alteromonas sp.; identical to SEQ ID NO: 84932
  misc_feature (1)..(495): tr|A0A2D7GVQ5|A0A2D7GVQ5_ALTSX Tryptophan halogenase OS =Alteromonas sp. OX=232 GN=CL600_10335 PE=4 SV=1

SEQ ID NO: 86785 - protein, 95 aa, Pseudomonas sp.
  misc_feature (1)..(95): tr|A0A2N8BRW3|A0A2N8BRW3_9PSED Tryptophan halogenase (F ragment) OS=Pseudomonas sp. FW306-2-11AA OX=2070663 GN= C1X97_30545 PE=4 SV=1
MTESPLGEIAHAYHFDASLYARYLRGLSEGRGVRRIEGKIVDVRLRGEDGFVEAVVMESGEVVAGDLFLDCSGIRGLLIEQALHAGYEAWGEWLP

SEQ ID NO: 86786 - protein, 503 aa, Xanthomonadaceae bacterium
  misc_feature (1)..(503): tr|A0A4Q6GB88|A0A4Q6GB88_9GAMM Tryptophan 7-halogenase OS=Xanthomonadaceae bacterium OX=1926873 GN=EOP92_38245 PE=4 SV=1
MQNAPIKDIVIVGGGTAGWMTAAALSTMLNGRYNIRLVESDDIGIVGVGEATIPMIQRFNRVLGIDEHEFMRETQGSFKLGVEFVNWGRLGDRYMHGFGRLGQDLATVPFDQYWQRMHMAGKAAPLEEYSITRMAAKANKFMPPRFDVQNSPLRDINYAYHFDAGLYAKFLRKLAESRGVTRIEGKITRATLREPDGHVDAVELENGARVEGELFIDCSGFRGLLIEQTLETGYEDWTRWLPADRALAVPCESAAAMTPYTRATAHKSGWQWRIPLQHRTGNGHVYCSRFISDDEAASTLLANLDGKALAEPRLIKFQTGMRKQAWNRNVVAIGLASGFLEPIESTSIHLIQSSIQRLIDFFPDRRFSPVDRDEYNRQARFEYERIRDFIVLHYHLNQRTDSDYWKECANMAIPDTLRHKMAMYRSHGRVVRVDNELFSEVGWIQVFEGQNMPIDGYHPLANTQSEEDVAEYLASVRDVIAKCVEVMPSHDDYIAKMCAAKKM

SEQ ID NO: 86787 - protein, 318 aa, Alteromonas sp.
  misc_feature (1)..(318): tr|A0A3D5F4K1|A0A3D5F4K1_ALTSX Tryptophan halogenase (F ragment) OS=Alteromonas sp. OX=232 GN=DGF36_02960 PE=4 SV=1
VLQHDNGDIKALRLASGELIEGDFFIDCTGFKGLLIEETLHTGYEDWSHWLLCDSACAVQTTSTEPAAPFTRSAAHPAGWQWEIPLQHRTGNGNVYSSAFMDDNAASEQLMQNVKGEAITTPRTLRFKTGRRNKTWHRNCLALGLASGFVEPLESTSIHLVIMGITRFMQLFPHGGNDQALADEYNQQTQLELERIRDFIILHYHVTQRDDSPFWEHCKNMTVPDSLQTRITLFKEQAHAFQKQNELFRVDSWAQVMLGQGVTPDSHHPAAAMLSDAQLHQSMQQQRQRVLQAVAQLPAHGEFIRRYCATPQKAEVLS

SEQ ID NO: 86788 - protein, 523 aa, Xanthomonas oryzae
  misc_feature (1)..(523): tr|A0A0K0GQJ7|A0A0K0GQJ7_XANOP Tryptophan halogenase OS =Xanthomonas oryzae pv. oryzae (strain PXO99A) OX=36009 4 GN=PXO_02802 PE=4 SV=1
MTMPDTLPSDPQQRAVRRVVIAGGGTAGWMAAAAMSKLLGRHLQITLVESDEIGTVGVGEATIPSLVTFHRLLEIDEAAFMAATQATIKLGIAFEHWRDVDRHYIHSFGHAGTDHWSAGFQHFWLKGQQRGVARDFGDYCLELRAAQEGRFAHLPNGGMNYAYHLDAGLYARFLRRFSEGFGVTRIEGRIGQVETDAESGFLTALTLQDGTRVEGDLFLDCTGLAGLLIGKTLGVGSDDWSRWLFADSALAVQTEAVGPPVTYTRSRADQAGWMWRIPLQHRVGNGIVYSSRYMDQDSARAVLERNLTGRALTEPRPLRVTPNQRHRVWEKNCVALGLASGFLEPLESTNIHLIQRGIIRLLQTFPQVINAVDIAEYNRQAAQEITHIRDFVILHYHATDRRDTPFWRDCAAMDIPDSLRHRVELFRQSGRVFHQANELFAENSWVQVMLGQGIVPQQHHPVADLMGDAELSRFLDTIHTRVEAALVRLPAHADFLQRYCPAPPPPEPAARLPAPPVMAPPAG

SEQ ID NO: 86789 - protein, 508 aa, Saccharophagus degradans
  misc_feature (1)..(508): tr|Q21G69|Q21G69_SACD2 Tryptophan halogenase OS=Sacchar ophagus degradans (strain 2-40 / ATCC 43961 / DSM 17024 ) OX=203122 GN=Sde_3053 PE=4 SV=1
MKVKKVESILVVGGGTAGWLTAGIIAAKHGTSVSITVVESPNIKTVGVGEGTWPTMKTTLQEMGVSETDFLRQCDASFKQGAKFCQWKTGEQSDYYYHPLMLPRDFDEFNSAPFWLDQKSGESFSNSVCFQQALCEKNLAPKTLTMPEYAGAANYAYHLDAGKFAPFLTHHCTKKLNVTHVKATVENVKLTDSGEIDYLLTKEAGQLEADLYIDCSGFCSLLLGQALDVPFVDKSDILFLDTAIATHVPYPTENSAIAPHTLSTAQTSGWIWDIGLQSRRGVGHVYSSKYIDDQTAKQQLADYLCTDVQSLETKTIPMPCGHREKFWQKNCVAIGLAAGFLEPLEASALVLVEMSAQFIRDQLPAHTSIMPIVEKRFNTTFHYRWQRIIDFLKLHYVLSQRRDSEFWCAQQDACSIPESLQELLNLWQYQPPWRHDFLHKDEVFPAASYQYVLYGMGFKTHCREDEVNKARYQQLLEETSFTKHRAIKALPPTRELLNTLHQHRMQVI

SEQ ID NO: 86790 - protein, 510 aa, Erythrobacter sp.
  misc_feature (1)..(510): tr|A0A547PA19|A0A547PA19_9SPHN Tryptophan 7-halogenase OS=Erythrobacter sp. JBTF-M21 OX=2584124 GN=FGU71_03390 PE=4 SV=1
MTAAKTGKPIQSITIVGGGTAGWMTAAALSRLLSGIPGLSIKLIESEAIGTVGVGEATIPQINSFNTLLGINEHEFVRETHATYKLGIEFVDWTRLGHSYVHPFGSFGLDMYGIEFHHYWHRGLAAGDSSGLNDYSISGMAGKLDKFMHPQHNNPKSALSKLGYAFQFDAGLYAKYLRRMAETAGVERIEGKIVHVAQHSDTGFVTHVKLDDETEIGGELFIDCTGFRSLLLGEVLGVGFEDWSKWLPCDRAVAIPCSLGGKNEALTRSTARPAGWQWRIPLQHRLGNGHVYSSAHMSQDEATDLLVANLDGAPLADPNHLRFTAGYRHKAWDKNVVALGLSAGFLEPLESTTIHMVQTGIARLMTFFPTTDFSAPEIAHFNKQNVQDYVDIRDFLLLHYTATERDDSEFWNYCRNLEPPSGLADKLEMFRSSGRIIREHNELFTEASWLAVMTGQGIKPGGWNTANSVIDDAETLKRLAHIRHVVSSTVQQMPSQAEFLAANGSAIAAR

SEQ ID NO: 86791 - protein, 51 aa, Xanthomonadaceae bacterium
  misc_feature (1)..(51): tr|A0A4Q6GCE7|A0A4Q6GCE7_9GAMM Tryptophan halogenase (F ragment) OS=Xanthomonadaceae bacterium OX=1926873 GN=EO P92_38030 PE=4 SV=1
MSGAIKEIVILGGGSAGWLTAAVIAAEHQSASGAGLKVTLIESPDVRTIGV

SEQ ID NO: 86792 - protein, 314 aa, Alteromonas sp.
  misc_feature (1)..(314): tr|A0A359K0B8|A0A359K0B8_ALTSX Tryptophan halogenase (F ragment) OS=Alteromonas sp. OX=232 GN=DEH24_02855 PE=4 SV=1
MTSASQPVRKVVIVGGGTAGWLTAGRIAAEHATKAHHPVEVVLVESPNIPTIGVGEGTWPTMRNTLIKLGIRETDFIRECDASFKQGAKFAGWVTGDTDDFYYHPLMLPQGFSQGNLGPYWQQHQDTIEQSFSNAVCFQEALCEHNRAPKSIRHAEFGAVANYAYHLDAGKFTSFLTRHCTEKLNVRHVLADVTGVTAHDNGDIRAIQTQQAGEIGGDLFVDCTGFQSLLLGKHYKVPFVPCDDVLFIDRALAVHVPYDSPDAPVATHTISTAQQAGWIWDIGLQSRRGVGHVYASRYQSEQQALDQLAQYVGP

SEQ ID NO: 86793 - protein, 239 aa, Burkholderiaceae bacterium
  misc_feature (1)..(239): tr|A0A5C7NYD1|A0A5C7NYD1_9BURK Tryptophan 7-halogenase (Fragment) OS=Burkholderiaceae bacterium OX=2030806 GN= E6Q92_08230 PE=4 SV=1
MDDINRSLRRIVVVGGGSAGWMAAAALSRAVQRDCTIVLIESDEIGTVGVGEATIPPIQTFNAMLGIDEAEFMRRTQGSFKLGIEFVNWGAQGHRYFHPFGPHGHQFDLSPQHQYWLRSRHQPGAAGLDDHSMAWAAASRGRFDKPSRDPRTVQSTFDYAYHFDAGLYARFLREVSESRGVQRLEGKIARVDLRSGDGFVQSVHLEDGRDVAGDLFIDCSGFRGLLIEDALHTGYEDWT

SEQ ID NO: 86794 - protein, 508 aa, Cellvibrio sp.
  misc_feature (1)..(508): tr|A0A2T6FFS8|A0A2T6FFS8_9GAMM Tryptophan halogenase OS =Cellvibrio sp. 79 OX=1954207 GN=B0W54_11975 PE=4 SV=1
MTTSINPLKKIVILGGGTSGWIAASMLAAHLKPGFCEIELVESEDIGSIGVGESTIPPVVRLVTSLGIDEEEFIRETQACYKLGIKFVDWRVKSQSYFHPYGTLGKRIGSQDFYQCWLKATKEGDVYDLQDFSPCAVMAAQEKFFLPSQAMNTPIGGAGYAVHLDAKLVAAYLRRYAEARDVKRSEGNCINVVRKENGFIEALELSDGRKIHGDFFIDCSGFKSLLIEQAMGVAFEDWSHYLPCDRAYVVKTEKAGSRMPYTTATARKSGWAWRIPLRNGTGHGYVYSSRFCSDAEAKTTLLKNLDAARINDPRMITFNTGRRKEFWKDNCLALGLSGGFIEPLESTAIHLIARGMDFFLRFFPDADCDRSLQREYNRRMAADYEEVRDFIVLHYCTTEREDTEFWRWCKTMELPDSLNERIELFRGHGILRENNDELFRPASWQSVFEGMGIRPQKYNPRIDNLDYQQISETLKLARSAIFNMVKSLPSHDEYLAEHYGLDPESPKN

SEQ ID NO: 86795 - protein, 509 aa, Thalassotalea agarivorans
  misc_feature (1)..(509): tr|A0A1H9YAF5|A0A1H9YAF5_THASX Tryptophan halogenase OS =Thalassotalea agarivorans OX=349064 GN=SAMN05660429_00 146 PE=4 SV=1
MTTNNSIKNIVIVGGGTAGWMTAAAFSKVLGDQYCNITLIESDAIGTVSVGEATIPQIQLFNRILDIDENEFIKQTQGTFKLGIEFVDWLRKGHSYMHPFGTIGNDMDAIPFHHYWLKAHQQGKVPNLDSYSLASQAARQGRFVRPQNMGNSPLSQITYAFHFDATLYAQFLRNYAEQRGVVRKEGKIVDVVLRHSDGFIDSVVTEKGEHLNADLFIDCSGFKGLLIEQALETGFEDWSHWLPCDRAVAMPCMATKESLPYTISTARDAGWTWRIPLQHRVGNGYVYPSKFVSDDEAVAILRKSMESEPIAEPNFLRWTTGIRKKGWNKNCVAIGLSAGFIEPLESTGLHLIQSAIAKLLGFFPSQGFAQEDIDAYNSQLTVEMERIRDFIILHYKATEREDTPFWQYCKHMEVPEYLTKKMDLYRANGRIYRQDGELFNETSWLAVMQGQGVTPAGYHPLVDVLSQQELERRLMHIKSVIDKSVTLIPKQQDFIDKYCKAESMKKEMV

SEQ ID NO: 86796 - protein, 511 aa, Massilia sp.
  misc_feature (1)..(511): tr|A0A086WCI7|A0A086WCI7_9BURK Tryptophan halogenase OS =Massilia sp. BSC265 OX=1549812 GN=JN27_07685 PE=4 SV=1
MNDKPIRRIVIVGGGTAGWMTAAPLAQRLARRADAPCEVILVESPEIGTIGVGEATLPTIRFYNAALGLDPDNFVRQTKASYKLGIEFTDWGRVGNRFFHGFGDFGPSLGKHPTYMYWLRMAAQFNNMPALENWSVSSMMARTNKFVPPDERTPSPVLDTYSYGYHFDAGLYANHLRDYAIARGAQRIEGMVVEVEQHPESGYITALKLRDGRRIEGDLFVDCSGFRGLLIEGALKAGYEDWSEQLPCNSALAVPCASAAALTPYTRSSAKEAGWTWRIPLQHRTGNGHVYSNAFTSDERAREVLLDSLDGDALDEPRQLRFVTGRRKKSWVKNCVAVGLSAGFVEPLESTSIHLIETAVGKLVELFPDRECRPELADEFNRAMGVRYESVRDFIILHYKLTERDDSEFWRYCANMPIPDSLRHQIELFRETGRVAILDRDGFAEPSFVAMLMGLGVVPKRYDPFVDGVDIRQVHGHFAGVRDMIAQGVNRMPAHDAYIAGQVKGASPRAA

SEQ ID NO: 86797 - protein, 279 aa, Alteromonas sp.
  misc_feature (1)..(279): tr|A0A349Z745|A0A349Z745_ALTSX Tryptophan halogenase (F ragment) OS=Alteromonas sp. OX=232 GN=DCW59_13475 PE=4 SV=1
LIDGAMQSEFVDWHHYLPCDRAIAVQTKLAGAPDPFTRSTADDAGWRWRIPLQTRLGNGHVYSSDFMEQDEALQKLLAGVEGEPVTQPLPLKFRTGHRKAFWDKNCVAIGLAGGFIEPLESTSIHLTQMGIQRLVNLWPGRGCNRSEIAQYNALMTADYERLRDFIVLHYNATEREDTEFWRYVKHMAIPDSLAAKLEIFRSNGRLIPSPEDLFTPHSWLAVMLGQGLYPQNYDVLVDRVPAQALLKNMQMLRMSVAKTAGSMPTHEEFIRRYCQASAA

SEQ ID NO: 86798 - protein, 505 aa, Xanthomonas axonopodis; identical to SEQ ID NO: 85881
  misc_feature (1)..(505): tr|A0A3S4RYB5|A0A3S4RYB5_XANMN Tryptophan 7-halogenase OS=Xanthomonas axonopodis pv. manihotis str. CIO151 OX= 1185660 GN=XANMN_14920 PE=4 SV=1

SEQ ID NO: 86799 - protein, 523 aa, Streptomyces netropsis
  misc_feature (1)..(523): tr|A0A445NJY6|A0A445NJY6_STRNE Flavin-dependent tryptop han halogenase RebH OS=Streptomyces netropsis OX=55404 GN=rebH PE=4 SV=1
MDSHVRRVVVVGGTASGWVAAARLASAFHGTVSVAVLETPQRAAAVSATGQAAVVAPELQRGLFDRIGVPEEEWMRACCASFKAAVRYVNWRTEGAAETTVRITGNGGEDHFYRPCAEMPRCAELPLSDFWRHRRHEGGTTEPYDYACFREPPLLDARKSPRRLDGRTAVPYGWHVDVRMFTQFLRKTAMREFGVRSVRGKLLRAERDARGMLTALHTVGGASVAGDLFLDCTGTESLLLAGVLGEPFLDARDRLLCDSAVTVTVPHDDAAHGIDPFTTATAMPDGWAWRMPLPGRFAAGLVHARDLTAPQEAADRLCALWGLRPGHATVRHLAYRTGRSRRAWVKNCVALGPAASFVEPLADEGLADVLHMVDRLVRDFPSRDGAEAPAARFNRAAQARYARARDFAQLLYSAAPRADTPFWRAQRELPLSDALEEYLVGHRAGLSPEAGEAPYEALLAALAPRRAAPPAALAHRPAARRTADAEFSRIRRQQRILLETLPGAHEYLHRLHTRPVPAAAVTV

SEQ ID NO: 86800 - protein, 159 aa, Burkholderiaceae bacterium
  misc_feature (1)..(159): tr|A0A5C8B7R5|A0A5C8B7R5_9BURK Tryptophan halogenase (F ragment) OS=Burkholderiaceae bacterium OX=2030806 GN=E6 Q34_02505 PE=4 SV=1
MADNRIQDIVIVGGGTAGWMSAATMAQLLPNGHRIRLIESDLISTIGVGEATIPSIRNFNMHLGIDENDFLRNTQGTFKLGIEFVNWGVKGTKYFHGFGSVGRDQPMANFYHYWLKMNQLGLVDGLEPFSINPVASLMGKFSVGRPDLPNSPLSDLSYA

SEQ ID NO: 86801 - protein, 498 aa, Erythrobacter sp.
  misc_feature (1)..(498): tr|A0A547PA17|A0A547PA17_9SPHN Tryptophan 7-halogenase OS=Erythrobacter sp. JBTF-M21 OX=2584124 GN=FGU71_03400 PE=4 SV=1
MSVPRAPLKRIVVAGDGQLGSLAALAIKQALPFAEVIIIGTPFDNGALADRSPTALPFTNRFHDRLGLQEAVLLLRAGGCHRLVLRYIGWGGQDSAGTLQHGAMPYGLSNDASLKTRFAQEWGGGSRSGTEGQSNAQFAGSVAEVLSGRGRFAILPAEPPTPLREIDYGLRWNPTAYRDVIIEMASAAGVRHVSGEISGTVPDGQGGLSALTIDGTGAIEADFFVDCTGPSAMLLSGTAPIKRDDWREYLPIRQLAFAQPVKPVLSLEDRVSLPQYGWLNELAGRDALQLMLALPDGVSDQQIIEMLGQPPADSVSLNPGAVREPWVGNVAALGDATAQFEPLGFLNLDLAHRQLELLLEMLPGQVIDPRERAEYNRRAGLMAAGVRDVLGLHYAAPAAVKRFGARKQSAHLERLLDQSSRRGRIPFAEELPFANQELSALLAALGIGGGLTPLASAEGSGAAHQSRSAFEAKAQAALHAAPPYGEWLGRFLQSNQPR

SEQ ID NO: 86802 - protein, 503 aa, Saccharophagus degradans
  misc_feature (1)..(503): tr|Q21GW5|Q21GW5_SACD2 Tryptophan halogenase OS=Sacchar ophagus degradans (strain 2-40 / ATCC 43961 / DSM 17024 ) OX=203122 GN=Sde_2807 PE=4 SV=1
MKPLQKIVILGGGTTGWMCAAMLANSVNTKRINIELVESEQIGTIGVGESTVPPFMDMLASLGIDEVEFIQATQATFKLGIQFKDWLKKDETFFHPFGRAEAGMDELSLYHLWLRAQLNGDTFSRFLDYSPNSVMAQQKRFAPYKAVPGTLLADSRYALHLDAGLVAKYLRNFAQQKGVKRTEGKVEKVNTSIDTAPRILSLQLESGQTINGDFFIDCSGFRALLIGDALQSSFTDWSTYLPCNRAVTVQSEALPELPPYTKATAQLAGWQWRIPLQHRTGNGYVYASKYISDEQATQTLLSNIQGKTLTEPRIIPFTTGMRKQVWKANCIGVGLAAGFIEPLESTAIHLAMRGIAEFLQQFPHSDCNPALINEYNARLQQDYEEIRDFIILHYAATERNDSDFWAYCKNVDWPASLVQTVEYFKARGDVPRKLAPLFESTSWRSLCEGMNIRPSAYSAFIENADYKASKQHMQNYKQQLVSLVKQIPTHKAFIEQNCASSSK

SEQ ID NO: 86803 - protein, 532 aa, Burkholderiaceae bacterium
  misc_feature (1)..(532): tr|A0A5C8BB50|A0A5C8BB50_9BURK Tryptophan 7-halogenase OS=Burkholderiaceae bacterium OX=2030806 GN=E6Q34_02625 PE=4 SV=1
MHSVKQILIVGGGTAGWLTAAFLARQLASNRTHGIQIRLVESPEIGIIGVGEGSFPSIRGTLAAIGIDEARFVRECHATFKQGIRFDDWLHTPRAQVPHRSQQHYFHPFNQPSQRQGTPDLLPYWLHGVAGTALPFAQAVSMQKRIADASRAPKRISDANFMGPMNYAYHFDAALFAKLLATHAKSLGVQHLLGNVQQVELAEDGAIAAVHTAEHGALRADLYIDCTGFRARLIGQALDSEFHSVSDTLFVDRALAVQVPYPSNDSPIPSYTISSAQEAGWIWDIGLQERRGVGYVYSSRHTDQARAEQILRQYLGNQAEHQQARLLELKLGYRPRPWIKNCVAVGLSGGFLEPLEASGIGLVETAAYLLAYLFPYHGEFEVSAQHFNQQMVQRYERIVDFIKLHYCISQRRDHRFWIDNTDEASIPQSLRDKLSLWRHRPPHRLDFVTDLEMYPPSSWQYVLYGMHYPTQIHPSMLDASKLVLVEQEFAAIAAMSQRATQDLPDHRAYVAQLCRKAESQSETKKTISYAMR

SEQ ID NO: 86804 - protein, 520 aa, Micromonospora deserti
  misc_feature (1)..(520): tr|A0A2W2DLV9|A0A2W2DLV9_9ACTN Tryptophan halogenase OS =Micromonospora deserti OX=2070366 GN=C1I99_05240 PE=4 SV=1
MINNVVIVGGGTAGWMTASYLSATFGPQISVTLVESKNVPTIGVGEATFSTIRHFFAYLGLEERDWMPECSATYKLAIRFENWREPGHHFYHPFERARVIDGFPITDWWLRQRGTGHFDDDCFVIPALCEKKSSPRFLDGRIFEQREGDDGSGLAGRSTMTEQRTQFPYAYHFDAALLARYLTRYGTARGVRHVLDDVTDVVLDQRGWISHVTTAEHGELHGDLFIDCTGFRGMLINKALEEPFQSYQETLPNDSAVALRVPLDMASYGLRPCTTATAQDAGWIWTIPLFGRIGTGYVYARDYTSPDEAERTLREFVGPAAEGMEANHIRMRIGRTRNAWVRNCVSIGLSAGFVEPLESTGIFFIQNGIEQLVKHFPDKNWNDQLRTSYNSHMARMMDGVREFLVMHYYAARRENNQYWKDAKTRPLPDGLAERIENWKVRLPDSQSIFPYYHGFESYSYHAMLLGLGGLPLQAPAALSAIDGTAAEKAFELIGQEARDLTDQLPSQYEYFAHLRKLPTP

SEQ ID NO: 86805 - protein, 498 aa, Alteromonas sp.
  misc_feature (1)..(498): tr|A0A359K6L6|A0A359K6L6_ALTSX Tryptophan halogenase OS =Alteromonas sp. OX=232 GN=DEH24_13935 PE=4 SV=1
MNKPGNSSNKVNNVIIAGGGTAGWMAAAALSRLIGKSVNVTLVESKDIGIVGVGEATIPPIRTFHKLLGIDEKAFMRATNATFKLGIEFANWREPDHAYIHSFGVTGRECWAGEFHHFWMRAQQEGLGSAFGDYCFELKAAQQYKFGMSERMPINFAYHFDAVAYGKFLRQFAEKLGVTHVEGDIDKVNVNVTSGDIESLTLKDGRNLAGDLFIDCTGFKGLLIEQALHTGYENWSHWLPCDRAVAMQTESVEAPAPFTRSVAHEAGWRWQIPLQNRVGNGLVYCSRYMSDEQAKQTLMDQVTGNPINDPRVIQFTPGKRRLGWNKNCVALGLASGFIEPLESTSIHLIMTGIIRLLRLFPFDGVTQSAIDEYNNKYNSEMAAILDFIVMHYKVTNRDDSLFWQHCQRMAIPDSLTHKINLFKETGRVFLDDGDIFRVDSWTQVMLGQGLVPEQYHRVADEMSIEELTRFMNGLHQHVSQQVQALPAHGDFLKQYLGM

SEQ ID NO: 86806 - protein, 504 aa, Sphingomonas sp.
  misc_feature (1)..(504): tr|A0A0Q4TRA2|A0A0Q4TRA2_9SPHN Tryptophan halogenase OS =Sphingomonas sp. Leaf257 OX=1736309 GN=ASF14_12095 PE= 4 SV=1
MTTPSPDAIRSVVIVGGGTAGWMTAAALAHASPRGLSITLVESDAIGTVGVGEATIPPIRLFNQTLGIDEAEFLRETKGSFKLGIEFVGWGRAGHRYFHPFGTHGKSFDLVAVHQHWLAAGGPGSGIAFDDLSMAWGAGQRGRFAAPMADPRSVASTFDYAYHFDAGLYAQFLRRYAEARGVVRVEGKIAGHALEEVRGHVASVTLDDGRVLAGDLFVDCSGFRGLLIEEALGTGYEDWTHWLPCDRAVAVPCETGGDGLTPYTRSTAREAGWQWRIPLQHRTGNGYVYCSRHISDDQAAATLMAKLDGAALGDPRFLRFTTGRRKRMWNRNVVAIGLSSGFMEPLESTSIHLIQAGIAKLLAYFPTQAFAPAAIEEYNRVAITEYERIRDFLILHYKLTERTDAPLWRECAAMPIPDTLAMKIAHFRESGRLVARDMDLFGPASWAAVHIGQFNMPEGLDPLLAYGDPAQSRGFVAKLAGAIGQMAESMPTHAQWLTKIGATI

SEQ ID NO: 86807 - protein, 459 aa, Xanthomonadaceae bacterium
  misc_feature (1)..(459): tr|A0A4V2BK64|A0A4V2BK64_9GAMM Tryptophan 7-halogenase OS=Xanthomonadaceae bacterium OX=1926873 GN=EOP92_15285 PE=4 SV=1
MRDTLRRTGVTETDFVRECDAAFKQGSKFARWTEDRDDDYYYHPFVLPQGYLETNVVAGWQERSEIPFGKLVSFQPHLCEAGKAPKQFSTPEYAAVANYAYHLDAGKLGVFMRKHCVGKLGVRHVSDHMTSVNTHENGDIASLQTREHGAIQGDLFIDCTGMRSLLLGQHYGIEMVSQKHVLFNDRAIALQVPYADPESPIACQTISTAQRNGWIWDIGLQSRRGIGHVYSSTHTTDEAAEQELLRYVAATGGQVQDMVELPRITIRPGYRERSWHRNCVAIGLSSGFMEPLEASSLVLVELAAGMLSDQMPATREAMDTVAARYNDTFAYRWERVVDFLKLHYVLTKRTDTDYWRDNCRPETIPDRLQELLRFWRQQPPSRYDLHRVEEVFPSASYQYILYGMGFKPDARPTTRRIDDVRQAEGYYREAADMTRKMLSALPGHRELLDHINSRGLPRI

SEQ ID NO: 86808 - protein, 413 aa, Streptomyces sp.
  misc_feature (1)..(413): tr|A0A1Q5CSD2|A0A1Q5CSD2_9ACTN Tryptophan halogenase OS =Streptomyces sp. CB02058 OX=1703921 GN=AMK10_34645 PE= 4 SV=1
MSTQEEFDVVVIGGGPGGSATAGLLAMRGHSVLVLEREKFPRYHIGESLITGLMPTLEELGLLERLEGMGFTKKYGGTLLWGKNQGTWGFRFHESALYDHAYQVRRADFDALLLARARELGVTVLEEAAVKAPVFDGDRVVGVTYTEKGSKEVRTARSRMLVDASGQNHLLGREFDLIHYHDDLRNIATWSYWQGCNRYGGNRAGDIVSENRPSGWFWYIPLHDGTVSVGYVTPIDEYKASGESLEDLYTKELAQTEEIKTLMAGARRVSGFRNIKDWSYTCEKFHGPGWALVGDAAAFIDPLLSTGVTLALRGSRALAEAVDEALTDPSAEKDVLDWYEHSYRSFLDSVLDFVRFFYDRTKNKEDYWDKAQEQIDPDKLRPREVDFARMLSGLTGIDDIFDKRRRKRGSEAA

SEQ ID NO: 86809 - protein, 106 aa, Alteromonas sp.
  misc_feature (1)..(106): tr|A0A349Z1E2|A0A349Z1E2_ALTSX Tryptophan halogenase (F ragment) OS=Alteromonas sp. OX=232 GN=DCW59_03265 PE=4 SV=1
MSTKPLHVVIAGGGTAGWMTANLLAKHWLNQPVTITLVESPDIGIIGVGEGSTPTLKRFFSDMGIAEQDWMPACNATYKVSIRFEGWSPGANIPAYSHPFISQLDT

SEQ ID NO: 86810 - protein, 502 aa, Sphingomonas sp.
  misc_feature (1)..(502): tr|A0A4R2U419|A0A4R2U419_9SPHN Tryptophan halogenase OS =Sphingomonas sp. PP-CC-3A-396 OX=2135655 GN=C8J40_1033 94 PE=4 SV=1
MKRVQRLVILGGGTAGWMTAAALGATFGDLVKISILESDAIGTVGVGEATIPTIHWFNQLIGLEEAAFVAATKASFKLGIEFVDWARPGTRYFHPFGRYGVDLGPVPFHQHWLRARADGLDRPLSAYSLAAQLAAAGRFAKPVDDPRSILSTLGYAYHFDAGLYARHLRQLAEKRGVVRHEGLLRDIERDPETGFVTALTNDRGERLEGDLFIDCSGFRALLIGETMGAQFEDWSHWLPCDRAVAVPCARIAATTPFTRSTLRPAGWQWRIPLQHRTGNGYVYASSFVSDDEAVATLLSNLDGEALADPRMLRFTAGFRREAWRGNVVAIGLASGFLEPLESTSIHLIQSGIAKLITLFPDADCDPALARQFNTLLARDMDGIRDFLILHYHATQGHDAPLWRHTRHMTPPPTLIDKMTQYARAGRLMLSADELFREASWLAVLEGQGVGALGHAPLADTLDAVTNRRQLDQIETVIARATPTLPLHDVAIAALVDPQVAAR

SEQ ID NO: 86811 - protein, 509 aa, Alteromonas sp.
  misc_feature (1)..(509): tr|A0A2D5BYM1|A0A2D5BYM1_ALTSX Tryptophan halogenase OS =Alteromonas sp. OX=232 GN=CL593_03860 PE=4 SV=1
  misc_feature (4)..(4): Xaa can be any naturally occurring amino acid
  misc_feature (154)..(154): Xaa can be any naturally occurring amino acid
  misc_feature (188)..(188): Xaa can be any naturally occurring amino acid
  misc_feature (229)..(229): Xaa can be any naturally occurring amino acid
  misc_feature (504)..(504): Xaa can be any naturally occurring amino acid
MQNXKKNPIKRVVIAGGGTAGWLTASLMKKVLGEAVNITLVESEVIGTVGVGEATIPPIRLVNQVLGIDEAQFLYETKATIKLAIKFENWKTKGQSYYHTFGAPGKAMAFCHFHHYWLKGQQLGKTQDLWDYDLNYHAAEAGKFAPINAKDPLXELPFAYHFDASLYAKYLRKLSESMGVVRIEGKIXSVERDNVNGYIKALRLDNKNRIEGDLFIDCTGFKGLLIQEXLGTGYDDWSHLLPCDSAIAVPSERHESTRPFTRSIAHDAGWQWRIPLQHRNGNGHVFCSRYVSEDHALDTLMGNLDTKPLADPKLIKFTTGRRRKQWNKNVVSVGLSSGFLEPLESTSIHLIQSAIVRLIQLFPHNGITPSLEAEYNKQSALEFEQIRDFLILHYSVNERTDSAFFNDMRNLDLPDTLRHKIALFKENGSLFRDQNDLFLESSWLQVMYGQGITPNDYHGLVNTFSDEKLKEMLTRLLKIKREPLSQLPSHDEYLNGMVKRAKQXMSANA

SEQ ID NO: 86812 - protein, 490 aa, Sphingomonas sp.
  misc_feature (1)..(490): tr|A0A4R2TWF4|A0A4R2TWF4_9SPHN Tryptophan halogenase OS =Sphingomonas sp. PP-CC-3A-396 OX=2135655 GN=C8J40_1031 56 PE=4 SV=1
MTSRTPIASIAVLGAGVVGLSAAIAFARALPGLAVTLIETPDDPTALTDWLSGTLPSITAFHDRIGLRERDLLAAGATHRLGTRLSDWSGDGAPVVLAQGERGGAIAPGAFHQHWLNARRAGKTAAFDAFSVPAVLAAAEKFVHPSDDPNSPISGFGYALRLDPPRYRDLLRALARHIGIVPVPGAFAGVERGEDGRVSAVLLADGRRLVADLYVDCSGPAAPLRSALDTRWDDWRRWLPVDRLLLGTAPVQTLTPTDDLVAVPAGWRFASRLRDRTLVGLAYAADQTSDSSARRILPAGDTFVPLTPGARPEPWKHNVLALGDAAVVLDPLADANLYLAHAAILRAIDLLPGRDCAPTELAEYNQRSYRQAARVRDVQAAHYLPTGRTRGPFWKHASRLPRPDSLAHTLEHFAHRGRLPFYEDESFDKDDWHGLLLGLGIIPRIADPIASASPPETIAATLKRLAEATAALPARLPPYPLYLAQLERAR

SEQ ID NO: 86813 - protein, 505 aa, Pseudoxanthomonas sp.
  misc_feature (1)..(505): tr|A0A4Q9TGH4|A0A4Q9TGH4_9GAMM Tryptophan 7-halogenase OS=Pseudoxanthomonas sp. NML171590 OX=2527958 GN=EYC45_ 05000 PE=4 SV=1
MGDNRIGSVVVVGGGSAGWMAAAALATYLGRQARVRLVESEQIGIVGVGEASVPHMRTFNAQVLGLDEREFAQRTQATAKLGIAFEDWGRIGERYVHGFGTIGQSKGPLPFHQFWLKQFLAGRAEPIGAYSLQTVMAPLERFVPGVANAPAGSPLADIAYAYHFDAGLYAQYLRQVSEARGVERIEGRIVQVHQHPETGHVTSLVLDGGQQVEGELFVDCSGFVGLLIEQTLQAGYIDWSQWLRCDRALAVPCARSGPIAPYTRATARGAGWQWRIPLQHRTGNGYVYSSAYVDDDQAAATLLGHLDGAPQGQPRQLRFTTGMRRRFWQGNVVALGLAAGFLEPLESTSLYLAQSGISRLLALFPTRDFDPLLAQRYNRESAFEYERVRDFLILHYHATTREDTPFWRDCRTMQVPESLREAMELFAADGRYFRNGEDFFALPSWVQVMLGQGIVPRGYHPIVDDMPQEALARYVEGTRERLAEAVAAMPTHQQFLDRYWKAEAP

SEQ ID NO: 86814 - protein, 498 aa, Alteromonas sp.
  misc_feature (1)..(498): tr|A0A2D7GQ55|A0A2D7GQ55_ALTSX Tryptophan halogenase OS =Alteromonas sp. OX=232 GN=CL600_00275 PE=4 SV=1
MTNNTVTNVVVVGGGTAGWISAAVIKRLLGSQVNVNLVESEDIGTVGVGEATIPPIALLNNMLGLDEKEFLRETNATMKLAIRFENWKTQGDSYYHTFGAPGKSYAFCHFHHYFKRAQQLGLKDSIWEYDLNYLACEAGKFAHIKTPDPVIEMPYAYHFDASLYARFLRKKCEAMGVVRTEGVIERVEQHPENGFVKGVCLKNGQMINGDLFIDCSGFKGLLTQQTLNTGYEDWSHWLPCDRAVAMPSERFEKTVPFTRSIAHSAGWQWRIPLQHRNGNGLVYSSNYYSDDEALGILSANLETKPLADPNFIRFKTGRRRKQWNKNVIAVGLASGFLEPLESTSIHLIQSAIVRLIHLFPHHGVKQKQVDEYNEQSRIEYEQIRDFIILHYHVNERTDSQFWRDVREMDVPDSLTHKIELFRDSGNLFREQNDLFLESSWLQVLMGQGVSPNDYHPLANGISEQKLMDLMENIKRIKREPVSKIASHDEFLKQFCAQQ

SEQ ID NO: 86815 - protein, 498 aa, Saccharophagus degradans
  misc_feature (1)..(498): tr|Q21GU4|Q21GU4_SACD2 Tryptophan halogenase OS=Sacchar ophagus degradans (strain 2-40 / ATCC 43961 / DSM 17024 ) OX=203122 GN=Sde_2828 PE=4 SV=1
MKQNKIKKVVIAGGGTAGWMAAAAISKLLGKNLDISLVESDQIATVGVGEATIPALQTFHKLLGIKEPHFMAATQATFKLGIEFKRWKDTQSSYIHSFGAVGKDCWAAGFQHFWRRGVDLGVNHDYGDYCLELEAAKQNKFAHPNSGNIFYAYHLDATLYAKYLRKFSETFGVKRIKGKIVEVKTHLHNDYIKSLVLESGQEVEGDLFIDCTGFIGLLIEQTLQTGYEDWSHWLPCDSAVAVQTAATQAPIPYTRSTAHAAGWQWRIPLQHRVGNGLVYCSKHISDEEAKQTLLNNIEGELLTEPRVIKYRTGQRLKHWNKNCVALGLASGFIEPLESTSIHLIQRGILRLLFLFPSNGINDTDVAEYNQQTKAEIEHIRDFIILHYHVNQRNDSRFWRYCANMSIPETLAHRISLFKKSSRFYPKDDELFGEYSWVQVMLGQGIEPEGYHPIVDMMSEDELHHFLKNIRSSVQQALASMPQHTDYIQQYCKAPPIPI

SEQ ID NO: 86816 - protein, 491 aa, Saliniradius amylolyticus
  misc_feature (1)..(491): tr|A0A2S2E094|A0A2S2E094_9ALTE Tryptophan 7-halogenase OS=Saliniradius amylolyticus OX=2183582 GN=HMF8227_0056 8 PE=4 SV=1
MKVVIVGGGSSGWMAASILTRLMNQQLDITLVESEQVGTVGVGEATIPPITHFNRVLGISEAEFLKQTQGSIKLGIEFSDWYQPGQSYMHAFGQIGKNMGLAGFHHNWLKAKSEGQGGDFWDYSLNYQAAKANKFTHLNTIPNTQLQGLVQAYHLDAGLYAAYLRQLSEKQGVKRVEGFVESVTLVPETGFIDSLVLQSGQKIQGDLFIDCSGFRGLLIEGALKTGYEDWRHWLPCDRALAIPSEKLDPLPPYTRSIAHNAGWQWQIPLQHRTGNGLVYCSDYLSDEQAQELLLKNLSSDPLAEPKPIRFTTGRRVKQWHKNCVALGLSSGFLEPLESTSLHMVQSGLVRLIKLFPQNGISPVDVEEYNRQSKVEFERIRDFIILHYVLNNRPEAFWQRCRTMPIPDSLAHKIELFREGGKVFREQDELFTEVAWYQVMIGQGLLPQKYHPLADSLTTEQQADLLTGLKTLIDRTVQQLPTHQSFLDKIMA

SEQ ID NO: 86817 - protein, 509 aa, Alteromonas sp.
  misc_feature (1)..(509): tr|A0A2D6HPS6|A0A2D6HPS6_ALTSX Tryptophan halogenase OS =Alteromonas sp. OX=232 GN=CL591_01100 PE=4 SV=1
  misc_feature (4)..(4): Xaa can be any naturally occurring amino acid
  misc_feature (114)..(114): Xaa can be any naturally occurring amino acid
  misc_feature (123)..(123): Xaa can be any naturally occurring amino acid
  misc_feature (504)..(504): Xaa can be any naturally occurring amino acid
MQNXKKNPIKRVVIAGGGTAGWLTASLMKKVLGEAVNITLVESEVIGTVGVGEATIPPIRLVNQVLGIDEAQFLYETKATIKLAIKFENWKTKGQSYYHTFGAPGKAMAFCHFXHYWLKGQQXGKTQDLWDYDLNYHAAEAGKFAPINAKDPLLELPFAYHFDASLYAKYLRKLSESMGVVRIEGKISSVERDNVNGYIKALRLDNKNRIEGDLFIDCTGFKGLLIQEALGTGYDDWSHLLPCDSAIAVPSERHESTRPFTRSIAHDAGWQWRIPLQHRNGNGHVFCSRYVSEDHALDTLMGNLDTKPLADPKLIKFTTGRRRKQWNKNVVSVGLSSGFLEPLESTSIHLIQSAIVRLIQLFPHNGITPSLEAEYNKQSALEFEQIRDFLILHYSVNERTDSAFFNDMRNLDLPDTLRHKIALFKENGSLFRDQNDLFLESSWLQVMYGQGITPNDYHGLVNTFSDEKLKEMLTRLLKIKREPLSQLPSHDEYLNGMVKRAKQXMSANA

SEQ ID NO: 86818 - protein, 502 aa, Sphingomonas sp.
  misc_feature (1)..(502): tr|A0A0Q4UBW6|A0A0Q4UBW6_9SPHN Tryptophan halogenase OS =Sphingomonas sp. Leaf257 OX=1736309 GN=ASF14_06480 PE= 4 SV=1
MSDDAPISRIAIIGGGTAGWMAAAALARVLGPEGPAITLVESEEIGTVGVGEATIPPIQAFNALLGIDEDDFVRATQGTFKLGIEFVDWLRPGHRYFHPFGVYGIDKGAIPFEAMWQRLRLAGEALPLEAYSICAAAARSGRFMRPQPGNTPLAHIGYAFHFDAALYARFLRGHAEAAGVHREEGRVISVERGGPRDFIEAVLLADGRRIAADLFIDCSGFRGLLIEDAMGAGFEDWGHWLPNDRAVAVPTANVGPPTPFTRSTAHGAGWQWRIPLQHRTGNGLVYASRHLSDGEAATTLLAHLDGEPLSDPRPLRFRTGRRDRFWIGNCVALGLAGGFLEPLESTSIHLIQAGIARLLEMLPTRAFEPADTRRYNRLMAAEFDSVRDFLILHFHATERRDTAYWRKLASMDIPETLAERLAIHARTGRVYREADELFTKTSWLAVMDGQGLVANGHDPLAQGMPMDELRARLNRIAAVTQAAAGHMPAHADFLARHCSARR

SEQ ID NO: 86819 - protein, 536 aa, Yersinia frederiksenii
  misc_feature (1)..(536): tr|A0A0T9NM53|A0A0T9NM53_YERFR Tryptophan halogenase OS =Yersinia frederiksenii OX=29484 GN=ERS008531_00129 PE= 4 SV=1
MSKPIKNIVIVGGGTAGWMSASYLVRALQQQANITLIESAAIPRIGVGEATIPSLQKVFFDFLGIPEREWMPQVNGAFKVGIKFVNWRKSPDPSRNDYFYHLFGSVPNCDGVPLTHYWLRKREQGFQQSMEYACYPQPEALDGNLAPCLHDGSRQMSHAWHFDAHLVADFLTRWAVDRGVNRVVDEVVEVKLNDRGFISSLFTKEGRKLEADLFIDCSGMRGLLINQALKEPFIDMSDYLLCDSAVATAVPTDDAQVGIEPYTTSIAMNSGWTWKIPMLGRFGSGYVFSSKFTSRDQATADFLNLWGLSDNQPLNQIKFGVGRNKRSWVNNCVAIGLSSCFLEPLESTGIYFIYAALYQLVKHFPDTSFDLRLTDAFNAEIIYMFDDSRDFVQAHYFTTPREDTPFWLTNRHDLRLSDAIKEKVERYKAGLPLTTTSFDDSTYYETFDYEFKNFWLNGNYYCIFAGLGMLPDRSLPLLRLRPESNDKAEAMFARIQREAERLRANLPTNYDYLRSLHEGDSGLFRPGPTPASLEIP

SEQ ID NO: 86820 - protein, 110 aa, Xanthomonadaceae bacterium
  misc_feature (1)..(110): tr|A0A4Q2XR16|A0A4Q2XR16_9GAMM Tryptophan halogenase (F ragment) OS=Xanthomonadaceae bacterium OX=1926873 GN=EO P89_06690 PE=4 SV=1
MSARIQVVIVGGGTAGWMTAATLAMSFAGRLADVTLVESEDIGTVGVGEATVPHIRFFNQRLGIDEADFIHRTNATFKLGIEFRDWGRIGDSYIHPFGDFGHDIDGLPFH

SEQ ID NO: 86821 - protein, 463 aa, Alteromonas sp.
  misc_feature (1)..(463): tr|A0A3D0Q1E2|A0A3D0Q1E2_ALTSX Tryptophan halogenase (F ragment) OS=Alteromonas sp. OX=232 GN=DEP33_02960 PE=4 SV=1
VGEATIPTLMEFNDFLGIKEHDLLRECQGTYKLGIDFVDWYQKGQSYFHPFGFYGRDTPEFSFHQLWLRLNAMAAKGEIPADAPGIISDYNLCTVAAMQGRFAPPQGGADTILSTMRYAYHFDSARYGQMLRRYAEQRHVERIEGIVNSVEQDHSTGLLKSVTLNSGQVLQGDLFVDCSGFKALLIDGAMQSEFVDWHHYLPCDRAIAVQSKLAGAPDPFTRSTADDAGWRWRIPLQTRLGNGHVYSSDFMEHDEALQKLLAGVEGEPVTQPLPLKFRTGHRKAFWDKNCVAIGLAGGFIEPLESTSIHLTQMGIQRLVNLWPGRGCNRSEIAQYNALMTADYERLRDFIVLHYNATEREDTEFWRYVKHMAIPDSLAAKLEIFRSNGRLIPSPEDLFTPHSWLAVMLGQGLYPQNYDVLVDRVPAQALLKNMQMLRMSVAKTAGSMPTHEEFIRRYCQASAA

SEQ ID NO: 86822 - protein, 506 aa, Alteromonas sp.
  misc_feature (1)..(506): tr|A0A2G2PDR7|A0A2G2PDR7_ALTSX Tryptophan halogenase OS =Alteromonas sp. OX=232 GN=COB03_05745 PE=4 SV=1
MMSSVSDNLNAMGKGAKNSPVKRVVIAGGGTAGWMAAAALSKLLGKSLSITLVESKDIGIVGVGEATIPPIRTFHKLLGIDEKAFMRATNATFKLGIEFENWREQDHSYIHSFGVTGRECWAGEFHHFWLRANALGFGGDFGDYCTELKAAQEGKFAYGERMPMNFAYHFDAVAYGRFLKELAVEAGVTHIEGDIQHVSKCSHTGCISSIKLSDGQEIAGDLFIDCTGFKGLLIEKTLHTGYENWSHWLPCDSALAVQTASTGAPIPYTKSVAHTAGWRWKIPLQNRVGNGLVYCSNYMSDDEAKDTLLSAIEGETLNEPRIIRFTPGKRRLGWNKNCVALGLASGFIEPLESTSIHLIMTGIVRLMRLFPFDGITQSTVDEYNNKYNSEMAAILDFIVMHYKVTNRKDSPFWEHCNSMDIPPSLTHKINLFKQTGRVFLDDGDIFRVDSWTQVMMGQGVVPEQYHRVADEMSETELERFLAGLKQQVDKQVSALPYHQDFLKKYL

SEQ ID NO: 86823 - protein, 500 aa, Alteromonas sp.
  misc_feature (1)..(500): tr|A0A359KBJ7|A0A359KBJ7_ALTSX Tryptophan halogenase OS =Alteromonas sp. OX=232 GN=DEH24_18720 PE=4 SV=1
MHSPLKKIIILGGGSSGWMTAAALGKILKNHPCEIQVIESEDIGTVGVGEATIPQILLFNDLIGLDEDTFIKRTKGTFKLGIQFKDWRKVGHSYYHAFGEVGKNMEGVHFYHYWLKMRQQGKAAPLDEYTLSSLACNEKRFMRPFDAGNSPLSNIAYAFHFDAGLYAKFLRESAEGHGVVRTEGKVSQVTQHPNGDIRSLILENGEEHQADFFIDCSGFRALLIEQTLKAGYEDWRHWLPCDRAVAAPSALTEEPWPFTRAAAQQAGWQWRIPLQHRVGNGHVYSSEFMSDHDAERTLRENIDGELLADPRLIKFVTGKRNKFWHKNCLAVGLAGGFMEPLESTSLHLVQVAISKFFSFFPFQTPTQSDIDEYNAQMDFEFTRIRDFLILHYHVTEREDTPFWRYCKNMSIPDTLQEKIDQFKANGRINRFNNELFNDLSWFEVMYGQGLRPEGYNALADIFPDDELAKRLEGIQRVVRKSVDYMPSHAEFIANTCPAKP

SEQ ID NO: 86824 - protein, 478 aa, Xanthomonadaceae bacterium
  misc_feature (1)..(478): tr|A0A4Q6GQ97|A0A4Q6GQ97_9GAMM Tryptophan 7-halogenase OS=Xanthomonadaceae bacterium OX=1926873 GN=EOP92_15270 PE=4 SV=1
MAAAAISRMLGKTLDIKLIESEEIGTVGVGEATIPTLFTFHRLLGINEQEFMAATQGTIKLGISFENWLRQGHAYIHSFGTSGKDHWMGGFQHFWRRGRALGVAGDYEDYCVELKAAQQGRFAHLPNNGINYAYHMDASLYAKFLRKFSEGHGAQRIEGKIVEVVTDHDSGYITSLKLDGGAEIEGDLFIDCTGFRALLIGKTLNVGYADWSHWLLNDSALATQTTAVRDAVPYTRAIAGTAGWQWRIPLQHRVGNGIVYSSRHIADDEAKNEFLSSLEGEIIKDPWPIRFRPGQRLKTWEKNCVALGLAGSFIEPLESTTIHLIQRGIVRLLQNFPQVVTPTAIAEYNRQLDEEIQHIRDFVVLHFKATERRDTPYWRTVGSMEIPPSLRHRIELFRETGTVFHVPNELFGENSWIQVMMGQGIVPRQHHAVADVMSEEELSRFLNLISENVSKTVAQLPSHQSYLASYCPAVPPQC

SEQ ID NO: 86825 - protein, 501 aa, Alteromonas sp.
  misc_feature (1)..(501): tr|A0A349Z442|A0A349Z442_ALTSX Tryptophan halogenase OS =Alteromonas sp. OX=232 GN=DCW59_08105 PE=4 SV=1
MQTQLNKIIILGGGSAGWMTAAALGKILSKHPCDIQVIESEEIGTVGVGEATIPQIQLFNDLIGLDEDTFIKRTQGTFKLGIQFQNWRKPGHSYYHAFGEVGKNMEGVHFYQYWLKMRQQGKAAPLDEYTLSSLACNEKRFMRPFEAGNSPLSNIAYAFHFDAGLYAKFLREVAESHGVQRTEGKVTEVRQHPDGAIQSLILENGSEHGADFFIDCSGFRALLIEQTLKAGYEDWRHWLPCDRAITAPSSLTETPWPFTRAAAQQAGWQWRIPLQHRVGNGHVYCSEFMTDEDAEKTLRLNIEGDLLADPRQIRFVTGKRNKFWHKNCLAVGLSGGFMEPLESTSLHLVQVAISKFFSCFPFQQPCQNDIDQYNAEMDFEFTRIRDFLILHYHVTEREDTEFWRYCKHMAIPDTLQEKIDHFKANGRISRFNNELFNDLSWFEVMYGQGLRPEGYHALADIFPEEELARRLEGIQRVVRKSVDYMPGHAEFIAKTCAANRD

SEQ ID NO: 86826 - protein, 411 aa, Bibersteinia trehalosi
  misc_feature (1)..(411): tr|A0A179CVW0|A0A179CVW0_BIBTR Tryptophan halogenase OS =Bibersteinia trehalosi Y31 OX=1261658 GN=F480_06450 PE =4 SV=1
MQQFDVVIIGAGPSGSVSASLLKKQGFSVCVLEKQHFPRFVIGESLLPHCMEILEDAGLVEAVHAEPSFQFKNGAAFTWGNRYTYFDFTDKFTAGPGTTYQVRRGIFDKILIDETTKKGVEVRFGHEVLALDNSGDLAVISARTEAGETYQIQAKFVLDASGYGRVLPRLMQLDTPSHLPARLAHFTHIDDNITAEDFDRNKILITTHPVHRDVWLWLIPFADNRCSIGVVGLPNVLEGDSETVLKKFALECPMLNRILANANWNNEFPFRNIQGYSANVKSLHGKHFALLGNAAEFLDPVFSSGVTIALHSAQLAARLVTQQLNGQAVDWEQEFTKPLMVGVNAFRTYVNGWYDCAFQDVIYARNPQPEIRQMISSILAGYAWDENNPFVAKSESRLAALAEICGLATQD

SEQ ID NO: 86827 - protein, 367 aa, Xanthomonadaceae bacterium
  misc_feature (1)..(367): tr|A0A4Q2XPR4|A0A4Q2XPR4_9GAMM Tryptophan 7-halogenase (Fragment) OS=Xanthomonadaceae bacterium OX=1926873 GN= EOP89_06075 PE=4 SV=1
MIAKRRTVTIVGGGTAGWMAAALLSRLLIDGYDIRLIESDEIGTIGVGEATIPSIRTFCGLAGIDQVAMIRATQATFKLGIEFVDWRDRGHSYIHGFGKIGQDLMWLHPHQFWLKYAPRGEAKHFDTYALNCVAARLNRFALPDTRQPESPMAGIDYAYHFDASLFAQFLRTTCEARGVERIEGRIVSVEQRPDDGFVDHLVLADGRSVDGDLFVDCSGMRGLLIGQTLGVGYEDWSRWLLCDSALAVPCESVSPLTPYTRSTARDAGWQWRIPLQHRIGNGHVYSSSHVGDQAAADTLLANLDGKPLADPRPVRFRPGKRERAWEKNVVAIGLASGFLEPLESTSIHLIHTGLLRLISLFPRQDFD

SEQ ID NO: 86828 - protein, 524 aa, Xanthomonadaceae bacterium
  misc_feature (1)..(524): tr|A0A4Q2XNP7|A0A4Q2XNP7_9GAMM Tryptophan 7-halogenase OS=Xanthomonadaceae bacterium OX=1926873 GN=EOP89_07010 PE=4 SV=1
MQKQHTGTDSGTIRTIVVVGGGSAGWIAAARLAAKGARGADDIVVKLVESATVPTIGVGEGTWPTMRNTLAKIGIGETEFLRSCDAAFKQGARFVGWKDGSARDAYYHPLNPPAGASDLNLSPHWQQVAAESPDRDFADWVDFQQALCDAGLAPKTITAPEYGGVANYAYHLDAGKFATLLRDHAVGRLGVEHIIGDVTDVVMADNGDIASLDLADGGSVAGDLFIDCTGFAARLIGKVYGVPFRRCNDILFADRAIAMQVPYPDENTPITSHTVSTASDAGWIWDIGLWARRGTGYVYSSAHVDDDAAEAALRAYVGPQAEHLSTRRISIEAGHRERFWQNNCVAVGLSAGFLEPLEASALMLVEASMDAIADRLPRTRGAMDTAARQFNESFRHHWERIIEFLKLHYAITKRTDTAFWRDNAAPESIPDALKERLELWRQHPPAPQDFAHAREVFSWPSYQYVLHGMGFETQYPTVAASSPDAVLARRWVGRIERMRGDAVAQMPSHRSLLRAIREHGLQAV

SEQ ID NO: 86829 - protein, 500 aa, Alteromonas sp.
  misc_feature (1)..(500): tr|A0A359K7V8|A0A359K7V8_ALTSX Tryptophan halogenase OS =Alteromonas sp. OX=232 GN=DEH24_15550 PE=4 SV=1
MTAAALANKLQGLAIDIELIESDSIGTVGVGEATLPHIRFFNSALGIDEAAFMRETEATIKLGIEFCDWGNVGESYIHPFGDFGLPINNVDFYQHWLKHFQSGAITTPLHEYAAGVMSAKHNKFRIPEPSSSNIEQHYGYAYQFDSSLYAKFLRRYAQAKGVIRTEGKIVEVKQHNDTGEVVSLALDNQAVIEGDFFVDCSGFRGLLIEQTLHAGYDDWSEWLPCNRAVAIPCENTNPLMPYTRATAKAAGWQWRIPLQHRTGNGFVYWSEHISDDEACSQLLSALDGKPLAEPNQLYFKAGRRNVCWEKNVVAIGLSSGFLEPLESTSIHLIQEGITTLIELFPQQRVQQQDADEYNRRMALNFERVRDFLLLHYVATKRDDSDMWRYFRNLTLPDSLQTKIELWLSRGYIQRYEFGVFLPPSWIAVLLGQNLMPTGFDPRVNNTSDAEFIQTSERMRKAILNSVNNTPLHREFLTGYGAASNSKPLKSAMASTTSGGN

SEQ ID NO: 86830 - protein, 307 aa, Xanthomonadaceae bacterium
  misc_feature (1)..(307): tr|A0A4Q2XS11|A0A4Q2XS11_9GAMM Tryptophan 7-halogenase (Fragment) OS=Xanthomonadaceae bacterium OX=1926873 GN= EOP89_05335 PE=4 SV=1
MAVGARTQVVIVGGGTAGWMTAATLAMSFAGRLADVTLIESDEIGTVGVGEATVPHIRFFNQRLGIDEADFIRRTNGTFKLGIEFRDWGRIGDSYIHPFGDFGHDIDGLPFHHHWAHATREGGETLPSLEDCSLPIVAARDNRFAPPLDDPRSIGSTYSYAYQFDATLYAAYLRDYAEARGVVRIEGRVDAVEQKDDCIGAVRLADGRRFAGDLFIDCSGFRALLIDGALKGGYEDWSHWLPCDTAWAVPTANAGPLTPYTRATAREAGWQWRIPLQHRTGNGHVFSSRFTDPERARDILLSNLEGE

SEQ ID NO: 86831 - protein, 510 aa, Sphingomonas sp.
  misc_feature (1)..(510): tr|A0A4R2TWI1|A0A4R2TWI1_9SPHN Tryptophan halogenase OS =Sphingomonas sp. PP-CC-3A-396 OX=2135655 GN=C8J40_1031 57 PE=4 SV=1
MTDPNPGPIRKVVIVGGGTAGWMAAAAAARYLDDGQRQVVLIESDAIGTVGVGEATIPPILGFNALLGIDERDFLRATGATFKLGIEFVGWDTGDDRYMHAFGGHGRDIQGLAFHQLWLKLRDRPGIGALEEYAPSAVAAYLHKFGQPGGQPPLAYAYHFDAGLYAAFLRRRAEAGGVTRIEGRITGTDRDPRTGHVRAVRLEGGQSVDGDLFIDCSGFRSLLLGETMGVAFEDWSHWLPCDRAVAVPTEPSTPLLPYTRATARTAGWQWRIPLQHRTGNGYVYSSAHISDDEATATLLANLDSKPTAEPRQLRFKAGRRERLWEGNVVALGLAGGFLEPLESTSIHLIQTGISKLFALFPDRGFADVERDEYNRLMGDAYTSVRDFIILHYHATRRDDSAFWRHVRTMPIPDSLTRKLTLFRKNARIFRYDDELFGISSWVQVLLGQDVVPVGYDPIVDALDADRVADAVRQIRGATLRTAQALPGHGDFVAANGRFEGVPPMRSPVRT

SEQ ID NO: 86832 - protein, 501 aa, Alteromonas sp.
  misc_feature (1)..(501): tr|A0A3D0T0Q6|A0A3D0T0Q6_ALTSX Tryptophan halogenase OS =Alteromonas sp. OX=232 GN=DEP76_10235 PE=4 SV=1
MQTQLKKIIILGGGSAGWMTAAALGKILSKHPCDIQVIESEEIGTVGVGEATIPQIQLFNDLIGLDEDTFIKRTQGTFKLGIQFQNWRKPGHSYYHAFGEVGKNMEGVHFYQYWLKMRQQGKAAPLDEYTLSSLACNEKRFMRPFEAGNSPLSNIAYAFHFDAGLYAKFLREVAESHGVQRTEGKVTEVRQHPDGAIQSLILENGSEHGADFFIDCSGFRALLIEQTLKTGYEDWRHWLPCDRAVTAPSSLTETPWPFTRAAAQQAGWQWRIPLQHRVGNGHVYCSEFMTDEEAEKTLRLNIEGDLLADPRQIRFVTGKRNKFWHKNCLAVGLSGGFMEPLESTSLHLVQVAISKFFSYFPFQQPCQNDIDQYNAEMDFEFTRIRDFLILHYHVTEREDTEFWRYCKHMAIPDTLQEKIDHFKANGRISRFNNELFNDLSWFEVMYGQGLRPEGYHALADIFPEEELARRLEGIQRVVRKSVDYMPGHAEFIAKTCAANRD

SEQ ID NO: 86833 - protein, 509 aa, Alteromonas sp.; identical to SEQ ID NO: 84295
  misc_feature (1)..(509): tr|A0A2E9PJY9|A0A2E9PJY9_ALTSX Tryptophan halogenase OS =Alteromonas sp. OX=232 GN=CL602_11565 PE=4 SV=1

SEQ ID NO: 86834 - protein, 536 aa, Sphingomonas sp.
  misc_feature (1)..(536): tr|A0A4R2UB37|A0A4R2UB37_9SPHN Tryptophan halogenase OS =Sphingomonas sp. PP-CC-3A-396 OX=2135655 GN=C8J40_1078 PE=4 SV=1
MRKQGNRQQTMATNTGPEATSDHPITNIVIVGGGTAGWLAACLIAARTDRGAGHPLEVTLIESPDVATIGVGEGTWPTMRRTLERIGITETDFLLACDASFKQGSRFDGWRTGAPDDSYLHPFTAPVDGDPRDIVAAWAEHGGQFANSVGAQGEICHRDLAPRQRAMPDYAGTLNYAYHLDAGKLAALLTRHATERLGVRHIRDHVVGIDSTEHGDIAAVSTRASGAIAGDLFLDCTGHAALLIGGHYGIATIDRGGELFNDRALAVQMPVAPDSAIASQTNATAHAAGWIWDIGLPTRRGIGCVYSSAHLSDDAAAETLERYIRTTSPGVAPPIFRQLKFQSRHRERFWERNCLAVGLSAGFLEPLEASAIVLIELSLDALLDNFPSHRGAMDIHATRFNTLFRYRWDRIVEFLKLHYVLSERDEPYWLDHRDAASIPPRLAELLTLWRHQPPSRADFPMIDEIFPAASYQYVLYGMGFPVPTRGPIATADRTRTETLLAQVDQRKRMLAAGLPTNRAYLDALRHATAPAMELSA

SEQ ID NO: 86835 - protein, 505 aa, Sphingomonas sp.
  misc_feature (1)..(505): tr|A0A0Q4TZD4|A0A0Q4TZD4_9SPHN Tryptophan halogenase OS =Sphingomonas sp. Leaf257 OX=1736309 GN=ASF14_06295 PE= 4 SV=1
MDKAITRIVIVGGGTAGWLAAARIAAATAGSVTVTLIESPDVPTLGVGEGTWPTIRRTLERIGITETELLVACDGSFKQGTRFDGWATGASDDRYYHPFVPPIDADPADLPRDIPYAFATCPQPLVCAEDLAPRQRGMPDYAGALNYAYHLDATKLAALLTRHATTRLGVRHVRDHVTGVERGRDGGIATVHTRGSGSVAGDLFLDCTGHAALLIGNALGVETVDASSILFNDRALAVQLPAAPGSRIASQTVATAHGAGWVWDIGLPTRRGIGCVYASAFMSDDEAEGVLAEYCRRISGDSPAPRRLTFRSAYRSRPWTANCLAIGQSAGFMEPLEASAIVMIELALDALLDDFPVDAGLMAIQARRFNALATYRWERIVDFLKLHYVLSRRNEPYWRAHRDPATIPDRLAEMLALWRYRSPSALDLPMQDELFPAASYRYILWGMGFPAPLPSPLPRPHRPDLPSQLRQIDQRGRALAASLPTNRAYLDALRAEQAPLSEKCA

SEQ ID NO: 86836 - protein, 517 aa, Saccharophagus degradans
  misc_feature (1)..(517): tr|Q21LR2|Q21LR2_SACD2 Tryptophan halogenase OS=Sacchar ophagus degradans (strain 2-40 / ATCC 43961 / DSM 17024 ) OX=203122 GN=Sde_1105 PE=4 SV=1
MIKKIVVLGGGSAGWLTAAILAAEFQGNEDSMVSISVIESPDVKTIGVGEGTWPTMKATLQRIGISETEFINSCSASFKQGSKFVGWKTGVPEDSYHHPFTLPVGMGKVNLYAVWQDETVARRSFSSTFSAQPVVADRGLGPKLHTMPEYAGVFNYGYHLDAGKFSELLKNHCVKKLNVRHVSDHVVEVNCAEDGYIESLGTRASGDVQGDFFIDCSGTSGLLIGNYYEIKLIDKKKNSFNDSAITAHVPYFDECNDIGSTTVATAQSAGWVWDIALSSRRGCGYVYSSSHITDDEAENEFRAYLASSIGDKNASQLATGRINFCAGYREKFFHKNCVAIGMSAGFIEPLEASALALVELSANMIRDEMPFCKKSLQEVEKRFNRVFAYRWERIIDFLKLHYVFSERKGSDYWADAASADSIPDSLKYLLSVWQFRPPNVYDFMQGEELFPVASYQYILYGMGFEMAPNAVARESDNVALGRRLLKEQEGALDKYLTNLPTNRQLLDNILKFGMQKL

SEQ ID NO: 86837 - protein, 515 aa, Sphingomonas sp.
  misc_feature (1)..(515): tr|A0A0Q4U5R3|A0A0Q4U5R3_9SPHN Tryptophan halogenase OS =Sphingomonas sp. Leaf257 OX=1736309 GN=ASF14_07035 PE= 4 SV=1
MGETEVRRVVVVGGGSAGWIAACRLAAQARRIGSGVRVTLVESRHVPTVGVGEGTWPTMRNTLAKIGITETDFIRSCDAAFKQGARFVGWTDGTPQDGYYHPLNPPAGATEIDLAPHWLHGAAENASFADWVDYQPMLCDAGLGPKTIVMPEYAGHANYAYHLDAGKFATLLREHGVGTLGIDHVLGDVVRPQMSDHGDIVHLELADGRTVAGDLFIDCTGFAARLIGGVYQVPFRRCGDVLFADRAMALQVPYADEGAPIICHTVSTAQDAGWIWDIGLWTRRGVGHVYSSAHTSDDAAETALRRYVGPAAEGLSARRITIDAGHRTRFWQNNCVAVGLSAGFIEPLEASALMLIEASMDAIADRLPRTRAAMDVMARQFNATFTHHWMRIIEFLKLHYVLTRRTDTDFWRDNVAASSIPDGLAERLELWRHHSPGPQDFDHAREVFSWPSYQYVLHGMGFDSRQPRIDAAAPDTVLAQRFVTRMARARDDLRARAPRHRDLLRAIREHGLQRV

SEQ ID NO: 86838 - protein, 515 aa, Sphingomonas sp.
  misc_feature (1)..(515): tr|A0A0Q4U405|A0A0Q4U405_9SPHN Tryptophan halogenase OS =Sphingomonas sp. Leaf257 OX=1736309 GN=ASF14_10265 PE= 4 SV=1
MVQPVQNIVIVGGGTAGWLTAGVIAARHQGRRPHGFTVTLVESPNVPIIGVGEGTWPTLRTTLRKMGVSETAFFRECDASFKQGARFNRWTTGAADDGYYHPLMLPQSFAQVNLAPHWLTAEGEPVSFCDAVTPQGRICDAGLAPKTIATPEYEAIANYAYHLDAGKFADFLRRHCCEQLGVRHVLADVEEVLLTESGDIRAVRTAQAGEVTGDLFVDCTGFRSLLLGEAMGVPFKPLNDVLFCDTALAIQVPYDDPEAPIASHTISTAQSSGWIWDIGLPTRRGVGHVFSSSHIDRDGAERELRAYLGEAGRDLPVRELKIRAGHRTRFWERNCVGVGLAAGFLEPLEASAIVLIELSAKLIAEQMPACREVMDTVAKRFNDTTLYRWGRIVDFLKLHYSLTQRTDSDFWRDNCRPETMPDRLQELMELWRYQAPWMHDEFDRVEEVFPSASYQYVLYGMGQRTDIAPGSLIAETIVAQRARRENDVQTGRLLAGLPKHRDLIRKIVERGLPTI

SEQ ID NO: 86839 - protein, 123 aa, Alteromonas sp.
  misc_feature (1)..(123): tr|A0A3D0SC77|A0A3D0SC77_ALTSX Tryptophan halogenase (F ragment) OS=Alteromonas sp. OX=232 GN=DEO96_05445 PE=4 SV=1
MTTHPKQIVIAGGGTAGWIAAAALARKMGPLVNIRLVESSTIGTIGVGEATIPPLRTFHKLLQIDEQAFMRATAATFKLGIRFENWGRIGEQYIHSFGMTGQQSWLAEFVHFYLSAKARGLEG

SEQ ID NO: 86840 - protein, 509 aa, Xanthomonadaceae bacterium
  misc_feature (1)..(509): tr|A0A4Q6CBT8|A0A4Q6CBT8_9GAMM Tryptophan 7-halogenase OS=Xanthomonadaceae bacterium OX=1926873 GN=EOP91_02450 PE=4 SV=1
MQQPDASPGKIRRVVIAGGGTAGWLAACALAHQFRERLDITLVESEQIGTVGVGESTVPPIRAFHRFLQIDEQEFLRAVAGTFKLSISFENWRRPGERYIHPFGITGQGTWAAAFHHFWLDSQRRGMPSELGDFCLETVASRDDLFSLDTQPQVNYAYHFDAGLYARFLRRIAESHGLVRVEGKIRQVEQDGADGSVTALVLEDGQRLEGDLFIDCTGFRGLLIEQTLHTGYEDWNQWLPSDRAVAVQTEPVGPPVPYTRAIAHQAGWRWHIPLQHRVGCGLVFSSRHMSDDEARAKLLHDVGAPPIREPWLVPFRTGRRLKAWNKNVVSLGLASGFIEPLESTSIHLAISAVVRLVQLFPYDGIAPSLVDLYNQVSREEMEHVRDFIILHYHATQRDEPMWTECREMELPESLAARLRAWRERAHAWQDGNELFRIDSWTHVLLGQGIAPGQPHPLARAVPDGDLGKLLAALREPIGRAVAQMPPQQEFINRYCKAGPEVWGIRRTPQ

SEQ ID NO: 86841 - protein, 522 aa, Colwellia sp.
  misc_feature (1)..(522): tr|A0A2N1I7Y0|A0A2N1I7Y0_9GAMM Tryptophan halogenase OS =Colwellia sp. 12G3 OX=2058299 GN=CXF71_16135 PE=4 SV=1
MQQNNSQSHTQNKIQNVVIVGGGTAGWMTASLLAKTLGKALNITLVESDKIGIVGVGEATIPPIVNFNSAIGIDEKAFIKETQGTIKLGIEFNNWHQEGDSYMHAFGNIGKKFPFCDFHHFWLRAQLDKNASNQSIDSTNIDSTNISSKSFWDFSLNYQAAKQHKFAPIRNIPNTNLPGLAHAYHFDAGLYAKFLSKHAIGMGVKRIEGTITQVNQHNESGFIESVLLENDRCIKGDLFIDCSGLAALLIEKTLSTGYEDYSHWLPCDRAIAVPCEKVEPIEPYTRSTAHKVGWQWRIPLQHRTGNGLVYSSKHMSDDEAKELLLNNIDGKPLAEPRVIPFKTGRRRKQWHKNVIAIGLSSGFFEPLESTNIHLIQTAAIRLMKFFPHNGIQQEEVDEFNRQSKVELEGIRDFIILHYKLNNRGDSEFWRACQRMEIPESLLNKIELFKKTGKVFCKPDDLFTEIAWQQVMIGQGNIPDDHHPLVDTLTKEQLTDLMASLKTLINGTVNKLPSHDEFLQSLK

SEQ ID NO: 86842 - protein, 521 aa, Xanthomonas axonopodis; identical to SEQ ID NO: 85802
  misc_feature (1)..(521): tr|A0A443Z8M4|A0A443Z8M4_XANMN Tryptophan 7-halogenase OS=Xanthomonas axonopodis pv. manihotis str. CIO151 OX= 1185660 GN=XANMN_20335 PE=4 SV=1

SEQ ID NO: 86843 - protein, 498 aa, Massilia sp.
  misc_feature (1)..(498): tr|A0A086W5P6|A0A086W5P6_9BURK Tryptophan halogenase OS =Massilia sp. BSC265 OX=1549812 GN=JN27_21735 PE=4 SV=1
MGKPVRRVVIAGGGTAGWMAAACISKVLGKRLDIKLVESDEIGTVGVGEATIPTLLNFHNLLEINEQEFMAETKATFKLGISFENWRNVNEDYIHSFGMTGTDHWTAGFQHFWHKGRERGLAGDYGDYCLELRASQESKFAHLPQNGRNFGMNYAYHLDASAYGRYLRKFSERFGVQRIEGKIVDVTTSALTGHVRSITLDSGVDIEGDLFIDCTGFRALLIGQAMGVGYEDWSEWLFNDSAAALQTTSVGDAIPLTRSIAHPFGWQWRIPLQHRVGNGIVFSSRYVEEGAAIQTLLGNIEGEALMKPRVIKFTPGQRRQVWKHNVVAVGLSSGFLEPIESTSIHLIQRSIIRLMQMFPASGIAQADVDEFNKQAWTEVEHIRDFIILHYKVNNRIDAPYWADARNMEVPASLQHRIDLFRETGRVFRISNELFAENSWVQVMLGQGIMPYRHHQSADLMGDEELSHFLGSIKGQIDRTVASLPSHQSYVGRYCSAPK

SEQ ID NO: 86844 - protein, 530 aa, Kitasatospora sp.
  misc_feature (1)..(530): tr|A0A540VYS1|A0A540VYS1_9ACTN Tryptophan 7-halogenase OS=Kitasatospora sp. MMS16-CNU292 OX=2567942 GN=E6W39_0 6045 PE=4 SV=1
MSNRINKVVILGGGTAGWMTAAYLGKALQGTVDITVLEAPTIPRIGVGEATVPNLQRAFFDFLGIPEDEWMRECNASFKVAVKFLNWRTPGPGQATARSYQGRPDHFFHPFGLLPSHDNVPLSHYWEYRRLQGETDEPFDYACFTDTAVMDGNLAPRYPDGRKAVNYAWHFDAALVADYLRRFATDKQGVHHLSDEMTDVLKDGRGFITGLRTKAGRLVEGDLFVDCSGFRGLLINQAMAEPFLDMSDHLLCDSAVATAVPHDDEANGVEPYTSSIAMRHGWSWKIPMPGRFGSGYVYSSKFTEQGEATEEFCRMWGLDSNAKFNHIRFRVGRNRRAWVKNCVSVGLASCFLEPLESTGIYFTYAAIHQLAKHFPDRGFDQTLVDRFNREIQEMFDDTRDFLQAHFYLAPRTDSEFWRANKELALPDNIREKIAMFRAGVPINPPATDESNYYGNFDAEFRNFWTNGSYYCIFSGLGLSPDHPLPALTYRPESVQGSQRLFDRVKQRQRELTETLPTNLEYLKQLHGTRP

SEQ ID NO: 86845 - protein, 495 aa, Saliniradius amylolyticus
  misc_feature (1)..(495): tr|A0A2S2E2A7|A0A2S2E2A7_9ALTE Tryptophan 7-halogenase OS=Saliniradius amylolyticus OX=2183582 GN=HMF8227_0089 5 PE=4 SV=1
MKQSINKVIIAGGGTAGWMTAATMSKLLGNVLDVTLVESEQIGTVGVGEATIPPLLTLHQLLKLNEQEFMAATQATFKLGISFENWKDVGEDYIHSFGTTGKDCWACGFQHFWLKGHQKGIASRYGDYCPELLAAEQNKFAIQPKQGLNYAYHLDASLYAKLLRQMAEQHGVKRVEGKIASVQKHDNGYLKGLILDSGQTLEGDFFIDCTGFRGLLIEQALHTGYDDWTHWLPCDSAIAVQTQATRAPIPYTRSIAHESGWQWQIPLQHRVGNGLVYCSRYQSDDDAREQLLKNIQGELRTEPRVIKFQTGQRRQHWNKNCVAVGLSSGFIEPLESTSIHLIQRGIIRLLQMFPLNGISEHDIKEFNQQTEHEVENIRDFIILHYHVTERRDTPFWRHCASMPIPDSLKHRIELFKETGRVFKVPNELFAENSWVQVMMGQGLTPQAYHPIVDHMPDHELEAFLAQIKAQSAHRAQQLPEHADFINHYCKASEAM

SEQ ID NO: 86846 - protein, 526 aa, Saccharophagus degradans
  misc_feature (1)..(526): tr|Q21I28|Q21I28_SACD2 Tryptophan halogenase OS=Sacchar ophagus degradans (strain 2-40 / ATCC 43961 / DSM 17024 ) OX=203122 GN=Sde_2391 PE=4 SV=1
MQTRPADQTAPLKNIVIVGGGTAGWLTAGRLAAQFNTGADAVKNTNNIRVTLIESPNIPTVGVGEGTWPTMRSTLIKMGIRETDFLTQCDATFKQGAKFARWTTGKQDDFYYHPLMLPQGFGKTDLAQHWQTVKQVTGQSFSEAVCIQQAICEKGLAPKTIRAPEFNGAANYAYHLNAGKFATFLQKHCTQNLGVNHILDDVSGVNIADNGDIASVITKANGNIEGDLFVDCTGFNALLVGKHYQVPFKDCSDVLFIDSALAVQLPYSKADSPIASHTISTAQDAGWIWDIGLTHRRGIGHVYSSRHTSESDALQALATYTQTDCDKLDVRKIPIKSGHREKFWVNNCVAVGLAAGFLEPLEASALVLVELSAQMIAEQLPANRATMNIVAKRFNETFLYRWDKIIDFLKLHYCISQRTDTAFWRDNCDPATIPQSLQDLLALWQHRAPSDLDFTSNNEVFPAASYQYVLYGMGFNTQFSNTGLYNAAVADAHFMRKQLNEDEALKALPSNRELLEKIAQFGLQPV

SEQ ID NO: 86847 - protein, 498 aa, Pseudoalteromonas tunicata
  misc_feature (1)..(498): tr|A4CBZ0|A4CBZ0_9GAMM Uncharacterized protein OS=Pseud oalteromonas tunicata D2 OX=87626 GN=PTD2_18685 PE=4 SV =1
MTPTKISNVVIVGGGTSGWITAALLVKVLGRVINITLVESDEIGTIGVGEATIPPIVQLNNALGISEKTFLAHTKGTFKLGIEFNDWGQLGDSYMHAFGGIGKSLPFCDFHHLWLQSKQQGGNSDFWDFSLNYQAAMAGKFGPSQKIASTNIQGLEYAYHFDAGLYAGLLSEFSQGLGVKRLEGKVTEVVVNQNNGDVSHLCLANGEHLYGDLFIDCTGLKALLIEQTLNTGFEDYSHWLPCDRAVAVPCEKVEPIVPYTRSTAHSCGWQWRIPLQHRTGNGLVYSSKYLSDEAAKAQLLNSLDGKPLGEPKIIAFKTGRRRKQWHKNVVAIGLSNGFFEPLESTNIHLIQTAATRLIKFFPHFGIKDAEVSEFNRQAQVEAEQMRDFIILHYKVNQKVDSPFWQACQRMEIPHTLAQKIALFAQSGKVFREQDELFTEIAWQQVMLGQNLVPADIHPIATMLSPLQLSELMENLKTLVDHNVAGIVSHSDFLAQIAH

SEQ ID NO: 86848 - protein, 533 aa, Xanthomonas axonopodis; identical to SEQ ID NO: 85887
  misc_feature (1)..(533): tr|A0A443Z915|A0A443Z915_XANMN Tryptophan 7-halogenase OS=Xanthomonas axonopodis pv. manihotis str. CIO151 OX= 1185660 GN=XANMN_21580 PE=4 SV=1

SEQ ID NO: 86849 - protein, 502 aa, Saccharophagus degradans
  misc_feature (1)..(502): tr|Q21N77|Q21N77_SACD2 Tryptophan halogenase OS=Sacchar ophagus degradans (strain 2-40 / ATCC 43961 / DSM 17024 ) OX=203122 GN=Sde_0588 PE=4 SV=1
MSETKKRVVILGGGTAGWIAANLMAKHWEQEAFEITLVESPNIGIIGVGEGSTPPLKVFLDLIGCKEEEWMPACNATYKVGIRFNDWSIKPGYESYFHPFYSKTDDHTIPAFFHNSFLIRQGVDLDGLPDHFFLGVELAKQKKAPLPAENFPFETSYGYHFDSNLLGQYLAKVAASRGVKYKKATVCEVVLKENGDVSHLLTDEGESIGGDLFVDSSGFKGQIIQQALKVPFISCVQSLFNDSAVVLPTDQVDEPNCQTTSTAMKNGWRWDIPLTNRTGNGYVYSSSFCDADAAETELRTTLNLLDSDVEARHLKFKVGRVQEHWVRNCLAVGLSQGFIEPLEATALDMVQETVVRFIEAYDKGQHTEQSRKDFNSRISHRFDAVRDYITAHFRIVSRTDTEYWRACGSNDKISASLYSILSSWMQGKNITQELEQQQLDAYFPNISWNCLLAGKGIYPDKSQLRKGNELAHKYKTTDINKFIKACALNYPTQADVLKRYTR

SEQ ID NO: 86850 - protein, 498 aa, Saccharophagus degradans
  misc_feature (1)..(498): tr|Q21DG9|Q21DG9_SACD2 Tryptophan halogenase OS=Sacchar ophagus degradans (strain 2-40 / ATCC 43961 / DSM 17024 ) OX=203122 GN=Sde_4005 PE=4 SV=1
MRNITIVGGGTAGWITANILAKSWAHQNVNITVIESPTIPTIGVGEGSTPALKGFFDFLEIQESEWMNKCNATYKNGIRFNGWTNKPDFKSYFHPFPSALDYTYLPEYFNHIASRRAGYANATQSENYFLAAKLAAEKKSPYVIDNLGKLKSEVNYGYHFDAAKLAEFLQQQATNLGVIHTVAAVQGVTQGEQGIAKIHLSNGESHSADLYIDCTGFSAKLIEKTLGAKFISYADHLYNDAAVAIPSLHCENETLISSETVATAMENGWAWQIPLQNRVGNGYVYSSQYCSAEQAEQELRTKLGLMDSAVEAKHLTMRVGRRDKHWIKNCVAIGLSQGFIEPLEATALALVQFSAAKLVDYYSIESNIDNTKRDDYNRVINNQFDGIKDYIVAHYKTNSLTHTKYWCDNRAHLDKLSPSLQQIFKCWISGADLSAEIQRQNIQKYYPVVSWYCLLAGMGMFPEAIYQANAVAPSCTKMQAIAGSALSQLECMQHFKTL

SEQ ID NO: 86851 - protein, 525 aa, Massilia sp.
  misc_feature (1)..(525): tr|A0A086W5P9|A0A086W5P9_9BURK Tryptophan halogenase OS =Massilia sp. BSC265 OX=1549812 GN=JN27_21750 PE=4 SV=1
MASTTIRHVVIVGGGSAGWLTAAVLASSFQSAGEGALRVTLIESPDVPTIGVGEGTWPTMRDTLRAAGLSESAFFRECDASFKQGSRFNRWVSGGDHDYYFHPFVLPQGWGDADMAGHWLARHADIPFADLVSYQPHLCVHGRAPKQAATPEFAAVANYGYHLDAGKFGLFLKKHCLEKLGVHYVPDHVTGIRSHDDGDIAALHTKAHGELAGDLFVDCTGMQSLLLGKHYGVPFLPQRGILFNDSALAVQVPYRLDDTPIASQTTSTAQEAGWIWDIGLPTRRGIGHVYSSAHTSDDAAERALRAYIRATGGPDDIPTPRKLSFEPGYRERFWHRNCVAIGLSSGFIEPLEASALAMVELSSAMLADEMPVTRAQMDLCAQRFNETFTYRWERVIDFLKLHYVLSRREGALDPNGYWRDNRNSETIPQRVADLLALWRHRPPSRYDFNRIQEVFPAASYQYILYGMGFRPEPGLSRRERVGEGNAAMADGFLRQAADLTRRMLPALPDNRTLIAHIVRHGLPVK

SEQ ID NO: 86852 - protein, 502 aa, Saliniradius amylolyticus
  misc_feature (1)..(502): tr|A0A2S2DZ46|A0A2S2DZ46_9ALTE Tryptophan 7-halogenase OS=Saliniradius amylolyticus OX=2183582 GN=prnA PE=4 SV =1
MAKIQHITILGGGTSGWLSAAILSYQFRHQPVRITLVESEQIGTIGVGEATIPPFLDVLSSIGIDQFDFIRQTQSTFKLGIRFSGWLEQTDAYMHPFGQLGQPLFHQDFYQCWLKSYQAGNNSPLMAHSPAAVLAEAGGFMMPAMVKNHPMQASAYALHIDATLAARYFRNHAEKLGVERVEGRVEQVLCHENGHVSQLLLSDGSAVGGQLFLDCSGFSALISGQTLGAEFEDWSEFLTVNEAVTIQSEPFPEPPSYTESKAQAYGWSWHIPLQHRTGNGYVYDNRYIDSESAAQTLLEQLPTPPLSDPRRIRFRTGIRPSPWLGNCVAIGLAAGFLEPLESTAIHMVTRGVKHLLRLLPDRAFNPVLQEEYNRRMRRDFEEIRDFLVLHYCKNQRSDSEFWCYYQRMNLPERLEKKLTLFEENGGLIPGEDDLFTANNWYAVLEGLRVRPRRMSPLSEDIPVTRLEPLLQQIRQSLTDGARAMPSHRAFIDQHCPATKPGM

SEQ ID NO: 86853 - protein, 510 aa, Pseudoalteromonas tunicata
  misc_feature (1)..(510): tr|A4CBD5|A4CBD5_9GAMM Putative tryptophan halogenase O S=Pseudoalteromonas tunicata D2 OX=87626 GN=PTD2_17660 PE=4 SV=1
MTDLRNVIVVGGGTSGWLSATYLASSFKKTGRNIKVTLIESANIPTIGVGEGTFPTIVNTLYEIGLSEKDFLASCDASFKQGALFKNWLHDPQERTHGYYHPFEPPEMPKGIDLSAYWVKRKKAGTMSHDFSHATCVQAQLCDHNLAPKTTETPEFSWLAKYAYHLDAAKLGKVLQKHGTEKLNIEHIFADIEDVNIDNDGYIASITSNEGKTFLADFFVDCTGFRSLLLGKALTVPFVSQSQYLSVDSAVTLQVSYEKDDSPIATHTISTAQEAGWIWDISLQSRRGTGYVYSSKHTTPERAEAVLKAYHNIDADTDISLRHIHFDVGYREKSWYKNCCAIGFSSGFVEPLEATAIAMVEAGVRSLAARFPQHRAAMDIRQQQYNEIFVSRWKNIIDFIKLHYCLSKRKDTAFWQEHTSSKTLPASLKARLEAWKYYGITDGDLPYKYDLFTLASWQYILYGLEFLPDYVESAPLPDTLIDKAFESIQIKGSNAKKQLKNNRDLIQNYL

SEQ ID NO: 86854 - protein, 514 aa, Pseudoalteromonas tunicata
  misc_feature (1)..(514): tr|A4CBD9|A4CBD9_9GAMM Putative tryptophan halogenase O S=Pseudoalteromonas tunicata D2 OX=87626 GN=PTD2_17680 PE=4 SV=1
MNHKSRIVIVGGGTAGWLSAAKLAKELAANQPNGVQVTLLESSDIPTVGVGEGTWPTIRKTLASIGIDEAEFIKETDASFKQATQFVNWKSDPISTNNTYYHLFSSVSDSAQFNLAPYWLLGDKHTSYAQAVSAQDILCDKGLAPKLITNKPYEGIQNYAYHLDAGKFATLLKRHCIEKLGVKHLIGNVVQVNTDEEGAIASLVTDTQGMLAADLYVDCTGFKSLLIGQALGVKFNSIADTLFVDNAIAIQMPYENDEADIASATLSTAQQAGWIWDIGLQSRRGTGHVYSSEFISHDEAEHTLRQYLGPKATDLPAKHIKMNCGYREKFWHKNCVAIGLSAAFVEPLEASAIFLIEASANMVAELFPINKALMQASAQTFNDSFNYRWRKTIDFIKLHYVLSNRSAPFWQANKRPESIPSSLSEMLNQWQHRPISKYDFAHVFEPFPQESYQYVLYGMGYHPDLAMSQSRYANLDTAENLFGQVSQMRSNFEKHLTTNRALLNKVKKYGFQKL

SEQ ID NO: 86855 - protein, 494 aa, Saliniradius amylolyticus
  misc_feature (1)..(494): tr|A0A2S2DZC9|A0A2S2DZC9_9ALTE Tryptophan 7-halogenase OS=Saliniradius amylolyticus OX=2183582 GN=HMF8227_0024 6 PE=4 SV=1
MLELKKGSEQGPHILIVGGGTAGWMSALLLNQQLSEYGVRVSLMESEQIGTIGVGEGTTPYIRQFFSAIGLSEREWMSECQATFKCGIRFPSWSDNPEHGSYFHPFYSGVDKEPGEAFFVNANLRRRGQMAEAQPDRFFLAHYLASQGKAPKVPDNAFHLDYAYHFDAGLLGQYLKKVGIQRGIRHRLNTIDAVRRHPSGDIASVITADGEAVAADFFIDCTGFASKLLQQNLGVPFCSFADNLLNDSAVAIQLPRDYEQVLVSETRSEALSNGWAWRIPLIRRTGFGYVFSSNYQSPDQAETELRRYLQVGDEIPARRLSMKVGRVEKHWQNNCLAVGLSQGFIEPLEATALMLVQFTVERFARALIKGSPEHCFNQEVNRMFDGVRDYIVAHYKTNGRQDTPYWRDNREQTPASDRLQAILDTWRTGAELEPVLTEMESELVYFRPSWYCLLAGSGLLPDVPAQPCVGTPASYAERFFRPLAERFTDQTDYL

SEQ ID NO: 86856 - protein, 501 aa, Saccharophagus degradans
  misc_feature (1)..(501): tr|Q21HS1|Q21HS1_SACD2 Tryptophan halogenase OS=Sacchar ophagus degradans (strain 2-40 / ATCC 43961 / DSM 17024 ) OX=203122 GN=Sde_2498 PE=4 SV=1
MHSKQVKKIVIVGGGTAGWMAAAMLACRYSREDLAIQLVESDAIATVGVGEATVPGIIQLHQHLGIKESEFVSATNATFKLGIEFKNWSQLGATFFHPFAKYGAPIAGQAFFDCWLRLKQAGYTAKLDEFSLSIALAKANKFVQPDDNATNQLAMFGYAYHFDATLYAKFLRAYAEQRGVQRTEGLITQTYLQADGNIECVELASGEKIAGDLFFDCSGFRGLLIEEALQTGYQDWSHWLPCNKAVAVQTINEKPPTPYTRSTALAAGWQWTIPLQNRIGNGYVFCDRYISDDEAIATLTRNVEREMLTEPRVIGFNAGVRNKFWNKNCVAIGLASGFIEPLESTSISLIQTGVEKIMDAMPALEYSENTIASTNSLNQQEYERIRDFIVLHYKASAREDSAFWRDVREMDIPTTLQNKMSAYLKDATFLDYGQESFKDASWQTMYNGFNLYPQIPPSNVADLDVQQLMLVAEKMRAAIQAGVAHAPSHAEFLSTLADGKF

SEQ ID NO: 86857 - protein, 507 aa, Colwellia sp.
  misc_feature (1)..(507): tr|A0A2N1I812|A0A2N1I812_9GAMM Tryptophan 7-halogenase OS=Colwellia sp. 12G3 OX=2058299 GN=CXF71_16270 PE=4 SV =1
MTIKRIAIVGGGTAGWLTANHLGKTLCKKSELSITLIESPDIAPIGVGEGTVPDIKKTLASFGISETDFIRQCDVTFKQSIKFVNWLDQDKHGKDNFFHHLFDVPSREDSESLTAHWLTQNDGVPFAERVSSQYKVCEQGKAPKKITTPEYQGDLAYAYHLNAAKFSGLLADNAKAKYGVKHLLTHISDVSLADDGSIRSLVTREGEELAFDFYIDCSGFESLLISKAMKVPFVDVSDQLLVNTALVVQVPTEKDSAIPPYTIATAHQAGWIWDIALPTRRGVGFVYSNKHMSDEEAHTKLDKYLGGSNPELTYKKLPMKIGYREKFWHKNCVALGLAQGFLEPLEATSILLTDFSANFLAERFPSEKGELLTLEKRFNHAMGHAWKRVVDFIKLHYCLSDRHDSLFWSDNRDPNTMSEELKNKLAMWEKFIPISDDFFSQFEVFYLENFLFVLYGMKYKTQLKNIEVTNAEERISALKEITDNLMNNLPEHRVLLEKINKFGLQQF

SEQ ID NO: 86858 - protein, 497 aa, Xanthomonas oryzae
  misc_feature (1)..(497): tr|A0A0K0GP45|A0A0K0GP45_XANOP Tryptophan halogenase OS =Xanthomonas oryzae pv. oryzae (strain PXO99A) OX=36009 4 GN=PXO_02202 PE=4 SV=1
MVIAGGGTAGWITACALSHQFRGLLDITLVESEQIGTVGVGESTVPPIRTFHRFLQIDEQEFLRAVAGTFKLSISFEHWRAQGERYIHPFGITGQSTLVCAFHHLWLESQRRGMPGSFGDYCLETVASRVDRFALYGEPAVNYAYHLDAALYAKFLRARSEACGVKRIEGKIQQVTVQPHSGDVASVVLEDGHVIEGDLFIDCSGFRGLLIEQTLHTGYEDWSHWLPCDRAVAVQTEAVGPPVPYTRAIAHEAGWRWHIPLQHRVGNGLVFSSKHLSDDQAHAKLLHDVAAPAVKDPWMVPFRTGRRRKAWNKNVVSLGLASGFIEPLESTSIHLTISAVVRLLALFPGEGIAPSQVQLFNDVSRAEMEHVRDFVILHYHATQRNEPLWQQCRAMELPESLALRLRAWRERAHAWQGADELFRVDSWTHVLMGQGIEPEQHHPLTRAFSDHDLRRLLDGIAQPIQHAVQQMPSQHAFIERYCKAGAQVWGMRSPVPA

SEQ ID NO: 86859 - protein, 496 aa, Saccharophagus degradans
  misc_feature (1)..(496): tr|Q21KW6|Q21KW6_SACD2 Tryptophan halogenase OS=Sacchar ophagus degradans (strain 2-40 / ATCC 43961 / DSM 17024 ) OX=203122 GN=Sde_1401 PE=4 SV=1
MNNKIKNVVIAGGGTAGWMAAAAIAKLLGKNLSITLVESEEISTVGVGEATIPPLQTFHRLLGIDEAEFMRAVRGTFKLGINFESWRDVGEDYFHSFGTTGRDCWASTFQHFWQRGLAEGYKADYGSYCPEVLAAKQNKFAHGGGQPLKYAYHMDASQYAVYLRGLAERHGVKRVEGKIDRVNVDPESGNIFSLALAGGETLAGDLFIDCTGFRALLVEGALHAGFDDWSHWLPCDSAVAVQTKGGSDLPPYTRSIAREAGWQWQIPLQHRVGNGLVYCSKYLSDENAKHTLLNNLDGEPLTEPKIIKFKTGQRRKSWVKNCVAIGLSSGFLEPLESTSIHLIQRGIIRLLQLFPVNGIAPTLRDEYNKQSKSEIEFIRDFIILHYKVTNRADQPFWRYCKAMDVPSSLAHRIELFKQTGRVFRTEGELFSENSWIQVMMGQGVMPQEYHPIANQMTEDEQAHFLNGLRNSTEISVKALPAHKDYIAQYCAAFAQE

SEQ ID NO: 86860 - protein, 509 aa, Erythrobacter sp.
  misc_feature (1)..(509): tr|A0A547PA18|A0A547PA18_9SPHN Tryptophan 7-halogenase OS=Erythrobacter sp. JBTF-M21 OX=2584124 GN=FGU71_03405 PE=4 SV=1
MRTDEPKPKPMRVVVLGGGTAGWMTAAGLAKLLPGLANVHLIESEDIGIVGVGEATLPHIRGFVERLGIDEAAFMKATHATYKLGIDFRDFGSIGTSYIHPFGSFGEEVNGVAFHHYWLELQRQGMAGAIGEYSLAVQAAQANRFTPPAQDTSLASSYGYAYQFDATLFGPFMRDFGMANGVDRTEGRVTEVQRDSETGDVSALIMESGERIEGDLFVDCSGFRSLLLGDALDEEWEDWTHWLPCDRAAAMPCSHTSDEIAPYTTATAMPAGWRWRIPLQHRIGNGYVFASSFISEDEACNTIAKVAEGTQLADPRVLRFRPGRRKKSWSHNVIGVGLASGFLEPLESTSIYLAQMAITYLIELFPSGRQIDPRDRDEFNRLVDMEYDRVRDFLILHYNATTRDDSEFWNHVRTMELPDSLAGKMELWRDAGRIEKYSDGLFYDASWIAVYLGQGVLPQHHDPRAALPKPEQVAGALTQLQKAIGEIVVGMPGHTDYLNQQAARMADPL

SEQ ID NO: 86861 - protein, 374 aa, Myxococcaceae bacterium
  misc_feature (1)..(374): tr|A0A4Q6A903|A0A4Q6A903_9DELT Tryptophan halogenase OS =Myxococcaceae bacterium OX=2484252 GN=EOO72_03530 PE=4 SV=1
MSDTHCDVAVLGGGPAGAGVALALRAQTRLSVTLVERTTHDAPRIGETLPPDARLPLARLGVWGGFLRDGHLPSRGTASCWGSATVGYHDTLMSPFGSAWHLDRSRFDASLCAQVAERGGSVRTGTTVEGCEALGPEGFRLRLSHPVEGPTTLWVRFVVDATGWKAAFATSQGARRQVVDRCFALYGDFRLRQGAAFSTQALVESRPEGWWYSALLPGGRVVVGLMGDGESLRGVRGQETWLSLLARTTATRERLEACDFSGEPPRAVPAAVACLDRVHAEHWLAVGDAACAFDSLSSQGISKALGSALLAAESLEQHLRGRADALGAYAARVRQGFVEHLRTRDHYYREERRWPDAPFWRNRRKALASGALAA

SEQ ID NO: 86862 - protein, 506 aa, Rhodanobacter sp.
  misc_feature (1)..(506): tr|A0A0Q9P6D9|A0A0Q9P6D9_9GAMM Tryptophan halogenase OS =Rhodanobacter sp. Soil772 OX=1736406 GN=ASG75_11310 PE =4 SV=1
MTDLRIRNIVIVGGGTAGWMAAAAFAKVLGAAYSIRLVESEEIGTVGVGEGTVPHLKLFNNLLGIDDVEFVKNTQGTFKLGVQFNDWGRLGDSYVHGFGTIGHDVGLLPFHQYWIKAHRAGKAQDIGAYSLNTVAAPRGRFMPSASDAPPGSPLANVAYAYHFDAGKYARFLRGYAEQRGVRRTEGKVAQTVLHPDSGFVEAIVLESGERIEGELFIDCSGFRGLLIEQALHTGYLDFSHWLPCDRALAVACEKVGPPTPYTRASARPAGWQWRIPLQHRTGNGYVYSSAHVSDDEAAATLLGHLDGKPMGEPRLLRFTTGVRRQAWNRNVVALGLAGGFMEPLESTSIYMIQSGIARLLNLFPQRDFSSVLIERYNTQSRFEYERIRDFLILHYHATERDDTPFWNQCRTMSIPPQLADNIRLFRDSGRFFRDGEEMFAVVSWVQVMLGQHIMPQSYHPLVDQMPDAELAEFMASVGRVVASCVDVMPPHQAFLDRCCTAPALVA

SEQ ID NO: 86863 - protein, 506 aa, Pseudoalteromonas tunicata
  misc_feature (1)..(506): tr|A4CBD4|A4CBD4_9GAMM Tryptophan halogenase, putative OS=Pseudoalteromonas tunicata D2 OX=87626 GN=PTD2_17655 PE=4 SV=1
MDIKKVAILGGGTAGWLTANHLGKALIGQGISITVIESPDIPTIGVGEGTVPMMRETLKYFGISESQFIKECDATFKQSIKFVNWLDKTAHGEGNFYHHLFDFPFPNNRDLTPFWLRTQHKSFAQTVSFQANVCEAKKAPKKISTPEYVGETTYAYHLNAKKFAELLQNHAVNKFSVAHQVSTVIDATVNNTDIELIVTDTHGEQVFDFYVDCSGFNCYLLGKKLNIPFVDMSHKLPIDKAITAQIPTEDDAEIPPYTIATAHEAGWIWDIALKNRRGTGFVYSSNYLSDEEAKQKFERYLGQSLEGIVSRVIPMKIGYREQFWQGNCVAIGLSQGFVEPLEATAILVTDFCARHLAERFPRSKSELPACQSRFNRNVKYAWDRVIDFIQLHYYLSDRQDSAFWLDWKNVDRLSDELKQKLAIWQNNPPLSTDFFSKFEVFDVENYLYVLYGMHYLTKPSYIDAKSFEQDQILAQQVEDHSQKLIASLPSHRELIDKLARFDFSKL

SEQ ID NO: 86864 - protein, 524 aa, Saccharophagus degradans
  misc_feature (1)..(524): tr|Q21LA5|Q21LA5_SACD2 Tryptophan halogenase OS=Sacchar ophagus degradans (strain 2-40 / ATCC 43961 / DSM 17024 ) OX=203122 GN=Sde_1262 PE=4 SV=1
MSMSKSSTSKPVTSIVIVGGGTAGWITAGTLAAHLNSNSQATVTVTLVESPTTPTIGVGEGTWPTMRNTLKKMGVRETDFIRECNATFKQGAKFCGWTTGEQNDGYYHPLVLPQGYADINLAPHWLASNKATPFAQSVCVQAALCETGLAPKLISTAEYAAIANYAYHLDAGAFTRFLTKHCTQNLHVQHVLADVTSVQAKENGDIESVNTLQAGNIYGDLFIDCTGFEALLIGKHFKVPFISCKHTLFIDTALAVHLPYTDDQSNIASHTISTAQTSGWIWDIGLQNRRGIGHVYSSAHTTDAQAEKALRQYIAKLSPNTQDLTVRKIPIEPGHRQTFWQNNCVAIGLSAGFLEPLEASALVLIEMSATMLAEQLPTTRASMAIIAKRFNQTNTYRWQRIIDFLKLHYTLSKRTDSDFWIDNRAPNTNPDSLKELLELWKYHYPWHSDFDRAAEVFPSASYQYLLYGMQYPTQSSHLGMSDKNIALANKLFTQNKALTQKLLSSLPSNRELINKIKTYGLAQI

SEQ ID NO: 86865 - protein, 520 aa, Sphingomonas sp.
  misc_feature (1)..(520): tr|J8W309|J8W309_9SPHN Tryptophan halogenase OS=Sphingo monas sp. LH128 OX=473781 GN=LH128_05595 PE=4 SV=1
MTIDNPPSGRVVILGGGTAGWLAAAYLSRTLGMTGITLVESSEIGIIGVGEGTFPTIRSTLAGLGISEAEFLVRADATFKQGVLFEGWATGTDSYFHPFNMPIGGEDEALLPHWLADTSPQRAAWADAATVQEQVIRAGRAPKRPEDPDFSGPMNYAYHFDAARFADYLRDISIAAGVVRIEGTVGNVQRKADGDIAALELTDGRIVEGDFFLDCSGFRALLIGQTLGADFTSCSDSLFNDRALAMQVPYDRPDAPVRPYTLATAHEAGWTWDIGLTERRGIGYVYSSRHCSDDEAEATLRRYVGPQGAALNPRQLRFETGYRQQQWIGNCVAVGLSAGFFEPLESTGIMLIEAALRMVGDFLGPDLLAGADHDARDAAARSFNRLMSARFERIVHFLKLHYCITRRTDTAYWRDNADPATIPEPLRDMLAQWRRRPPSRFDFVVDLETFLPPSYHYILYGMGFETTLAGARYPGAAQAREVFARVRAAHAGARGGLPDHRALLNHYHARTRVPSSKVSR

SEQ ID NO: 86866 - protein, 510 aa, Sphingomonas sp.
  misc_feature (1)..(510): tr|A0A4R2TTK0|A0A4R2TTK0_9SPHN Tryptophan halogenase OS =Sphingomonas sp. PP-CC-3A-396 OX=2135655 GN=C8J40_1055 4 PE=4 SV=1
MTVTRPGKITKVVIVGGGTAGWMTAAALSRLVASGVSVTLVESEEIGTVGVGEATIPSLLDYNRMLGIDEDAFVRATGATFKLGIEFRNWTRLGDSYLHPFGTHGRDIDGVSFHQLWLRQAASGNADPGPIGDYCLSSVAARRGRFTRPSANPQSVLSTLSYAFHFDAGLYATFLRDIAEQDGVVRVEGRVIAVDRNAETGFIEAVRLEGDRRIEGELFIDCSGFRSLLLGDTLGVPFASWKQWLPCDRAWAVPSERQGPLTPYTRATADSAGWRWRIPLQHRVGNGYVYSSAHIDDDDAKQALLAGLDGAALGEPRQLRFEAGRRKRLWDRNCVAIGLSGGFLEPLESTSIHLIQSGIARLMTLFPDRGFDPVEIDEYNRVMLREYEQVRDFIILHYHATERSDSPFWDHCRTMALPESLQGKLALWRGKARVFREQGELFTPDSWIAVLLGQNVQPASFDPLTGGLPLGEATRFMAHIREMIGMTAEAMPTHEDFIAQHCAAPIFRQA

SEQ ID NO: 86867 - protein, 346 aa, Alteromonas sp.
  misc_feature (1)..(346): tr|A0A3D5F4V8|A0A3D5F4V8_ALTSX Tryptophan halogenase (F ragment) OS=Alteromonas sp. OX=232 GN=DGF36_04610 PE=4 SV=1
MSTKPLHVVIAGGGTAGWMTANLLAKRWLNQPVTITLVESPDIGIIGVGEGSTPTLKRFFSDMGIAEQDWMSECNATYKVSIRFEGWSPGANIPAYSHPFISQLDTFSERSFYVNCFHRRMGQDVTTRPDEFLFNGWLAKHQRSPVTPPNFPFRIEYGYHFDSGLVGEFLKRHAQGLGVIHKALNITDVECHPNGDIAALHSKEGERVEGDFFIDCTGFQSLLLQKTLGVNFKSFKDNLFNDSAVVCPTPAQSELPVETRATALSAGWAWQIPLTNRTGNGYVYSSDFISDEQAASELCRHLGVDEDSAALRKLTMKVGQVERHWANNCLAVGLSQGFIEPLEATA

SEQ ID NO: 86868 - protein, 501 aa, Sphingomonas sp.
  misc_feature (1)..(501): tr|A0A0Q4LAA9|A0A0Q4LAA9_9SPHN Tryptophan halogenase OS =Sphingomonas sp. Leaf38 OX=1736217 GN=ASE88_00190 PE=4 SV=1
MTEQRVKKVVIAGGGTAGWLAAAALSRQLGQLLDITLVESDEIGTIGVGEATIPTMRSFHAILGLDEREFMRATQATFKLGISFENWARDGDRYIHSFGDLGKSTWMGDFHHFWLAAKAAGDPSEIGDYCLELQAAKAERFALPSEGEIHYAYHLDAGLYARFLRARSEANGLKRIEGRIASVDRDGETGFIRALVLDSGERVEGDLFIDCTGFRGLLIEGTYAAGYEDWSHWLPTNSALAVQSAATGPAHPYTRAIAHDAGWRWRIPLQHRVGNGLVYASDHLSDDEAHARLLSAIDGAPLTEPRLIRFRTGRRRQVWMGNCVALSLASGFVEPLESTSIHLVMTGVTRLMQAFPFGGIAPAAVTRFNEQAQAELERVRDFIVLHYHLNERTEPFWAARRDMPIPATLVERIALFAEAAQAYQGGEDLFRVASWVQVMLGQRLAPRDHHRLGSIMGGAQLAGVLTNIRSTIADAVAGMPMHQQFLDRYLPAPAVSAAQIR

SEQ ID NO: 86869 - protein, 496 aa, Alteromonas sp.
  misc_feature (1)..(496): tr|A0A349Z1E1|A0A349Z1E1_ALTSX Tryptophan halogenase OS =Alteromonas sp. OX=232 GN=DCW59_03260 PE=4 SV=1
MPDAIKKVVIAGGGTAGWMTAALLNKVLGKSVAIELVESEQIGIVGVGEATIPPIQIFNRFLGIDEKAFLRETQGTIKLAIKFENWRVPGESYYHTFGAPGTTMGFCSFHHYWLKAKEAGLDKSFWDFDLNYLACQQGKFNKINTQNPLYDMPYAYHFDSALYGQFLRRFAEQGGVKRTEGIIEHVQQNTESGFITGLQLTDGRQIEGDLFIDCTGLSGLLIRKTLGVNYEDWSHWLPADSALAVPSGRFDKTLPYTRSIAHSYGWQWRIPLTHRNGNGIVYSSQFTTDEQANKTLLGNLDTEALGEPRTIRFNTGRTDQQWCKNVVAIGLSSGFLEPLESTSIHLIQSGIIRLMKMFPNQGISPTMVGMYNAESKDEFETIRDFIILHYHVNERDDSEFWRAMREMTIPERLAQKIEAFKETAAIFNEQNDIFRDASWVQVMMGQGLSPRDYHAAVNAMDNQTLLSAMQQIQQAKMQPVAKLLGHDEFIERYTSA

SEQ ID NO: 86870 - protein, 194 aa, Xanthomonadaceae bacterium
  misc_feature (1)..(194): tr|A0A4V1S671|A0A4V1S671_9GAMM Tryptophan halogenase (F ragment) OS=Xanthomonadaceae bacterium OX=1926873 GN=EO P89_15885 PE=4 SV=1
LAGEATLHRRPHAWAGNCVGIGHAAYVLEPLTPAPMMLLERDLDRLLSLIPNTGSMAVERGEYNRRYQEDTQNAALFACAMFATNGLPDTPYWRAAQGESRPDALVRKLEMFETRGLLVAYDLEPFHPEDWTILHLGMGRRPTRHDRLADRANPAQVTAFLANLERSVAQSVSTLPDCDTYRLQLEQYLLRNRR

SEQ ID NO: 86871 - protein, 323 aa, Alteromonas sp.
  misc_feature (1)..(323): tr|A0A359K7S5|A0A359K7S5_ALTSX Tryptophan halogenase (F ragment) OS=Alteromonas sp. OX=232 GN=DEH24_16005 PE=4 SV=1
MNQPDKQHVVIAGGGTAGWMAAAAISRLLHGRVEVTLVESSDIGTVGVGEATIPTLLFFHKLLKIDEQAFMAATNATFKLGINFENWRSLNHAYLHAFGATGKDCWAAGFQHFWRRGLDLGLSEDFGQYCLERVAAEAEKFAHLPGNGLNYAFHIDATRYAGFLRELAGQAGVTRIDATIERVNVREQDGFIESLTLNNGQTLSGDLFIDCTGFRGLLIEKALHTGYEDWSQWLLCDSAVAMQTESVEAPLPYTRCIAREAGWQWRIPLQSRVGNGLVYCSNYLSDERATEILQQNINGNPLNSPRVIKFRPGRRLKQWNRNC

SEQ ID NO: 86872 - protein, 506 aa, Xanthomonadaceae bacterium
  misc_feature (1)..(506): tr|A0A354YC00|A0A354YC00_9GAMM Tryptophan halogenase OS =Xanthomonadaceae bacterium OX=1926873 GN=DDZ67_07085 P E=4 SV=1
MQNQGRIRRVVIAGGGTAGWIAGCALAHQFRDLLDITLVESEQIGTVGVGESTVPPIRAFHRFLQIDEQEFLRAVAGTFKLSISFENWRRPGDRYIHPFGITGQGTLVCAFHHFWLESQRRGMQSEFGSYCLETAASLQDRFALVEQPALNYAYHFDAGLYARFLRARAERLGLKRVEGKIQRVRQRADGGVEALLLEDGQLIEGDLFIDCTGFRGLLIEQTLGTGYEDWSHWLPSDRAVAVQTESVGAPVPYTRAIAHEAGWRWHIPLQHRVGCGLVFSSRHMSDDEACAKLLRDVAAPPIREPWLVPFRTGRRRQAWNRNVVSLGLASGFIEPLESTSIHLTIAAVVRLISLFPAEGIAQSSVDIYNDISRAEMEHVRDFIILHYHANRRDEPMWRQCREMELPASLAVRLRAWRERAHAWQGSDELFRVDSWTHVMLGQGIVPRQQHPLARALSDADLRRLFDGIRAPIERAVAQMPSQDRFIERYCRAAPEVWGGRKPKVVA

SEQ ID NO: 86873 - protein, 501 aa, Sphingomonadales bacterium
  misc_feature (1)..(501): tr|A0A124IHM1|A0A124IHM1_9SPHN Tryptophan halogenase OS =Sphingomonadales bacterium BRH_c42 OX=1734407 GN=APF82 _04825 PE=4 SV=1
MAIDRIIIVGGGTAGWMAAAVLSRLKSGRPLEITLVESEAIGTIGVGEATIPPFVEFNQMLEIDEREMLAEVRGTFKLGIQFVNWGRQGESYIHPFGAYGYTMGGIAFHQVWHRFRQEGDRRPLQAFNLETMAAYFGKFARTQDYQRDDLPPINYAYHLDAGRYAQFLRKYAEKRGVARQEGHVTDVALHPETGFVTSIRLASGEEIAGDLFIDCSGFRGLLIEQALATGYEDWTHWLPCDRAVALPCARDDSSPPPPFTRATAHSAGWQWRIPLQHRTGNGHVYCSAYMSDDEAHAILVANMAGKPSADPNFLRFVTGRRKKFWNRNVVALGLAAGFMEPLESTSIHLINTGLNKLVAMLSLEGITQAQEDTFNRLTAREYARIRDFLILHYNATARDDSEFWNYCRTMSVPETLTQKIELFRSNGQIFREEDELFTESSWTAVMMGQGIEMAGHSPVADTLDPAKTRKEFDEMEKSIRHVVEHMPGHGDYLRSYCPAPM

SEQ ID NO: 86874 - protein, 503 aa, Sphingomonas sp.
  misc_feature (1)..(503): tr|A0A4R2TMF0|A0A4R2TMF0_9SPHN Tryptophan halogenase OS =Sphingomonas sp. PP-CC-3A-396 OX=2135655 GN=C8J40_1075 PE=4 SV=1
MKNTPVRRVVIAGGGTAGWMAAAAIARTMGSTIELTLIESDAIGTVGVGESTIPPMITFNRLLGINEAEFMRETQATFKLGILFDDWKDRGESYFHSFGITGKDHWSAGFQHFWLHGLTKGHDQPYDDYCLELRAALQGKFAHLPDDRMNYAFQLDSTRYAKFLRRMAEADGTRRLEGKIAQVELNGESGDIAALVLESGARIEGDLFLDCTGFRALLIEGALHAGFDDWTHYLPCDSAIAIQTESVRPALPYTRAMAHDAGWQWRIPLQHRTGNGLVYCSRYLDRDAALDRLLGNIEGKTLTEPNVIRFVTGARRQQWHRNCIAIGLSGGFMEPLESTSIHLIQRAVLRLLRLFPSGAVSPRDVAEFNDQQHTDMLQIRDFLILHYKATERRDSAFWRHCAAMPIPASLEQKIELFRETGRVFRKNEELFAENSWVQVMLGQGIVPQSYHPIATKLRDEELARLLGGLRENTNATVAGLPEHAAYVARYCGTAPAPSPAIAA

SEQ ID NO: 86875 - protein, 500 aa, Alteromonas sp.
  misc_feature (1)..(500): tr|A0A359K2K8|A0A359K2K8_ALTSX Tryptophan 7-halogenase OS=Alteromonas sp. OX=232 GN=DEH24_06865 PE=4 SV=1
MKQTHPASVIIVGGGTAGWMCAAYLAKQWGAKSHITLIESSQIGTVGVGEGSTPFLKQFFTDLGWQEQDWMPHCDATYKTGIEFANWTNSQRFSQYFHPFFTPLDQQTGELFFDSCQTLRSSRGNADVKPEHYFCAAEMVRKRVTPQSTKLPGDIDYAYHFDASKLALSLKSFSTQLGVQHKEGKVAEVYTEEGNIRGLRMEQGETLSADLYVDCSGFVGLLMKKALNAPFRSYRETLFNDAAVALPTQHNSNEPIAPQTRSVGMDNGWMWQIPLTSRIGNGYVYSSDFCSADEAEGALRKALNVDDLVPARHLKMQVGRLDEHWQGNCVAIGLAQGFIEPLEATALMLVQYALYQLVDGVESAKPLASAQQVYNREMNRMFDGIRDYIAAHYYLNTRTDSAYWQACRHEMCVPDNLQYLLDKWDSGACFETALDHLDSELVYLRPSWYCILAGMGRFNSPEAHQKAPVHQASLAHLAKLTAHYFSQQQRPRSGELTCGM

SEQ ID NO: 86876 - protein, 495 aa, Alteromonas sp.
  misc_feature (1)..(495): tr|A0A359JZI4|A0A359JZI4_ALTSX Tryptophan halogenase OS =Alteromonas sp. OX=232 GN=DEH24_00895 PE=4 SV=1
MPQTIQNVVIAGGGTAGWMTAALLRRVLSPTIRIELVESEQIGIVGVGEATIPPIQTFNQFLGIDEKAFLRETHATIKLAIKFENWKTQGDSYYHTFGAPGTTMGFCSFHHYWLKAKQAGLAQSLWDFDLNYLSCLQGKFNKINTPNPLYEMQYAYHFDSALYGQFLRKTAEQAGVVRTEGIIEHVQQDPDSGFITALQLTNGKQIQGDLFIDCTGLRGLLIQQALGVSYEDWSHWLPADSAQAVPSERFDKTLPYTRSIAHRVGWQWRIPLTHRNGNGIVYSSQYLSDDEAGQTLLNNLDTKALDTPRTIRFKTGRTDQQWCKNVVAIGLSSGFLEPLESTSIHLIQSGIVRLMKMFPNQGISQAMVDLYNAESKDEFETIRDFIILHYHVNQRDDSDFWRDMRNMAIPDRLAQKIAAFEDTAAIFNEQSDIFRDASWVQVMMGQGLDPKDYHPAADAMDNAQLMDAMQQIYKAKQQPLDKLMSHDEFIKRYTA

SEQ ID NO: 86877 - protein, 519 aa, Alteromonas sp.
  misc_feature (1)..(519): tr|A0A2D5LIT8|A0A2D5LIT8_ALTSX Tryptophan halogenase OS =Alteromonas sp. OX=232 GN=CL592_05100 PE=4 SV=1
  misc_feature (503)..(503): Xaa can be any naturally occurring amino acid
MRKSVLIVGGGTAGWITAAYMARMLAADTPGGVSITLVESEEIGILGVGEGTFPIIRKTMGRIGLDESDLIKHADATFKQGIRFNNWKKNPADDPNDSYFHPFQVASQHTDMDLLPYWLLGVAGDVPWSECCTVQERAVEAKLAPKLISHPNYEAPLNYAYHFDATKLAALVRRRAMEMGVKLLIDTIDDVKLDEDGAIAAVTARQHGDLTADLFIDCTGFRATLIGETMGSEFTSYKNELFCDRAVALQVPYEQAGGPIPSCTYTTAKDYGWIWDIGLHERRGLGYVYSSKYCDEETAVATLKAHIGPAADKLQHRLLKFEPGYRKTQWHKNCVGIGLSVGFIEPLEATGISFAEVAALMLCNLFPWSGDYERSATQFNNAMSKRFEHVKDFIKLHYYLTERDDTAFWRDNQDPATASEYLKGKLEQWRHRPPSFLDIDASHDIFDENSWQYILYGMGFKTDISAREGALRFFDDARNEFASIRQQSENAKRAVPTHRDLVXEVCQSGFKPQPRRARR

SEQ ID NO: 86878 - protein, 368 aa, Alteromonas sp.
  misc_feature (1)..(368): tr|A0A3D0S9T9|A0A3D0S9T9_ALTSX Tryptophan halogenase (F ragment) OS=Alteromonas sp. OX=232 GN=DEO96_02660 PE=4 SV=1
LACNEKRFMRPFEAGNSPLSNIAYAFHFDAGLYAKFLREVAESHGVQRTEGKVTEVRQHPDGAIQSLILENGSEHGADFFIDCSGFRALLIEQTLKTGYEDWRHWLPCDRAITAPSSLTETPWPFTRAAAQQAGWQWRIPLQHRVGNGHVYCSEFMTDEDAEKTLRLNIEGDLLADPRQIRFVTGKRNKFWHKNCLAVGLSGGFMEPLESTSLHLVQVAISKFFSYFPFQQPCQSDIDQYNTEMDFEFTRIRDFLILHYHVTDREDTEFWRYCKHMAIPDTLQEKIDHFKANGRINRFNNELFNDLSWFEVMYGQGLRPEGYHALADIFPEEELARRLEGIQRVVRKSVDYMPGHAEFIAKTCAANRD

SEQ ID NO: 86879 - protein, 254 aa, Alteromonas sp.
  misc_feature (1)..(254): tr|A0A359K3N2|A0A359K3N2_ALTSX Tryptophan halogenase (F ragment) OS=Alteromonas sp. OX=232 GN=DEH24_08660 PE=4 SV=1
LPFTRSTAKTAGWQWRIPTQQRVGNGHIYCDRFMGHDLARQILLDGLDSKPISEVRTIQFKTGCQEAFWEKNCIGIGLSAGFLEPLESTSLFLIQQGISRFISLYPDAGLHPVIRNEYNRLMTREFEQVRDFIILHYKATTRDDSPFWRYVRDMEIPDSLTHKMTLFQQGGRVFRDDHELFTRSSWVAVMVGQGIFPKTFDPILANIPVADIQRSLNSMKQAMEQSVARLPDHAMFIEKYTAMQPNPTFSMGRQ

SEQ ID NO: 86880 - protein, 277 aa, Xanthomonadaceae bacterium
  misc_feature (1)..(277): tr|A0A4Q2XKZ9|A0A4Q2XKZ9_9GAMM Tryptophan 7-halogenase (Fragment) OS=Xanthomonadaceae bacterium OX=1926873 GN= EOP89_10290 PE=4 SV=1
LIGETLGVGYEDWSHWLPMNRALTVQTAAVGPALPYTRAIAHEAGWQWRIPLQHRVGNGIVYAAEHLSDDAARALLIGSVAGNTLTEPRLIRFTTGRRKRAWEKNCVALSLSSGFIEPLESTSIHLMMIALTRLLQLFPFGGATAAVADRFNAMAQREMEGVRDFVILHYHLNARDEPFWRQCREMSIPDTLAARLALFAEEAQAYQGADELFRVSSWLQVMLGQGLTPHRHHLMARMMPPGQLAEALTNLSRGIAARVATLPPHQQFVDTLAGART

SEQ ID NO: 86881 - protein, 255 aa, Xanthomonadaceae bacterium
  misc_feature (1)..(255): tr|A0A4V1S915|A0A4V1S915_9GAMM Tryptophan halogenase (F ragment) OS=Xanthomonadaceae bacterium OX=1926873 GN=EO P89_00535 PE=4 SV=1
VPSAHTGPLPPYTRSTARTAGWQWRIPTQRRVGNGHIYSSAFLSDDAAADILLAGIEGPALGDPRQLRFTAGCRQRFWTGNCIAIGLAAGFLEPLESTSIYLIQEGISRFISLFPAAPIPDIVRTEYNRHMRTEFEQVRDFIILHYCATERDDSAFWNHCRTMPLPDTLNHKIALFRETGRIFRYEEELFARPSWVAVMLGQGIVPSTCDPIVATLPSGDVAHSLLSMQRAIHTAAEQMPTHQQFIAHYCAAQAA

SEQ ID NO: 86882 - protein, 244 aa, Alteromonas sp.
  misc_feature (1)..(244): tr|A0A349Z746|A0A349Z746_ALTSX Tryptophan halogenase (F ragment) OS=Alteromonas sp. OX=232 GN=DCW59_13480 PE=4 SV=1
MSHSANPVNTPEVKRVVIVGGGTSGWMCAAAIARIAPPDTRITLVESEDIGVIGVGEATIPTLMEFNDFLGIKEHDLLRECQGTYKLGIDFVDWYQKGQSYFHPFGFYGRDTPEFSFHQLWLRLNAMAAKGEIPADAPGIISDYNLCTVAAMQGRFAPPQGGADTILSTMRYAYHFDSARYGQMLRRYAEQRHVERIEGIVNSVEQDHNTGLLQSVTLNSGQVLQGDLFVDCSGFKALLIDGAM

SEQ ID NO: 86883 - protein, 270 aa, Xanthomonadaceae bacterium
  misc_feature (1)..(270): tr|A0A3C0HID8|A0A3C0HID8_9GAMM Tryptophan halogenase (F ragment) OS=Xanthomonadaceae bacterium OX=1926873 GN=DC M32_05395 PE=4 SV=1
VAVPCASAAPLTPYTRATARKAGWQWRIPLQHRTGNGHVFDINAISEDEATATLLANLDGEPLAEPRTLRFTTGIRREPWKRNVVSMGLASGFLEPLESTSIHFIQSALARLVEWLPDRGFDPASTAKYNALTRFEYERCRDFLVLHYRANRRVGEPFWDARRHAPVSDELAEKLALFASHGRIHRFADELFTETGWLQVMVGQGLMPRRPNPMALGGDPMPMIEDVRRVLAAAAQAMPTHEAFIARHCRAPGAAALSLSNVNPPSGTPA

SEQ ID NO: 86884 - protein, 528 aa, Alteromonas sp.
  misc_feature (1)..(528): tr|A0A2D5BWK7|A0A2D5BWK7_ALTSX Tryptophan halogenase OS =Alteromonas sp. OX=232 GN=CL593_00325 PE=4 SV=1
  misc_feature (253)..(253): Xaa can be any naturally occurring amino acid
  misc_feature (317)..(317): Xaa can be any naturally occurring amino acid
MNKLVKHVVIVGGGTAGWLSAGILAAKLKPDYKVTLIESPNVPTIGVGEGSWPSLRDTLLDIGINEREFLTACKGTFKQGSSFVNWRACAANSQTFAHQYHHPFTVPTAYNELDIHACWQSIAKHESYENSFSLQSLMCTQGKAPKQATTPDYAHVLNYGYHFDATALANLLKKHCLESLGVHYVSAHVSKVEEHPNGYIRQLLTDNGQAISGDLFIDCSGKSGLLIQQHFNVPWLSLETTMLNNRAMAVQAXYAPDDQAISSTTVATAQRVGWTWDIGLQHRRGVGLVYASEFCNEDAAIDILFKQVSQRLRHAKXQDLSVRTLSFEPGYRKDFWVKNCLSLGMSSGFVEPLEASAIAMVELGLRMLCESFPHNAEHMEHVSQRYNQRFEYRWQRVVDFLKLHYVLSERNEPYWLAQRHESRTPPSLSTLLEIWKYQSPSRLDLIENEEIFPSASYQYVLYGMGYNTALPAIALSDADLSKAKAIRSKMTQMKQAYLHALPNNRALLDELCGLNEEKGNKEHNHVHI

SEQ ID NO: 86885 - protein, 502 aa, Pseudoalteromonas sp.
  misc_feature (1)..(502): tr|A0A410CP58|A0A410CP58_9GAMM Tryptophan 7-halogenase OS=Pseudoalteromonas sp. R3 OX=1709477 GN=ELR70_13960 P E=4 SV=1
MNKKRIVILGGGTAGWMAANLMAKSWQDQPIEVALIESPDIGIIGVGEGSTPQFKGFMDFMGISEAQWMPACNATYKNGIRFIDWSTRPGFSSYFHPFPSQPDDYSAPAFFHNSFVRRKAIDVAGHPDPFFLTTYLAEQAKAPIAAHHFPFEINYGYHFDAGKLGLFLAQTARDLGVEHIQANIIDVRKHTDGDIAALVAEQGTEITGDVFIDCSGFRSLLMQQHLDVGFDSFANNLFNDAAVVLPTEQGDVISSETQSIARKFGWSWHIPLTNRIGNGYVYSRRYCDPDKAETELRAALGLLDSDVEARHLTMKVGQVKKHWHKNCLAIGLSQGFIEPLEATALHIVQETVQSFIECYQDGEFTDKFKTRHNQSLDARYQAIRDYIVAHYRVNSRTDTQYWRDNANNNQLSRSLYDVLQTWVSGKNLSDELHRQDIDKYYPSVSWHCLLAGYGIYPEQSQLIAGNEEANKYDLSQIQDYIARCGLNFDDHRVQLERLAQKR

SEQ ID NO: 86886 - protein, 501 aa, Alteromonas sp.
  misc_feature (1)..(501): tr|A0A2D5BWN7|A0A2D5BWN7_ALTSX Tryptophan halogenase OS =Alteromonas sp. OX=232 GN=CL593_00330 PE=4 SV=1
  misc_feature (348)..(348): Xaa can be any naturally occurring amino acid
MSTFDSATLPPVKNVVIAGGGTAGWMAAIALVKLLGKSLNITLVESKDIGIIGVGEATIPPIRTFHKLLNIDEKAFMKATQATFKLGIEFEGWREENHSYIHSFGVTGRECWAGEFHHFWLRAQKLGFGGEFGDYCPELQAAKANKFFTNESMPLNFAYHFDAVAYGRYLRTLATEAGVHHIVGNITNVSKCSQTGNITSLEVDESQEVNGDFFIDCTGFKGLLIEQALHTGYDNWSHYLPCDSAVAMQTETVAAPVPYTKSSAHKAGWRWQIPLQHRVGNGLVYCSKYMSDDEAKSTLVQQVEGEPVNDARFIKFTPGKRRLGWNKNCVALGLASGFIEPLESTSIXLIMTGIVRLMRLFPFDGVTQSAIDEYNTKYDSEMAAILDFIVMHYKVTNREDSPFWQHCKNMPIPPSLTHKLNLFKDTGRVFLDDGDIFRVDSWTQVMLGQGLTPNQYHKVADEMSEAELERFMMGLKQQVDNQVSRLPSHEAFLDKYLAVNS

SEQ ID NO: 86887 - protein, 516 aa, Sphingomonas sp.
  misc_feature (1)..(516): tr|A0A4R2TR17|A0A4R2TR17_9SPHN Tryptophan halogenase OS =Sphingomonas sp. PP-CC-3A-396 OX=2135655 GN=C8J40_1055 5 PE=4 SV=1
MTKRILIVGGGTAGWLTAGYLAKRLGADLPGGVAITLVESRDIGILGVGEGTFPTIRRTLATIGIDEADLIRRCGATFKQGAKFVHWRHAPGQGATDHYSHPFQVADASDGLDLLPYWLLGLGGTENWDEVSNPQKKAADRHRAPKLPTHPDYVGPLNYAFHFDAVALAGLLREQGVKNGVRHLTDTVSEVLLDADGAIGGVRTERNGILDADLYIDCTGFRAELIGKAMKIPFRSCRDVLFCNRAIAAQLPYTRPDEPIASYTISTAQEAGWIWDIGLDRRRGIGHVYSSDHSEDDAAERVLRGYLGAAGETADVRHFKFEAGYREVNWYKNCVAVGLSSGFFEPLEATGIAFAEVSAGMIANLFPWGGDYETSARQFNANMLRRYERALDFIKLHYCISERRDTAFWRDNVADASVPDRLLEMLDRWRFRPPNELDIDGQVDIFTEASWQYVLYGMGWKTDLSAKAGALRYGEDARRAFAEVQRQARYAIANLPSNRDLVSYAQSHSFGARAAA

SEQ ID NO: 86888 - protein, 496 aa, Alteromonas sp.
  misc_feature (1)..(496): tr|A0A3D5F5E7|A0A3D5F5E7_ALTSX Tryptophan halogenase OS =Alteromonas sp. OX=232 GN=DGF36_04605 PE=4 SV=1
MPDAIKKVVIAGGGTAGWMTAALLNKVLGNSVTIELVESEQIGIVGVGEATIPPIQTFNRFLGIDEKAFLRETQGTIKLAIKFENWRKPGESYYHTFGAPGTTMGFCSFHHYWLKAKEAGLDKSFWDFDLNYLACQQGKFNKINTQNPLYDMPYAYHFDSALYGQFLRRFAEQGGVKRTEGIIEHVQQHPQSGFITGLQLTDGRQVEGDLFIDCTGLNGLLIRKTLGVNYEDWSHWLPADSAQAVPSERFDKTLPYTRSIAHSCGWQWRIPLTHRNGNGIVYSSQFTTDEQANETLLGNLDTQALGEPRTIRFNTGRTDQQWCKNVVAIGLSSGFLEPLESTSIHLIQSGIIRLMKMFPNQGISPAMVDMYNAESKDEFETIRDFIILHYHVNERDDSEFWRAMREMTIPERLAQKIEAFKETAAIFNEQNDIFRDASWVQVMMGQGLSPRDYHAAVNAMDNQTLLSAMQQIQQAKMQPVAKLLGHDEFIERYTSA

SEQ ID NO: 86889 - protein, 331 aa, Alteromonas sp.
  misc_feature (1)..(331): tr|A0A3D0SC90|A0A3D0SC90_ALTSX Tryptophan halogenase (F ragment) OS=Alteromonas sp. OX=232 GN=DEO96_06785 PE=4 SV=1
SEAAGVTRCEGKIQSVDTDPQSGNLTRLSLDTGITIEGDVFIDCTGFRGLLIGEHLGVGYEDWSHWLAADRAIAIQTQSTEAPKPYTIATAHKAGWQWRIPLQSRVGNGIVYSSRYLSDEDALATLKQNLDGEMLTEPRYLKFKTGRREKAWHKNCIAVGLASGFLEPLESTSIHLVTTALIRLMKLFPFSGDHQLLAEQYNRETQKEMETIRDFIILHYNLTKRTDSDFWEHYRTMEIPEPLAHRMAIFASNGYVWPDDVALFRVDSWVQVMMGQGLMPAQHHGASRMLPTDSLKQQLSAFKQSVNNALGQLPAHADFIARYCPASEQVK

SEQ ID NO: 86890 - protein, 513 aa, Xanthomonadaceae bacterium
  misc_feature (1)..(513): tr|A0A4V1S8F3|A0A4V1S8F3_9GAMM Tryptophan 7-halogenase OS=Xanthomonadaceae bacterium OX=1926873 GN=EOP89_05575 PE=4 SV=1
MQTVSNIVIVGGGTAGWLTAGIIAARHQGRMHAGFTVTLVESPNTPIIGVGEGTWPTLRSTLSKMGVSESDFFRECNASFKQGARFARWTTGEPDEGYYHPLMLPQGFTRVNLAEHWIADPKGQSFCDMVSPQGLLCDDGLAPKTIATPEYEAVANYAYHLDAGKFAGFLQRHCCEKLGVRHVLADVQHATQAENGDILTVVTEQAGEIPGDLFIDCTGFAALLIGKTLGVPFKSCADTLFCDTALAVQLPHEDPEGPIASHTISTAQTAGWIWDIGLPTRRGVGHVFSSSHISDDAAEQELRAYLGPAGKDLPVRKLAIRAGHRETFWKNNCVAIGLAAGFLEPLEASAIVLIELSAKLVAEQMPVCREVMDILAARFNATTHYRWGRIIDFLKLHYVLTKRTDSDFWRDNVRPETIPDRLQDLMTLWRYQPPWFHDEFDRVEEVFPAASYQYVLYGMGFHTEVAHDAIAGDRRIAEQARREAATQTERMRHGLPRHRDLIRKIVERGLPTI

SEQ ID NO: 86891 - protein, 508 aa, Xanthomonadaceae bacterium
  misc_feature (1)..(508): tr|A0A4Q2XV39|A0A4Q2XV39_9GAMM Tryptophan 7-halogenase OS=Xanthomonadaceae bacterium OX=1926873 GN=EOP89_01045 PE=4 SV=1
MAGNDVEPIRVVVLGGGTAGWMTAAALVGLIGSGCKVELVESAEIGVVGVGEATLPHLRGFLRTLGIVEAEFMAATHATYKLGIEFCDFAKLGDRYVHPFGTFGRPFGGVDFHHYWLRQYCGSTASTVGMTPSIPIGEYCLSAMAAKHRRFAHPQSDADDPTTSYGYAYQFDATRFAPFMSTWAQTRGARRTEGIVTTVERNDRGDVASMVLADGRRVEGDLFVDCSGFRSLILGSTMAEPWEDWSHWLPCDRAVAVPSASPDGPIEPFTQATAMSAGWRWRIPLRHRVGNGYVYASRFLNDEGARDALLATLDMPPLAEPRLLRFSAGRRRRSWVGNVVAIGLASGFLEPLESTSIHLVQMAITQLIERFPERVIEAMDRDGFNAAVDADYDRIRDFLILHYHATTRSDSPFWNHMRTMPIPDTLADRIALWRRSAHMPRYGFGLFLEPSWVAVLLGQNIVPEGWDQRADLPDGAALDRAFERLRRSIDDRVAAMPEHAAYLHRATA

SEQ ID NO: 86892 - protein, 501 aa, Alteromonas sp.
  misc_feature (1)..(501): tr|A0A3D5F4C7|A0A3D5F4C7_ALTSX Tryptophan halogenase OS =Alteromonas sp. OX=232 GN=DGF36_02560 PE=4 SV=1
MQTQLNKIIILGGGSAGWMTAAALGKILSKHPCDIQVIESEEIGTVGVGEATIPQIQLFNDLIGLDEDTFIKRTQGTFKLGIQFQNWRKPGHSYYHAFGEVGKNMEGVHFYQYWLKMRQQGKAAPLDEYTLSSLACNEKRFMRPFEAGNSPLSNIAYAFHFDAGLYAKFLREVAESHGVQRTEGKVTEVRQHPDGAIQSLILENGSEHGADFFIDCSGFRALLIEQTLKAGYEDWRHWLPCDRAITAPSSLTETPWPFTRAAAQQAGWQWRIPLQHRVGNGHVYCSEFMTDEEAKKTLRLNIEGDLLADPRQIRFVTGKRNKFWHKNCLAVGLSGGFMEPLESTSLHLVQVAISKFFSCFPFQQPCQNDIDQYNAEMDFEFTRIRDFLILHYHVTEREDTEFWRYCKHMAIPDTLQEKIDHFKANGRISRFNNELFNDLSWFEVMYGQGLRPEGYHALADIFPEEELARRLEGIQRVVRKSVDYMPGHAEFIAKTCAANRD

SEQ ID NO: 86893 - protein, 545 aa, Alteromonas sp.
  misc_feature (1)..(545): tr|A0A349Z5P0|A0A349Z5P0_ALTSX Tryptophan 7-halogenase OS=Alteromonas sp. OX=232 GN=DCW59_10905 PE=4 SV=1
MIKKRRLVIVGGGSAGWMAAAYLNGALNDKGMSSNVDIHLIESPDTPRISVGEATIPSMRHLLAVVGVDELDFMRATEATFKQSIKYTNWVTNNNTFYHHPFSRLTMQPVDNMGMRWLQSDQSIPFMETCSAQPIICEMGLSPQALGDSRMGQPLSYAYHMNAQKFADYLRDFSVQRGVKHTFANVVDIQLRDQDHIHSVTTDQGQVCEADLFVDCTGFRANLIEKTLGVGFEDCSQWLLCDRAITMHVPYDEYYPGLVRPYTTATALSNGWIWDIPMQTRRSIGYVHSSDFIDEESAEREMRAYQGGNNEALDARLIKFKVGRRHRTWHGNCIAIGLAGGFIEPLESTGLYLSDMGAVMLAEHFPWHDEGMDLLATRYNRMMSNRFYEILDFINMHYCLTQRTDTDFWLEVQKPERINDRLAAKFEYWKVKPPSPSDFDDMWLPGQSLTAVAKDYAGADRRPAVDTAGLWNYQSYECILYGMAFLKKQSAQWFGESRPPTRVSQTILQRLQMARNQLPPHAHWLQQRLGMQQYPTAAKPAGWVA

SEQ ID NO: 86894 - protein, 500 aa, Shewanella sp.
  misc_feature (1)..(500): tr|A0A0C3MP24|A0A0C3MP24_9GAMM Tryptophan halogenase OS =Shewanella sp. cp20 OX=1521167 GN=DB48_16980 PE=4 SV=1
MTSEIKHLVIVGGGSAGWMAAAMLSRMMGPQLEITLIESDQIATVGVGEASIPPLQLFNRALGINEHDFLRATQGTYKLGIEFEHWLKQDQAYMHAFGTQGKDLALTPFRHLWLKSKPESASDYWRYSLNYQAAKANRFQPLAHLPGTDLPGINHAYHFDAGLYGKLLAHYSQQNGVNRKEGKITRVLLDGDSGDIDCLELENGERIRGDLYLDCSGFHGLLIKQALNVEYLDYRQWLLCDRAIAMPTMATRPRRPYTRASAHKAGWCWQIPLQHRTGNGIVYSSQYMSDDEALSLLEKHIDGAPIGEPRKIQFIPGRVAKQWHKNCVSLGLSSGFLEPLESTSLHLIQSGIIRLLKLFPNPLNMDALRDEYNRQSAEEFEQIRDFIILHYKLNQRDNDEFWQHCREMSVPDTLTAKMALFSATGVIDCPQESLFSENAWTQVMLGQGLMPASAHPLASALTTEQTTELLRNLNRIITKTTDAMASHDDYLKQHCAAQSE

SEQ ID NO: 86895 - protein, 499 aa, Alteromonas sp.
  misc_feature (1)..(499): tr|A0A349Z232|A0A349Z232_ALTSX Tryptophan halogenase OS =Alteromonas sp. OX=232 GN=DCW59_04485 PE=4 SV=1
MTTPPKQIVIAGGGTAGWIAAVALARKMGPLVNIRLVESSTIGTIGVGEATIPPLRTFHKLLQIDEQAFMRATAATFKLGIRFENWGRIGEQYIHSFGMTGQQSWLAEFVHFYLSAKARGLEGDYGDYCFELEAARQHKFATSAQSNIQYAYHLDAGNYVAFLKRFCSNLGVTHCDGVISQVLQHDNGDIKALRLASGELIEGDFFIDCTGFKGLLIEETLHTGYEDWSHWLLCDSACAVQTTSTEPAAPFTRSAAHHAGWQWEIPLQHRTGNGNVYSSAFMDDNAASEQLMQNVKGEAITTPRTLRFKTGRRNKAWHRNCLALGLASGFVEPLESTSIHLVIMGITRFMQLFPHGGNDQALADEYNQQTQLELERIRDFIILHYHVTQRDDSPFWEHCKNMTVPDSLQTRIVLFQEQAHAFQKQNELFRVDSWAQVMLGQGVTPDYHHPAATMLSDVQLNQSMQQQRQRVLQAVAQLPAHEDFIRGYCATPQKAEALL

SEQ ID NO: 86896 - protein, 504 aa, Sphingomonas sp.
  misc_feature (1)..(504): tr|A0A4R2TWV6|A0A4R2TWV6_9SPHN Tryptophan halogenase OS =Sphingomonas sp. PP-CC-3A-396 OX=2135655 GN=C8J40_1033 19 PE=4 SV=1
MVEQRIRKVVIAGGGTAGWLTAAALSRQLGQLLDITLVESEEIGTIGVGEATIPTMRSFHAILGLDEREFMRATQATFKLGIAFENWAHEGDRYIHSFGDLGKSTWMGDFHHFWLAAKAAGDPSEIGDYCLELQAAKAERFALPSEGEINYAYHLDAGLYARFLRARSEANGLKRIEGRIASVDRDGETGFIRALVLDSGERVDGDLFIDCTGFRGLLIEGTYAAGYEDWSQWLPTNSALAVQTASTGPAHPYTRAIAHDAGWRWRIPLQHRVGNGLVYASEHLSDDEAHARLLGAIGSAPLTEPRLIRFRTGRRRQVWKGNCVALSLASGFVEPLESTSIHLIMTGVLRLMKSFPFGGIAPAVVTRFNDQAQAELEHVRDFIILHYHLNNRPEPFWAARRDMPIPDTLVERIALFAEGAQAYQGGEDLFRVASWVQVMLGQHLVPHDHHRLGSIMGGPQLASVLTKIRSDIAGMVSGMPTHQQFLDRYLAPPIAAGSGIRSMN

SEQ ID NO: 86897 - protein, 244 aa, Alteromonas sp.
  misc_feature (1)..(244): tr|A0A3D5F5V0|A0A3D5F5V0_ALTSX Tryptophan halogenase (F ragment) OS=Alteromonas sp. OX=232 GN=DGF36_06160 PE=4 SV=1
IATAHKAGWQWRIPLQSRVGNGIVYSSRYLSDEDALATLKQNLDGEMLTEPRYLKFKTGRREKAWHKNCIAVGLASGFLEPLESTSIHLVTTALIRLMKLFPFSSNHQLLAEQYNRETQKEMETIRDFIILHYNLTKRTDSDFWDHYRTMDIPEPLAHRMEIFAQNGYVWPDDVALFRVDSWVQVMMGQGLMPAQHHGASRMLPTDGLKQQLSAFKQSVDNALGQLPAHADFIARYCPAGEQVK

SEQ ID NO: 86898 - protein, 471 aa, Alteromonas sp.
  misc_feature (1)..(471): tr|A0A3D2Y3F4|A0A3D2Y3F4_ALTSX Tryptophan halogenase (F ragment) OS=Alteromonas sp. OX=232 GN=DHW66_15030 PE=4 SV=1
TANLLAKRWLNQPVTITLVESPDIGIIGVGEGSTPTLKRFFSDMGIAEQDWMSECNATYKVSIRFEGWSPGANIPAYSHPFISQLDTFSERSFYVNCFHRRMGQDVTTRPDEFLFNGWLAKHQRSPVTPPNFPFRIEYGYHFDSGLVGEFLKRHAQGLGVIHKALNITDVECHPNGDIAALHSKEGERVEGDFFIDCTGFQSLLLQKTLGVNFKSFKDNLFNDSAVVCPTPAQSELPVETRATALSAGWAWQIPLTNRTGNGYVYSSDFISDEQAASELCRHLGVDEDSAALRKLTMKVGQVERHWANNCLAVGLSQGFIEPLEATALHLVQTSVEIFLDHVDEGGFADTQRNAYNQLITERFERVRDYIVAHYRLNTRSDSEYWLANQQNENLSDSLLHLLNVWYRRGDLGQEIQRQQLDSHFGNTSWHCLLAGYGAFPPLEKSVTTTDLYKQNQLAAFFEGCLLNFRSQ

SEQ ID NO: 86899 - protein, 510 aa, Xanthomonadaceae bacterium
  misc_feature (1)..(510): tr|A0A4Q6GX73|A0A4Q6GX73_9GAMM Tryptophan 7-halogenase OS=Xanthomonadaceae bacterium OX=1926873 GN=EOP92_03925 PE=4 SV=1
MNDKPIRRIVIVGGGTAGWMAAAPLAQRLARRLEAPCEVILVESPDIGTIGVGEATLPTIRYYNAALGLDPDDFVRRTKASYKLGIEFKDWGHLGNRFFHGFGDFGPSLDRHPSHLFWLRMSAQFKDMPALENWSVSSIMARNNKFVPPHEGTPSITTAYSYGFHFDAGLYAEYLRDYAVAHGAQRIEGTVVEVEQHPESGFITAVKLRDGRRVAGDLFVDCSGFRGLLIEGALKAGYDDWSEQLPCNSALAVPCASAAELTPYTRSTAKEAGWVWRIPLQHRTGNGHVYSNAFTSDGRAREVLLGSLDGAALDEPRQLRFVTGRRRKSWVKNCVAVGLSAGFVEPLESTSISLIETAVGKLVELFPDRDCRPELADEFNRYMGVRYESVRDFIILHYKLTKRDDSEFWRYCASMPIPDSLRHQIELFRETGRVAILDRDGFAEPSFVAMLMGLGAMPKRYDPFVDGVDIREVHGHFAGVRDMIVQAVARMPTHDAFIAGQLGAASPRAA

SEQ ID NO: 86900 - protein, 183 aa, Alteromonas sp.
  misc_feature (1)..(183): tr|A0A3D5F3D8|A0A3D5F3D8_ALTSX Tryptophan halogenase (F ragment) OS=Alteromonas sp. OX=232 GN=DGF36_01780 PE=4 SV=1
MTIPPKQIVIAGGGTAGWIAAAALARKMGPLVNIRLVESSTIGTIGVGEATIPPLRTFHKLLQIDEQAFMRATAATFKLGIRFENWGRIGEQYIHSFGMTGQQSWLAEFVHFYLSAKARGLEGDYGDYCFELEAARQHKFATSAQSNIQYAYHLDAGNYVAFLKRFCSNLGVTHCDGVISQVL

SEQ ID NO: 86901 - protein, 452 aa, Alteromonas sp.
  misc_feature (1)..(452): tr|A0A3D0Q566|A0A3D0Q566_ALTSX Tryptophan halogenase (F ragment) OS=Alteromonas sp. OX=232 GN=DEP33_11380 PE=4 SV=1
RLLGIAEKQFLSECDASFKQASKFVGWQQGGEDKYYHPFTAPAGFGAVNLVEAWHDEGCPGDFESWVCAQGMACERYQAPKMPQLPEYAYNFNYGYHLSADKFVALLHRHCTEQLGVQYKSAHVAGIQSHPDGAIAAIELAQGEPLAGDLFIDCSGFSARLIGQHYNVPFVSKRHILFNDTAVAAQVNHVGDQTPIASCTVATARPHGWVWDIALQSRRGIGHVFASELTTESQAEDALRAYISSDQSLSQKAIMPRTIRFDPGHRARFWEHNCVAIGVSAGFVEPLEATALVLIEKSAEWIADQLPRSRAAMAVLGKRYNEMTDARWSEIIDFIKLHYVLSERRDSHYWQAHADPASWTDSLQDALQLWQSQPPGLLETNLRQELFSSASKQYVLYGMGFRSQDWQPGGITSLRKPLIERVRREFLHNGDKLLAQLPTNREYFNRLKAASA

SEQ ID NO: 86902 - protein, 504 aa, Xanthomonadaceae bacterium
  misc_feature (1)..(504): tr|A0A4V1S8W0|A0A4V1S8W0_9GAMM Tryptophan 7-halogenase OS=Xanthomonadaceae bacterium OX=1926873 GN=EOP89_01955 PE=4 SV=1
MTGANLGPIRKVVIVGGGTAGWMAAAAAARYLDDGQRQVVLIESDAIGTVGVGEATIPPILGFNALIGVDEREFVRATGATFKLGIEFVGWDTGDDRYMHAFGGHGRDIQGLAFHQLWLKLRDYPGVGGIEAYAPSAVAAYLHKFGLPTGQQSQPLAYAYHFDAGLYAAFLRRRAEAGGVTRIEGRITGADRHSDTSHVSAVRLDDGRSVDGDLFIDCSGFRSLLLGETMGVPFEDWSHWLPCDRAVAVPTEPSSPLLPYTRATARSAGWQWRIPLQHRTGNGHVYSSAHISDDEATSMLLANLDARPTAEPRQLRFKAGRRTKMWEGNVVALGLAGGFLEPLESTSIHLIQTGISKLFALFPDRGFSTVERDEYNRLMGDAYTSIRDFIILHYHATRRDDSAFWRHARTMPIPDTLTRKIALFREKGRIFRYDDELFGISSWVQVLLGQNVIPTGYDPIVDALDADRVADAVRQIRAATLRGVQALPDHAAFIASHAAAGRKI

SEQ ID NO: 86903 - protein, 513 aa, Sphingomonadales bacterium
  misc_feature (1)..(513): tr|A0A101VDT0|A0A101VDT0_9SPHN Uncharacterized protein OS=Sphingomonadales bacterium BRH_c42 OX=1734407 GN=APF 82_07750 PE=4 SV=1
MISQVADPREERIRDVVIVGGGSAGWMAATMLATALSREIRIRLVESDAIGIVGVGEATIPPIKKFNRFCKVDEQAFLRETNGTFKLGIEFHNWGMPGDRYLHQFGFVGRELDAMVKLHNWWLTGRLAGQADYPAWEDVFIAKAAARANRFALPAHRQGDPLGRFTYAYHFDALLYGKHLRRLAEARGVERVEGTIVDVERADGHEGVTALLIEDGRRIEADLFIDCSGFRSLLMGEALNEPFDDWSHWLPADRAMVVPSAPAKDGITPYTKGIAHPVGWQWRIPLQNRIGNGHVFSSSFSSESEAEQRLMATLDTTPLDTPRLLKFRTGRRRRAWAGNVVALGLSSGFLEPLESTSIHLVQSGLERLIELFPTRRMDAVLRDRYNAQSEREWMQVRDFIIVHYKLTQRTDSEFWKYTAAMDIPDSLSAVLDLWKERAILGVDGGHLFQLGSWSSILIGQNFLPQGVHALADRAEPAAVAADIRRIVDEVNRAASQLPQHHEFIARYCAAPAS

SEQ ID NO: 86904 - protein, 490 aa, Alteromonas sp.
  misc_feature (1)..(490): tr|A0A2D5LHM4|A0A2D5LHM4_ALTSX Tryptophan halogenase OS =Alteromonas sp. OX=232 GN=CL592_02920 PE=4 SV=1
MSTKPLHVVIAGGGTAGWMTANLLAKRWLNQPVTITLVESPDIGIIGVGEGSTPTLKRFFSDMGIAEQDWMPACNATYKVSIRFEGWSPGANIPAYSHPFISQLDTFSERAFYVNCFHRRMGQDVITRPDDFLFNGWLARHQRSPLTPSNFPFRIEYGYHFDSGLVGEFLKRHAQGLGVVHKALNITDVECHPNGEIAALHSKEGERIEGDFFIDCTGFQSLLLQKTLGVNFKSFKDNLFNDSAVVCPTPAQTTLPVETRATALSAGWAWQIPLTNRTGNGYVYSSDFISDEQAASELCRHLGVDEESAALRKLTMNVGQVERHWAKNCLAVGLSQGFIEPLEATALHLVQTSVEIFLDHVDEGGFSDTQRNAYNQLITERFERVRDYIVAHYRLNTRSDSEYWLANQHNENLSDSLLHLFNVWYRRGDLGQEIQRQQLDSHFGNTSWHCLLAGYGAFPPLEKGATTTDLYKQNQLAAFFEGCLLNFKPQ

SEQ ID NO: 86905 - protein, 515 aa, Saccharophagus degradans
  misc_feature (1)..(515): tr|Q21LS3|Q21LS3_SACD2 Tryptophan halogenase OS=Sacchar ophagus degradans (strain 2-40 / ATCC 43961 / DSM 17024 ) OX=203122 GN=Sde_1094 PE=4 SV=1
MYKIKKIMIVGGGTSGWMTAAALAKFLIPHGIDIELIESSAISSVGVGEATIPHIRVFNDMLGIDENEFIRETGATYKLAIRFDGWGEKNSSYFHPFGVSGFPINGIDFHHYWLRLKQEAEVSEYGAYSFAAVAANLKRFGYPASNPNSPAHDFSYAFHIDASKYASFLKSRALAAGVTYIDGKVTEVTRDKEGAINAVQLDSGEFFVADFFIDCSGFRSLLLGESLGVEFESWAKWLPCDSAYAVPSEALSSPPSYTLSSAQLSGWQWRIPLQHRTGNGLVFSSSHQTNESALSTLLGNVSEPITADPKLLRFEAGKRKQSWEKNCVAIGLSAGFLEPLESTSLYLVQVAVQKFLELFSCEAAIGTTEMNAFNYLINIEYERIRDFLVLHYYANNRKDSDFWADCREVAIPSSLEEKLEIFRCGAGVVEYRHGLFMPASWLAVYLGQGVVPVTYDPRLKKMPLGKMKAFLAQVEWDVQRAVERYESHSLFVLRANSKASGAYPPASMSLYGAPR

SEQ ID NO: 86906 - protein, 501 aa, Xanthomonadaceae bacterium
  misc_feature (1)..(501): tr|A0A4Q2XWW3|A0A4Q2XWW3_9GAMM Tryptophan 7-halogenase OS=Xanthomonadaceae bacterium OX=1926873 GN=EOP89_02665 PE=4 SV=1
MAEQRISKVVIAGGGTAGWLAAAALSRQLGQLLDITLVESEDIGTIGVGEATIPTMRAFHTILGLDEREFMRATQATFKLGISFENWARDGDRYIHSFGDIGKSTWMGDFHHFWLAAKAAGDTSEIGAYCLELQAAKAERFALPSEGQINYAYHLDAGLYARFLRARSEANGLKRIEGRIASVDRDGETGFIRALVLDSGERVEGDLFIDCTGFRGLLIEGTYAAGYEDWSQWLPTNSALAVQTAATGPAHPYTRAIAHDAGWRWRIPLQHRVGNGLVYASDHLSDDEAHGRLLSTIGGAPLTEPRLIRFRTGRRRQVWMGNCVALSLAGGFVEPLESTSIHLIMTGLTRLMQTFPFGGIAPSMVKRYNDQAQAELERVRDFIILHYHLNERPEPFWAARRDMPIPDTLVERIALFTESAQAYQGGEDLFRVASWVQVMLGQRLMPRDHHRLGSIMGGPQLTSVLTNIRNTIADAVAGMPTHQQFLDRYLSPPVATPTKMR

SEQ ID NO: 86907 - protein, 204 aa, Alteromonas sp.
  misc_feature (1)..(204): tr|A0A359K1Z4|A0A359K1Z4_ALTSX Tryptophan halogenase (F ragment) OS=Alteromonas sp. OX=232 GN=DEH24_05845 PE=4 SV=1
QFNDLSVKQIQIQSGHREHFWHNNCVAVGLSAGFLEPLEASALVLVELSATMLAEQLPVNRATMPIIAKRFNQTFQYRWQRIIDFLKLHYMLTKRTDTAFWRDNCDPATIPDSLQELLDLWRYHPPYDHDFTSNNEVFPAASYQYVMYGMGFESDLSFGQQQVAKAFAQQQLQMNQQARQKVLSALPTHRDLLNKINQYGLQPV

SEQ ID NO: 86908 - protein, 541 aa, Xanthomonadaceae bacterium
  misc_feature (1)..(541): tr|A0A4Q6FH33|A0A4Q6FH33_9GAMM Tryptophan 7-halogenase OS=Xanthomonadaceae bacterium OX=1926873 GN=EOP93_14475 PE=4 SV=1
MSDGRIRRVVIAGGGTAGWVAAVALSHQFRDLLDITLVESDQIGTVGVGESTVPTIRTFHKLLKIDEREFMSEVAASFKLSISFEDWLRPGHRYFHPFGHTGMGTWSTEFHHFWLDSLRRGMTSELGDYCLETVASRGNRFALLDRNDAGPQEWSTRWARSPMSPGRLEVNYAYHFDAALYAAYMRRKCEGFGVTRVEGKIQEVRQHPESGFVQALVLDNGTVVEGDLFIDCTGGRAVLSEQTLKTGYEDWNQWLPCDRAVAWQTESNGPAVPYTRAIAHEAGWHWSIALQHRIGCGTVFSSAHMSDDEARARLVAANPARPLRDPWIIPFRTGRRRKAWNKNVVALGLASGFIEPLESTSIHLTISAVTRLLQLFPADGIDDSLVQRYNEVSRAEMEHVRNFIIMHYHLNQRDEPLWRDMRAMSLPPELALRIQAFRDRAHAWQGEDELFRLDSWTHVMLGQGVMPKQHQQVVRGLPDADMRRLFEAIREPIDRAVAAMPTHQQFLDSYCKAPQSAWDLMHQRAQMHARVTAQSQAPSAG

SEQ ID NO: 86909 - protein, 504 aa, Sphingomonas sp.
  misc_feature (1)..(504): tr|A0A4R2TKM6|A0A4R2TKM6_9SPHN Tryptophan halogenase OS =Sphingomonas sp. PP-CC-3A-396 OX=2135655 GN=C8J40_1096 1 PE=4 SV=1
MADQPLRIAIAGGGTAGWMAAATFARFLETGYEIDLIESDDIGTVGVGEATIPQIHLFNDALGLDEDAFLRATGGTFKLGIEFVDWFKPGHRYMHAFGDVGRDVGLLPFHQYWLRARSLGLAGDLGAYSLNTHAALAERMQRGPARTSRVLPSMPYAYHFDAGLYARYLRRYSETRGVNRIEGKIVRVTRDGESGDVSGLVLENGTTVAADLYIDCTGFRGLLIEEALGTGYEDWTHWLPCDRAIAVPSARSKAFTPYTRSTAHAAGWQWRIPLQHRTGNGVVFSSAHMSEDEATATLLSGLDTPAMADPRTITFRTGRRKQMWNRNVVALGLAAGFMEPLESTSIHLIQSAIARLLKLLPGRVIADADRSEFNRQSDFEYERIRDFIILHYKATTRDDPPFWRQCRDMAVPDTLAAKIELWRGSGHIVREHEELFTEVGWLQVLAGQGIAPHGHHPLADAISTADLAEFMDTIDKLNAREAGQMQDHAAFVAQHCAAAAGLAA

SEQ ID NO: 86910 - protein, 497 aa, Alteromonas sp.
  misc_feature (1)..(497): tr|A0A359KAY6|A0A359KAY6_ALTSX Tryptophan halogenase OS =Alteromonas sp. OX=232 GN=DEH24_21710 PE=4 SV=1
MTQSKTRVVIAGGGTAGWLSAFSLVTRLGALLDITLVESDQIGTVGVGEATIPTMCNFHRLMGLDEREFMAATQATFKLGIQFDNWGNQGDSYVHSFGEIGQRSWMAEFHEFWMEAVANGQQDTLEDYCLELKAAKQNKFALKVGNRPLNFAYHLDATAYAAYLRNKAEQAGVTRIEGKITTVNKHPDSGNLRELVLDNDARIEGDVFIDCTGFRALLIGEALGVGYDDWSHLLAADRAIAVQTTAVEPPRPYTIATAHKAGWQWRIPLQSRVGNGIVYSSRFSDDETALATLMSNVTGEAVTEPRYLKFKTGMRQQAWAKNCVAIGLSSGFLEPLESTSIHLVTTALIRLMKLFPFEGECGLLAERYNRETQKEMETIRDFIVLHYHLTQRDDSAFWDFYRNMEIPESLQHRMAMFAEHGYVWPDDVALFRVDSWVQVMMGQGLMPKRHHGASRMLPTASLTQQLTAFKQSVNNALAQLPEHEAFIKQYCPADKSA

SEQ ID NO: 86911 - protein, 505 aa, Sphingomonas sp.
  misc_feature (1)..(505): tr|A0A0Q4TYZ5|A0A0Q4TYZ5_9SPHN Tryptophan halogenase OS =Sphingomonas sp. Leaf257 OX=1736309 GN=ASF14_13245 PE= 4 SV=1
MTKVTNDVVRVVIVGGGTAGWMAGAALTRLLSGQCTVRLIESEAIGVVGVGEATLPHIRSFNERLGIPEAEFMARTRATFKLGIEFRDWGRIGDSYIHPFGTFGRGAGAIDFHHYWSRLARERQDLPPLDQLSYACTLAREARFEHPDQGRGGLTSTFGYAYQFDALLFAPYLRSLAEEAGAVRTEGMVVDVERDGESGLIRSVTLADGERVEGDLFIDCSGFRSLLLGQTLDEPFEDWSKWLPTDRAVAMPCRTETAVTPYTSAIAMPAGWRWRIPLQHRTGNGYVYASDFISDSDAARALEEAVEGEKLAEPRLLRFKAGRRRRSWVGNCVAIGLASGFLEPLESTSIYLVQQAITALIELFPGRQMDASDRDEFNRVIDLEYDRIRDFLILHYHATSRDGSPFWTYVRTMAIPDSLGEKLELWRRRGRVVKYREGVFLDASWIAVYLGQGIVPEGWDPRADVARTSDLVQAVRSLRSEIAAEVAKRPDHRAFLERYCPMVAA

SEQ ID NO: 86912 - protein, 503 aa, Xanthomonadaceae bacterium
  misc_feature (1)..(503): tr|A0A4Q2XY17|A0A4Q2XY17_9GAMM Tryptophan 7-halogenase OS=Xanthomonadaceae bacterium OX=1926873 GN=EOP89_00665 PE=4 SV=1
MTAGPVRRVVIVGGGTAGWMMAAAAARFLDDGQRTITLVESEAIGTVGVGEATIPPILAFNRLLGISEADFLRATGGTFKLGIEFVGWDTGDDRYFHPFGTHGRPFEGLNFHQIWLKLRDRKGIGGIEDYAMSSVAAAHDRYVPPASDPRSPQSGLAHAYHFDAGRYAAFLRERAEAQGAVRIEGRIATVDRDETTGHVVAVRLDDGRALQGDLFIDCSGFRSLLLGGTMDVPFENWSHWLPCDSAIAVPTARTEPIHPFTRSTARPAGWQWRIPLQHRTGNGYVYASRFTSDAEAEALLLANLDAPPVAAPRQLRFTAGRRIRLWEGNVVALGLAGGFLEPLESTSIHLIQEGISKLFGLFPDRRFTSVERDEYNRHMGNAYLRVRDFIILHYHATRRRDSAFWQHVGTMMVPDSLAAKIALFREKGRVFRYDDELFAIPSWVAVMLGQNIMPTGYDPIVDALDEDRLAEALRQMRAANLAAARAMPTHAAALAALGDAPGR

SEQ ID NO: 86913 - protein, 250 aa, Xanthomonadaceae bacterium
  misc_feature (1)..(250): tr|A0A4Q2XWD5|A0A4Q2XWD5_9GAMM Tryptophan halogenase (F ragment) OS=Xanthomonadaceae bacterium OX=1926873 GN=EO P89_01495 PE=4 SV=1
DEAEAQLLASLEGKPLADPRRLQFTAGRRRDCWNRNVVALGLSSGFIEPLESTSIHLVQAGIQRLIALFPDKRFDPVERDEFNRQMHDLYEDIRDFIILHYKATRRDDSPFWNQVRTMDVPESLQRKIDLFAGKGRLFREGYDLFSNPSWVAVCLGQGITPQGWEPAADALDEHKVASALEQMRRGYLDTAQRLPTHGDFLRRTALSPLAPQATSSPSASVPAQTASDDVPFFAFTAESPFDVGGGGSPL

SEQ ID NO: 86914 - protein, 503 aa, Novosphingobium sp.
  misc_feature (1)..(503): tr|A0A0N1AK13|A0A0N1AK13_9SPHN Tryptophan halogenase OS =Novosphingobium sp. AAP1 OX=1523413 GN=IP65_11870 PE=4 SV=1
MDDRKIRKVLIVGGGSAGWMTAAMLSQALARDCAITLVESEEIGTIGVGEATIPPIRVFNQTLGIDEREFLARTKGSFKLGIEFVGWGAENSRYFHPFGPYGRNFDMVPMHQYWLQARRQGETAPLDEHAMAWHLARAGRFAHPSPDPRSVMSTFDYAYHFDAGLYARFLRTIAEQRGVTRVEGRIADVALHGETGFVEAVTMADGRRIEAELFIDCSGFRGLLIEGALKTGYEDWSHWLPCDRAVAMPCAHPAADPNPTPYTRSTARAAGWQWRIPLQHRIGNGYVFCSAFLGEDRAAEDLASTLDGTALGDPRAVRFQAGRRKLHWNRNVIAVGLASGFLEPLESTSIHLIQANISKILALFPDRDFDPATRDEFNRVAHGEMERIRDFIILHYKLTQRQDAELWRHVAAMDIPDSLALKIAHFRRHGRLIARELDLFAPPSWLAVHIGQNNLPEGHDPLIDYRGVDGREWLGRLRGAMAAEAAQQPMHGAVLAGLAPQPA

SEQ ID NO: 86915 - protein, 513 aa, Pseudoxanthomonas sp.
  misc_feature (1)..(513): tr|A0A4Q9TGG3|A0A4Q9TGG3_9GAMM Tryptophan 7-halogenase OS=Pseudoxanthomonas sp. NML171590 OX=2527958 GN=EYC45_ 04890 PE=4 SV=1
MGSAHVASESIASIVVVGGGAAGWSAAAALIRHLPHCRVQLVESEEIGIVGVGEATVPNVRYFNLQVLGLEEGEFVRRTQGTFKLGIEFRDWRRPGDAYMHGFGAVGYDMGPLAFHQLWLHEVRAGRADADIGRYVLQNLAARQGRFMTAPADAPAGSPLADIAYAYHFDATLYAGYLRERAERQGVVRVEGRVVEATLRAQDGFVEAVVLADGRRIEGDLFIDCSGFRSLLLGEALQVPWVDWSHWLPCDRAVAVPCAPAGPPEPFTRSTARTAGWQWHIPLQHRVGNGHVYSSAFMDDATATEQLMSSLEGPARAEPRLLRFATGRRARFWERNVVAMGLASGFMEPLESTSILLVHNAVLRLLDVFPDKRFDPALLRRYNETTVFEWERIRDFLILHYKATERDDSAFWRHCAAMAIPDSLQQVIDLFAGSGRYHRNGEEFFSTSSWVQVLIGQGIVPQREHPLLAAIPEPQIQQFVGRVAQVLDNCVAAMPPHDQFIARTCAAPPPRLS

SEQ ID NO: 86916 - protein, 499 aa, Sphingomonas sp.
  misc_feature (1)..(499): tr|A0A4R2TRI0|A0A4R2TRI0_9SPHN Tryptophan halogenase OS =Sphingomonas sp. PP-CC-3A-396 OX=2135655 GN=C8J40_1052 28 PE=4 SV=1
MIVGGGTAGWMAATLLARKLDRQSVTITVVESSDIRTVGVGEATVPGIRDFFREIGVSEQEVMAGAQGTVKLGIEFVDWKREGERFFHPFGLYGMRSRGVAFHHYWRKLNAAGQTTPLSDFCLATALAERNLFMRPTDSPVHDLLFFDWAVHFDAGLFAKFLSKKAGEWGVKHIDATITDVLVDQSTGFISSVDTQCGKTISGDLFIDCSGFRSLLLGDALGVPYEDWTNLLPCDRAVAMPCERAGPLTPYTRSTALTAGWQWRIPLQHRVGNGYVYASRHISDDEAVATLKGRLEGEALAEPNIIRFRTGRRTAFWQGNCVALGLAAGFMEPLESTSITLIQTGLEKLLALLPDRSFDPALADEYNRTTGLEYARIRDFLVLHYFANGRQGEPMWDRCRGTALPEQLERKLTLFKARGHLVRYEWESFQDPSWLSMYAGFGIDAAAHDPLADHFSLSDLEAAFERMKGSIRDAVALAEPHETFLKSFAPRQLISHPGR

SEQ ID NO: 86917 - protein, 515 aa, Alteromonas sp.
  misc_feature (1)..(515): tr|A0A359KD73|A0A359KD73_ALTSX Tryptophan halogenase OS =Alteromonas sp. OX=232 GN=DEH24_21715 PE=4 SV=1
MNTASKKTRVVIVGGGTAGWLTAGIIAARHPLLVENSNTELVLLESPDVKNLGVGEGTWPTMRDTLKQIGLSERAFLSCCDASFKQASKFAGWRQDPAQHYYHPFTAPAGYGVLSLADAWIEAGYPQDFESWVSAQGHACERQLSPKLPQLPEYAFTYNYGYHLNAGKFVALLQAHCTEKLGVTYRQGHVAHIVSHDSGAIKALQLEDGNTVEGDLFIDCSGFAAVLMGKHFQIPFVSQRGVLFNDTAIAAQVNHAAPQTPIASATVATAQTSGWIWDIALQHRRGIGHVFASEFCAVEDAEQTLRNYIANDPNLQQDEVTTRVIKFDPGHRKYFWHHNCVAIGVSAGFVEPLEATALVLIEKSAEWVAEQLPRSPSAMPVLAKRFNQLTNERWQEIIDFIKLHYVLSDRTDSAYWRAHQQHESWTDSLSEALQLWQSQPPGLYESSNRQELFSSASKQYVLFGMGFRAEQWQSCGRLALQQPLIERFRREVQQQVNRVNAQLLTNREYLQKLRK

SEQ ID NO: 86918 - protein, 84 aa, Xanthomonadaceae bacterium
  misc_feature (1)..(84): tr|A0A4Q2XWA7|A0A4Q2XWA7_9GAMM Tryptophan halogenase (F ragment) OS=Xanthomonadaceae bacterium OX=1926873 GN=EO P89_01550 PE=4 SV=1
MTGPIEAPRTRVVVAGGGTAGWIAAAAIVRQLGPLVDVTLVESNEIGTVGVGESTIPTARSFHAFLGIDEAAFMRATQATFKLG

SEQ ID NO: 86919 - protein, 517 aa, Alteromonas sp.
  misc_feature (1)..(517): tr|A0A359K8S6|A0A359K8S6_ALTSX Tryptophan halogenase OS =Alteromonas sp. OX=232 GN=DEH24_13940 PE=4 SV=1
MIVGGGTAGWLCAGMLAAKLGKQGERHRGVEITLIESPDVSTIGVGEGSWPSLRDTLREIGLSESAFITHCQASFKQGSTFVGWRDGSEHDRYHHPFTNPAGYTEIDVHACWQALHSNKPYDRAFSVQPELCEQHKAPKQLATPDYAYVLNYGYHFDATRLAEMVSDHCVNQLGVRHVQAHIEHVVSHHNGDIKALTTQCGQTLEGDLFIDCSGQSALLAGQHYNVPWNSVKDILLNDSAMAVQVPYHEQDNTIASTTLATAHPQGWSWDIGLQHRRGVGMVYSSDFASAEDIEQSLKQYLTKRLPHDVVEQATCRQLKFSPGYRSEFWTHNCLSLGMASGFIEPLEASAVAMVELGVRMLCEQFPQNRDHMRILAARYNERFAYRWARVIDFVKLHYAINQRTNDAYWNAHRDPATWPDSLKSLLSLWQYQPPSRYDVVQNEEIFPSASYQFVLYGMGFKTESPALADSSDMLKRAGAISQKLQATLMQFGQGLPDNRALLNAIRERHKHSSGATL

SEQ ID NO: 86920 - protein, 530 aa, Xanthomonadaceae bacterium
  misc_feature (1)..(530): tr|A0A4Q2XVV9|A0A4Q2XVV9_9GAMM Tryptophan 7-halogenase OS=Xanthomonadaceae bacterium OX=1926873 GN=EOP89_00385 PE=4 SV=1
MTGRTPGPASARGPLRSIVIVGGGTAGWMAATLLARRLERQPVKITVIDSSAIGTVGVGEATVPGIRDFFREIGVTEQEVMAATQGTVKLGIEFVDWKREGERFFHPFGLYGMRSRGVAFHHYWRKMNVAGHASPLADFCLATALAERNLFMPPTDRPVHDLLFFDWAVHFDAGLFARFLAQKAIAWGVEHIDATITDVRVDGRTGFISGVDTSCGKAIDGDLFIDCSGFRSLLLGGALGVPYEDWTNLLPCDRAVAMPCTRSGPLTPYTRSTALEAGWQWRIPLQHRVGNGYVYSSRHISDDEAVATLKGRLEGEALGEPNMIRFRTGRRTAFWQGNCVALGLAAGFMEPLESTSITLIQTGIEKLLALLPDRGFDPALAEEYNRTTGLEYERIRDFLLLHYFANVRRGEPMWDRCRDTALPEALAHKLRLFKARGHLVRYEWESFQDPSWLSMYAGFGIDAAAHDPGADHFSIPDLESAFARMKESIEQAVALAQPHDAFLGLSARHPARAQAAEPGGAPDRLMMPAR

SEQ ID NO: 86921 - protein, 501 aa, Pseudoxanthomonas sp.
  misc_feature (1)..(501): tr|A0A4Q9TFS5|A0A4Q9TFS5_9GAMM Tryptophan 7-halogenase OS=Pseudoxanthomonas sp. NML171590 OX=2527958 GN=EYC45_ 08375 PE=4 SV=1
MTDSSQPRPVKRVVIAGGGTAGWMAAAALSRTLGKVLDITLVESEEIGTVGVGEATIPTLVTFHRLLDIDEQAFMAATGATIKLGIQFEGWREPGQDYIHSFGTTGKDHWTAGFQHFWMKGRQRGLARDYGDYCLELRAAQEQRFAHLARTGMNYAFHLDAGLYARFLRRFSEGFGARRIEGKIATVQTSAQGDIAALVMEDGTRVEGDLFIDCTGFRALLLGQTLGVAFEDWSHWLFADSALAVQTESVAPPVPYTRSMAGPAGWQWRIPLQHRVGNGIVYSSRFMDQEAARAALLDNLEGPPLFEPRPLRFTPGQRQVTWKRNCVALGLASGFLEPLESTNIHLVSRNLTRLLQSFPHVIRQVDIDEYNAQTEAEMVHIRDFVILHYHVTRRRDTPFWQACAQMDIPATLRHRIDLFAQTGRVFHVPNELFAENSWIQVMLGQGIAPAQYHPVADLMDDAELARFLDGIHQQVEQTVARLPTHADYLRSYCAQPRPAMA

SEQ ID NO: 86922 - protein, 513 aa, Alteromonas sp.
  misc_feature (1)..(513): tr|A0A3D5F5S8|A0A3D5F5S8_ALTSX Tryptophan halogenase OS =Alteromonas sp. OX=232 GN=DGF36_06165 PE=4 SV=1
MITRVVVVGGGTAGWLTAGIIAAKNPLVGENSHTEVILVESPDVKNLGVGEGTWPTMRDTLRLLGIAEKQFLSECDASFKQASKFVGWQQGGEDKYYHPFTAPAGFGAVNLVEAWHDEGCPGDFESWVCAQGMACERYQAPKMPQLPEYAYNFNYGYHLSADKFVALLHRHCTEQLGVQYKSAHVAGIQSHPDGAIAAIELAQGEPLAGDLFIDCSGFSARLIGQHYNVPFVSKRHILFNDTAVAAQVNHVGDQTPIASCTVATARPHGWVWDIALQSRRGIGHVFASELTTESQAEDALRAYISSDQSLSQKAIMPRTIRFDPGHRARFWEHNCVAIGVSAGFVEPLEATALVLIEKSAEWIADQLPRSRAAMAVLGKRYNEMTDARWSEIIDFIKLHYVLSERRDSHYWQAHADPASWTDSLQDALQLWQSQPPGLLETNLRQELFSSASKQYVLYGMGFRSQDWQPGGITSLRKPLIERVRREFLHNGDKLLAQLPTNREYFNRLKAASA

SEQ ID NO: 86923 - protein, 506 aa, Sphingomonas sp.
  misc_feature (1)..(506): tr|A0A4R2UDG1|A0A4R2UDG1_9SPHN Tryptophan halogenase OS =Sphingomonas sp. PP-CC-3A-396 OX=2135655 GN=C8J40_1031 55 PE=4 SV=1
METGGTRIVVVGGGTAGWMTAAALVRLLPTACSVHLIESAEIGIVGVGEATLPHIRAFVERLGLDEADFMRATHATFKLGIDFRDFGAIGDSYIHPFGTFGRPLDDVGFHHYWLRLAAEGRAGPIGDYSVAVAAAKAHRFAIPDGPADDLAASFGYAYQFDATLFGPYLRRFAEAHGARRTEARIVSVDQDPVSGDVRAVRLDNGETVEGDLFVDCSGFRSLLLGNAMAEPWEDWSRWLPCDRAVAMPCTSPEGPIEPYTRATAKPAGWQWRIPLQHRVGNGYVYSSAHIADQAAADALVASVEGTPLADPRFLKFRAGRRSNSWVGNVVAIGLASGFLEPLESTSIYLAQMAITQLIELFPQRAGSEGISATDRTEFNRMVDMEYDRIRDFLILHYHATTRDDSDFWNHVRTMEVPTTLADKMELFRRAGRVTQYSEGLFLEPSWIAVYLGQGIIPKAWDQRADRPGLDGLDRAVASLRDHVAATATAMPDHAAFIARRNATIAA

SEQ ID NO: 86924 - protein, 399 aa, Xanthomonadaceae bacterium
  misc_feature (1)..(399): tr|A0A4Q6GWR6|A0A4Q6GWR6_9GAMM Tryptophan 7-halogenase (Fragment) OS=Xanthomonadaceae bacterium OX=1926873 GN= EOP92_05810 PE=4 SV=1
WAAAFHHFWLDSQRRGMPSEFGDFCLETVASRGDLFTLDTQPQVNYAYHFDAGLYAKFLRRIAESHGLVRVEGKIREVVQDPGDGSVTALVLEDGQRLEGDLFIDCTGFRGLLIEQTLHTGYEDWNQWLPSDRAVAVQTESVGPPVPYTRAIAHEAGWRWHIPLQHRVGCGLVFSSRHMSDDEARAKLLRDVGAPPIREPWLVPFRTGRRLKAWNKNVVSLGLASGFIEPLESTSIHLAISAVVRLIQLFPIDGIAPSLVDLYNEVSRDEMEHVRDFIILHYHATQRDEPMWKECREMELPESLAVRLRAWRERAHAWQDANELFRIDSWTHVLLGQGIAPGQPHPLTRAVTDNDLGKLLTALREPIGRTVAQMPSQQAFIDRYCKAGAEVWGTRKPPQ

SEQ ID NO: 86925 - protein, 508 aa, Sphingomonas sp.
  misc_feature (1)..(508): tr|A0A0Q4TR79|A0A0Q4TR79_9SPHN Tryptophan halogenase OS =Sphingomonas sp. Leaf257 OX=1736309 GN=ASF14_11865 PE= 4 SV=1
MDAAPSADHIAQRVVIVGGGTAGWMAAAALARFAPASTRITLIESDAIGTVGVGEATIPGIRLFNQMLGLDEAEFLRATNGSFKLGIRFEGWSGEGSGYLHAFGSIGRGLGLVPFHHYWLRGGGAANPASLWGHMPSAQAAMAGRFAPDPGRPDLPSGLAWAYHFDASLYATLLRRHAEAAGVVRVEGRIASVAREPGGRVDHVVLDGGQAHAGDLFIDCTGFRALLIGETLAEPFDDWSEFLPCDRALAVAGERTSPLPPYTRAIAHGAGWRWRIPLQHRTGNGLVYDSRHLSEDEAAHRLLTALNGEAMGEPRRLRFTTGRRRRAWVGNCVALGLAAGFLEPLESTSIHLIQSGIARLLDYWPGTIPPAVEIDAYNRETAAEWLAIRDFLILHYHANTRPEPFWTERRAVPLPESLAARIALFRANGRFRREGEELFAEPAWVQVMIGQGIIPAAHHALADTLSADELDDFLSLTRRHAAQVAARLPTHDAFLAAHCAAPAPKVFA

SEQ ID NO: 86926 - protein, 255 aa, Xanthomonadaceae bacterium
  misc_feature (1)..(255): tr|A0A3C0HKL3|A0A3C0HKL3_9GAMM Tryptophan halogenase (F ragment) OS=Xanthomonadaceae bacterium OX=1926873 GN=DC M32_09180 PE=4 SV=1
MSLDNALRRIVVVGGGTAGWMAAALLATVLGRRIGITLVESEQIGTVGVGEATIPMIRLFNATLGLDEDEFVRETNGSFKLGIEFRDWLQPGQSYMHAFGPVGGPDRGLVHFWHHWARARLEGRAGALGDYVFNSVAGFAGRFMRPVAAAANSPLARLSYAFHFDATLYAAFLRRLAEARGVTRVEGRIVEVPLHPDTGFVEAVRTEAGVRVEGDLFIDCSGFRGLLIEEALASGYDDWSAMLPCNRAVAVPCAS

SEQ ID NO: 86927 - protein, 508 aa, Fulvimonas soli
  misc_feature (1)..(508): tr|A0A316IIF8|A0A316IIF8_9GAMM Tryptophan halogenase OS =Fulvimonas soli OX=155197 GN=C7456_102241 PE=4 SV=1
MNAPPIKHIVIVGGGTAGWMAAAALAKVLGRDYAIRLVESEEIGTVGVGEATMTHLKLFNNLLGIDEIDFIRKTQSTFKLGIQFRGWARPGDAYIHGFGAIGHDLGLLPFHQYWLKARQQGWAQDIGAYSLNTAAAVQNKFMAPATDVPPNSPLASIAYAYHFDAALYARYLRDYAERHGVRRTEGKIAQVLLRPDDGFVEAVALESGERIEGELFIDCSGFRGLLIEQALHTGYVEFTQWLPCDRAVAVASENAGPPMPYTRATARPAGWQWRIPLQHRTGNGYVYSSAHVSDDEAVATLLKNLDGRALGEPRPLRFVTGMRKRCWNRNVVALGLASGFMEPLESTSIHLVQTGIARLLQLFPRKDFAPVLSERFNAQTAFEVERVRDFLILHYHATERADTAFWTQCRTMSIPDSLADNIRLFRDSGRFFRNAEEIFAQLSWVQVMLGQRIVPQGYHPMVDQVPDADLRRFVTGVGQVIANCVEAMPTQAAFIERYCAAPPIPVPA

SEQ ID NO: 86928 - protein, 504 aa, Xanthomonadaceae bacterium
  misc_feature (1)..(504): tr|A0A4Q2XTT9|A0A4Q2XTT9_9GAMM Tryptophan 7-halogenase (Fragment) OS=Xanthomonadaceae bacterium OX=1926873 GN= EOP89_02335 PE=4 SV=1
MRPTHVVIVGGGTAGWMTAAAVTRLLPNVCTVQLIESTEIGIVGVGEATLPHIRAFVERLGLDEADFMRATHATFKLGIDFRDFGAIGDSYIHPFGTFGRPLDDVGFHHYWLRLAAEGRAGPIGDYSLAVAAAKRHRFAIPDGAPDDLAASFGYAYQFDATLFGPYLRRFAEAHGARRTEARIVGVEQDAISGDVRTLRLDSGETVEGDLFVDCSGFRSLLLGDAMAEPWEDWSRWLPCDRAVAMPCTSPDGPIEPYTRATAKSAGWQWRIPLQHRVGNGYVYSSAHITDQAAAEALVASVEGTPLADPRFLKFRAGRRRNSWVGNVVAIGLASGFLEPLESTSIYLAQMAITQLIELFPQRARSEGISAIDRVEFNRMVDMEYDRIRDFLILHYHATTRDDSEFWNHVRTMDVPTTLADKMELFRRAGRVTQYSEGLFLEPSWIAVYLGQGIIPQAWDQRADRPGLNGLDRALASLRDTVASTANAMPDHAAFIAHRNATIAA

SEQ ID NO: 86929 - protein, 526 aa, Dyella japonica
  misc_feature (1)..(526): tr|A0A0G9H2D1|A0A0G9H2D1_9GAMM Tryptophan halogenase OS =Dyella japonica DSM 16301 OX=1440762 GN=Y882_08985 PE= 4 SV=1
MARLKKVLIVGGGTAGWLAACYLAKAVNAADPNSVQVHLVESPDIGLLGVGEATFPSIRGTLAAIGLDERRFLVGATATYKQGIHYRHWVRPPGTPGADHFFHPFNAPSQRPGGPELLPYWLLGAAPEGMPFADAVSMQSTLVDHSKGPKRYKDPDYQGPLNHAFHFDAACFARVLAEHGQETLGVQRHVATVERAELDEHGAIARIVTKELGELTADLYVDCTGLKGMLIGNVMQSPFRSRADVLFADRAVAIQVPYAQPDSPIPSYTISTAQEAGWIWDIGLQKRRGAGYVYSSRHTDVERAEAVFRNYLGPVADGLKAFHIKFETGYRPEHWRKNCVAVGLAGGFVEPLESTGIALIELATYLLTHLLPNDTDTMEQAARHFNEMMIARYDRIIDFIKMHYCLSQRRDSKFWIDNADPVSIPQSLQDKLAQWKHRPPHRLDFVSDLEMFLVSSWQYVLYGMEFKTDLSPMRNLYPRVDEARQEFRNIQLAASQALHDLPDHRALVEQMCKEYRERAGIEAALV

SEQ ID NO: 86930 - protein, 535 aa, Tropicibacter phthalicicus
  misc_feature (1)..(535): tr|A0A238JEL5|A0A238JEL5_9RHOB Flavin-dependent tryptop han halogenase RebH OS=Tropicibacter phthalicicus OX=10 37362 GN=rebH PE=4 SV=1
MAKPITSITIVGGGTAGWLAATFLRTKLARKIKVTLVESPNVPTVGVGEATVPNMPATLREMGLDDQEFFRRCNASIKMGVMFRNWNVDHKGDFISYMNPFITPPMIDGMEAGYFYHAYGAGKRDFIQSFCPLIDLLEAWKCPLSLGGKEDPMPKVGYAYHLDAVKFAGMLAEVGRERGVTHILDDVDDIELDERGHVAALQLRERGRHDVEFVIDCTGFQGFLLQKALGEPFESYADYLGNDRAMALQIPHQDPSKIPAATSSTALGAGWSWSVPLFNRVGTGYVFSSTHRTDDQARDEFMAHLGDKAPEGAEPRVIPMRVGRTRRAWVKNCVALGLSGGFIEPLESTAIHMIDMGLRWLLMYFPSQDFDEATQNRYNQIVDSMYNEVRDFICLHYQLGNRTDDPYWIDARTQLKIPDRLAENLELWKHRLPGPLDLPTSFLFTHTTFQAVLLGKRVYEMGYGDGAFSRPYAMNEKSWREFLRKSAAHTRATVAYKGAHRTILLALRGELGPKATVTKKLGQVEEDLSLEPGLF

SEQ ID NO: 86931 - protein, 503 aa, Sphingomonadales bacterium
  misc_feature (1)..(503): tr|A0A124II82|A0A124II82_9SPHN Tryptophan halogenase OS =Sphingomonadales bacterium BRH_c42 OX=1734407 GN=APF82 _08985 PE=4 SV=1
MSERIKSILVVGGGSSGWMAAALFAHLFQGLYRIRLVESEDIGTIGVGEATIPAIKKYNELLELDEAQFMRLTQGTFKLGIQFNDWDRIGSSYIHGFGVIGQDMGWLRCHQYWLKMHLQGETSDFANLSINTAAALQNRFMPARPDMGDSPIAHIAHAYQFDAALYARFLRGYAEDRGVTRTEGRIVDVSLKAEDGFIEAVTLESGERIEADLFIDCSGFRGLLIEQAMQTGFEDWSHWLPCDRALAVPCTRSENFTPYTKSTAHGAGWQWRIPLQHRTGNGHVYSSKFMDEAEAERILIANLDGEQLAEPNRIRFTAGKRRKVWNRNCVAVGLASGFLEPLESTSLYLIQSALIRLIRLFPDGRLDQANIDEFNRQTDFEYERIRDFIILHYKATERDDSEFWRYCRDMDVPATLERKIDLFRANGRIFREDEELFSEESWIQVMLGQGIIPKGYDPLVDVKSEPQIVQYLGNIENVIGKCVAVMPSHADFVEKYCKAEQRA

SEQ ID NO: 86932 - protein, 490 aa, Sphingomonas sp.
  misc_feature (1)..(490): tr|A0A0Q4L091|A0A0Q4L091_9SPHN Tryptophan halogenase OS =Sphingomonas sp. Leaf38 OX=1736217 GN=ASE88_11680 PE=4 SV=1
MTACLIAHRWRARGMRVTLVESPEIGIVGVGEGSTPQLKHFFDTLGIAEDAWMPACDATYKLGIGFDGWSDRAGYERYFHPFPTALDGHTASQFFYNTRALRTGRYVEAHPDRFLLPARLAAAYCAPQPAASFPFEVSYGYHFDAYKVGAFLAAHASGTLGVDHVQRRIACVERTPTGQIAALIDTDGGRIAGNFFVDASGFRSTIFTALDVPFVSYATALFNDRAVVMPTAHAPGAPIPSQTRATALSAGWAWHIPLTSRIGNGYVYSSRHLTEAQAEAELRAHVGTEAGDARHLKMRVGRVRESWSHNALAVGLAQGFLEPLEATALHLVIATVEAFLDGADAGGATDAVRSAFNTRIAARYDGVRDYIVAHYRLNQRRDDPTGYWAHARGIEALSDELKMLMSAWFTGADMVAAIERAGLARYYSAISWHCLFAGYGTFPEPARLIPPGADIDPVDMTRIDDFLTRCAMNFGSHASRLRPADLKDIA

SEQ ID NO: 86933 - protein, 513 aa, Alteromonas sp.
  misc_feature (1)..(513): tr|A0A2G2PK04|A0A2G2PK04_ALTSX Tryptophan halogenase OS =Alteromonas sp. OX=232 GN=COB03_01390 PE=4 SV=1
MTPVNSVVIVGGGTAGWLTAGLLAATHSKQGSTGARLSVKVIESDSIHPIGVGEGTWPTMRSTLAKIGIEEAALVQQASATFKQASKFVNWHTEGQRTGYYHPFSAPQGSASVDITPYWLYNNALKEYASDVCFQPTLCEQGLAPKLTANSKQSFSANYGYHLDAGKFISVIREHCKKVLGVEHIIDDVTDVATDDAGIKHVVTKNNDHIRGDIFVDCTGFSARLIEKALDVPMEDASSVLFSDSALVHQIAYSDEHQPIACHTLSTAQEAGWIWDIGLQNRRGTGYVYSSEFQSDDEATQTFMAYLKSINPNEELPSTFRKINYKTGYRKRFWEKNCVAIGLSSGFLEPLEASSLMLIEQSAIQLAEQLPAYTQVMPHVASRFNRALTNKWQSTIEFLKLHYVLSNRNEDFWLANRSPQSIPQRLASLLEEWQYRPILDSDFTDTDEVFSAQSYRYILYGMSHKTNLSQYVRSMSKYEGADKQLQLNKALIAQLKARLPSHRGLIDTMLNKH

SEQ ID NO: 86934 - protein, 505 aa, Alteromonas sp.
  misc_feature (1)..(505): tr|A0A359K3N6|A0A359K3N6_ALTSX Tryptophan halogenase OS =Alteromonas sp. OX=232 GN=DEH24_08665 PE=4 SV=1
MSEHRIKKIVIVGGGTAGWMAAAAMSKLLHDDSITIELIESEQIGTVGVGEATIPHILYFNRLLGINENDFVKFTNGTFKLGIEFVDWGQTGESYIHPFGPYGMDMEGIHFHHMWLRQQKMGQAKPIDEFNLQILAAQANKFQRAQVELQGSPLSTIAYAFQFDAMLYARHLRGIAEANGVVRTEGKITRVNQHPENGHIASVDTDNGHHIEGDLFIDCSGFKGLLIEQTLNSGYEDWSHYLPCNRAIAVASNKLDELTPFTRATAKSAGWQWRIPLQSRTGNGHVYCSKFMDDDTALQSLYADLNSEPISEPNYLRFKAGIRKKPWNKNVVSLGLASGFLEPLESTSIHLIQTAIARLMTNFPDKLFNQHDIDYYNERTRLEYEQVRDFLILHYKATRRNDSPFWHYCRTMDIPDSLHKRIEIYKQNARLYRHDNELFNHVSWFAVMHGQGIHPERYHPIADMLPDDELHRRMEEIHTVTGKCLQVMPGHEDFIAQHCKASSSG

SEQ ID NO: 86935 - protein, 497 aa, Xanthomonadaceae bacterium
  misc_feature (1)..(497): tr|A0A4Q6GU55|A0A4Q6GU55_9GAMM Tryptophan 7-halogenase OS=Xanthomonadaceae bacterium OX=1926873 GN=EOP92_09010 PE=4 SV=1
MSSMGKPVRRVVIAGGGTAGWMAAACMSKVLGKRLDITLVESDEIGTVGVGEATIPTLLNFHSLLEINEQEFMAETKATFKLGISFENWRNVNEDYIHSFGLTGTDHWTAGFQHFWHKGRERGLAGEYGDYCLELRASQENKFAHLPQHGMNYAYHLDASAYARYLRKFSERFGVQRIEGKIVDVTTSTMTGQVRSITLDSGVDIEGDLFIDCTGFRGLLIGQAMGVEYENWSEWLFNDSAAAVQTASVGDAVPLTRSIAHPFGWQWRIPLQHRVGNGIVFSSRYVEEDAAVQTLMGNIAGEPLMKPRVLKFTPGQRRQVWKGNVVAIGLSSGFLEPIESTSIHLIQRSIIRLMQIFPTSGIVDSDVAEFNKQAAAETQHIRDFIILHYKVNNRIDAPYWTDARNMAVPASLQHRIDLFRETGRVFREPTELFAENSWIQVMLGQGIMPYRHHQTADLMGDEELSQFLGAIKGRIDRTVASLPQHQAYVERYCAAPK

SEQ ID NO: 86936 - protein, 532 aa, Streptomyces sp.
  misc_feature (1)..(532): tr|A0A5B7V503|A0A5B7V503_9ACTN Flavin-dependent tryptop han halogenase RebH OS=Streptomyces sp. YIM 121038 OX=2 136401 GN=rebH PE=4 SV=1
MDDNRIRNLVILGGGTAGWMSACYLGKALGPQVNITLLEAPAIPRIGVGEATIPNLHKVFFDFLGLAEEEWMRECNASFKAGIRFINWRTPGAGESAARPAADGRGDHFDHLFGLLPDHENLPLSHYWTHRRASGATDESFDRACYVQPPVLDHNLAPRHLDGTRWTNYAWHFDANLVADYLRRFATGKLGVAHVKDRYTHAEMDHRGFVTAINTETGNRLEADLFVDCSGFRSLLMNQVMREPFLDMSDYLLNDSAVATAVPNDDEKDGIEPYTSAIAMSSGWTWKIPMLGRFGTGYVYSSRFQSVDSATAEFCRMWNLDPETQPLNQIKFRVGRNRRAWVRNCVGIGLSSCFVEPLESTGIYFIYASLYQLVKHFPDKNFEPILVKRFNTEVEKMFDDTRDFIQGHFGFAPRNDTPFWRACKELEFSDDFVEKVNMYKAGLSVETPVVDESNYYGNFEAEFRNFWNNSSYYCIFTGLGMLPDHPLPSLSLRREAVEASGAVFADIKRRQAELVDTLPSTYEYLRRLHHGQ

SEQ ID NO: 86937 - protein, 79 aa, Alteromonas sp.
  misc_feature (1)..(79): tr|A0A3D0Q0R9|A0A3D0Q0R9_ALTSX Tryptophan halogenase (F ragment) OS=Alteromonas sp. OX=232 GN=DEP33_01795 PE=4 SV=1
MSHSANPVNTPEVKRVVIVGGGTSGWMCAAAIARIAPPDTRITLVESEDIGVIGVGEATIPTLMEFNDFLGIKEHDLLR

SEQ ID NO: 86938 - protein, 524 aa, Alteromonas sp.
  misc_feature (1)..(524): tr|A0A2D5C090|A0A2D5C090_ALTSX Tryptophan halogenase OS =Alteromonas sp. OX=232 GN=CL593_07025 PE=4 SV=1
  misc_feature (84)..(84): Xaa can be any naturally occurring amino acid
  misc_feature (154)..(154): Xaa can be any naturally occurring amino acid
  misc_feature (305)..(305): Xaa can be any naturally occurring amino acid
  misc_feature (396)..(396): Xaa can be any naturally occurring amino acid
MSEVNRIVIVGGGTAGWLTAGLLAATHSGADNNGQRLSVTVIESDAVPPIGVGEGTWPTMRRTLATIGISEAELVTQASATFKXASKFVNWYSDNGRNQDNSYYHPFSAPQGSATLDITPYWLTTAQTHSHYAQDVCFQPALCDAGLAPKLTAXGKQSFTANYGYHLDAGQFISLLRRHCVNRLGVTHLVDKVTQVNTQADSPEAGIVSLQTQQSGKIEGDLFVDCSGFSGLLINKALGVKLKDASHHLFANSALVCQAPFENETAPIPCHTLSTAQEAGWIWDIGLQHRRGTGYVFSREHQDVXRAADTLSRYLSQVAPSMATPDAFREIQFKTGYRETFWHNNCVAIGLSSGFLEPLEASSLMLIEQSAMLLAEQLPANTTIMSKVSQRFNSRXTYLWERTIEFLKLHYVLSNRPEAFWQDNKQRGSIPERLADLLEEWRYRPILDSDFPQANEAFSAQSYRYILYGMGPKTDFNWDMSTTERSLKHHNFATKQGQLNQTLIGQLKERLPSHRGLVESFFQS

SEQ ID NO: 86939 - protein, 525 aa, Xanthomonadaceae bacterium
  misc_feature (1)..(525): tr|A0A4Q6GTB3|A0A4Q6GTB3_9GAMM Tryptophan 7-halogenase OS=Xanthomonadaceae bacterium OX=1926873 GN=EOP92_08995 PE=4 SV=1
MASTTIRHVVIVGGGSAGWLTAAVLASSFQALEAGGLRVTLIESPDVPAIGVGEGTWPTMRDTLRAAGLSESAFFRECDAAFKQGSRFNGWVTGSDSDYYFHPFVLPQGWGDADVAGRWIERHADVPFADLVSYQPHLCVHGRAPKQAATPEFAAVANYGYHLDAGKFGLFLKKHCLEKLGVHFVPDHVTGIRSHDNGDIAALYTKAHGELAGDLFVDCTGMQSLLLGKHYEVPFLSQRGVLFNDSALASQVPYAREDDPIASQTTSTAQQAGWIWDIGLPTRRGIGHVYSSAHTSDEEAERALRAYIRATGGPEDIPTPRKLSFQPGYRERFWHRNCVAIGLSAGFIEPLEASALAMVELSAAMLADEMPVTRAQMDISAARFNETFTYRWERVIDFLKLHYVLSRRSGAEDATGYWRDNRSSATIPGRLADLLALWEHRPPSRYDFNRIQEVFPAASYQYVLYGMGFQPAPGLARRARPGEPDSEMADGFFRQAADLTRRMLPALPDNRTLIAHIVRHGLPRG

SEQ ID NO: 86940 - protein, 130 aa, Xanthomonadaceae bacterium
  misc_feature (1)..(130): tr|A0A4Q2XLN2|A0A4Q2XLN2_9GAMM Tryptophan halogenase (F ragment) OS=Xanthomonadaceae bacterium OX=1926873 GN=EO P89_10285 PE=4 SV=1
MSEPAARRLVIVGGGTSGWMAAAAFGKTIGRSARITLVESGAIGTIGVGEATIPIIDTFHRVLGLSPLDIVRHTKATFKLGILFDDWQRIGASYFHPFGKYGVDHAGISFMRQWLRLNADGGLPDYGRFN

SEQ ID NO: 86941 - protein, 341 aa, Alteromonas sp.
  misc_feature (1)..(341): tr|A0A349Z8C7|A0A349Z8C7_ALTSX Tryptophan halogenase (F ragment) OS=Alteromonas sp. OX=232 GN=DCW59_15700 PE=4 SV=1
MAQKKTRVVVAGGGTAGWLTAFSLVTRLGNVLDITLVESDQIGTVGVGEATIPTMCNFHQLMGINEQEFMAATNATFKLGIQFVNWANEGDSYIHSFGEIGQRSWMAEFHEFWMEAVANGQQDSLEDYCLELKAAKANKFATKIGNRPLNFAYHLDATAYAAYLRKKSEAAGVTRCEGKIQSVDTDPQNGNLTRLTLDTGIAIEGDVFIDCTGFRGLLIGEHLGVGYEDWSHWLAADRAIAIQTQSTEAPKPYTIATAHKAGWQWRIPLQSRVGNGIVYSSRFLSDDDALATLKQNIDGEMLTEPRYLKFKTGRREKAWHKNCIAVGLASGFLEPLESTSI

SEQ ID NO: 86942 - protein, 520 aa, Pseudoalteromonas sp.
  misc_feature (1)..(520): tr|A0A269PI66|A0A269PI66_9GAMM Tryptophan halogenase OS =Pseudoalteromonas sp. NBT06-2 OX=2025950 GN=CJF42_2329 0 PE=4 SV=1
MNKPIKNIVIVGGGSAGWITAGLLAAEHKTNNDNAITITLIESPEIKTIGVGEGTWPSMRNTLDKIGIKESEFIAQCNASFKQGSKFVNWQGIQNNDIYYHPFMTPEGYTQVNLHHGWQHSNSNKSFADTINMQSHICHRGLAPKQASTPEYASVTNYGYHLDAGKFSHMLQTHCTKVLGVKHVIAHINQIHNDENDYITHIEISPKGRISGDLFIDCSGLNALLIDKHYKIPFIDKNHILFNDSALAVQAPYCDPDEDIASATVSTAQSAGWVWDIGLSNRRGIGYTYSSKHTCDTEAEKTLKAYLSETINDQKIQNLNIRKLNFKPGHREKFWHKNCIAVGMSSGFLEPLEASSLALVELSANMISEELPANFEHMNIIAKRFNERFEYRWQRVIEFLKLHYVISKRTDSQYWLDNKTPESIPKRLKELLTLWQYQPPNINDFVQNQEVFPSASYQYVIYGMGFNTTAYPTDKAFNNIALAQRYFAHNQETKLKYLNALPSNRELLNHIKNNCLQNTG

SEQ ID NO: 86943 - protein, 172 aa, Xanthomonadaceae bacterium
  misc_feature (1)..(172): tr|A0A4Q2X5U2|A0A4Q2X5U2_9GAMM Tryptophan halogenase (F ragment) OS=Xanthomonadaceae bacterium OX=1926873 GN=EO P89_15880 PE=4 SV=1
MQQYLKNIVIVGGGTAGWMTAAALSSLLEPRDVTITVVESDTIGTVGVGEATIPDILAFNQMLGIDEAEFMAATDATFKLGIEFVGWGRADSRYFHPFGQHGADMRGIDFHQYWMRSRLDGNPAPIDTYSLCAVAAQADRFTLPDPNPRSVRSQIRYAYHFDATRYARFLRH

SEQ ID NO: 86944 - protein, 224 aa, Alteromonas sp.
  misc_feature (1)..(224): tr|A0A3D0SFH0|A0A3D0SFH0_ALTSX Tryptophan halogenase (F ragment) OS=Alteromonas sp. OX=232 GN=DEO96_05450 PE=4 SV=1
VAFLKRFCSNLGVTHCDGVISQVLQHDNGDIKALRLASGELIEGDFFIDCTGFKGLLIEETLHTGYEDWSHWLLCDSACAVQTTSTEPAAPFTRSAAHPAGWQWEIPLQHRTGNGNVYSSAFMDDNAASEQLMQNVKGEAITTPRTLRFKTGRRNKTWHRNCLALGLASSFVEPLESTSIHLVIMGITRFMQLFPHGGNDQALADEYNQQTQLELERIRDFIIL

SEQ ID NO: 86945 - protein, 350 aa, Alteromonas sp.
  misc_feature (1)..(350): tr|A0A3D0T2G0|A0A3D0T2G0_ALTSX Tryptophan halogenase (F ragment) OS=Alteromonas sp. OX=232 GN=DEP76_09335 PE=4 SV=1
MTTPPKQIVIAGGGTAGWIAAAALARKMGPLVNIRLVESSTIGTIGVGEATIPPLRTFHKLLQIDEQAFMRATAATFKLGIRFENWGRIGEQYIHSFGMTGQQSWLAEFVHFYLSAKARGLEGDYGDYCFELEAARQHKFATSAQSNIQYAYHLDAGNYVAFLKRFCSNLGVTHCDGVISQVLQHDNGDIKALRLASGELIEGDFFIDCTGFKGLLIEETLHTGYEDWSHWLLCDSACAVQTTSTEPAAPFTRSAAHPAGWQWEIPLQHRTGNGNVYSSAFMDDNAASEQLMQNVKGETITTPRTLRFKTGRRNKTWHRNCLALGLASGFVEPLESTSIHLVIMGITRFM

SEQ ID NO: 86946 - protein, 511 aa, Sphingomonas sp.; identical to SEQ ID NO: 83728
  misc_feature (1)..(511): tr|A0A0Q4FW04|A0A0Q4FW04_9SPHN Tryptophan halogenase OS =Sphingomonas sp. Leaf16 OX=1735681 GN=ASE65_00690 PE=4 SV=1

SEQ ID NO: 86947 - protein, 187 aa, Xanthomonadaceae bacterium
  misc_feature (1)..(187): tr|A0A4Q2XS35|A0A4Q2XS35_9GAMM Tryptophan 7-halogenase (Fragment) OS=Xanthomonadaceae bacterium OX=1926873 GN= EOP89_04195 PE=4 SV=1
MTGQGERLHGERAIRSIVIVGGGTAGWMAAAMLARRLENQPVRITVVESSAIGTVGVGEATVPGIRDFFRELGVTEREVMAATKGTAKLGIDFVDWKRPGHRFFHPFGLYGMRSRGVAFHHYWQKLRSAGDPVELADYCLATVMAKRNLFMLPTDRPVHDLLFFDWAVHFDAGLFARFLAARSTAQG

SEQ ID NO: 86948 - protein, 535 aa, Massilia sp.
  misc_feature (1)..(535): tr|A0A430HLW4|A0A430HLW4_9BURK Tryptophan 7-halogenase OS=Massilia sp. SOD OX=2495579 GN=EJB06_13025 PE=4 SV=1
MKAFHNVLIVGGGTAGWLTACYLARTLGAAGVGAAGVGAAGVGAASVGAASAGASGVSITLVESPEIGIIGVGEGTFPSIRSTLAAIGIDEARFVRDCEATFKQGVRFNDWVRPAGAPGADHYFHPFSQPSQRQGGPELLPHWLQGTAGAGVAFAQAATMQKRVADAAHGPKRLADADYSGPMNYAYHFDAGRFAALLAEHGRSLGVRHVQANVERVELDAGGAIACVHTREHGALGADLFVDCTGFRAALIGEALGSPFRKMDDVLFVDRALALQVPYPAPDTLIPSYTISTAHEAGWTWDIGLQRRRGIGYVYSSRHTTDERAEQVLRRYIGAAADGLAPRQLKLNIGYREVQWVKNCVAVGLSGGFLEPLESSGIGLIETAAYLIGHLFPFNGDTAPVAAQYNRLMRERYERVVDFIKLHYCLSQRTDSAFWTDNTDPRSIPQSLRDKLAMWRCRAPHRLDFVADVEMYPTSSWQYVLYGMEFATSLHPSACHPARREEAAAEFAMIAKLASHALADLPPHRALVEHLCQRR

SEQ ID NO: 86949 - protein, 193 aa, Xanthomonadaceae bacterium
  misc_feature (1)..(193): tr|A0A4Q2XYQ0|A0A4Q2XYQ0_9GAMM Tryptophan 7-halogenase (Fragment) OS=Xanthomonadaceae bacterium OX=1926873 GN= EOP89_00070 PE=4 SV=1
MRDGTRRLMQQDRLERVLVAGGGITAWSAAAALKRRAPFLDVTILNCAPSPDALADRIACTLPSLLGFHDDLGIGPADGIVRTGSGYRLGTLFSGWATGLPDFVHAYGRYGRAFGPTAFHLHWARSAQEGSTAPFDSHSPAAVLARAGRFAPPIPETPFADHEYGLTLDLPRYRTMMRAFALHVGVREIVGEI

SEQ ID NO: 86950 - protein, 510 aa, Sphingomonas sp.
  misc_feature (1)..(510): tr|A0A4R2U836|A0A4R2U836_9SPHN 2-polyprenyl-6-methoxyph enol hydroxylase-like FAD-dependent oxidoreductase OS=S phingomonas sp. PP-CC-3A-396 OX=2135655 GN=C8J40_10963 PE=4 SV=1
MIDGRGQHIVILGGGTAGWMTACLIAHRWRDRGVRVTLVESPEIGIVGVGEGSTPQLKHFFDTLGIAEAEWMPACDATYKLGIGFEGWSDRAGYEQYFHPFPTALDGHTAPQFFYNTRARRTGRDVAAHPDQFLLPARLAAAHCAPQPAANFPFEVSYGYHFDAYKVGAFLAAHATETLGVVHVQRRIASVERASTGDITALIDTDGERIAGNIFVDASGFRSTIFSALDIPFVSYADALFNDRAVVMPTAHAPDASIPSQTRATALSAGWTWHIPLTSRNGNGYVYSSRHLTEAQAEAELRAHIGADAGEARHLEMRVGRVRDSWSHNALAVGLAQGFLEPLEATALHLVIATVQAFLDMVDQDGATDAVRAAFNTRIAARYDGVRDYIVAHYRLNQRHDDPTGYWAEARGIESLSDDLKMLMSTWFTGADMVAAIDRAGLGRYYSAISWHCLFAGYGTFPNAARLIPPGADIDLIDLPKIDDFLTRCASNFGSHASRLRHLADHKDTV

SEQ ID NO: 86951 - protein, 498 aa, Alteromonas sp.
  misc_feature (1)..(498): tr|A0A359K9D5|A0A359K9D5_ALTSX Tryptophan halogenase OS =Alteromonas sp. OX=232 GN=DEH24_18700 PE=4 SV=1
MNSTQPATKPHVVIAGGGTAGWMTAAALARKLGPLVRITLVESSDIPTIGVGEATIPPLRVFHQLLGINEAEFMRATSATFKLGIEFADFGQLNQRYIHSFGQTGQSSWLAEFIHFWREGLDRGIATDYGSYCLELEAAKANKFYTSAQNAPLNYAYHLDAGAYATFLKHISVQAGVNHVVDTIEQVTLNDTGNIDALQLRQSGSLHGDLFVDCTGFRARLLGESLDVGYEDWSHWLFCDRALAVQTELTPPLKPYTIASAHSAGWRWEIPLQHRMGNGFVYSSQYLDETTAHDTFTALLRNKPLQDVRSLQFTTGRRLKAWHKNCVAIGLSSGFVEPMESTSIHLIVMGITRLMQLFPYSGDYQHLQDEYNAQTQIELERIRDFIVLHYNVTQRDDSAFWRACKDMVIPDSLSERIELFKEHGHAFQKANELFRVDSWSQVMLGQGLLPKNWHPAAKMMSDEQLAGALKKGQMEISQRVAQLPDHEAFVAQYCGQNR

SEQ ID NO: 86952 - protein, 208 aa, Alteromonas sp.
  misc_feature (1)..(208): tr|A0A3D0SI78|A0A3D0SI78_ALTSX Tryptophan halogenase (F ragment) OS=Alteromonas sp. OX=232 GN=DEO96_08200 PE=4 SV=1
MSHSANPVNTPEVKRVVIVGGGTSGWMCAAAIARIAPPDTRITLVESEDIGVIGVGEATIPTLMEFNDFLGIKEHDLLRECQGTYKLGIDFVDWYQKGQSYFHPFGFYGRDTPEFSFHQLWLRLNAMAAKGEIPADAPGIISDYNLCTVAAMQGRFAPPQGGADTILSTMRYAYHFDSARYGQMLRRYAEQRHVERIEGIVNSVEQDH

SEQ ID NO: 86953 - protein, 495 aa, Thalassotalea sp.
  misc_feature (1)..(495): tr|A0A1Y5GMK7|A0A1Y5GMK7_9GAMM Tryptophan halogenase OS =Thalassotalea sp. 42_200_T64 OX=1856287 GN=A9Q98_11590 PE=4 SV=1
MNNSKLQNVVIAGGGTAGWMAAAALSKLLGKNLNVTLVESDEIGTVGVGEATIPPIRTFHKLLGINEQEFMQATNATFKLGIGFENWGQKNDSYVHSFGVTGKECWAGEFHHFWLHGLNKGIQSDFGDYCFELQAAKAGKFALSKQMPINYAYHLDATVYAQYLRKFCEKLGVNRIEGKISKVNKNPSSGEITSLTLESGATINGDFFIDCTGFKGLLIEQALHTGYEDWSHWLPCDSAVAVQTKAVEAPIPYTKSIAHDMGWQWRIPLQHRVGNGMVYCSRYESDQSATEKLLANIEGELITEPRVIKFKTGRRRKGWNKNCVALGLSSGFIEPLESTSIHLIMSGIIRLMRLFPFEGINQSAIDEYNSKLNSELEAIRDFIVLHYHVTKRQDSEFWNYCRNMEIPASLAHKINLFKETGRVFLDDGDIFRVDSWTQVMLGQGLMPEQYHQIANIMSDDELNRFLHGIKASISNAVQQLPSHDEFIQSYCKSAS

SEQ ID NO: 86954 - protein, 777 aa, Methylobacterium sp.
  misc_feature (1)..(777): tr|A0A0X1SHU1|A0A0X1SHU1_9RHIZ Tryptophan halogenase OS =Methylobacterium sp. AMS5 OX=925818 GN=Y590_11615 PE=4 SV=1
MAALYLKRVLRRAGWTVTLVGSAPAAGASAALATRPAFTRFLTGFGIDEAIFMRRCAATYRLASRYDDWFAEGQGHWHPFGACGPRIAGRDLFHYWMKLRQESTEEGAEVEAGSYADYAPQALMAAAGRGPRPMADRSSLTESGDYGYHLDRTALVRFLRDLALSEGVRGVAGRVREIERDLYGDVGALVLDGGQKVEGDIFLDCTGATGQLIGTALGEAWVAGSGPGNRVARLSLPRSPEVPPFTAYRGRAEGWTASLPLADRTEHLYVYDSRTTPPDAAAATLRCAFDSEAGIVDAELRHGRRASPWQRNVVALGAAAGAVEPLLGFDLDLVLAGLETFLATLPRQGDGGDVLRRAYAARLNRFHDDAAEAVAAHYVLGRRSEPFWAAARAVTIPDRLADRLDLYELAGHVALSEEAPFSEGDHYLLFSGADFLPRRPFAPVDVADGREIARLLASIRAQSAQIAEAMAPHGRLMDALHGKVPVAGPSVRIAAASAPVGPAGLRRTPEGARLADLVAGLGQPFGYERSVKASPAGLQTDRFLMSLHRASLGLKPETTLDRLAAGLGLPERERAEAAGLIGGADILHLGYEDGPPGALYKLYVEWSSRTDAAWTGADEAGAEPMLVHRAYKWTPGGTHPPVVTLYHWPRVRGPEEIGARLNRMAGEWGAAGAPARDTAHAILRLAQERGRGAVHYLEAREEPGRRLSYDLNLYACGLTVADAEPLLGQAFVDLGVPREAAARVLRERLQETLGHVAGGVGRDGQPFITVYSGVAGG

SEQ ID NO: 86955 - protein, 513 aa, Xanthomonadaceae bacterium
  misc_feature (1)..(513): tr|A0A354YCW6|A0A354YCW6_9GAMM Tryptophan halogenase OS =Xanthomonadaceae bacterium OX=1926873 GN=DDZ67_11465 P E=4 SV=1
MHEDFETTSIATAPIRRVVIAGGGTAGWMAAAALSKVLGKTLEITLVESEEIGTVGVGEATIPSLATFHRLLEIDEREFLSATQGTIKLGISFENWRTAQHRYIHSFGTTGKDHWTAGFQHFWLKGRERGLAGSYDDYCIELQAALQDRFAHLPNHRMNYAYHLDASYYARFLRQLAERHGCRRVEGKIVEVTTDPASGFIGALRLERGEVIEGDLFVDCTGFRALLIGQTLGVGFEDWSHWLLNDRAIATQTTAVRDAVPYTRAIAEPWGWQWRIPLQHRVGNGVVYSSKYVADDEAKQRFLASVEGEVIKDPWPVRFRPGRREQCWAKNCVALGLAGSFIEPLESTTIHLIQRGITRLMQSFPAVISQVGIDEYNRQLNDELQHVRDFVVLHYHATERRDSPYWEYVANMPLPATLQHRIDLFRETGTVFHVPNELFAENSWIQVMMGQGIVPQQRHRTPDLMGDAELSHFLGSIKATVDRSVEQLPSHMDYLRRYSPATPPARPAAPVAG

SEQ ID NO: 86956 - protein, 503 aa, Xanthomonadaceae bacterium
  misc_feature (1)..(503): tr|A0A2W4TMC8|A0A2W4TMC8_9GAMM Tryptophan halogenase OS =Xanthomonadaceae bacterium OX=1926873 GN=DCF27_09870 P E=4 SV=1
MEGQVRDVVIVGGGTAGWMTAAALSKVLGPQHRIRLIESEEIGTVGVGEATIPMIKLFNQALEIDESDFIRETKGSFKLGIEFVNWGRLGDSYLHGFGKIGQDLGVIPFYQHWLKLHQAGQAGPLDDYSINTAAARANKFMPPLTDRPNSPMADIAYAYHFDASLYARYLRGYAEARGVRRTEGKVAEVKQRAEDGFVEAVVLEGGERVDGQLFVDCSGFRGLLIEQALHTGYQDWTHWLPCDRAMAVPCANGGPLTPYTRSTARSAGWQWRIPLQHRVGNGYVYSSQFISDDEAASTLLANLGGEPLATPKPLRFTTGKRNKFWNKNVVAIGLASGFMEPLESTSIHLIQSGIARLTAFFPHGGFDQVDVDEFNAHSHFEFDKIRDFLILHYHATERSDTPFWDYVRTMSIPDSLQNKMELFRSNGRVFREHTEMFAEPSWVQVMHGQRVHPRGYHPLVDNLGDDKLREHCDTVRGVIANCVRAMPTHDDFIAKHCAKPKAA

SEQ ID NO: 86957 - protein, 277 aa, Xanthomonadaceae bacterium
  misc_feature (1)..(277): tr|A0A4Q2XXP3|A0A4Q2XXP3_9GAMM Tryptophan 7-halogenase (Fragment) OS=Xanthomonadaceae bacterium OX=1926873 GN= EOP89_01950 PE=4 SV=1
YLDCSGPVAALRSALDTQWDDWRTWLPVDRLLLGTTSAQLPTPTDDLIAVPVGWRFVIPLRDRTLTGLAFAADQTPDSSARRILPAGEVIVPISPGTRREPWRHNVLALGDAAVMLDPLADANLHLAHAAILRAIRLLPGTDFAPTELAEYNLHAHRQAERVRDFQAAHFLSTGRTRGPFWKRASRLARPASLAHTLEQFAHRGRLPFYEDESFDKDDWHGLLLGLGMIPRTPDPIASAIAPEMIAGTLARLASATATVPTQLPPYPAYLAQLERGR

SEQ ID NO: 86958 - protein, 208 aa, Xanthomonadaceae bacterium
  misc_feature (1)..(208): tr|A0A4Q2XTI6|A0A4Q2XTI6_9GAMM Tryptophan 7-halogenase (Fragment) OS=Xanthomonadaceae bacterium OX=1926873 GN= EOP89_02970 PE=4 SV=1
MRKRILIVGGGTAGWLTAGYLAKRLGADLAGGVSITLVESQDIGILGVGEGTFPTIRRTLATIGIDEAELIRRCGATFKQGAKFVHWRHAPGQGRPDHYSHPFQVADASDGLDLLPYWLLGHGGTENWDEVTNPQKKAADRHRAPKLASNPDYVGPLNYAFHFDAVALAGLLREQAVKNGVRHLTDTVNEVLLDADGAIGGVRTERNG

SEQ ID NO: 86959 - protein, 506 aa, Massilia sp.
  misc_feature (1)..(506): tr|A0A430HRK6|A0A430HRK6_9BURK Tryptophan 7-halogenase OS=Massilia sp. SOD OX=2495579 GN=EJB06_03110 PE=4 SV=1
MTDQRIKQIVIVGGGTAGWMSAAALSQLLPVGHQYRLIESDQISTIGVGEATIPSIRNFNLHLGIDENDFIRATQGTFKLGIEFVDWGRQGSNYIHGFGSVGRDQPTANFFHYWLKMHQAGQADSLEPYAINTMAARLGKFSRGRPDLPNSPLSDLSYAFHFDAGLYARYLRGYSEARGVRRTEGRIVETMLHPDGSIAALLMENGERIEGDFFLDCSGMAGLLIEQALHTGYEDWSGWLPCDRAIAVPCESHGPLAPLTRSTARSAGWQWRIPLQHRTGNGHVFSSKFMSADEAQAILMSNLDGQPLAEPRLLKFTTGKRKRAWNKNCVAIGLSGGFMEPLESTSIHMVKTALMRLISFFPDRGFDQVDIDTFNRLCDKEYEQIRDFLILHYKVSTRDDSAFWRYCRDMDVPLTLQRKLDLFASHGRILRENEELFPEDSWLQVMHGQGLRARGYNPVVDQRAPDEIADFLQGTQAVIRKCVDAMPSHEDFIKANCQAAPMRRAA

SEQ ID NO: 86960 - protein, 515 aa, Thalassotalea sp.
  misc_feature (1)..(515): tr|A0A1Y5GM40|A0A1Y5GM40_9GAMM Tryptophan halogenase OS =Thalassotalea sp. 42_200_T64 OX=1856287 GN=A9Q98_11595 PE=4 SV=1
MDKAIKKIVIVGGGSAGWITAGVIGAQHPGIDVTLIESPEVNSIGVGEGTWPSMRNTLSKIGISEIEFLSQCCASFKQGSKFVGWCNGQKDDFYYHPFMTPDGYTQVNLHAAWKARNDNKAFADTVNVQSQVCQAGLAPKQMSTPQYAAVTNYGYHLDATKFAALLQQHCTTKLKVKHILDHVERVIPADNNDIKAIHSKHNGDIEGDLFIDCTGTSSLLLGKHYGVKFIDKKHILFNDCALAVQVPYPQPNSPIASATISTAQSAGWIWDIGLPTRRGIGHTYSSAHMDDDNAEKLLRDHIAKTTSKEISKQLVPRKLTFRPGHREIFWHKNCVAVGMSAGFLEPLEASALALIELATTMISEQLPVTRAHMDIVAKRYNERFQYRWNRVIEFLKLHYVLSARDDSQYWRDNKLAASIPGHLQELLQLWQHQAPSRYDFIQNEEVFPSASYQYVLYGMHFNTQTRNYNSAIDNTEMADKILDDGQVKLQKYLAGLPTNRELVDYLCQQYTLKQA

SEQ ID NO: 86961 - protein, 310 aa, Alteromonas sp.
  misc_feature (1)..(310): tr|A0A3D0Q4V1|A0A3D0Q4V1_ALTSX Tryptophan halogenase (F ragment) OS=Alteromonas sp. OX=232 GN=DEP33_07210 PE=4 SV=1
LLNKVLGNSVTIELVESEQIGIVGVGEATIPPIQTFNRFLGIDEKAFLRETQGTIKLAIKFENWRKPGESYYHTFGAPGTTMGFCSFHHYWLKAKEAGLDKSFWDFDLNYLACQQGKFNKINTQNPLYDMPYAYHFDSALYGQFLRRFAEQGGVKRTEGIIEHVQQHPQSGFITGLQLTDGRQIEGDLFIDCTGLNGLLIRKTLGVNYEDWSHWLPADSAQAVPSERFDKTLPYTRSIAHSCGWQWRIPLTHRNGNGIVYSSQFTTDEQANETLLGNLDTQALGEPRTIRFNTGRTDQQWCKNVVAIGLS

SEQ ID NO: 86962 - protein, 121 aa, Xanthomonadaceae bacterium
  misc_feature (1)..(121): tr|A0A4Q2X3Z3|A0A4Q2X3Z3_9GAMM Tryptophan halogenase (F ragment) OS=Xanthomonadaceae bacterium OX=1926873 GN=EO P89_16670 PE=4 SV=1
MQKQQTGTKSDIIRTIVVVGGGSAGWIAAARLAAKGARGSDDIVVKLVESATVPTIGVGEGTWPTMRNTLAKIGIGETEFLRSCDAAFKQGARFVGWKDGSARDAYYHPLNPPAGAADLNL

SEQ ID NO: 86963 - protein, 802 aa, Methylorubrum populi
  misc_feature (1)..(802): tr|B1Z9B9|B1Z9B9_METPB Tryptophan halogenase OS=Methylo rubrum populi (strain ATCC BAA-705 / NCIMB 13946 / BJ00 1) OX=441620 GN=Mpop_2363 PE=4 SV=1
MLRSERSVPPRLVIAGGGPAGSIAAAYLRRILRRAGWSVTLVAPEPAAGPSVALATRPAFTRFRQGFDIDEAIFLRRCAGTYRLASRFEDWFAGGRGHWHPFGACGPRIAGRDLFHYWLKLRESGARREAGDYADYAPQTLMAAEGRGPRPQAGTSSLVQSGDYGYHLDRAGLVRVFREIALSEGVRAVPGRVRGIERDPYGDVAALLLDGGERIEGDVFLDCTGAAAQLVGTALGEPWIAEGGAGDRIAYLSTAREPEPAPFTLYRGRPEGWVAALPLAGRSDHALVYDGRTTPPETAQALLRAASGCENGVCDAELRRGRRRAPWQRNVVAVGAADGAVEPLMGFGLDLVLAALEAFVAYLPRGGRAAEVLRRAYVARMNRLHDDAEQAVAAHYVLGRRPEPFWAAARAAAVPERLADRLDLYELAGHVEPEADAVFGEGDHYLLFAGADFLPRRPFAPVDVGDGREIERLLAGVRARSAQVAQTMAPHADLLEGLHGRAPAGPTVQVAAAAAKDSAARHGPQSLRRSPEGARLADLVAGLGQPFGYERSVKATPAGLQTERFLVSLHRTSLGLDPAKTLDALAEVLGLPAPERSEAAGLIAGADLLHLGYEAGPSGALYKLYVEWSARADAAWHETDAAGAAGAEPILVHRAYKWRVEGSASPVVTLYHWPRVRTPGEIEARLARLGESWDGAGTSLLGTARDILRLAREHGRGAVHYLEAREEPGPRLSYDLNLYACGLTMGEAEMVIGQAIVDLGVPPPDAAAVLAERRGEALGHVAGGVGRDGIPFLTVYSGMAEA

SEQ ID NO: 86964 - protein, 517 aa, Alteromonas sp.
  misc_feature (1)..(517): tr|A0A2D5LIV4|A0A2D5LIV4_ALTSX Tryptophan halogenase OS =Alteromonas sp. OX=232 GN=CL592_05095 PE=4 SV=1
  misc_feature (48)..(48): Xaa can be any naturally occurring amino acid
  misc_feature (57)..(57): Xaa can be any naturally occurring amino acid
MSHSANPVNTPEVKRVVIVGGGTSGWMCAAAIARIAPPDTRITLVESXDIGVIGVGXATIPTLMEFNDFLGIKEHDLLRECQGTYKLGIDFVDWYQKGQSYFHPFGFYGRDTPEFSFHQLWLRLNAMAAKGEIPADAPGIISDYNLCTVAAMQGRFAPPQGGADTILSTMRYAYHFDSARYGQMLRRYAEQRHVERIEGIVNSVERDHNTGLLQSVTLNSGQVLQGDLFVDCSGFKALLIDGAMQSEFVDWHHYLPCDRAIAVQTKLAGAPDPFTRSTADDAGWRWRIPLQTRLGNGHVYSSDFMEHDEALQKLLAGVEGEPVTQPLPLKFRTGHRKAFWDKNCVAIGLAGGFIEPLESTSIHLTQMGIQRLVNLWPGRGCNRSEIAQYNALMTADYERLRDFIVLHYNATEREDTEFWRYVKHMAIPDSLAAKLEIFRSSGRVIPSPEDLFTPHSWLAVMLGQGIYPQNYDVLVDRVPAQALLKNMQMLRMSVAKTAGSMPTHEEFIRRYCQAAAA

SEQ ID NO: 86965 - protein, 315 aa, Alteromonas sp.
  misc_feature (1)..(315): tr|A0A3D2XUI2|A0A3D2XUI2_ALTSX Tryptophan halogenase (F ragment) OS=Alteromonas sp. OX=232 GN=DHW66_00640 PE=4 SV=1
VLQHDNGDIKALRLASGELIEGDFFIDCTGFKGLLIEETLHTGYEDWSHWLLCDSACAVQTTSTEPAAPFTRSAAHPAGWQWEIPLQHRTGNGNVYSSAFMDDNAASEQLMQNVKGEAITTPRTLRFKTGRRNKTWHRNCLALGLASGFVEPLESTSIHLVIMGITRFMQLFPHGGNDQALADEYNQQTQLELERIRDFIILHYHVTQRDDSPFWEHCKNMTVPDSLQTRITLFKEQAHAFQKQNELFRVDSWAQVMLGQGVTPDSHHPAAAMLSDAQLHQSMQQQRQRVLQAVAQLPAHGEFIRRYCATPQKAE

SEQ ID NO: 86966 - protein, 516 aa, Alteromonas sp.
  misc_feature (1)..(516): tr|A0A3D0SC74|A0A3D0SC74_ALTSX Tryptophan halogenase OS =Alteromonas sp. OX=232 GN=DEO96_06790 PE=4 SV=1
MQENITRVVIVGGGTAGWLTAGIIAAKNPLVGENSRTEVILVESPDVKNLGVGEGTWPTMRDTLRLLGIAEKQFLSECDASFKQASKFVGWQQGGEDKYYHPFTAPAGFGAVNLVEAWHDEGCPGDFESWVCAQGMACERYQAPKMPQLPEYAYNFNYGYHLSADKFVALLHRHCTEQLGVQYKSAHVAGIQSHPDGAIAAIELAQGEPLAGDLFIDCSGFSARLIGQHYNVPFVSKRHILFNDTAVAAQVNHVGDQTPIASCTVATARPHGWVWDIALQSRRGIGHVFASELTTESQAEDALRAYISSDQSLSQKAIMPRTIRFDPGHRARFWEHNCVAIGVSAGFVEPLEATALVLIEKSAEWIADQLPRSRAAMAVLGKRYNEMTDARWSEIIDFIKLHYVLSERRDSHYWQAHADPASWTDSLQDALQLWQSQPPGLLETNLRQELFSSASKQYVLYGMGFRSQDWQPGGITSLRKPLIERVRREFLHNGDKLLAQLPTNREYFNRLKAASA

SEQ ID NO: 86967 - protein, 504 aa, Xanthomonadaceae bacterium
  misc_feature (1)..(504): tr|A0A4Q2XVJ7|A0A4Q2XVJ7_9GAMM Tryptophan 7-halogenase OS=Xanthomonadaceae bacterium OX=1926873 GN=EOP89_00540 PE=4 SV=1
MENARIRKVVIVGGGTAGWMAAAALSRVLAGGNIDIRVIESEAIGTVGVGEATIPHIQYFNRLLGIDENDFVRRTAATFKLGIEFVDWGRIGQRYIHPFGSYGQEMEGIHFHHFWYRQSQAGGALPLDRYSIGVGAARANKFQRPDPSLVNSPLATIAYAFQFDAALYARYLRELAEAAGAQRTEGRIVDVRLDGETGHVDTLLLEDGSVVAGDLFIDCSGFRGLLIEGALGTGYDDWSHYLPCDRAVARACERVGDPLSYTRATAKAAGWQWRIPLQSRTGNGYVYCSDHIDDAEALRTLDAGLDGKPVTDPNFLRFTAGVRRKAWNRNVVSLGLASGFLEPLESTSIHLIQSGIARLLTNFPDRNFNAPDIDYYNRRTRLEYEQIRDFLILHYKATERDDTAFWDRCRTMPIPASLEERIAIFRENARLYRHDNELFSETSWLAVLHGQNIVPKSHHPIADFLSEDELAARMTRIAAAMDGSVARMPSHQAFIDHYCAIDRR

SEQ ID NO: 86968 - protein, 511 aa, Xanthomonadaceae bacterium
  misc_feature (1)..(511): tr|A0A3C0HIG9|A0A3C0HIG9_9GAMM Tryptophan halogenase OS =Xanthomonadaceae bacterium OX=1926873 GN=DCM32_05390 P E=4 SV=1
MSDTRVERIVILGGGTAGWMAAAALSKTLGPRYSIALVESEDIGTVGVGEATIPMIQQYNQALQLDEPDFVAHTQGSFKLGIEFVDWGRKGDSYIHGFGKIGQSMSLAPFYQFWLKQRAAGAAGPLDEYSLNTAAARVNRFLPPSDRHPGSPLADIAYAYHFDAGLYARYLRGYAEQRGVRRVEGKLASVERHPDTGFVTALTLENGQRVDGQLFIDCSGFRGLLIGEALGTGYVDWSHWLPCNRAAAVQCERREALTPYTRSTAREAGWQWRIPLQHRVGNGYVFCADHVSEDEASARLLQRLDGPALMTPKILKFTTGKRKRFWSKNVVAVGLASGFMEPLESTSIHLIQSSIARLTTFFPHAGFDAVDIDAFNAQSHVEFDRIRDFLILHYKATTRDDTPFWRQVREMPIPETLRAKIDLFRSNGRFFREQEELFGEMSWVQVMIGQGIVPRRWHALVDSFDDAAVAKHVEDTRRIIQNCLRVMPDHADFIARHCAAPPATVVAPKVA

SEQ ID NO: 86969 - protein, 264 aa, Alteromonas sp.
  misc_feature (1)..(264): tr|A0A359K7L6|A0A359K7L6_ALTSX Tryptophan halogenase (F ragment) OS=Alteromonas sp. OX=232 GN=DEH24_15540 PE=4 SV=1
MKDSTPNILKQITIVGGGSAGWMTAAALSRMLPTGDVKITLVESEQIGTIGVGEATIPDMINFNKLLGISESEFIKATNGTFKLGIEFNDWGKLGDSYFHPFGGHGVDMNGVDFHQYWLHTLAAGNTCDLEDYSICAVAAKQNKFVLPEQNPNSVLSHLRYAYHFDATAYAAYLRKYAEQRGVKRIEGKIASVQQHTDTGNIAGLTLEDGTTVGGELFFDCSGFRSLLLGDTLGVKFRDWSHWLPCNTAQTVATEQTDKVLPFT

SEQ ID NO: 86970 - protein, 196 aa, Alteromonas sp.
  misc_feature (1)..(196): tr|A0A3D0QCE1|A0A3D0QCE1_ALTSX Tryptophan halogenase (F ragment) OS=Alteromonas sp. OX=232 GN=DEP33_16015 PE=4 SV=1
MAQKKTRVVVAGGGTAGWLTAFSLVTRLGNVLDITLVESDQIGTVGVGEATIPTMCNFHQLMGINEQEFMAATNATFKLGIQFDNWANEGDSYIHSFGEIGQRSWMAEFHEFWMEAVANGQQDSLEDYCLELKAAKANKFATKIGNRPLNFAYHLDATAYAAYLRKKSEAAGVTRREGKIQSVDTDPESGNLTRLT

SEQ ID NO: 86971 - protein, 275 aa, Xanthomonadaceae bacterium
  misc_feature (1)..(275): tr|A0A4Q2XPF7|A0A4Q2XPF7_9GAMM Tryptophan 7-halogenase (Fragment) OS=Xanthomonadaceae bacterium OX=1926873 GN= EOP89_08075 PE=4 SV=1
NRSANGDVAGVTFADGRSLDADFFVDCSGFRGLLIEEALATGYEDWRHWLPCDSAIALPTTRTGAPLPYTRSIAETAGWQWRIPLQHRAGNGHVFCSAFLDADSAEAQLRASVVGTPLADARRLRYTTGRRRKAWNRNVLAIGLSAGFLEPLESTSLHLVQSAITRLLALFPDRAFAAPDVDYYNRTTALEYERIRDFLVLHYHATARDDSPFWQHCRTMTIPDTLSARMDPLATLQSERLAALLPRIRNAIAQGVAAMPDHAAFITATCAAPTP

SEQ ID NO: 86972 - protein, 491 aa, Sphingomonas sp.
  misc_feature (1)..(491): tr|A0A0Q4UA06|A0A0Q4UA06_9SPHN Tryptophan halogenase OS =Sphingomonas sp. Leaf257 OX=1736309 GN=ASF14_16925 PE= 4 SV=1
MTDKRIRRIVILGGGTAGWMTAAALSRALAGQGVAITLVESDAIGTIGVGEATIPTIHWFNQIIGLDERQFMAETKATVKLGIEFVGWNGEGSRYFHPFGTYGPPGDGAMFLHRLIRARADGDHAPTEAYSLTAQAARAGRFARPVADRRSLLSTLGYAYHFDAGLYARYLRGLAERAGVRRIEGVVASVEQDGESGFVRSLTLDGGQVVAGDLFIDCSGLRALLIGQALDVGFDDWSHWLPCDRAWAAPSAAESDRTPYTRATAAEAGWRWRIPLQHRVGNGYVFSSRFQDEEEARASLIAGMDGPPLAEPRLIRFTPGMRREAWRANVVAIGLSSGFLEPLESTSIHLIQSGIAKLLSLFPAADCSPLLARQFNRVFGQEMLDVRDFLILHYHATTGRDEPMWRERQAMAIPDTLAEKLGHFRSSGRIVLSSDELFRDASWFAVLDGQGERPGDHNPLVEVLGREDNLRQLAALRADIVKTTAAMPPLP

SEQ ID NO: 86973 - protein, 168 aa, Xanthomonadaceae bacterium
  misc_feature (1)..(168): tr|A0A4Q2XD78|A0A4Q2XD78_9GAMM Tryptophan halogenase (F ragment) OS=Xanthomonadaceae bacterium OX=1926873 GN=EO P89_12795 PE=4 SV=1
MQAVRNIVIVGGGTAGWLTAGIIAARHQGRMPGGFTVTLVESPNTPIIGVGEGTWPTLRSTLSKMGVSESDFFRECNASFKQGARFARWTTGEPDEGYYHPLMLPQGFTRVNLASHWIADAKGQSFCDMVSPQGQLCDDGLAPKTIATPEYEAVANYAYHLDAGKFAG

SEQ ID NO: 86974 - protein, 283 aa, Alteromonas sp.
  misc_feature (1)..(283): tr|A0A359K0V7|A0A359K0V7_ALTSX Tryptophan 7-halogenase (Fragment) OS=Alteromonas sp. OX=232 GN=DEH24_03805 PE= 4 SV=1
MHTSAIHHYVIAGGGTAGWMTAALLGKLLNGTGARITLVESPDQPGVGVGEATVPSFVDFIKLLGIDEQTFVKATQATFKLGIQFSHWQTLGHSYWHPFGHVGARIDGKPFFQQWLHAHRSGLTQTYTDFSASARMAQENKFYIPNPQQPNNLSQMGYAYHFDAQQVAVFLRDFAVSKGVVHKKALIEHVQMCPDNSVIQRLITRTGEHIDGDFFIDCTGTQARLMGQALNTGFTDWQRYLPVDHAWVVQTQNTDEPVPYTKAIAEPMGWRWQIPLQHRTGNG

SEQ ID NO: 86975 - protein, 501 aa, Alteromonas sp.
  misc_feature (1)..(501): tr|A0A2D6HXG3|A0A2D6HXG3_ALTSX Tryptophan halogenase OS =Alteromonas sp. OX=232 GN=CL591_14940 PE=4 SV=1
MSTFDSATLPPVKNVVIAGGGTAGWMAAIALVKLLGKSLNITLVESKDIGIIGVGEATIPPIRTFHKLLNIDEKAFMKATQATFKLGIEFEGWREENHSYIHSFGVTGRECWAGEFHHFWLRAQKLGFGGEFGDYCPELQAAKANKFFTNESMPLNFAYHFDAVAYGRFLRTLATEAGVHHIVGNITNVSKCSQTGNITSLGVDESQEVNGDFFIDCTGFQGLLIEQALHTGYDNWSHYLPCDSAVAMQTETVAAPVPYTKSSAHKAGWRWQIPLQHRVGNGLVYCSKYMSDDEAKSTLVQQVEGEPVNDARFIKFTPGKRRLGWNKNCVALGLASGFIEPLESTSIHLIMTGIVRLMRLFPFDGVTQSAIDEYNTKYDSEMAAILDFIVMHYKVTNREDSPFWQHCKNMPIPPSLTHKLNLFKDTGRVFLDDGDIFRVDSWTQVMLGQGLTPNQYHKVADEMSEAELERFMMGLKQQVDNQVSRLPSHEAFLDKYLAVNS

SEQ ID NO: 86976 - protein, 508 aa, Xanthomonadaceae bacterium
  misc_feature (1)..(508): tr|A0A5C7RFH0|A0A5C7RFH0_9GAMM Tryptophan 7-halogenase OS=Xanthomonadaceae bacterium OX=1926873 GN=E6Q88_08750 PE=4 SV=1
MSAAPVGNTGRVTEVVIVGGGTAGWMTAAALAKILSPEYKVCLIESDEIGTVGVGEATIPMIKLYNNALELDENEFIRETKGSFKLGIEFVNWGRLGDSYIHGFGKIGQDLGLLPFYQYWLKMHQAGKAGGLDDYSINTLACRYDKFIPAVTDRPNSPLADIAYAYHFDAGLYARYLRKYAEARGVRRIEGKIASVEQHPHSGFVEAVTLESGERVGGQLFVDCSGFRGLLIEQTLQTGYVDWTHWLPCDRAVAVQCTSGDTITPYTRSTAREAGWQWRIPLQHRVGNGYVFSSPHISEDEATAVLMRNLEGQPLTEPRVLRFVTGKRKKFWNKNVVAIGLSSGFMEPLESTSIHLIQSGIARLSAFFPHAGFDQVDIDEFNDHANFEFDKIRDFLILHYHATERDDTPMWNYCRTMSIPESLTRKIELFRSNGRVFREGNELFAEPSWVQVMYGQRIHPQSYHALVDVYSEAKIAEYMAGIRGVIANCVKVMPRHEAYIAKYCAASM

SEQ ID NO: 86977 - protein, 497 aa, Novosphingobium sp.
  misc_feature (1)..(497): tr|A0A0N0JI33|A0A0N0JI33_9SPHN Tryptophan halogenase OS =Novosphingobium sp. AAP1 OX=1523413 GN=IP65_07560 PE=4 SV=1
MNEAAIRSITILGGGTAGWMAATLLAKACDGQPLRIILVESEEIGIIGVGEATVPLFRLFNDRLGLDEHAFLQATMGSYKLGIEFCDWGQVGNTHFHGFGDYGEPIGGIAPHHHWLRLARSGEAAPIDDYSAPYALAQRGKFTPADPRQPRYAHAYHFDAVLYARYLRTLAESWGVTRVEGRVVDVPLDPQTGHIRALHLADGQVVDGEFFIDCTGFAAELIGKRLGAGYVDWSHWLPCDSAIAVPSARQDPPAPFTRSTALAAGWQWRIPLQHREGNGIVYASAHMSDAAAEEALLGSLGGAPLANPRRFRFTAGRREAFWQRNCVALGFASGFLEPLESTGIQLIQNGIGRLIEFFPDRHFDPRVAAEYNRVCQVEWDRIRDFIIAHYCVSQRPEPFWQAARAMDLPDTLQQKLDSWHATGKIPLLDGESYQEPSWAAILLGNGVWPQRHDPLIDALPIDMLRAHMARRREDLARMGRSAPDHRFYLARHCQAAA

SEQ ID NO: 86978 - protein, 491 aa, Novosphingobium sp.
  misc_feature (1)..(491): tr|A0A0N1APG1|A0A0N1APG1_9SPHN Tryptophan halogenase OS =Novosphingobium sp. AAP1 OX=1523413 GN=IP65_08490 PE=4 SV=1
MSGAPIASIAILGGGTAGWMTAAALSKALAPQGVAIALIESDAIGTIGVGEATIPTIHWFNQLIGLDEAAFMQATGATWKLGIEFRGWQGDGSAYFHPFGTYGLPGDAQMLPHRLIRAWNGGHPIDIEAVSLTTQLARAGVFARSSGDPRSLLSTLGHAYHFDAGLYAAFLRRMAEERGVRRHEGRVTAIDRDGETGFIRALTTERGERLAVDLFIDCSGLNGLLIEGQMAAGFEDWSHWLPCDSAWAAPTAADPAAPLFTTATAAAAGWRWRIPLQHRVGNGYVFSSRFETADAARDSLIAAIGTPTADPRLIRFTPGRRRRAWIGNVVAIGLASGFLEPLESTSIHLIQTGIGKLLSLFPRQDCAPLLAEQYNRVFAQEMEDVRDFLVLHYHFTQGRSEPLWQHCQATALPESLAYKVDQFTTSGRLMLRGEELFRDASWFAVMTGQGLRAGDHNPMLDGMSDMENLRHLDAVKAAVAKSLAQLQAGRA

SEQ ID NO: 86979 - protein, 504 aa, Sphingomonas sp.
  misc_feature (1)..(504): tr|A0A0Q4L3X5|A0A0Q4L3X5_9SPHN Tryptophan halogenase OS =Sphingomonas sp. Leaf38 OX=1736217 GN=ASE88_10535 PE=4 SV=1
MTDRALRSIAIIGGGTAGWMAAAALAHVLGTRNVAITLVESEEIGTVGVGEATIPPIQAFNALLGIDEDAFVAATMGSFKLGIEFVDWLRPGACYFHPFGVYGTDVGAVPFEGLWHRLRAVGDAASLDAYSICAAAAQDGRFMRPLTDGGNTPLHRIGYAYHFDASLYARFLRRHAEATGVVRREGRVVDVAVRGADGFVETVTLASGERIAADLFVDCSGFRALLLGETLGTGYEDWSHWLPNDRAVAVPSAPVGPPTPYTRSTARAAGWQWRIPLQHRTGNGYVFASGHLSEDEAIATLLASLDGEPLAEPRALRFRTGRRDAFWVKNCVGLGLSSGFLEPLESTSIHLIQAGIARLLEMLPTRDFEAADIRRYNRLMIAEYDSIRDFIILHFHATQRDDTPYWDHVRTMAVPETLAERIRIYQATGRVFREADDLFTKTSWLAVMDGQGLCANGFDPLAASLSADEARTRLARMAAVTAAAATRMPPHEQFIARHCARSIA

SEQ ID NO: 86980 - protein, 519 aa, Novosphingobium sp.
  misc_feature (1)..(519): tr|A0A0N0JIT3|A0A0N0JIT3_9SPHN Tryptophan halogenase OS =Novosphingobium sp. AAP1 OX=1523413 GN=IP65_06780 PE=4 SV=1
MTDMPAAQHAKPIRQIVIAGGGTAGWMAACYFSGRLARQGVAITVVESSAIGTVGVGEATVPGIRDYFRAIGVEDIDVLRATGGTVKLGIEFRDWAQPGSRFFHPFGLYGVPSRGVPFHQYWLKLQHAGEPTDLAAYSLCSALAQRGAFMLPPDKPVNDLAVFDWAVHFDASRFAAMLRDRALAQGVRHIDDVINDVALDAQTGHIAHLVTKEHGSVAGDLFIDCTGFRSLLLGKALGVGWTDWTDLLPCDRAVAIPCAADATRDWSYTVSTAQEAGWQWRIPLQHRVGNGYVYSSAMLSDDEATAKLLSRLEGEALAEPNLIRFGAGHRQRFWVGNCVGMGLAAGFLEPLESTSITLIQTAIERLAEFFPDATFDPALADEFNRATTLEYARIRDFLILHYLGNRRVGEPFWDRLRQADVPEMLAHKLRLFRARGRLVRYEWESFLDPSWLSMYAGFDWLPSAHDPMADHFTNAEISEALRRMRETVAGAVAEARPHRDFIAHIAGIAGSPPAGPLAA

SEQ ID NO: 86981 - protein, 501 aa, Pseudoalteromonas sp.
  misc_feature (1)..(501): tr|A0A410CP30|A0A410CP30_9GAMM Tryptophan 7-halogenase OS=Pseudoalteromonas sp. R3 OX=1709477 GN=ELR70_16680 P E=4 SV=1
MVGGGTAGWLAANHLAVDVAEDVTITLVESPNIPTIGVGEGTVPVIVDSLKKFGIRESDIFRLCDATFKNGIHFVGWNKSVNGQPHRYFHPFDDPNVNGVNLLPYWLHQLPEARARFDQSVSIQTHIALENKAPKLITDAEYDRMINYAFHLDAGKFSALLAEHAVKNRRVNHIKDDVESVQIAPDGFISGLQLKQGDVLKGDLFIDCSGFQSLLLGKALNTPFIDKSDVLFANHAVVTQVPYEHAQEVPPYTISTAQQAGWIWDIGLQSRKGVGHVYSDQFTTHEQAHRDLCAYLGKSENAVESRLIKMQVGFRAEAWVKNCIGIGLSQGFVEPLEATGLLVFDLAARMLSKRLPTQRQEMPAIAKQFNQHMAHVWQSIVDFIKLHYCISNRDDSEFWRMNRAAETIPDSLQQKLALWRNDIPNEYDFVSSLDVFRLENHLYVLYGMGYPSRCKYPSPQQVSQQEAMLKLVAQRQIQAGTMLDTHSNLVAKASRYGFQRI

SEQ ID NO: 86982 - protein, 256 aa, Xanthomonadaceae bacterium
  misc_feature (1)..(256): tr|A0A4V1S8F6|A0A4V1S8F6_9GAMM Tryptophan halogenase (F ragment) OS=Xanthomonadaceae bacterium OX=1926873 GN=EO P89_05500 PE=4 SV=1
AFAVQSETPEGLLPYTRAIAHGEGWRWKIPLQHRTGNGLVYSSAHLSDDVARDRLLAGIDGKPLFEPRQIRFTSGMRRRVWNHNCLSLGLASGFVEPLESTSIHLVMIAVTWLVQNFPFGDDSAALAERFNARTRREWEQVRDFIILHYVLTERDDTPFWQSRRTLPIPDSLAGRIALFRESAMAYQDKDELFRIESWVEVMLGQGVSPRSHHRLPATMPTAQLQGAMNDLRNGIATAVERLPGYETFLARFRQPA

SEQ ID NO: 86983 - protein, 508 aa, Pseudoalteromonas sp.
  misc_feature (1)..(508): tr|A0A0W1KUC1|A0A0W1KUC1_9GAMM Tryptophan halogenase OS =Pseudoalteromonas sp. H103 OX=1761893 GN=ATS74_08525 P E=4 SV=1
MNKAIKTVAVIGGGTAGWLSAAIIASYHQGKNGDGLKVMLVESSDIPTIGVGEGTWPTMKNTLQQIGLREVDIFKACNATFKQGGKFVNWTHGNNDFYYHPFTVPLGYGRIDLAPYLDNVEDYAQQTNFQHDICEASLAPRGIAQGEYQGNCNYAYHLDAGAFAELLKQHCKSKLGIEHVIGTVEQVKLDDNGAIDTLTLKEQTRTINADLYIDCTGFSSLLLGQALNVPFKKMDHVLFNDSAFAMQVPYDENDNSLASHTIATAQNAGWIWDIGLTHRRGVGHVYSSKFLSDEEAEQNLRNYLGDAANGLTARKISFESGYREKFWHKNCVAVGMSAGFVEPLEATAIMLVEISSRFVAEHMPADTQVMPIVAKRFNEQMDYRWQRIIDFLKLHYMLTKRTEPYWQAHVQPETIPQSLQEDLLLWGTRGPLIQDFHGALELFPAASYQYVLYGMGFKPDFTKQAYLYSQDAQAKQIIERNSQLTQQMLQTLPPHRAYIEQWLAANPV

SEQ ID NO: 86984 - protein, 502 aa, Sphingomonas sp.
  misc_feature (1)..(502): tr|A0A0Q4LD48|A0A0Q4LD48_9SPHN Tryptophan halogenase OS =Sphingomonas sp. Leaf38 OX=1736217 GN=ASE88_03760 PE=4 SV=1
MKRVQRLVILGGGTAGWMTAAAMSATFGDLVNISILESDAIGTIGVGEATIPTIHWFNQLIGLDEEAFVAATKASFKLGIEFVDWARPGTRYFHPFGRYGVDLGPVPFHQHWLRGKGDGLDRPLSVYSLAAQLAADGRFAKPVDDPRSILSTLGYAYHFDAGLYARHLRQLAEKRGVVRHEGLLRDIERHPKTGFVTALTSDRGERLEGDLFIDCSGFRALLIGETMGARFEDWSHWLPCDRAVAVPCARIAATTPFTRSTLRPAGWQWRIPLQHRTGNGYVYASSFVSDDEAVATLLSNLDGEALADPRMLRFTAGFRREAWRGNVVAIGLSSGFLEPLESTSIHLIQSGIAKLITLFPDSDCDPVLARQFNTLFARDMDGIRDFLILHYHATQGHDAPLWQHTRHMTPPPTLVDKIAQYTRAGRLMLSADDLFREASWLAVLEGQGVGALGHAPLADTLDAATNRRQLNQIETVIARATPTLPLHDAAIAALVAPQVAGR

SEQ ID NO: 86985 - protein, 508 aa, Brevundimonas sp.
  misc_feature (1)..(508): tr|A0A1S6EYL0|A0A1S6EYL0_9CAUL Tryptophan halogenase OS =Brevundimonas sp. LM2 OX=1938605 GN=BZG35_16770 PE=4 S V=1
MGDRIRRIVILGGGTAGWMTAAALSKTLARDVSITLLESDDIGTVGVGEATIPTIHWFNDLIGLDEEDFVRVTKASFKLGIEFVDWTRAGSRYLHPFGTYGVPGSGLPFHQRWLKARNDGLERPLRDFSLASQLAQQNRFAKPVSDPRSILSTLGYAWHFDASLYAGYLRSLCTRRGVTRVEGRMANVERDGETGRVSALTTDKQERLEGELFIDCSGFRALLIAAELGSGFEDWSHWLLCDRAAAVPCERVAETTPFTRSTARTAGWQWRIPLQHRTGNGYVYSSAHISDDEAAATLLAHLDGAALAEPRLLQFKAGRRKTVWSKNVVAIGLASGFLEPLESTSIHLIQSGIAKLLSLFPDRHVDPALARRFNLLFEADMDNIKDFLILHYHANERVGEPLWDHCRTMPIPDTLQARIDDYRRSGRLMLGSDDLFRDASWLAVLNGQDVVAEGFTPLADRLDAQVNREQLEQLAQLIERAAPTLPAHDTVIQQILARQPVEALAAAG

SEQ ID NO: 86986 - protein, 493 aa, Sphingomonas sp.
  misc_feature (1)..(493): tr|A0A0Q4TY43|A0A0Q4TY43_9SPHN Tryptophan halogenase OS =Sphingomonas sp. Leaf257 OX=1736309 GN=ASF14_06310 PE= 4 SV=1
MSTPRRIVIAGGGTAGWMAAAAMARTLGRAVTVTLVESDAIGTIGVGESTIPPIITFNRLLGINEAEFMAATQATFKLGIQFDGWKGPEDRYFHSFGLTGKDHWAAGFQHFWLDGLRRGHDAPYDDYCLELIAAREGRFAHLPDERMNYAYQLDSTLYGRFLRGMAEGDGVTRIEGRIAEVALNPDSGDIAALVLDDGRRVEGDLFLDCTGFRALLIDRALHVGFDDWSHYLPCDAAVAVQTESVRPPVPYTRAIAHEAGWQWRIPLQHRAGNGIVYCSRYMDHDAARERLLSTVEGQVLTEPNMLRFQTGARRKQWHRNCIAVGLSGGFLEPLESTSIHLIQRAILRLIRLLPGGPISAYDVAEFNDQQMTDMLQIRDFLILHYKVHERRDSAFWRQCADMEVPDSLAHRIALFRETGRVFRRNDELFAENSWVQVMMGQGIKPESHHPITARLSDEELDRLLTTLRQNIATTVRGLPPHADYVAHHCGTAA

SEQ ID NO: 86987 - protein, 526 aa, Sphingomonas sp.; identical to SEQ ID NO: 83715
  misc_feature (1)..(526): tr|A0A0Q4EV38|A0A0Q4EV38_9SPHN Tryptophan halogenase OS =Sphingomonas sp. Leaf16 OX=1735681 GN=ASE65_12780 PE=4 SV=1

SEQ ID NO: 86988 - protein, 515 aa, Shewanella sp.
  misc_feature (1)..(515): tr|F7RRK5|F7RRK5_9GAMM Tryptophan halogenase, putative OS=Shewanella sp. HN-41 OX=327275 GN=SOHN41_02949 PE=4 SV=1
MHSESIKSVVVVGGGTAGWLTAANLARAFNSANPNNIQVCVIESPDIPTIGVGEGTWPTMRATLAKLGIDEADFLTQCNATFKQGTKFINWQTDVEPNQYHHLFTSIFDPTQFNLAPYWLKGCAGNSLSYAQAVSAQIKTAELGLAPKKITSKPYEGLQNYAYHLDAGKFADLLKRHAINKLGVKFIAANVTDVRLESDGYIAEVQTDNSGAIAGDFFVDCTGFKSLLIGETLGIGFTSVADTLLTDHAVTIQVPYDSDDAPINACTHSTAQDAGWIWDIALTNRRGVGYVYSSKHVSHEEAEATLRRYIGDAATGLSARKIKIDLGYRNKFWHKNCVAVGLSAAFIEPLEASAIFLIEAAGNMIADQLPSRRQGLLFAEQKFNESFMFRWQKTIDFIKMHYLLSQRSTPFWQANKCKSTIPESLTTLLGNWQEHCISAYDFAHVYEPFPMESYQYVLYGMGFKPQSVAEYRYTEDVKAAEHFNKVQQVTEYLAKELPGQRALLQKVAQFGFSSI

SEQ ID NO: 86989 - protein, 502 aa, Sphingomonas sp.; identical to SEQ ID NO: 84313
  misc_feature (1)..(502): tr|A0A0Q4FY92|A0A0Q4FY92_9SPHN Tryptophan halogenase OS =Sphingomonas sp. Leaf16 OX=1735681 GN=ASE65_00620 PE=4 SV=1

SEQ ID NO: 86990 - protein, 505 aa, Sphingomonas sp.; identical to SEQ ID NO: 83716
  misc_feature (1)..(505): tr|A0A0Q4FR91|A0A0Q4FR91_9SPHN Tryptophan halogenase OS =Sphingomonas sp. Leaf16 OX=1735681 GN=ASE65_17635 PE=4 SV=1

SEQ ID NO: 86991 - protein, 516 aa, Novosphingobium sp.
  misc_feature (1)..(516): tr|A0A0N0JJ35|A0A0N0JJ35_9SPHN Tryptophan halogenase OS =Novosphingobium sp. AAP1 OX=1523413 GN=IP65_06965 PE=4 SV=1
MSGTSPRAIRSVCIVGGGSAGWLTAGLIAARHGRDLAVTLVESVSRGTIGVGEGTWPTMRNTLRKIGIAETDFMRACHASFKQGAKFARWRTGAADDFYYHPLVLPEGFPDLDLAPYWNSAAQGNGNGGPSFSDAVCFQEYLCEQGLAPKLMTSPDYAGIANYAYHLDAVKLGELLATHCTGKLGVNHIDDEIVGVTRRDDGDIAAVIGRDSGAIAADLFVDCTGFSSRLLGEALEVPFIDRSDVLFIDRALAVQLPVEEDSPIASHTISTAQKHGWIWDIGLPTRRGIGYVYSSRHAGADRAEEELAAYVGPGFAKLTPREIPIRSGHRAQFWKNNVVAVGLAAGFLEPLEASALVLIELSADYIATSMPATRQAMDFVARRFNSMTRYRWDRIIEFLKLHYVLSERSDTAFWRDNRDPATIPQDLQDQLELWRDTPLGEHDFASAHEMFPAASYQYVLYGMGFRTRPRAGQLAQRDMADDAFARNAAMKRKLGQMMPTNRALLDKLAQHRFPPL

SEQ ID NO: 86992 - protein, 355 aa, Alphaproteobacteria bacterium
  misc_feature (1)..(355): tr|A0A3M1PPN6|A0A3M1PPN6_9PROT Tryptophan 7-halogenase (Fragment) OS=Alphaproteobacteria bacterium OX=1913988 GN=D6740_09520 PE=4 SV=1
LKLFNRRLGIDEGAFLRAVRGSIKLGIEFLGWGAPGERYIHPFGRYGADFDIVPLHHYWLRARALGRDVGGIEEYALAAVAARMGRADRPLADPRRIQSTFDYAYHLDATRYAAFLRRYAEARGVRRIEGRVARVVRDGETGLVDALVLEDGRRLAADFFIDCSGFRSLILGEALDVPFHDWTQWLPCDRAIAVPSRAGGAFTPHTQSFAHRAGWRWRIPLQHRIGNGIVYQSAEMTDDEAERILLGSLDGEALAEPRLIRFRAGRRARPWEKNCVAIGLAGGFLEPLESTSIHLIQSALFRLLALWPLSPQDRISAHEFNRLSAEEYARIRDFIILHYHANRREEPFWRQLAAM

SEQ ID NO: 86993 - protein, 439 aa, Alphaproteobacteria bacterium
  misc_feature (1)..(439): tr|A0A3M1GE43|A0A3M1GE43_9PROT Tryptophan 7-halogenase (Fragment) OS=Alphaproteobacteria bacterium OX=1913988 GN=D6782_02880 PE=4 SV=1
MTQAGTRKKVIIAGGGTAGWMTAAAIGKVLEKVVDVTLVESEQIGTVGVGEATIPTLVTYNRLLRIDEAKFMRAVGATFKLGISFENWTDLNHRYIHSFGVTGKDHWTAGFQHFWRRGHEMGIAKEFGQYCLELVAAERTRFAHLPDLGLNYAFHIDSTAYAAFLRQIAEGHGVKRKEGIIKDIARSDEGDLKSLTLDDGTVLEGDLFIDCTGFRALLIGDTLGVGYDDWTHWLPCDRAIAVQTKSVRPPVPYTRSIAHGAGWQWQIPLQHRTGNGIVFCSRFMSEDEAKAFLLSNIEGDILTEPRVIRFRTGTRRAHWHRNCIAIGLSSGFIEPLESTSIHLIQRSVIRLMKMFPHGAVQPSDIDEFNKQTFYELEHIRDFIILHYHLTNRTDTPFWRHCRTMDVPEGLRHRMRLFKQTGRTFRANDELFAENSWTQV

SEQ ID NO: 86994 - protein, 516 aa, Sphingomonas sp.
  misc_feature (1)..(516): tr|A0A3M0FQQ3|A0A3M0FQQ3_9SPHN Tryptophan halogenase OS =Sphingomonas sp. PP-CE-3A-406 OX=2135659 GN=C8J44_0062 PE=4 SV=1
MRKRILIVGGGTAGWLTAGYLAKRLGADLAGGVSITLVESRDIGILGVGEGTFPTIRRTLATIGIDEAELVRRCGATFKQGAKFVHWRHEPGQGRTDHYLHPFQIADASDGLDLLPYWLLGYGGPDNWDEVSNPQKKAADQMRAPKLATNPDYVGPLNYAFHFDAVALAGLLREQGVKNGVRHLTDTVTEVLLDGDGAIGGVRTEQNGLLDADLYIDCTGFRAELIGKAMKIPYRSCRDVLFCNRAITAQLPYARRDEPIASYTISTAQESGWIWDIGLDRRRGIGHVYSSDHSDDETAERVLRGYLGAGGDEADVRHFKFDAGYREVNWYKNCVAVGLSSGFFEPLEATGIAFAEVSAGMIANLFPWGGDFETSARQFNANMLRRYERALDFIKLHYCISERRDTAFWRDNVADSSVPDSLLELLDRWRFRPPNELDIDGQVDIFTDASWQYVLYGMGWKTDLSAKAGALRYHNDARRAFAEVQRQAQYAIANLPSNRALVDYAQTHRFGARAPA

SEQ ID NO: 86995 - protein, 275 aa, Streptomyces sp.
  misc_feature (1)..(275): tr|A0A3D9WY95|A0A3D9WY95_9ACTN Tryptophan halogenase OS =Streptomyces sp. Ag82_O1-9 OX=1938856 GN=BX279_8632 PE =4 SV=1
MRATLDIDPYVKVNPTLPTNGPWHGFQVDRQRLDALLLDRARQAGAEVRLGCRALEPVVAGGAVTGVRFSGGAWPPLRTRTVIDATGRARWLSRALDLTAPPCSPRLLIWYGYASGACAQRDAAPAIVADDTGWTWTARVGPARYQWMRLDFVPRRGRKYGPPREFAGLESEAPARAADVSWRLCPEPAGPGWFVTGDAGVLLDPASSHGVLRAPLSGWTAGSLTAAAAARALDPGRAAGIYRQWLHEGAERDMIHLSARYATLGARGFGRAEGA

SEQ ID NO: 86996 - protein, 519 aa, Alphaproteobacteria bacterium
  misc_feature (1)..(519): tr|A0A3M1G5B3|A0A3M1G5B3_9PROT Tryptophan 7-halogenase OS=Alphaproteobacteria bacterium OX=1913988 GN=D6782_08 925 PE=4 SV=1
MTEKAVRDVVIVGGGTAGWLTAGILAADHRAAFEDGLRVTLVESPTIPILGVGEGTWPSLRDTLRRIGIGETDFIRQCNASFKQGSRFDGWVNGAADDVYFHPFEAPPSFDDIDPLALWRAAPAGTPFAEAISHQAALCLAGRAPKQIVTPEYAAVANYAYHLDAPAFAAMLRAHCTQKLGVRLITDDMVDVVIGDDGTVESLVTKASGHVAGDLFVDCTGTRALLIGKALGVEAKSVGNFLFNDRALALHAPYEGEQAPIASQTTATAMPAGWIWDIALQTRRGIGYVYSSAYTSEDAARADLSTYLHRAAPASGVSGADARLIKFSGGYRETPWVGNVVAIGMAQGFVEPLEASAIVMIELSAMMLSDTLPAWRGAIETASARFNQRFAYRWSRIVDFLKLHYVLSRRPGQYWADNRKIASWPERLRRLVAQWKFEAPSREDFPQILEIFPAVSYVYILYGMGFETAPRRTHRRKDSPAIAERHLRDMALKRKKFLDGLPSNRELIGHIQSRGLTRI

SEQ ID NO: 86997 - protein, 484 aa, Alphaproteobacteria bacterium
  misc_feature (1)..(484): tr|A0A2N3BXF7|A0A2N3BXF7_9PROT Tryptophan halogenase OS =Alphaproteobacteria bacterium HGW-Alphaproteobacteria- 3 OX=2013666 GN=CVT81_16415 PE=4 SV=1
MSDSRIRSVVIVGGGTAGWMAAAMSEEIGIVGVGEATIPQIRLINSFLGVDENEVLRASQGTFKLGIEFNDWRRVGDSYLHAFGETGMPLGPLSFHHYWLRSQQAGGKTRLWDYSLNTSAAEGLRFARMDKVGDTPVGGIRYAYHFDAGLYGQFLRRYAEQRGVRRSEGKVVDVHLRATDGFIESVQMDSGERIEGDLFLDCSGFRGLLIEGALKAGFDDWSRWLPCNRAVTVASARVEPMRPYTQSNARPAGWQWRIPLQHRTGNGHVYCSDFMSEDEASALLLANLDGEALAEPRALRFTSGIRNTLWQRNCVALGLASGFVEPLESTAIHLVQSCINRLLTLFPDRHCDAALRDEFNRQTRYEFESVRDFLVLHYKATERDDTPFWRHCAQLQLPERAARKVALFRASGQIVRENEELFTEGSWLQVMLGQGIEPERYHPSADAISAAQLDGFLRGIRGTVAQAAAMLPSHSEYVAGHCRA

SEQ ID NO: 86998 - protein, 502 aa, Alphaproteobacteria bacterium
  misc_feature (1)..(502): tr|A0A2W4SVA2|A0A2W4SVA2_9PROT Tryptophan halogenase (F ragment) OS=Alphaproteobacteria bacterium OX=1913988 GN =DCF29_21830 PE=4 SV=1
MDEIDDPRIRSVVIVGGGTAGWMTAAALVQHFRTAPLKITVVESSDIGTIGVGEATIPTLRRFYAQLGLRDDDVMRATQATCKLGIRFIDWSGPGSDFIHPFGLYGQDVKGIGFHHYWLKQRRAGDAAPLAAYSLGASLAAGGKFTLPSPNPPSQLSVFDWALHLDAGLFAQHLRAYAEAGGCARIDARIRAVELRPEDGFVRALTLDDGREVEGDLFVDCSGFKGLVIGEALGVGFEDWGRWLPCDAAYAVQSANRPGDAPAPFTRVTARSAGWQWGIPLRHRAGNGLVFSSAHLSDDQALAELMPHLLGDPLTEPRRIPFRPGRRTQAWARNCVAIGLSAGFLEPLESTSIALIETGIERLKALFPDRRFAQPILDEFNDQTAREMERVRDFIILHYKLNRRTDTDFWRDCREMAIPETLERKIALWTARGQFVRYRWEMFHPASWLAIYDGFGLYPDGYDPAVDAMDPAYLSRSLAEMRANIADLVARTPDHAHFLAGL

SEQ ID NO: 86999 - protein, 477 aa, Massilia armeniaca
  misc_feature (1)..(477): tr|A0A2R4CHE0|A0A2R4CHE0_9BURK Tryptophan halogenase OS =Massilia armeniaca OX=2072590 GN=C9I28_01550 PE=4 SV=1
MVAAGLSKSLGKLLDIKLIESDEIGTVGVGEATIPTLMNFHHLLEIDEREFMAETMATFKLGISFENWRNVGEDYIHSFGTTGTDHWTAGFQHFWHKGRERGLAGDYGDYCLELKASLHNRFAHLPKNGMNYAYHMDAGRYARFLRRFSERYGVQRVEGKIAEVRKDLIHGDIRALRLDSGLELEGDLFIDCTGFRALLIGETMGVGYEDWSHWLFNDSAAALQTKSVGDAIPLTRSIGRESGWQWRIPLQHRVGNGIVYSSRYTDDDTAIRTLQANVEGEPLMTPRIIRFKPGQRRQTWKGNCVAIGLASGFLEPIESTSIHLIQRGIIRLMQMFPTDGISQADVDEYNKQAETEIHHIRDFIILHYHVTNRRDTPYWRDAASMPVPASLRHRIDLFRETGRVFRIPNELFAENSWIQVMLGQGIHPRQHHQTADLMGDDELAHFLGSMATSIERTVAQLPSHQQYVQQYCAGTGW

SEQ ID NO: 87000 - protein, 579 aa, Metarhizium guizhouense
  misc_feature (1)..(579): tr|A0A0B4HAW6|A0A0B4HAW6_METGA Tryptophan halogenase OS =Metarhizium guizhouense (strain ARSEF 977) OX=1276136 GN=MGU_06090 PE=4 SV=1
MAVPPSCTVLVIGGGPAGSYAAAALAREGIETVVLEADKFPRYHIDESTLPSLRHFFKFIDFYDTVDAYGFYHKNGAVFRLAQAQPDACKSPSPAYTDFLEAGGPNGYAWNLIRSEFDDLLFKHAGTCGAQTFSETRVDMIQFEPVANGLKPDMNRNLEDHLTPGRPVSATWVRKDGTSGSITYKYLVDASGRHGILSTKYLKNRKFNNNFKNAATWAYWKSDNVYGPGTHMEGSPYFEALDDASGWAWFMPLHDGTRSVGIVQDQKMATEKKHELGRPSTLDFYKQCLEMAPRIKELLSEAEFIPHVRAACDWSYTASTYHLPNARICGDAGSFIDPLFSSGVHLAITGGLSAAATISASIRGDCSEAAAGSWHSKKTVESYTRFFLAVSSATKQIRTQHEPIIKDMDEEGFQRAFDLFRPIIQGTADADAAGKVSQLEISKILQFCFKAFTYVPPEKKDALFDKLRKLDSKALQDDAKQVQTLDAIEKHLTADELQILEILRSRRMIREDPFEMDSFTLDTIDGMAPRLVRGSLGLVNYEQAKIDKAHFYSQDFLDGNYPGIREGSVHLPTSRVQLG

SEQ ID NO: 87001 - protein, 782 aa, Aspergillus oryzae
  misc_feature (1)..(782): tr|A0A1S9DYJ5|A0A1S9DYJ5_ASPOZ Tryptophan halogenase OS =Aspergillus oryzae OX=5062 GN=OAory_01027160 PE=4 SV=1
MDIPDRCTVLVVGGGPGGSYAASVLAREGIDTVLLEADNFPRYHIGESLLRTTGSFLEFVDAYGKFESHGFRQKNGAAFKFNSKPAAYSNFLQHGQHAWNVDRSQCDDLMFKHARECGARTFDGVKVQSVKFSQTFCLDEKESGEQAHLGKPVSASWVRKDKTTGSIKFQYLVDASGRAGLISTKYMKNRKFNEGLKNVASWGYFEGFEMYGVGTVAEGCPYFASFPDGSGWVWFIPLGENKVSVGVVMEQKSATAKKKLMESPSSREWLLTQAKEAPGIGDLLAKATLVSDVKSASDWSYTASTYATTNIRIVGDAGCFIDPLFSSGIHLALTGAFSAAATICSSIRGDCSEKSAADWHSKRIQEAYARFLLVVASTYGQITGKEAAILNDEGESDFDSAFELIRPIIQGSAEESTGKAGPEDATEAVSFCMRVIRKAQNRLEDISIGDKIIRAAMQPDTGSIGGSDIDRIVIHAERGALGLVKIMPSKVVHLPCSHGSMGSEKTNIPVAESPRDVQTTLTFSKQNEDCSAPPPMYIGKPQSYNRPTTTLPATIHDISGHELEYTLDSHGFQFYSHESKVKDFLDEERVRAEYYPETEQLLHDVTGATRFCVFDHTVRQASQDWTTERDARGPVQRVHIDSSYAGAEARVRYHFPDEATELLKHRYQMISVWRPIKTILKDPLAVADAHSTPESDLFPVKIHFPDREVEGWAVKADPQLKWYYRYKQPPDMVTLIKLFDSKLDGRARRVPHTAFVNPATEHEAPRESIELRALIFHPDDPN

SEQ ID NO: 87002 - protein, 500 aa, Sphingomonadaceae bacterium
  misc_feature (1)..(500): tr|A0A2A5YVH9|A0A2A5YVH9_9SPHN Tryptophan halogenase OS =Sphingomonadaceae bacterium MED-G03 OX=1986231 GN=CNE8 9_03145 PE=4 SV=1
MKQPSLPRRIVVAGGGTAGWMTAAALARTLGPVAQVTLVESEQIGTIGVGESTIPPLVAYNRILGIDEADFMRATQATFKLGINFEHWRVPGESYFHSFGGTGKDHWSAGFQHFWMHGRAQGHDAPYGDYCLELQAAQANRFSHLPDDRMNYAYQLDSGLYAKFLRSMAEGDGTTRIEGRIVAVDLDGTSGDIAALRIDGDRRIEGDLFIDCTGFRALLIEGALHAGYDDWTHWLPCDGAVAVQTASVRPPVPYTRAIAHDAGWQWRIPLQHRQGNGIVYCSAFMTPDAALQMLLDSVEGETLVQPNPIRFRTGARRRQWHRNCVAVGLSGGFMEPLESTSIHLIQRAVLRILRMLPAGAISPRDIAEFNDQQMADMEQIRDFLILHYKATDRRDTPFWRHCASMSVPDSLTHRIELFRETGRIFRKNEELFAENSWVQVMMGQGVTPQSYHPVAAKLRPQELEHLLATLREQVSRTVAALPDHGAYIARYCGAQDVAAA

SEQ ID NO: 87003 - protein, 496 aa, Shewanella decolorationis
  misc_feature (1)..(496): tr|A0A5B8QXM8|A0A5B8QXM8_9GAMM Tryptophan 7-halogenase OS=Shewanella decolorationis OX=256839 GN=D0436_12405 P E=4 SV=1
MSQIKDIVIVGGGTSGWMTAALLAKLFKHTLNITLVESEDIGTIGVGEATIPPLQLFNSVLGIPENEFIQATHATFKLGIQFEHWGKQGDSYMHAFGNIGKDIGYTQFHQYWLSTQPEMMASFWDYSLNYQAALNNKFQSLEQIPHSPLSGLTHAYHFDAARYAWLLRQYSEKSGVKRIEGKIESVNCAANGHITNLTLVSGNSVQGDFFIDCSGFAALLIGKTLNVGYESYQDWLLCDSAYAVPSEKACEIKPYTRAIAHEAGWQWRIPLQHRTGNGIVYSSRYMKDEEAKAKLLSTLEGKPLAEPKKISFIPGRRLKQWQHNCVAIGLSSGFLEPLESTSIHLVQSAIIRLTKLFPHQGVVQATVDEFNRQSQLEFEQIRDFIILHYYLNRRSDSDTDTLWSACQQMQIPESLQQKISLFSETGAIFRHKDELFTEAAWVQVMLGQGIIPTDYNPLANTVAPEALTEFLSNIKVIIKNTVSNMPTHEQYLAQLV

SEQ ID NO: 87004 - protein, 493 aa, Alteromonas sp.
  misc_feature (1)..(493): tr|A0A385N0M8|A0A385N0M8_9ALTE Tryptophan 7-halogenase OS=Alteromonas sp. RKMC-009 OX=2267264 GN=DS731_16505 P E=4 SV=1
MCAAALARTAQPETQVTLLESDQIGTIGVGEATIPLLAEFNAFLGIDEHDMLKECAGTFKLGIEFIDWYRKGHAYFHPFGFFGKDTPEFPFHQLWLKLNSLVRNGELPEELCGNICEYNLCTVAAKLGRFSQAQGGANTILSTMRNAWHFDSGAYGKLLRRYAEQRDVQRIEGKIVDVSVEPKSGDITSVRLENGLVVAGDLFIDCSGFRGLLINEHLQSEFNDWTHYLPCDRAIAIQTYENIHAPPYTRAYAKEAGWRWQIPLQSRFGNGYVYSGQFQEQQEALTSLLSDLHGEPVTGPNFLRFRTGHRRTFWKNNCIAIGLAGGFIEPLESTSIHLVQTGIQLLISLWSASGSNDELRSRYNKMMTDEYEDIRDFIILHYKATLRDDTAFWRFVRDMSVPDSLSEKMEQFARNGNIATRPDALFTSHSWLAVMLGQGIVPMHYDSRVDRIPGDILIKNMHGLREAVKRTAASLPSHQQYINKHCAFSNTHG

SEQ ID NO: 87005 - protein, 517 aa, Cellvibrio sp.
  misc_feature (1)..(517): tr|A0A1Y0FXE0|A0A1Y0FXE0_9GAMM Uncharacterized protein OS=Cellvibrio sp. PSBB006 OX=1987723 GN=CBR65_10230 PE= 4 SV=1
MINDSVRHVVVVGGGTAGWITAGVLAAKCVKEQGRDLTITLIESPTIGNVGVGEGTWPSMRTTLQAMGISEAEFIQQCDATFKQGARFNRWVDNAETDFYYHPLMLPFNLGPISTVTHWLDNAPNAEGLSYSAAVCHQEAICEAGLAPKSITTPEYQGNLNYAYHLDTNKFAAFIKDHCINKLGVHHVVNDIIGTRAGEDSEIAVLQLADNTELVADFYIDCSGFAGLLIDKHFKVPFIDKSDVLFCDRAVAVQCPYGINGKSVIASHTISTATGSGWIWDIGLQSRRGIGHVYSSRYIDDEEAAQGLRDYVGEAVRDLPLRFIKYTPGHREKFWRKNCVAVGLSAGFVEPLEASSILLVEISAYWIAEKLPQYKSGFARCEQQFNEIFRYRWDTIIEFLKLHYCLSKRRDTPFWRDNTSPESIPDTLLEKLAMWQEHCPSVLDFLNRADVFPFESYCYILYGMKFKTATHRPDEKNLQRLEHKVTNQRRHLTALMSALPANRALIDAIRKHGLQKI

SEQ ID NO: 87006 - protein, 511 aa, Sphingopyxis indica
  misc_feature (1)..(511): tr|A0A239JAR3|A0A239JAR3_9SPHN Tryptophan halogenase OS =Sphingopyxis indica OX=436663 GN=SAMN06295955_109148 P E=4 SV=1
MKDSVTEIADVVIVGGGTAGWMAAAALSRFLANGRRRITLVESDAIGTVGVGEATIPPILNFNRMLDINENDFLRATRGTFKLGIEFVNWGRAGDRYIHPFGSFGHDLHGIAFHQLWLRERVRGEAGDIADYSMSAAAAARGRFGRPGREAKPPLSELFYAFHFDASLYARFLRGLAERQGTIRREGRITGVERDGESGDVAAVRLESGERIAGDLFIDCSGFRGLLIEEQLGAGYEDWSRWLPADRAIAVPTANVGPPDPFTRSTAHGAGWQWRIPLQHRTGNGHVFSSAFMDEDEARRILLANLEGEPLADPRTIPFRTGRRKLSWSHNVIALGLSSGFLEPLESTSIHLIQNGIQRLLALFPDKPVSPVERDEYNRGMRDLYEDVRDFIILHYKATQRDDTPFWRHVRDMDIPDSLARKIELWRLHGRIFRENAELFGVTSWVAVLLGQNIRPERYDPVADTLDEAKVAAAMAEMRAAYARAAERLPAQDEFLKVAGAWAAEAAEAAA

SEQ ID NO: 87007 - protein, 507 aa, Cellvibrio sp.
  misc_feature (1)..(507): tr|A0A1Y0G039|A0A1Y0G039_9GAMM Tryptophan halogenase OS =Cellvibrio sp. PSBB006 OX=1987723 GN=CBR65_16715 PE=4 SV=1
MGEQTIKNIVIVGGGTAGWMAAAAISKTVGCQTVNITLIESEEIGTVGVGEATIPMISLFNNVLGLDENEFVRETNGTFKLGIEFVDWRKPGHSYFHPFGLLGVDMDGISFMHYWLRWKKAGGNLDYAKFNAETEAAAALKFMRTNHESGPMLMPKINYAFQFDAGLYAAFLRRYSEKRGVVRKEGKIVDIKQDATTGHIDCVVLQNGETIRGDFFIDCSGFRGLLIEQVLQAGYHDWSHWLPVNRAVAVPCESAGKLLPYTRSTAREFGWQWRIPLQHRTGNGYVYCDQYISDDEAASQLLAHLDGRAQAEPKTLRFLTGMRKKCWIKNCLAIGLAGGFLEPLESTSIHLTQVAISKLLAMFPRDEFNEALIKRFNEEMETEYDTVKDFLIAHYKVTEREDTPFWQYVKNMSIPDSLQERLNIFKKRGEVLARQTELFKEVNWFVVLVGQGLFPEGYHPVADAISADELRLRLTKIRTGIQNRINIMPGHADFIAANCRSPMSKIG

SEQ ID NO: 87008 - protein, 512 aa, Sphingopyxis indica
  misc_feature (1)..(512): tr|A0A239G833|A0A239G833_9SPHN Tryptophan halogenase OS =Sphingopyxis indica OX=436663 GN=SAMN06295955_10374 PE =4 SV=1
MQVIQRIVIVGGGTAGWLTAGVIAARHRGRMPHGFEVTLVESPNVPIIGVGEGTWPTLRTTLRRIGVSETDFFRHCDAAFKQGARFNRWTTGADDDGYYHPLMLPQGFAQVNMVPHWLADGDGSFCDTVTPQGRLCDAGLAPKTIATPEYEALANYAYHLDAGKFSAFLQRHCCETLGVRHILADVTEVRMTESGDVAALETEQGPVIEGDLFVDCTGFRALLIGDAMQVPFRPCGDTLFCDTALAVQVPYADPADPVVCHTISTAQSAGWIWDIGLPTRRGIGHVFSSSHISADEAERELRAYIGPAADGLTVRRIPIRSGHRETFWKGNVVAVGLAAGFLEPLEASAIVLVELSAKMIAEQLPPNRAVMDVLARRYNATTHYRWGRIIDFLKLHYALTRRDDSDFWRDNRQPETIPGRLLDLMELWKFQPPWLHDEFDRAEEVFPAASYQYVLYGMGHQTRTPQGEGATDAELARRARRETEVQTARLMAGLPRHRELLDKIAQHGMQPI

SEQ ID NO: 87009 - protein, 514 aa, Sphingobium sp.
  misc_feature (1)..(514): tr|W1S8X7|W1S8X7_9SPHN Tryptophan halogenase OS=Sphingo bium sp. C100 OX=1207055 GN=C100_12085 PE=4 SV=1
MVQPVRNIVIVGGGTAGWLTAGIIAARHRSRIGSGFTVTLIESPNTPIIGVGEGTWPTLRTTLSRMGVSETDFFRECDAAFKQGARFARWTSGAADDGYYHPLMLPQNFGQVNLAPHWLAQDDPDSFCDAVCAQGRICDDGLAPKTMATAEYDALANYAYHLDAGKFAPFLQRHCCEKLGVRHILADVEQVLMHDNGDIRAVRTTQAGEVEGDLFVDCTGFKALLIEGAMGVPFRDCNDILFCDTALAMQVPYAAPDCPIASHTISTAQSAGWIWDIGTQARRGVGHVFSSSHISDDHAERELRAYIGPAADGLNARRIKIRSGHRETFWKGNCVAVGLSAGFLEPLEASAIVLIELSAKIIAEQMPACREVMDIVAARFNATAHYRWGRIIDFLKLHYVLTKRTDSDFWRDNVRIESIPDRLQELLLLWRYQSPWFHDEFDRAEEVFPAASYQYVLYGMGFRTEVDPPALARDAHLADRARRENAAATAKLCAGLPRHRELIDRIVAHGLQPV

SEQ ID NO: 87010 - protein, 578 aa, Kordia sp.
  misc_feature (1)..(578): tr|A0A345GV27|A0A345GV27_9FLAO Tryptophan halogenase OS =Kordia sp. SMS9 OX=2282170 GN=KORDIASMS9_00355 PE=4 SV =1
MNPKKRKYDVIICGGGLAGLTLARQLKVEFPQLSTLVIEKRTFPKPVATYKVGESTTEIASFYFKEDLQLSDYFKNAHFKKLGFRFILGDGRDEWTSRPEIGLSKYPPYDSLQMDRGVLENDLCEINKVSGVEIIDDTAIIDIEINEKAQDNIVKIKKDDQTFDLQCRWVIDSMGRRLFFHNKYNLTKKMETPHNAAWFRVKGRFDVEDMVNKDNATFRNHVPHKNRYYSTFHIMGQGYWVWLIPLNSGHTSIGIVTSEAYHDFSTYNTKAKAKAWLEQYEPTIAKHLENFKMEDFLRNKNYSHSATRVASIDRWACTGEAAVFADPLYSPGSNMIGYENTCIVDMLRKDLSNNLEEKHVDRLSQFIISQNEWLIDHIQGSYPYFGHQQVYTLAYLWSVVIGWSLDCPQMFNKTFLDIEVKTRLDKENANIIFALGRMKKLFLDWHKVAKNTFTFDFIDYLNIPFILDIFKRNLVPNKSLETLIEDRIHTVERLEEFAQAIFLIVVKDVMPEQLERFQEPIWLNVNAISLNPDAWDEEGLFEPKTKPRDLTIVQHQILKVIQYKDQLKEKIDLDISIF

SEQ ID NO: 87011 - protein, 492 aa, Alteromonas sp.
  misc_feature (1)..(492): tr|A0A385MZP8|A0A385MZP8_9ALTE Tryptophan 7-halogenase OS=Alteromonas sp. RKMC-009 OX=2267264 GN=DS731_20235 P E=4 SV=1
MNNKKQRVVIAGGGTAGWMAAAALTRLLHNRVDVTLVESSDIGTVGVGEATIPTLVFFHQLLKIDEKAFMAATNATFKLGINFENWRTTRDSYLHAFGATGQDCWAAGFQHFWTRGRQLGLSGDFGQYCLERVAAEAHKFAHLPKNGLNYAFHIDAGRYAGFLRQLAEEAGLKRIDARIEKVVTRPADGFITQLQLDNGDRIDGDLFIDCTGFRGVLIEETLHTGYTDWSHWLLCDSAVAVQTESHAPPLPYTRCIAHEEGWQWRIPLQNRTGNGLVFCSKYLSDDAATQRLTGNIDGAALNDPKVIKFRPGRRVKQWNRNCVSLGLASGFIEPLESTSIHLIQQGIVRLLRMFPHGEVQQSVVDEFNRQSVDEIEHIRDFIILHYHVTERTDSAFWRHCKQMDVPDSLARRLTIFRESGQIHRKNNELFDDSWQQVMIGQGLLPEAYHPIADMMSEQELQNLLTHIKSNIDRTVAGLPTHRQYLNSLFNRA

SEQ ID NO: 87012 - protein, 514 aa, Sphingomonadaceae bacterium
  misc_feature (1)..(514): tr|A0A2A5YRY8|A0A2A5YRY8_9SPHN Tryptophan halogenase OS =Sphingomonadaceae bacterium MED-G03 OX=1986231 GN=CNE8 9_07575 PE=4 SV=1
MVQPVRNIVIVGGGTAGWLTAGVIAARHKTLIGRDISVTLVESPNMPIIGVGEGTWPTLRTTLSRLGISETDLFRECDAAFKQGAFFARWTDGTARDGYYHPLMLPQNFGQVNLAPHWLAQDGGDSFCDAVCAQGRICDDGLAPKTMATAEYDALANYAYHLDAGKFAPFLQRHCCEALGVRHVLADVEHVVMHDNGDIAAVRTTQAGMVEGDLFVDCTGFKALLIEGAMGVPFRDCSDILFCDTALAMQVPYAAPDSPIASHTISTAQSAGWIWDIGIQTRRGVGHVFSSSHLSDDQAERELRAYIGSASEGLDVRKIKIRSGHRETFWRGNCVAVGLAAGFLEPLEASAIVLIELSAKIIAEQLPACREVMDIVANRFNATTHYRWGRIIDFLKLHYVLTKRSDSDFWRDNVRTESIPERLRELLLLWRYQSPWFHDEFDRAEEVFPAASYQYVLYGMGFRTEVAPAALARDAHLASRAMRENIAATDRLRAGLPRHRDLIDRIVAHGLQPV

SEQ ID NO: 87013 - protein, 506 aa, Porphyrobacter sp.
  misc_feature (1)..(506): tr|A0A2Z2PFY5|A0A2Z2PFY5_9SPHN Tryptophan halogenase OS =Porphyrobacter sp. CACIAM 03H1 OX=2003315 GN=CBR61_151 10 PE=4 SV=1
MTGQSAPLSSIVIVGGGSAGWMTAAALADAVGRSCAITLIESEAIGTVGVGEATIPPIRHFNKRLGIDEATFVRETQGSYKLGIEFIDWGRQGHRYFHPFGQYGAEFDSVPFYHHWMHEHLAGRVDGPIDDFSMCWAMAKAGKFSHPSPDRRLIQSTFDYAYHFDAGLYAAFLRRYAESRGVTRIEGKVVDVALRGEDGFIESVTLDNGEQIAGQFFIDCSGFRGLLIEDALHAGYDNWQAWLPCDRAVAVPCERGEFTPYTRSTAREAGWQWRIPLQHRTGNGYVHCCEFISEDEAAATLLANLDGMALADPRPLRFVTGKRRKFWEKNCVAIGLSAGFMEPLESTSLHLIQYGILRLIALLPDAAISPLLAREYNAQTSREYELIRDFLILHYKATTRDDSELWRYCAAMPIPDSLQYKIDHFREAGMLVADGQELFANPSWIAVYLGQGIVPRQAPALAAMRTGVPVAERFRQIRQAMDEAVAAMPSHGDFIARHCPAPPLAA

SEQ ID NO: 87014 - protein, 507 aa, Shewanella decolorationis
  misc_feature (1)..(507): tr|A0A5B8R1H3|A0A5B8R1H3_9GAMM Tryptophan 7-halogenase OS=Shewanella decolorationis OX=256839 GN=D0436_16960 P E=4 SV=1
MTIRKIAIIGGGTSGWLAANHLGRVLQGGSELSITLIESPDIPIIGVGEGTVPSIRKSLQSFGISESEFIRACDVTFKQSIKFVNWLDKARHGKDNFYHHLFDIINLQGVDTVSAWLVEKQGDFADYVSPQHLVCEAAKAPKLITTPEYAGVLGYAYHLNAAKFAKLLAKNAIEKFNVEHIFSTVQDVRLGDDGAISSLQTEQGTLSFDFYIDCSGFESILLAKALKVPFISKAHQLFIDTALVAQIPTQPTDIIPPYTQATAHQAGWIWDIALTQRRGTGFVYSSAHMAQSEVERKFDHYLGGKLADVPHRKIPMTVGHRQQFWVKNCVALGLAQGFLEPIEATSILLTDFSARFLAERFPANIDDVDYLAKRFNDTVGYAWERVVEFAKLHYCLSDRTDSAFWLDNQRQETIPEGLKQRLELWKSYSPIAEDFPSKFEVFNLDNYLYVLYGMKYQTNLRGGSSATQASLNMYMNKMSKVKQQMLDGLPEHRELLDKICIYGLQSI

SEQ ID NO: 87015 - protein, 503 aa, Cellvibrio sp.
  misc_feature (1)..(503): tr|A0A1Y0G3G3|A0A1Y0G3G3_9GAMM Tryptophan halogenase OS =Cellvibrio sp. PSBB006 OX=1987723 GN=CBR65_16130 PE=4 SV=1
MQKKPVSKIIIVGGGTAGWMTAASLSKHFRKTSVAITLVESSEIGTVGVGEATIPTLRRFYAELGMKDLDVMRATRATCKLGIQFRDWHSTGSQFIHPFGLYGQRANGVDFHHYWMKLREHGEGAGELPEYSLGVQLAEHHKFIEPSPNPPSELSVFDWALHFDASLFAKLMREYAEQQGVKRIDARIHEVRQDSIDGSLASLMLENGDEVNGDLFIDCSGFRALLIEQTFKTGYEDWSEWLLCDSAVAVQSELAGDPPPYTISQAHEAGWQWRIPLQHRQGNGHVYCSRYMTEDEAIAILKKNIDGHLLHEPRRFSFTAGRRKQAWNKNCIAVGLASGFLEPLESTSIALVETAIEKIRHSFPYPYYTQAAVDEFNHLTAQEYERVRDFIILHYKANQRHGEPLWDQCRTTAVPEPLQNKIDAFVTRGELIRYPIEIFGPPSWLAIYHGFGILPQTYNSRVDQLDENYLKQSLAEMRKSIQRAVNSVPTHKEFIAANCSVNA

SEQ ID NO: 87016 - protein, 497 aa, Cellvibrio sp.
  misc_feature (1)..(497): tr|A0A1Y0FX77|A0A1Y0FX77_9GAMM Tryptophan halogenase OS =Cellvibrio sp. PSBB006 OX=1987723 GN=CBR65_11890 PE=4 SV=1
MKELKLKRVVIAGGGTAGWISAALLAKSFGKSIDLTLIESDAIPTVGVGEATIPPIINLHKVLELSEKEFMSRVNGTFKLGISFENWRDVGENYVHSFGFAGKSNWAAGFQHFWLAGQKRGIDSTEYGNYCAEHLACRKEKFAVMPKNGVNYAYHLDAGLYAKFLREFSEKYGAVRKEGKITGVNLHPDTGYIQSLSLESGEVVEGDLFVDCSGFRGLLIGDALKTEYEDWSHWLPCNSAIAVQTETVRPPLPYTRSIAREFGWQWRIPLQSRVGNGLVFCSEYGSDDEAKELLVKNLEGKLLNEPRVIKFTTGTRKQHWTKNCVAIGLSSGFLEPLESTSIHLIQKSITRFIQLFPYDGIKQSEVDEFNRQTREEVQNIRDFIILHYHVTDREDTPFWRYCKYMDVPESLTHRIKLFRETGKVFKKEMDLFAEESWIQVMLGQGVTPESYHPVVDSMTDDALRELLMELKQSTEQKVDRLPAHHEFIDYYCKSNVM

SEQ ID NO: 87017 - protein, 493 aa, Planctomycetes bacterium
  misc_feature (1)..(493): tr|A0A518IE13|A0A518IE13_9BACT Tryptophan halogenase OS =Planctomycetes bacterium Enr17 OX=2527976 GN=Enr17x_33 880 PE=4 SV=1
MQQFDVVILGAGFGGSLTALLLDRIGLSVALIDRGTHPRFAIGESSTPAAGYLLRSLSEQYDLPQFQPFCKYGTWQERYPGLACGIKRGFSYFCHEPQQNFEAKPHHGSELLVTANVSDSLADTHWYRADVDTFFAEEVQKSKVVYLDQAEVMLDRVDGWEITGTRQGEPIALRAAFVIDATGAAGIVPNKLGIKRQTEFQTNSTAVYGHFENVVPWAEVLDQRQIDRSDYPFDCDHAALHQVLREGWMWQLRFNHGITSAGFVLKGGPQTGVSEDVWSGLLERYPSLAAQFAGASLVAPESGLVSTSRLQRGWKLCAGENWALLPHTAGFIDPLHSTGSAHTLCGIERLVAALERFWGKVELTSAMADYSDSIQAELSLIDTLIAGCYHSLPDFDLFTASTLFYFAAATGFEHLRCCEGKQPLFLCADDSEFRPVVKEWSELVGQLEKNEYEIPRAIERAEMLLKPWNRVGLFQPAIPNMYYYTAAPESEPR

SEQ ID NO: 87018 - protein, 510 aa, Cellvibrio sp.
  misc_feature (1)..(510): tr|A0A1Y0G0I7|A0A1Y0G0I7_9GAMM Tryptophan halogenase OS =Cellvibrio sp. PSBB006 OX=1987723 GN=CBR65_16125 PE=4 SV=1
MQCHACWRADLNERVNKIVIVGGGTAGWMAAASLARFFDGKPSHIVLIESEQIGTVGVGEATIPGIRAFNLSLGIDEIDFIRKTNATFKLGIEFRNWYQNNTTFFHPFAAYGLPLHGVEFHHYIARMRAAGETVDIADYSFPIQLARRGHFAQPHEKPPTPLADYGYAYHFDAALYASYLRDYAMARGVVRIEGKIASVKLHPDDGFIESVIMDNNAEIAGQLFIDCSGFRGLLIEEALHTGYDDWRCWLPCDRAVAVQSQLTGEPTPYTRTTAHEAGWQWRIPLQHRTGNGYVYASRFISDEQARQTLLTHLDGEPIKQPRQFDFVTGRRKKIWNKNCFALGLASGFLEPLESTSISLIQTGISKLLQFFPDVSFNAHDMAEVNRLHHHEFERIRDFLILHYKATTRSDTAFWRFCQEMPVPDSLAHKMQVYESRGHLVMYDPEAFEKESWVTMYMGFHRYAERYDERADNINLDELKNQLAKMRQMIQIAADQAMRHGDFIARHCAAE

SEQ ID NO: 87019 - protein, 491 aa, Flavobacteriales bacterium
  misc_feature (1)..(491): tr|A0A2D8WDP5|A0A2D8WDP5_9FLAO Uncharacterized protein OS=Flavobacteriales bacterium OX=2021391 GN=CMD04_00645 PE=4 SV=1
MKLDRICIIGGGSAGWMTASMLSRHFEGTGKEITVVEADIPRIGIGESTTQFFNTFIRYLGLKDEDWMPYCNATYKHSVKFTNFNQDGSFHYPFGPRGTDIPLTEYYNWRRGRNIDSMTFCRVFSDVIDPIEVNRLYPPFLERYVGYHVDALLFGDFLRDHYAIPKGVKHIKGTVTNIQSCVDGVSRVFLGTDDRYVDGDLFIDCTGFRALLMNELNVKWEDWSTLLKNDSTWAVRKPYTDKKTEMQPYTECTGLSSGWVWNVPTWDRIGTGYNYCSQYITDEDALAEFKEHLGVDIPENMFRLLKWPTGIREKVWSHNVVSIGLSAGFIEPLESGGLYSVHEFLFKLIQVLPKASNKWNGFQREQFNHSVRKKFTSFRDFVVKHYTMGYRDDTPFWKDYTDMDALGEFPDLLTQDWEQIQNINYISEGEAYLLGGYEYDIMPEHYEMLSKRNGYNIPDFEEPILRRTFMDQTLGRYPNAYEYYEKYLYNE

SEQ ID NO: 87020 - protein, 498 aa, Cellvibrio sp.
  misc_feature (1)..(498): tr|A0A1Y0FXW0|A0A1Y0FXW0_9GAMM Tryptophan halogenase OS =Cellvibrio sp. PSBB006 OX=1987723 GN=CBR65_12890 PE=4 SV=1
MIGNQTVKHLVIVGGGTAGWMAAAAFSKLLGKSISVTLVESDEISTVGVGEATVPPLILFNRYLGINEQELMAFVKGTIKLGISFENWKNINESYIHPFGQTGKDTWAASFQHFWRKGLELGVDYPLGEYTVEYQAAVQSKFSHMPGSPLTYAYHIDAGLYAKFLRGIAEKAGATRIEGTVQDVVLDDGGYIRSIQLASGEIIDGDFFIDCSGFRALLIEQALHSGFEDWSHWLPCDSALAVQTESVREPVPYTRSIAHTAGWRWQIPLQHRVGNGLVYCSRYMSDDEARKTLLDNLEGRVISEPKIIRFKAGQRLKHWNKNCVALGLASGFIEPLESTSIHLIQRGITRLLQMFPSNGIFSGDIDEYNAQMKTEILSIRDFIVMHYHLTEREDSDFWRYCKNMPIPASLVHRINLFKETGKLFVESPYKLFAEPSWLHVMVGQGVVPERYHAVANEMTDAELKQFLEGIRSSVQKAVQKMPSHHDYLQYYCKAPEWS

SEQ ID NO: 87021 - protein, 499 aa, Pseudoalteromonas sp.
  misc_feature (1)..(499): tr|A0A0W1LG49|A0A0W1LG49_9GAMM Tryptophan halogenase OS =Pseudoalteromonas sp. H105 OX=1348393 GN=ATS75_03580 P E=4 SV=1
MQNKQIKQVVIAGGGTAGWITAALLNKVLGKVVNITLVESEQIGTVGVGEASIPPILHLNAALGIRESEFIKATQATIKLGIEFENWRAQDHTYMHAFGDIGKDFPFCEFYHFWLRAKQQGTTADFWDFSLNYQAAKQHKFTHLQHIPNTQLTGLNYAYHFDATLYGEYLKSLAISRGVNRIEGKIANVEQCENTGFITALALEDGQTISGDLFIDCTGLRALLIEQTLNTGFEDWSHWLPCDSAIAVQTQSANDPVPYTRSIAHDAGWQWQIPLQHRVGNGLVFSSRHITDEQAKQQLLANLPGEPITEPRVIRFKTGRRRKQWHKNVVSVGLSSGFLEPLESTSIHLIQTAAIRLIKLFPHNGIDDSLVETFNQQSQTEIECIRDFIILHYKLTDRTDSAFWRQCKQMSIPDSLQKKIDLFKATGKIIRQDDELFAEIAWQQVMIGQGLEANDYSVLAGALTDDQLNDLFSSLKTLINGTVEQLPSHSEFLARMKNN

SEQ ID NO: 87022 - protein, 497 aa, Pseudoalteromonas agarivorans
  misc_feature (1)..(497): tr|N6V235|N6V235_9GAMM Uncharacterized protein OS=Pseud oalteromonas agarivorans S816 OX=1307437 GN=J139_10692 PE=4 SV=1
MKPIKHVVIAGGGTAGWITAALLNKVLGKVIKITLIESSTIGTIGVGEATIPPIIQLNNALGINEQDFINATNASIKLGIEFENWKTPSHSYMHAFGSFGKDLPFCDFYNFWVKGHISGAKESLWDFSLNYQAAKQHKFAPLNTLPNTQLPGLSYAYHFDATLYAEFLKNLATSRGVEHIDAKIEQVEQCPLSGNIKSLTLSNTQQINGDLFIDATGQRALLIKQTLNTGFVDWSHYLPCDSAVAVQSQGTSELKPYTRSIAHSAGWQWQIPLQSRIGNGLVYCSRYLSDDAATQLLLNNLPAEPMTEPRVIKFKTGRRLKQWHKNVVSVGLASGFLEPLESTSIHLIQSAVTRLIKLFPHNGISEALVTEFNKQSVIEIEHIRDFIILHYTLTAREDSPFWRQCKQMDIPDSLAHKLKLFKQTGKVVRENDELFAEVAWQQVFIGQGLIPEDYNSIVDSLSSEQLNDLFSTLKTLITSTVDQLPTHKNFLAKIKKA

SEQ ID NO: 87023 - protein, 499 aa, Cellvibrio sp.
  misc_feature (1)..(499): tr|A0A1Y0G073|A0A1Y0G073_9GAMM Tryptophan halogenase OS =Cellvibrio sp. PSBB006 OX=1987723 GN=CBR65_16025 PE=4 SV=1
MKPIKKIVVVGGGSSGWIAASMLSFHLKNDLCQIELVESTEIGTIGIGESTVPPFVGLIQRLGIDEQDFVRETQATYKLGIKFVDWHQRNENYFHPFGVIGKKIGNHDFYQCWLKARMQGEASSLQDFSPCNVMAENGRFFLPNKAQNTPIGGANYALHVDARLVAQYLRRYAEARGVRRTEGVVQQVSQRDNGFIDKVVLTDGREIQGDFFIDCTGFKALLIDKTLGVDVEDWSNFLPCDRAIAIKTEQTEPTLPYTLATARKAGWTWRIPLQHRIGHGYVYASRFCSDADAKSTLMRAIDSPMVEEPRVIPFVTGRRREMWKHNCLSLGLASGFIEPLESTAIHLIARGMDFFLRYFPDQDCEPGLIREYNRRMAGDYEEVRDFIVLHYCTTQRQDTPFWRWCQHMPLPDSLNERIELFRGHGALREGVDELFRSASWQSVFEGMGIRPRKHCPRVDNVDFAQIGETLTRARAAIHGMVKTLPTHDEFLRHQLKLEP

SEQ ID NO: 87024 - protein, 507 aa, Cellvibrio sp.
  misc_feature (1)..(507): tr|A0A1Y0G0J3|A0A1Y0G0J3_9GAMM Tryptophan halogenase OS =Cellvibrio sp. PSBB006 OX=1987723 GN=CBR65_17790 PE=4 SV=1
MKIKRIAIVGGGTAGWLAANHLGFELRKDPEIEITLIESKDVPSIGVGEGTVPYIKKALEKFGISEAELIASCDVTFKQGIKFVEWLNSAIHGEKHYYYHPFESPFPSGIDIIPYWLNHRSRENFHEITAQSYACEAKLCPKKISSPPYQGEMNYAYHFDAIKFAKLLSRNAISKYRVKHKIATVVGAQKDDAGNIDSLMLGSGESSKFDFYIDCSGFSSLLIEKELSVPFVDKSNQILTDTALALQVQTEADEEIPPYTIATAHKAGWVWDITLTGRRGTGFIYSSQHMSETEAVEGFSKYLGVDVEMLSPRKISMPVGYREEFWVNNCVAIGLSQGFVEPLEATSILITDFSAEYLARAFPVNVEDISLLKKRYNKVVEYSWARILDFIKLHYCISDRDDSDFWRENRDMSNVSDVLVERLSIWEKFHPKKSDFFSKFEVFDVENYLYVLYGMKFYTVPPHASAYDVESGQGKMAQVRQDAERLAVELLGHREWLDKLKKAMQPG

SEQ ID NO: 87025 - protein, 505 aa, Cellvibrio sp.
  misc_feature (1)..(505): tr|A0A1Y0G0V9|A0A1Y0G0V9_9GAMM Tryptophan halogenase OS =Cellvibrio sp. PSBB006 OX=1987723 GN=CBR65_16740 PE=4 SV=1
MSDNRIEHIVIVGGGTAGWMTAAAMAKVLKNQYCNIHVIESEDIGTVGVGEATIPQIQLYNRLLGLDEDDFVRRTQGTFKLGIQFVNWSHIGSSYIHAFGDVGKDMDAIQFYHYWLKLYQAGEVPDIGEYTLTAIAARKGKFMRSIDAGNSPLSNIAYAFHFDAGLYARYLREYSEQLGVVRTEGKITHANLNHDNGFIESVALENGAVIKGDLFIDCSGFRGLLIEQALKTGYEDWTDWLPCDRAWAVPCESAGDPTPYTRSTAHAAGWQWRIPLQHRIGNGHVYSSRYMSDDEAVNILLNNLDGAPLAEPRLLTFTTGKRHKFWNKNCVAIGLASGFMEPLESTSIHLVQSSIARLMSLFPNKHFDQEDIDEFNRQAHFEYDRIRDFLILHYHATTRDDSPFWNYCRTMSIPEELQQKINQFKKNGRIYRNSVEMFNDLSWLEVMHGQGIQPRAYHPIVDVMPKDELMKRMAGIKSVIDRSVEVMPSHAEFIAEHCKAEKLMM

SEQ ID NO: 87026 - protein, 490 aa, Sphingopyxis indica
  misc_feature (1)..(490): tr|A0A239JDP5|A0A239JDP5_9SPHN Tryptophan halogenase OS =Sphingopyxis indica OX=436663 GN=SAMN06295955_109157 P E=4 SV=1
MGGGAAGWIAAALLAKRIGRHQARITLVESEEIGIIGVGEATVPLLAQCNALLGIDEFDFIRKTQGTFKLGIEFCDWGTAGNRHFHAFSDYGHPVEGVQTHHYWLRLRQSGDDTPIDDYSFAYAVAKNNNFAPSDPNDARYHHAYHFDAALYARYLRDVATDLGVQRIEGKMTHVDLDSESGDIAAIHLADGQTVPGNLFLDCTGFASELLGKALDTPFVDWSHWLLCNRAIAAPSGPAGAPAPFTRSTAHAGGWRWTIPLQHRTGNGMVYNSDFWSDDAARSALLDSIDGEPLAEPRVFRFTSGHRREFWRRNCVGIGFSSNFLEPLESTGIQLIVMGVLKLLKCFPQGTIDPVLRDEYNRLSTREIERIRDFIIAHYYLSRRPEPLWSACRNMEIPDSLRHKLDVWKASGQIALGDSESYMEPSWIAILLGNGVVPRRYAVSADLYPLEQIRDGMKLRREEIMRSAQAVTSHRDFINSHCKAAQMALA

SEQ ID NO: 87027 - protein, 496 aa, Cellvibrio sp.
  misc_feature (1)..(496): tr|A0A1Y0G0T6|A0A1Y0G0T6_9GAMM Tryptophan halogenase OS =Cellvibrio sp. PSBB006 OX=1987723 GN=CBR65_18440 PE=4 SV=1
MKNFIKKVVIVGGGTAGWIAAALLSKLMGNALTIELVESDAIGTIGVGEATIPPIRHLNEALGIDEADFMRETGATIKLAIKFEGWHRPGQDYFHAFGAVGQDFAFCPFHHFWLRAQQTNIHSELWDYNLNYQCIQANKFAPVSTKDPNLEVPYAYHFDASRYALYLRRYAEQRGVKRVEGMVEQVQRDTTSGDIAQLILKDGTVLAGDLFLDCSGLRGLLIHETLGTAFEDWSHWLPCDRAVAVPSEPLTAALAYTRSIAHPMGWQWRIPLQHRNGNGLVYSSRHCSDDEAAHQLLTQLDSTATDEPRLIRFTTGRRVENWRHNVVAIGLSSGFLEPLESTSIHLIQSAVVRLLKLFSRQRIEPATVAEYNRQSALELEQIRDFIILHYHANQRVNDPFWDELRHMKIPNSLAQKIHLFQQTGALFKTQDELFVESSWLQVLIGQGVVPQDYHPMADQVTEAQLRSLLNNMKKIKQAPLQQMLDYREFLARINNK

SEQ ID NO: 87028 - protein, 498 aa, Sphingobium sp.
  misc_feature (1)..(498): tr|W1RWR6|W1RWR6_9SPHN Tryptophan halogenase OS=Sphingo bium sp. C100 OX=1207055 GN=C100_19615 PE=4 SV=1
MYNDPVRNVVIVGGGTAGWMCAAGLSRMLDMRGLSVTLIESDEIGTIGVGEATIPSLHVFNQLLGLDEADFMRQTRATIKLGIEFTDWGKLGDHYIHPFGDYGLDRPDVKFHQMWLKLLHAGADVGAIGDYNMCLMAARLNRFGIGQMRRGLPDLRHAYHLDAGLYARYLRRYAEQRGIVRREGRVTNVNQREDGFVSSVTLRDGQVVEGDLFVDCSGFRALLIGQTLGVGFEDWGRWLPCDRAVAMPCENTGPLIPYTRATADAAGWRWRIQLQHRIGNGHVYSSAYIDSDTAEARLRATLDGAAMSDPLHIRFKPGHRHRLWDRNVIAIGLSGGFIEPLESTSIHLIQTGVSRLLLLFPDMRFTPALIDEFNRSSLLEYEQIRDFIILHYKATRRDDTPFWRYCRDMEVPDSLRHKMELFRAGGRIFRFSDDLFTESSWLAVLLGQGIVPECHDPVADAIPAGDMERALLSLRAAVLDAAKALPDHTDFIRSYCAI

SEQ ID NO: 87029 - protein, 569 aa, Alteromonas sp.
  misc_feature (1)..(569): tr|A0A1Z9XFC7|A0A1Z9XFC7_9ALTE Tryptophan halogenase OS =Alteromonas sp. TMED35 OX=1986603 GN=CBB95_07040 PE=4 SV=1
MRDNESHNNINRVVVIGGGTAGWLAAGVLAAKLSAENSVTLIESPAIPTIGVGEGSWPSLKDTLLDIGISELEFLSVCHGSYKQGSSFANWRKGEHKYYHPFTEPAGYREIDIHACWQAIAPTEAYENAFSIQAAMCEAGKAPKQATTPDYAHVLNYGYHFDATALATLLKKHCINKLNVTHVVGHIASVNSHQNGYIKSVVGDNGHVTEGDLFIDCSGSNGLLIDKHFKVPWVSVEHIMLNNRAVALQVPYSDNDSAIESTTLATAHPCGWTWDIALQHRRGVGLVYSSQLASDEQAYKTLINYVSRRYPKALAEALTPRTLAFEPGHREHFWVKNCLSLGMSSGFVEPLEASAIAMVELGLRMLCEGFPQTQEHMTIVSKRYNQRFRYRWRRVIDFLKLHYVLSDRDEPYWRAQRDMATVPESLRELLTLWKYQSPSRLDLIENEEIFPSASYQYVLYGMGYRTLPNSLRLSEEDRQKASNIREKLQKTKPSYFQALPSNNALLKSLAERYATSDLVNSQCPSGQTDKASSANDASKDNGNINNNVESYRDGTPNKKDTQYDRIGFR

SEQ ID NO: 87030 - protein, 503 aa, Shewanella colwelliana
  misc_feature (1)..(503): tr|A0A1E5IQN8|A0A1E5IQN8_SHECO Tryptophan halogenase OS =Shewanella colwelliana OX=23 GN=BEL05_11290 PE=4 SV=1
MSDKPISSITIVGGGSSGWMTAMYLQKLYNQSGGDVKITLIESQDIGTIGVGEATVHTIRFFFAAMGLDETELLRETNATLKSGIMFRNWMKPKVGNTHEYFHPFEQQRPLGPIDNASTWVHSPEAELSYADATSISAELIKHQRCPKAPNSPPYQGVVPYGYHLDATLMGRYLRKKACEAGVIHVESIVTDVNTDGESITSVTTPKGEFSSDIFIDCTGFKGLLIEKLRSDNWQSFEKELPCNKAVAIQRKYPQDMPPKSYTVATALSNGWVWEIDLSNRQGTGYVYDGNRLTKEQAEAELRAHLGDELEILRTVHLDMRIGCRKAFWVGNCIAIGLSGGFIEPLESTGLHIVNVGARLLATHLSSANPPQAVRDSYNRTLNGVYEDLRQFIILHYCLTDRDDTEFWREAAKTAKYAKGLQDRIDIWKHKTCEYMDLAGSFNTIFTDENYRFVLYGMDHVPAITLPTTREALTATLARLKAQQQQALDASMSHEVFLAKLAK

SEQ ID NO: 87031 - protein, 511 aa, Sphingopyxis indica
  misc_feature (1)..(511): tr|A0A239DC42|A0A239DC42_9SPHN Tryptophan halogenase OS =Sphingopyxis indica OX=436663 GN=SAMN06295955_101198 P E=4 SV=1
MDQMIGSVVILGGGTAGWLSACRVAAARPDLDVTLIEAPDIPTIGVGEGTWPTMRATLAAIGIDEAEFLTACDGSFKQGSRFDGWVDGGADDSYLHPFTPPPAMPAGDLIAAWRDAGDGADFAHAMTPQAAVCARNLAPRQRTMPAYQGALNYAYHLDAGKFAALLRRHAVQRLGVRHIADQVIEVCAGEAGDVAALVTRDLGAVAGDFFIDCSGHAAMLIGGHCGVGWIDRSDVLINDRALAAQVPTAPVAPIASQTVATAHRAGWVWDIALPSRRGIGCVYASRFMGDDAAEAELRAYIARNVPGAPEVPVRRLAFPTGHRARFWRGNCVAIGLSAGFIEPLEASAIVMIELSLDALIDNFPARRAVLPVLAERFDALFRYRWDRIVEFLKLHYLLSRRDEPYWRTQRDPAHVPERLAGLLALWRDQAPSRWDFPQIDEIFSAESHQYILYGMGYPVPGRLVASDRARAAIAENMRRARALAAALPANRDYLDALLADRGAANVQMEGF

SEQ ID NO: 87032 - protein, 509 aa, Sphingopyxis indica
  misc_feature (1)..(509): tr|A0A239J9T0|A0A239J9T0_9SPHN Tryptophan halogenase OS =Sphingopyxis indica OX=436663 GN=SAMN06295955_109149 P E=4 SV=1
MIADPVRRIVIVGGGTAGWMAAAAISRIMGALPGLEIELIESEAIGTVGVGEATIPQICLFNAMLGIDEDEFVRETHATYKLGIEFVDWTRIGHRYVHPFGFYGLDMMGIEFHHHWLKGQRLGDTSRLDDYAIAAVAAATNRFLRPRPDQPKSPLSKLGYAFQFDAGRYARYLRARAERQGVTRTEGRIVSVEQDGASGFVTGVTLDGGARVEGDFFIDCSGFRSLLLGQTLGVDFVDWTDWLPCDRAVAIPCTLGGDRQPITRSTARPAGWQWRIPLQHRIGNGHVYSSRHMSDDEAVALLLANLDGEPLAEPNMLRFTGGHRARAWEKNVVALGLSGGFLEPLESTAIHLVQSGIARLMTLFPTRAFGDAERERYNRETVREYVDIRDFLVLHYKATTRDDTDFWTYCRTLEPPEGLAEKIAMFRSSGRVFREHNELFTETSWLAVLVGQGIEAGGYHPAADLLPDAETLRRLTHIRRIVAETAEAMPTQEQFLRDHGSAIAAEAVM

SEQ ID NO: 87033 - protein, 500 aa, Cellvibrio sp.
  misc_feature (1)..(500): tr|A0A1Y0G004|A0A1Y0G004_9GAMM Tryptophan halogenase OS =Cellvibrio sp. PSBB006 OX=1987723 GN=CBR65_16705 PE=4 SV=1
MSEPIDIVIVGGGTAGWMCAAALVSVAPAAIRRVRLIESDEIGSVGVGEATLPQMKDFNDYIGINEADMMQKTQATFKLGIEFVDWGYKGSSYIHPFGTFGEKIGGIDFHQQWSRIRHFSEIEAIEKYSYAIEACRQHRFEFPVEEKSAINSTYAYAYHFDAGLYAQFLRKFAENKGLERIEGKITNVKQDVDSGFIKSVVMASGEEITGDYFIDCSGFRSLLLGKTLNTPFEDWSPWLPCDRAAAVPSDRLESLAPYTRSTAKSAGWQWRIPLQHRTGNGYVFSSQFIGEDEAIANLLKDLDASALAEPRVIHFQSGRYKYSWQKNCIALGLASGFLEPLESTSIYLIQVAIFNFLKLLPNRNPDTALIDEFNRLVDVEYERVRDFLILHYHLNSRDDKDLWRYCKNMPIPDSLALKMEMFRLRGHIDVYRYGLFAPPSWLSVYLGQGMMQDNVDPYVNNIPVDYVKGKFQELSAAIRQRVELMPTHAEFIADFCPSKL

SEQ ID NO: 87034 - protein, 525 aa, Cellvibrio sp.
  misc_feature (1)..(525): tr|A0A1Y0FY62|A0A1Y0FY62_9GAMM Tryptophan halogenase OS =Cellvibrio sp. PSBB006 OX=1987723 GN=CBR65_11905 PE=4 SV=1
MGKPVKSIVIVGGGTAGWLTAGTLAAAHAQGRGRNLSITLVESPTVKILGVGEGTWPSMRDTLKTMGIAEVDFIRHCDASFKQGSCFVGWQSGARESYYHPFTLPEAWGDMNLARIWPAFRDQVAFAEAVCPQSLVCDSQLAPKEVSTAEYDYLLNYGYHLDAGKFAAFLKRHCCERLGVHYISADVAAIESDDDGYITALKTEAAGSIEGDLFIDCSGFAALLLGQHYQVPFINKSDVLFNDTALAVQVPYKDDASPIKSYTQSTAQSAGWIWDIGLQSRRGIGHVYSSRFTTEAEAEQALLAYLQATDSPEARTDIRKISFTPGYREKFWVKNCVAVGVSAGFIEPLEASALVMIELAAKMLAEQMPASFDMMLPLAKRYNDKFSYHWQRVIEFLKLHYVLSSRTDSVYWQENKNPSTIPESLQDLLCLWRFQPPWAYDCPQREELFSSASFQYVLYGMGFPPDITAGYQKPGNKELQLAQHYFEKNAKQTRRLLGRLPGHRELLMHLSKISHHTDTVKQLIN

SEQ ID NO: 87035 - protein, 493 aa, Flavobacteriales bacterium
  misc_feature (1)..(493): tr|A0A3C1YBR5|A0A3C1YBR5_9FLAO Uncharacterized protein OS=Flavobacteriales bacterium OX=2021391 GN=DCR01_02360 PE=4 SV=1
MKVVVVGGGTAGWLAALMISKIRPEHDVTVIESSKIGIIGAGEGSTGSLTNIVQNEMWNLGCVEEDFIRECDATIKLGIKHIGWNKDTKSHYYGPIDGSPTSGDVVDVVFQNALGYREQDMLHVSTELGYKIHHNRNSFVEDKGNHAYHFDAHKVGQYFKKVCNTVKHIDSEVDDVVKDPENGWVTELKLSNGSTVKGDMFIDASGFNQVLMKAVGSKWKSYKENLPVNSALPFLLPYEEDEKIEPVTNAWAQKNGWCWQIPTLNRRGCGYVFCDDFVTPEKAQEELEQNIGKKVEPIRLLKFDSGRQEKLWIKNVLSVGLCAAFAEPLEATSIHTTIFQLKHFVFGCLGKDRDETCNIGQVDDYNNKNAHLYDTLKDFLVAHYTCGRNDTEFWKYIDSGKTMTDFVRTMHEVCKNRVPNHTMFPRHEGCAGWPLWSYVLAGTGKLTDKICRRELHFNNDVDISDTAYVYHVGQHDFKTMHLPDNTNYIRDMQ

SEQ ID NO: 87036 - protein, 496 aa, Pseudoalteromonas sp.
  misc_feature (1)..(496): tr|G7EMP4|G7EMP4_9GAMM FADH2 O2-dependent halogenase I OS=Pseudoalteromonas sp. BSi20652 OX=388384 GN=prnA PE= 4 SV=1
MKPIKHVVIAGGGTAGWITAALLNKVLGKVINITLIESSAIGTVGVGEATIPPIIQLNNALGINEQDFINATNASIKLGIEFENWKTPGHSYMHAFGSLGKDFPFCDFYNFWLKGQITGCEDDLWGFSLNYQAAKQHKFAPLNTIPNTQLPGLSYAYHFDATLYAEYLKKLAISRGVKHIDAKISHVEQCDTGNVKSLALDNDSQISGDLFIDCTGLRALLIEQTLNTGFIDWSHYLPCDSAVAVQTKSTHELKPYTRSIAHSAGWQWQIPLQNRIGNGLVYCSRYLSDDDAKQLLLKSLPAEPITEPRIIKFKTGRRLKQWHKNVVSVGLSSGFLEPLESTSIHLIQTAVTRLIKLFPHNGISDALVTKFNKQSVIELEHIRDFIILHYKLTEREDSPFWRQCMQMDIPNSLTHKLNLFKHTGKVIREDDELFAEVAWQQVMIGQGLIPDDYNSIVDSLSDDQLSDLFSTLKTLISSTVTQLPTHQNFLASIKKV

SEQ ID NO: 87037 - protein, 498 aa, Alteromonas sp.
  misc_feature (1)..(498): tr|A0A385MSR8|A0A385MSR8_9ALTE Tryptophan 7-halogenase OS=Alteromonas sp. RKMC-009 OX=2267264 GN=DS731_05125 P E=4 SV=1
MSENKKTKVVIAGGGTAGWLTAFSLATRLGNLLDITLVESDQIGTVGVGEATIPTMRSFHQLMGINEQEFMSATQATFKLGIQFENWGCKDENYLHSFGEIGQRAWMAEFHAFWMAAKENGYSAGLDDFCLELKAAREGKFALAAGKKPLNYAFHLDATAYAAWLRKKSEAAGVKRIEGKIATVDLHSETGNITALKLEKGKVIAGDVFIDCTGFRGLLIGEHLGVEYEDWSHYLAADSAIAVQTESVEPPLPYTRAIAHDAGWQWRIPLQTRTGNGIVYSSRFLSDEEAEKTLLANLDGKPLTQPRKLKFKTGRRVKAWHKNCVAIGLSGGFLEPLESTSIHLVTTALIRLMKLFPFSDNFGILAERFNEETAVELETIRDFIILHYHQTTRDDSPFWNHYRTMDVPGSLKHRLSIFRENGYVWPDDVSLFRVDSWVQVMMGQGLMPGSYHQAGKLLPPEGLKQQLTALKNQIDNQLAQLPPHAQFIEKYCPAGKVG

SEQ ID NO: 87038 - protein, 508 aa, Pseudoalteromonas sp.
  misc_feature (1)..(508): tr|G7EE97|G7EE97_9GAMM Uncharacterized protein OS=Pseud oalteromonas sp. BSi20652 OX=388384 GN=P20652_1079 PE=4 SV=1
MNKAIKTVAVVGGGTAGWLSAAIIASYHQGKNGDGLKVMLVESSDIPTIGVGEGTWPTMKNTLQQIGLREVDVFKACNATFKQGGKFVNWTHGNNDFYYHPFTVPLGYGRIDLAPYLDNVEDFAQQTNFQHDICEASLAPRGIAQGEYQGNCNYAYHLDAGAFAEMLKQHCKSKLGVEHIIGTVDQVKLDDDGAINELTLKDQTRTINADLFIDCTGFSSLLLGQALNVPFKKMDHVLFNDSALAMQVPYDESDNSLASHTIATAQNAGWIWDIGLTHRRGVGHVYSSKFLSDDEAEQNLRNYLGDAANGLTARKISFESGYREKFWHKNCVAIGMSAGFVEPLEATAIMLVEISARFVAEHMPADTQVMPIVAKRFNEQMDYRWQRIIDFLKLHYMLTKRPEPYWQAHVQPDTIPQTLQEDLLLWGSRGPLIQDFHGALELFPAASYQYVLYGMGFKPDFTKQAYLYSQNAQAKQIIERNSQLTQQMLQTLPPHRAYIEHWLAANPV

SEQ ID NO: 87039 - protein, 503 aa, Cellvibrio sp.
  misc_feature (1)..(503): tr|A0A1Y0FW45|A0A1Y0FW45_9GAMM Tryptophan halogenase OS =Cellvibrio sp. PSBB006 OX=1987723 GN=CBR65_07545 PE=4 SV=1
MQKNPLSSICIVGGGTAGWMAASLLSSALQGSNIKITLIESPDIATIGVGESTVPSIMDFLYTCQINIREFVEATSATFKLGIRFDDWLKPGEQFFHPFGRVGQDVNGFEFYQLWLKNVMDGKSTRWLDHSPCAIMAENQRFMLRQPPQKNWVLNSYSHALHLDALLAARYLRDFSQKRGIERVEATVNKVVMDERQFIHSLELDNGQTVASDFFIDCTGFKGLLIEGALNIGYEEWTHYLPCDRAVAVQTENASGLHPFTIATAREAGWTWKIPLQHRTGNGYVFSSQYCTDDQAIDTLCKAVTGKLLGEPRVIPFTTGRRNKIWHNNCLALGLASGFLEPLESTAIHLVHKTLVHFIRHFPDRDFESYTEQAFNQKINIDYQEIRDFIILHYCTSGRDDTEFWRWCQTMPVPDSLHEKISLFRERGQIEHVPGQLFTIDSWCSILEGMKVRPKKYHPLIDAFNEQYLAALMQESSRNVRETVINMPRHDDFIRQHCAVKLR

SEQ ID NO: 87040 - protein, 499 aa, Alteromonas sp.
  misc_feature (1)..(499): tr|A0A385MZ59|A0A385MZ59_9ALTE Tryptophan 7-halogenase OS=Alteromonas sp. RKMC-009 OX=2267264 GN=DS731_16555 P E=4 SV=1
MDSNTQSEKTRVVIAGGGTAGWLTAAALAKKLGPLVDITLVESSDISTIGVGEATIPPLRVFHQLLGINEAEFMRATSATFKLGIQFTDFGDKQTEYIHSFGQTGQSGWLAEFFHFWREAHERGIPGEYGEYCLELEAAKANKFFTSTQNSPLNYAYHLDAGAYAAYLKKLAVNSGITHIVDNIDAVNCAPSGDIYALLLRQHGLLTGDLFIDCTGFKALLIGEALNTGYEDWSHWLFCNRALAVQTELAPPLKPYTVASAHEAGWRWEIPLQHRMGNGFVYSSQFLTDEQAELQFQKTLNSAPLQTIRRIEFKTGRRDHAWQNNCVAIGLSAGFVEPMESTSIHLIVTGITRLMQLFPYRGDATRLRNEYNNQTRAEIEKIRDFIILHYHVTERDDSEFWKMCKKMNIPDSLAERIELFKEHGHAFQKNGELFRVDSWTQVMLGQGILPGSWHPAAKMMSSGQLSAAMEKGKQEIKQRVAQLPGHEAFVSQYCASVKH

SEQ ID NO: 87041 - protein, 520 aa, Alteromonas sp.
  misc_feature (1)..(520): tr|A0A385MSB3|A0A385MSB3_9ALTE Tryptophan 7-halogenase OS=Alteromonas sp. RKMC-009 OX=2267264 GN=DS731_05130 P E=4 SV=1
MTNRVVIVGGGAAGWLTAGILAAKNGEKSGCTHPVRIELVESPNVKNLMVGEGTWPTMRDTLRQIGISEKDFMQFCNAGFKQASKFVGWQYGNGEHYYHPFTAPAGYGAVNLSQYFLKNRPGSDFETLVCAQGAVCEQSLAPKTLATPEFAFALNYGYHLNAGKFTEMLRLHCTQKLGVVHTTGHVEQVNGAPDGDIASVTLSDGRVIEGDLFIDCSGFKALLLNGFYNVPMVCRRDQLFNDAALALQVPYRDENAPVASATVATAQKHGWIWDIALSGRRGIGHVFSRQYCSADQAQDALMQYVKNDPHLDASKAEPRLITFEPGHRSVFWHRNCVAIGVSAGFVEPLEATALVLVEKSVEWISHQFPRCRNAMTVLAKRYNEITHSRWEEIIDFIKLHYVLSSRDDSEYWRAHRDAASVPQSLKDSLALWQTQPPWLYESDRRLELFSSASKQYVLMGMQSTFGEACTGLSQHEMRVADKALNDVRRSTEQLLNGLPTNREFLSRLAGAVKKDCRASA

SEQ ID NO: 87042 - protein, 520 aa, Cellvibrio sp.
  misc_feature (1)..(520): tr|A0A1Y0FUU4|A0A1Y0FUU4_9GAMM Tryptophan halogenase OS =Cellvibrio sp. PSBB006 OX=1987723 GN=CBR65_07160 PE=4 SV=1
MQNNSIKNIVILGGGSSGWLTAGVIAAEHKSYQPEGIQVTVIESPDVAPIGVGEGTWPSMRITLSKMGVSETDFFRECDASFKQGIKFAKWVNGKDDDFYYHPLVLPQGFNEADLVLPWQSIRDEVSFADAICFQGHLCERGLAPKQITTPEYASVANYSYHFNSLKFGQFLAKHCGERLGVKHVIDHVLEVKSADNGDIAALSTKQSGDIEGDLFIDCSGSAALLLGKHYQIPFISKKHILFNDAALAVQVPYPSEDSPIASHTVATAQSGGWIWDIGLPTRRGVGYVYSSAHIDEETVADELRRYIEPSIGREKAASLSFRKIPYDPGHRATFWHRNCVAVGMAAGFLEPLEATALVLVEASAAMISNDLPATKDVMQIVAKRFNQRFSYYWDTIIDFVKLQYVLTKRTDTQYWIDNVKPESVPVRLQELLELWRHQVPNKYDFPLAEEMLPAASWQYILYGMGFVTENRSTQKRSSDFAIFQRYRREVKALTERYTAHLPTNRDLINKICQVGLRRL

SEQ ID NO: 87043 - protein, 501 aa, Cellvibrio sp.
  misc_feature (1)..(501): tr|A0A1Y0G450|A0A1Y0G450_9GAMM Tryptophan halogenase OS =Cellvibrio sp. PSBB006 OX=1987723 GN=CBR65_19585 PE=4 SV=1
MNADHIKSILIVGGGAAGWLTAGILAARYGQSLEITLIESSDVPIIGVGEGSWPSLRNTLRDMGISETEFFKECDASFKQGVKFISWRSEDEPNFYYHPFSLPIGFLERNLAAWWVASRQQGAFADAVCAQEYLCEKNRAPRTADTPEYKSHVNYGYHLDAGKFVTFLSRHCKTVLGVKHVIGTIDKVNQDENGITSIETREQQHLHADLFIDCSGLKSLLLGETLGAKFIDKSDQLFIDSAVAVQAPYASDTSPILPYTVAHAQDAGWIWDIGLYSRKGIGHVYSSRHMSEDEATAILANYVGKDFETLTPRKLTIPCGHRERFWVKNCVAIGMAAGFIEPLEASALVMVELAANYIRDQLPQHTSVMPIVAKRFNDLQTYRWNNIVDFLKLHYVLSQRNTNFWKDNRDPATLSDSLKESLQLWQYHVPYKKDFLHKEEVFPAASYQYILYGMGLRPELQFSFNDNEQATFNRMRQDNEKMKEGLGRLLPDTRGLLEGIR

SEQ ID NO: 87044 - protein, 518 aa, Cellvibrio sp.
  misc_feature (1)..(518): tr|A0A1Y0G1U1|A0A1Y0G1U1_9GAMM Tryptophan halogenase OS =Cellvibrio sp. PSBB006 OX=1987723 GN=CBR65_19605 PE=4 SV=1
MSKRVLIVGGGTAGWITAAYMARMLAADTSGGVSITLVESDEIGILGVGEGTFPIIRKTMSRIGLDESELIREADATFKQGIRFNHWKKNPADHPHDTYFHPFQVCSQHTDMDLLPYWLLGVAGDVPWAEACTVQERVVDAKLAPKLITHPNYNAPLNYAYHFDAGKLAEVVRRRAMAMGVKRLIDTIDAVTLDEHGAIASVQGRAHGELTADLYIDCTGFRARLIGETLGSEFTSYKNQLFCNRAVAMQVPYDQPNAPIPSCTYATAQAAGWTWDIGLHDRRGIGYVYSSDHCSDEAALENLKRYIGPAANALTHRQLKFEAGFRKIQWYKNCVGIGLSVGFIEPLEATGISFAEVAALMLCNLFPWSGDTERSARQFNEAMTKRFEHVIDFIKLHYFLSQRTDTDFWRDNRAPASASDYLQGKLEQWRHRPPSFLDVDASHDIFDENSWQYILYGMDFKTDITARAGALRFYEDAKQEFEKIRQQSKNAMTAVPTHRDLINDVVVHGFRKASGGQR

SEQ ID NO: 87045 - protein, 506 aa, Pseudoalteromonas sp.
  misc_feature (1)..(506): tr|A0A0W1LFN9|A0A0W1LFN9_9GAMM Tryptophan halogenase OS =Pseudoalteromonas sp. H105 OX=1348393 GN=ATS75_00190 P E=4 SV=1
MIKKIAIVGGGTAGWLTANHLGQSLLGTDIEITLVESPTIPSIGVGEGTVPSIRNSLQKFGISETDFIRECDVTFKQSIKFVNWLDKHKHGENFYHHLFDHPHIFGEELTDQWLSSDRHQQYADNVSKQAICCEKMRAPKSISTPEFVGLNGYAYHFDAKKFASFLMNHAQKTFAIQHLYAEIIDVNCDQDGFVTHLIDNEKNELSFDFIIDCSGFSAAILGEKLNVDFIDRSNELLTDTAITLQVPTSVDDEIPPYTIATAHQAGWIWDIALTERRGVGFVYSSKHMSEEQAKKKLHHYLGNKFTHLKPRKIPIKVGRREKFWHKNCVAIGLSQGFVEPLEATAILITDFSGNLLSKRFPRNKEDIDIIATDFNKQVEYVWDSTFDFIKLHYFISDRDDSLFWVDNKQPSTLSEKLKSNVLKWQSFSPIREDFDSKFDLFDLENYLYVLFGMNYLPKTEQLSEQASLLAQQQVDLKKRRVEQLLIELPSHRGLINKIAKFGLQKL

SEQ ID NO: 87046 - protein, 498 aa, Cellvibrio sp.
  misc_feature (1)..(498): tr|A0A1Y0FW29|A0A1Y0FW29_9GAMM Tryptophan halogenase OS =Cellvibrio sp. PSBB006 OX=1987723 GN=CBR65_07165 PE=4 SV=1
MSSDVVRKKVVIAGGGTSGWLAAAALGKLLGKNLDISLIESEEIGRIGVGEATIPPLRTFHKLLGIDERELMSAIQGTFKLGIEFINWGRLGDNYIHSFGVTGKDCWACDFQHFWLSAQKKGIGESFGEYCLELMAAKQGKMLGSDESGVNYAYHLDAGLYAGFLKKHALKHGVNWIEGKITTVNIDPSNGYIQSLLLEDGRTIDGDLFIDCTGFSARLIEGALNTSYEPYGHYLPCDSAVAIQTELAGPPRPYTQAIAHNFGWQWRIPLQHRVGNGMVYSSRHVSDDEALATLMSNLESPAITEPRAFRYRTGRRSKVWNKNCVAVGLASGFLEPVESTSIHLAMSAILRLLKLFPLDEIRQSTVDEYNRQSREEMDRVRNFIVLHYHATERTDTAFWRYCKDMEIPEALAHRIKLFKDTGAVPLLEKELFLVDSWTQVMFGQHIMPERYHPIVDLMEERELDRFLKGLKAMVDKKLGQMPSHQAFIDSYCKAPKIS

SEQ ID NO: 87047 - protein, 505 aa, Sphingopyxis indica
  misc_feature (1)..(505): tr|A0A239J9W9|A0A239J9W9_9SPHN Tryptophan halogenase OS =Sphingopyxis indica OX=436663 GN=SAMN06295955_109152 P E=4 SV=1
MSGGSKIRIVVLGGGTAGWMSASALAKLLGPRVTVTLIESEDIGIVGVGEATLPHIRGFVERLGIDEADFMRATHATYKLGIDFRDFGRIGESYIHPFGTFGEKVAGVPFHHYWLELAARGMAGPIGDYSLAVEAAKANRFAPPAEDDSLRSTYGYAYQFDATLFGPYLRDFALPLGVTRIEGLVTEVRQDAESGDVTALKLADGREIAGDIFVDCSGFRSLMLGATLGEDWEDWSHWLPCDRAAAMPTAHVDQEIAPYTTAVAMPAGWRWRIPLQHRMGNGYVFASAFLSEDEACEAIRAAASGDRLAEPRVLRFRPGRRRRSWSRNVVGVGLASGFLEPLESTSLYLAQIAITYLIELFPTGGRIDARDRDEFNRLIDMEYDRIRDFLILHYHATTRDDAPFWDHVRTMTVPDTLERKLELWREAGRVELYSEGLFYDASWIAVYLGQGVVPERHDPRAAIPDPGRMCGAMDALKAAIAGEVAAMPGHRAYLTARAERLAAAP

SEQ ID NO: 87048 - protein, 503 aa, Shewanella baltica
  misc_feature (1)..(503): tr|B8EBX1|B8EBX1_SHEB2 Tryptophan halogenase OS=Shewane lla baltica (strain OS223) OX=407976 GN=Sbal223_3181 PE =4 SV=1
MTTAIKRVVIAGGGTAGWMAAAALTKLMGKHLEIVLVESDEIGTVGVGEATIPTLHIFHRLLGLKEQEVMAATNATFKLGISFENWQDINKNYLHSFGFLGKDCWACGFQHFWLKGKQLGMVSEIGDYCAEHLAARQGRFAVLPNQDYNHAYHMDASLYAKYLRKMAEQHGIHRIEGKIKQVLQHHDSGNIKALVLENDETIEGDLFIDCTGFRALLIEQTLNTGFEDWSHYLPCDSAIAVQTQSVGAPIPYTRSIARDSGWQWRIPLQNRTGNGLVFCSKFISDEDATELLLANLEGEPLNKPRVIKFKTGTRRLHWHKNCVAVGLSGGFLEPLESTSIHLIQRSIIRLMQLFPSAGIVQSDIDEFNQQTKLEMDNIRDFIILHYKATEREDSRFWRYCKNMDIPASLKHRIEMFADSGKVYKYGSELFGESSWIQVMMGQGIMPKHYHPIVDVMEEPELEAFLNNIKSTVKRKVESLPAHIDFIQHYCPAEVLANTKPMAM

SEQ ID NO: 87049 - protein, 522 aa, Alteromonas macleodii
  misc_feature (1)..(522): tr|K0EPF6|K0EPF6_ALTMB Putative tryptophan halogenase O S=Alteromonas macleodii (strain Balearic Sea AD45) OX=1 004787 GN=AMBAS45_18850 PE=4 SV=1
MATATPITHIVVVGGGSAGWLTAGRIAAQHQCATRKDIKVTLVESPNVPIIGVGEGTWPTMRSTLIALGISETTFIKECDATFKQGAKFAKWTTGEEHDFYYHPLMLPQGFSQTNLGPYWQTVAPELNESFSQAVCVQEAICEAGCAPKSIRHAEFAGTANYAYHLDAGKFTAFLTKHCTEKLGVHHVLADVNRVESNDIGDIKALHTEQGVTVEGDLFVDCTGFKSMLLGEHYKVPFIPCDDVLFIDRALAVHVPYDTPQSPIASHTISTAQDAGWIWDIGLQSRRGVGHVYSSRHQSKDDAYARLDTYVRQTSTLNGIDGINVKDITIQSGHRQRFWQNNCVAVGLAAGFLEPLEASALVLVELSASMIAEQLPANRAVMDIVAKRFNDTFSYRWQRIIDFLKLHYMLSKREDSAFWRDNRDSHTIPDSLKELLALWQYHPPSDKDFTSNNEVFPAASYQYVLYGMGFISDLGAHQQWVNADFAKQQLMQNRKARGMAVEKLPKHRELINKIHQFGLQAV

SEQ ID NO: 87050 - protein, 506 aa, Alteromonas macleodii
  misc_feature (1)..(506): tr|K0EFJ9|K0EFJ9_ALTMB Putative tryptophan halogenase O S=Alteromonas macleodii (strain Balearic Sea AD45) OX=1 004787 GN=AMBAS45_09685 PE=4 SV=1
MQDPHNKPIKRVVIAGGGTAGWLAASLMKKVLGKAVDITLVESEAIGTVGVGEATIPPIRLVNQVLGIDEAQFLHDTKATIKLAIRFENWKTKGESYYHTFGAPGKSMAFCHFHHYWVKARQQGLKDDLWDFDLNYHAAEAGRFAQINAKDPVVELPFAYHFDASLYAQYLRKLSENMGVVRKEGKISRVQRFTDSGFIQALHLESGDVVEGDLFVDCTGFKGLLIEEALGAGYDDWSHLLPCDSAIAVPSERHEKTAPYTRSIAHDAGWQWRIPLQHRNGNGHVYSSRYISDDQACDTLLSNLDTKPLGDPKLIKFTTGRRRKQWYKNVVAVGLSSGFLEPLESTSIHLIQSAIVRLIQLFPHNGFAPSLETEYNKQSELEFEQIRDFLILHYTVNERTDSAFFNDMRNITLPDSLAHKIALFKESGNLLREQNDLFLESSWLQVLYGQGITPKDYHGLVNSVPEVQLNQMLTRLLEIKKEPIAKLPTHDEYINGMVAKYKRAMS

SEQ ID NO: 87051 - protein, 486 aa, Lysobacter sp.
  misc_feature (1)..(486): tr|A0A0Q7PDA2|A0A0Q7PDA2_9GAMM Tryptophan halogenase OS =Lysobacter sp. Root494 OX=1736549 GN=ASD14_14695 PE=4 SV=1
MAAAALATYLGKGTSIRLIESEEIGIVGVGEASIPFMQYFNTKMLGIKEADFVTHTQGTFKLGIQFNDWGRIGDSYIHGFGTISQGIGPLPFHQFWLKLFLAGRAPDIGAYSLHTAAAPLGRFMVSPANVPADSPLANLAYAYHFDASLYARFLRTLSEKRGVTRTEGKIVDVIQRGEDGFIEAVVMEGGERIEGELFIDCSGFRGLLIEQTLKTGYVDWTQWLPCDRAMAVPCEVVGPPTPYTRSTALASGWQWRIPLQHRVGNGYVYSSRHISDDEAAATLLANLDGKALADPRPLRFTTGRRNKVWNRNVIAMGLASGFMEPLESTSLYLVQSALNRLLGLFPDRNFDPLLSDRFNRECTAEAERARDFLILHYNATERDDTPFWDQCRTMAVPDSLREAIGLFRHDGRYFRADSDLFALPSWVQVMLGQRIVPRGYHPIVDEMPDDHLVEFVDRARAMVAKCVQAMPMHQDFIDQNCKAPAL

SEQ ID NO: 87052 - protein, 540 aa, Idiomarina sp.
  misc_feature (1)..(540): tr|A0A2S0IJS6|A0A2S0IJS6_9GAMM Tryptophan 7-halogenase OS=Idiomarina sp. OT37-5b OX=2100422 GN=C5610_03930 PE= 4 SV=1
MQNNNKKTQRVVIVGGGSSGWIAAAYLNGALNQRGEKPRVDITVIESPDIPRISVGEATIPAIQHVLSVIGLNEAEFLQQTDATFKQSIKYCNWVKKDNTFYHHPFSSMRVQPLDFAAQRWLASDRSIPFMETCSAQPIICEWGLAPKMMGEWRMGPPLTYAYHMDAQKFADYLRDFSKARGVRHIAANMTDVSLTAEGSVSSVNTDCAGEIEGDLFIDCTGFRAKLIEEQLQVGWDDCSQWLLCDRAVTMHLPYDRFYPGEVRPYTTATALSNGWVWDIPMQSRRSVGYVHSSAYISKQDAEAELRAYQGGDSSSQDVRFIDFKVGRRRQNWVNNVVAVGLSGGFIEPLESTGLYLSELGVVALAEYFPWQASSMQAMSERYNRVLQNRYYEILDFINMHYCLTQRDDTEFWREVRKPQRINPRLQQKLALWQHKPPTFHDFQDQCFGSPTAAATTLSGDARAPIDTAGLWNHESYQCILYGMHYDGSFSKGDQPPRVPKAIIQRLQMARQMLPPHAYWLQQKVGMANYATAHRPPGWV

SEQ ID NO: 87053 - protein, 500 aa, Sphingopyxis sp.
  misc_feature (1)..(500): tr|A0A0W1F0P9|A0A0W1F0P9_9SPHN Tryptophan halogenase OS =Sphingopyxis sp. H038 OX=1759066 GN=ATE68_04940 PE=4 S V=1
MNEDKRIQRIVIAGGGTAGWMAAAAIARTLGQAVDLALVESEAIGTIGVGESTIPPLVNFNRILRINEADFMRATQATFKLGILFDDWKDLGTQYFHSFGLTGKDHWSAGFQHFWLYGRTKGHQQPYDDYCMELKAAIAGKFAHLPEDRMNYAYQLDSGLYARFLREMAEADGAKRIEGKIARVELDGTSGDIAALVLDGDRRIEGDIFIDCTGFRALLMEGALHAGFDDWSNWLPCDSAIALQTPNVHPPVPYTRVMAHDAGWQWRIPLQHRTGNGIVYCSRYLGKDAALDRMLGNIEGDVLTEPNFLRFTAGTRRKQWYRNCVAVGLSAGFMEPLESTAIHLIQRSVLRFIRMLPAGRVSERDVAEFNEQQMQDMLQIRDFLVLHYKVTNRRDSPFWRHCAAMPIPDTLAQKIELFRETGRVFRKNEELFAENSWVQVMMGQGIEPQSHHPIAEKLRDDELDRLLEAIRSEVRQTVAGLPAHQDYVARYCGAAVPQAA

SEQ ID NO: 87054 - protein, 505 aa, Shewanella baltica
  misc_feature (1)..(505): tr|B8EFA9|B8EFA9_SHEB2 Tryptophan halogenase OS=Shewane lla baltica (strain OS223) OX=407976 GN=Sbal223_3216 PE =4 SV=1
MNNSPLKSITIVGGGSTGWMTALYLSKLYNHSSNIIDIRLIESKEIGIIGVGEATVHSLRFFFAAMGLDENELLRETNATLKTGILFRNWMKPVDGKMHEYFHPFEQQKPSGKIDNASAWILNNQINESNSTPFAEATSLSFSLMQNNLSPKTQYLNQYQGIVPYGYHLDATLMAAFLKRKATQAGVEHVEANVTDVLVNDGNITEVVTDQGSFKSDIFIDCTGFKGLLIQSLNNDNWQSFETELPCNKAVAMQREYLPHQLPRAYTTATALSHGWAWEIDLTNRQGTGYVYDGNSLTREQAEAELKAYLGDEQEIIRTVHLDMKIGCRREFWVGNCIAMGLAGGFIEPLESTGLHLINLGARLLATHLTSSNPSQAIRTSYNTAMNGLYTDLRQFIVLHYCLTDRNDNEFWQKAAQSSAFIPALEQKITLWKDKVCEYVDLANGYSSVFTDENYRYVLYGMQHIPEIHIPCPKTEITKILDNLKTQQFRAKEQSLSHQEFLAKI

SEQ ID NO: 87055 - protein, 494 aa, Microbulbifer yueqingensis
  misc_feature (1)..(494): tr|A0A1G9DEJ2|A0A1G9DEJ2_9GAMM Tryptophan halogenase OS =Microbulbifer yueqingensis OX=658219 GN=SAMN05216212_2 763 PE=4 SV=1
MTQPIKKIVIAGGGTAGWMTAAALSKLMGKDLDITLVESESIGTVGVGEATIPTLLFFHRLLGIDEKEFLAATQATYKLGISFENWRDVGKDYIHAFGVTGKDCWACGFQHFWLRAKQLGLAGDFGDYCLERRAAEAEKFTHLPNNGLNYAFHFDASLYAKYLRQFSESNGAKRVEGKIDQVMLHPENGHIRALKLDSGRELDGDFFIDCTGMRALLIEKTLHTGFESWSHWLPCDGAVAVQTEAVAPPIPYTRSIARESAWQWRIPLQHRVGNGLVYSGAYQSDESAKRQLMDNIEGKPLADPRIIKFQTGRRRKQWHKNCLAVGLSSGFLEPLESTSIHLIQQNIVRFLRLFPHREIRQIEVDEYNRQADFEMERIRDFIILHYKVTERDDTEFWRYCRQMDVPDSLAAKIDMFRETGHVYREGNELFVDSWQQVMIGQGLMPERYHPLVDTMPEQELRDFIAHVKAGVDGDLSRLQDHNTYLASLMSGQGQ

SEQ ID NO: 87056 - protein, 390 aa, Corallococcus sp.
  misc_feature (1)..(390): tr|A0A3A8RM02|A0A3A8RM02_9DELT Tryptophan halogenase OS =Corallococcus sp. AB032C OX=2316717 GN=D7X99_19595 PE= 4 SV=1
MSEDSCDVAVIGGGPAGAAVAVALRRKAPSLSVTLVERTTYDAPRLGETLPPDVRLPLSRLGVWEGFLRDGHLASRGTASCWGRAEPGFNDTMMSPWGSAWHLDRTRFDERLSVEAARQGARVLRATTLVDSESLGRNGYRLRLSHGAADPSTLRARFVVDATGGKASFASARGARRFVSDRCFAVYGAFHLQGGATFPTHALVESCPEGWWYSALLPSGRVVVALVGDGDSLRGLRWATPEPWMNLLKQAPVTWARLDACDFAGEALIAVPVLVGQLVRPRGEQWLAVGDAACTYDPLSSQGITKSLDSALLAADALERCLSGDADALQAYESTLNARFQDHQRTRGVYYRQEQRWPQAPFWRNRWEALPAPAASPAQFRRSHSTEVNP

SEQ ID NO: 87057 - protein, 558 aa, Amycolatopsis thailandensis
  misc_feature (1)..(558): tr|A0A229S553|A0A229S553_9PSEU Tryptophan halogenase OS =Amycolatopsis thailandensis OX=589330 GN=CFP71_20235 P E=4 SV=1
MFSLRIAEGAKPGSPAENDFRPSFPPLAKEPAVARPVEKIVIVGGGTAGWLSAAYLNRAFGDKVDITLVESERIGRIGVGEATVPTLRTTFAFLGMKEEDWMPRCNAAFKSAVRLNDWRKPHPGKKSHTYFHPFFTVPEPAVPNYEKPFHKRFGRGVSLAHFWLKQKLSGDTRLRETFGDAGMPLQGLCELNKAPRPLPGTDGPNPGFRYAYHFDAALMAGYLKELATGRGVHHVIADVESVALDTRGHIEKVVTETGAELTADLFLDCSGFRGLLINQTLKEPFVSEKDVLLCDSAIALSADHHPGGLRPYTSATARKEGWIWEIPLFKREGSGYVYSGQMTTPDKAEKELRDFLGTRAHDVEGNHIKMRVGHNRRSWVNNCVAVGLSSCFVEPLESTTIALIEYQLALLVLHFPDSDLDERRAKRYNETMVSAFEDVRDFIVMHYCLTDRDDTEFWRAVREAPIPDSLAEKLTEYAESVIIPDGSELRLFETRSLWAILSGMDFDFKKAPPSVELMNDAAAWEMFEQIDKEREIYSASLPDHMEYLKALHALGAKG

SEQ ID NO: 87058 - protein, 84 aa, Xanthomonas fragariae
  misc_feature (1)..(84): tr|A0A1Y6HHU0|A0A1Y6HHU0_9XANT Tryptophan halogenase OS =Xanthomonas fragariae OX=48664 GN=prnA_1 PE=4 SV=1
MTAAGDVPADPRPLRFATGRRKHCWNRAAATCRSPRSCNPCWTCSAIVSGRFYRNAEEMFAEISWVRVMVGQGVLPQGYHPLVD

SEQ ID NO: 87059 - protein, 506 aa, Caulobacter henricii
  misc_feature (1)..(506): tr|A0A0P0P4B6|A0A0P0P4B6_9CAUL Tryptophan halogenase OS =Caulobacter henricii OX=69395 GN=AQ619_12820 PE=4 SV=1
MTDNRIRSVVIVGGGTAGWMAAASLQRHFQGSPLKITLIESSEIGTIGVGEATIPTIRSFYQTLGLSDLDVMRATGATCKLGIRFKDWLKPGSSFIHPFGLFGQDLRGVPFHNYWLRLRAEGETAEIGEYSLGAALAKGGKFTQPSRNPPSSLSVFDWALHFDAGLFAGLMRQVAEAAGVQRIDARITKVNLRPEDGFIASVTLDSGASVEGDLFIDCSGFRGLLIEEALQTGYEDWGQWLLCDRAYAVQSEGHGAPPPYTDVTAQTAGWRWRIPLQHRYGNGYVYSSRHISDDEALRELQASVPDPLLHAPRQIRFTPGRRRKAWNRNCIALSLASGFLEPLESTSIALIETGIEKIKQLFPDRSFNPAVSDEFNEMSRLEMERVRDFIILHYKANQREDTAFWRDCRAVDVPDTLKHKIEMFRERGHFIRYRWEMFQPASWLAIYTGFDILPKTWDPSLDGLDVASLRRGMDEMRKAVRAAVDGAPTHSDFLEKYARPTPLAAQ

SEQ ID NO: 87060 - protein, 84 aa, Xanthomonas fragariae
  misc_feature (1)..(84): tr|A0A1Y6HC72|A0A1Y6HC72_9XANT Tryptophan halogenase OS =Xanthomonas fragariae OX=48664 GN=prnA_2 PE=4 SV=1
MFHQANELFAENSWVQVMLGQGIMPRHHHPVADLMGDAELRHFLENIRTRVEAALLRLPAHADFLRRYCPARVPADAAIAPLAG

SEQ ID NO: 87061 - protein, 493 aa, Citromicrobium sp.; identical to SEQ ID NO: 83649
  misc_feature (1)..(493): tr|A0A0N8H0N7|A0A0N8H0N7_9SPHN Tryptophan halogenase OS =Citromicrobium sp. RCC1885 OX=1647104 GN=AAJ72_11680 P E=4 SV=1

SEQ ID NO: 87062 - protein, 497 aa, Microbulbifer yueqingensis
  misc_feature (1)..(497): tr|A0A1G8Y8I0|A0A1G8Y8I0_9GAMM Tryptophan halogenase OS =Microbulbifer yueqingensis OX=658219 GN=SAMN05216212_1 398 PE=4 SV=1
MSDKIIKDVVVLGGGTAGWMTAALLAKVLGKSINITLVESDKIGTVGVGEATIPPILNFNQALGLDEREFLQATKGTIKLGIQFEDWWRKGESYMHAFGSIGKNFPFCDFHHFWNRSRKQGNDASLWEYSLNYQAARHNKFAPLAQIPGTSLPGISYAYHFDAGLYARFLRRYAESKGVKRIEGTVSEVKVDPHSGFVDGLVLENGQLVESGLYVDCSGMAALLIEKTLGTGYEDWSHWLPCDRAIAVPSAALTPLVPYTRSIAHEAGWQWRIPLQHRTGNGMVYSSRHWSDEEAQGALLENLDAEPLDEPRLIRFRTGRRRKQWNRNVVSIGLSSGFLEPLESTSIHLVQSAATRLIKCFPHAGIRPQEVAEFNRQSRVEMERIRDFIILHYKANQRRDSDFWRDCERMDIPASLEEKIELFRHTGKVFRDYDDLFTEVAWQQVLIGQGVIPEDHHTIADSLTGEQLADLMSSLKTLVDGTVRKMPEHEKFLPPEV

SEQ ID NO: 87063 - protein, 514 aa, Sphingomonas sp.; identical to SEQ ID NO: 86335
  misc_feature (1)..(514): tr|A0A430CDU4|A0A430CDU4_9SPHN Tryptophan 7-halogenase OS=Sphingomonas sp. S-NIH.Pt1_0416 OX=1920123 GN=BRX36_ 16435 PE=4 SV=1

SEQ ID NO: 87064 - protein, 483 aa, Sphingopyxis sp.
  misc_feature (1)..(483): tr|A0A0W1EZW5|A0A0W1EZW5_9SPHN Tryptophan halogenase OS =Sphingopyxis sp. H038 OX=1759066 GN=ATE68_07960 PE=4 S V=1
MAAAALARTMDNLSIRLVESDEIGTVGVGEATIPAIRLFNALIGIDENEFIRETGGTFKLGIQFHDWGRIGDVYMHAFGQIGRSLGMLPFQQYWLRGRNEGVVGRLGDYSLNESAGRKNRFARLPQIPNTSLDGIAYAFHFDAALYAAYLRKVSEAAGVERTEGKIASVRRGGESGHVEAVVLEDGTAIEGELFIDCSGFRALLIEGALETGFEDWTQWLPCDRAIAVPSENAGPARPYTQAIAHKAGWQWRIPLQHRTGNGHVFCSDFISEDEATAILLANVEGRPLADPRTLRFRTGMRRRAWNGNVVALGLASGFLEPLESTSIHLIQNGIAKLLAHFPGRDFEAANIDAYNRRVSFDYERIRDFVILHYHANQRTDAPFWIRCREMGIPETLAQKIALFQSQGQIVREGDELFVEIGWFQVLTGQNIMPGSHHPMADQLTHDELAGFFADIETIVARTASHLPTHEDFIAQHCAAGVPA

SEQ ID NO: 87065 - protein, 498 aa, Sphingomonas sp.
  misc_feature (1)..(498): tr|A0A430CQS8|A0A430CQS8_9SPHN Tryptophan 7-halogenase OS=Sphingomonas sp. S-NIH.Pt1_0416 OX=1920123 GN=BRX36_ 05175 PE=4 SV=1
MPDGSGGVTVEGPIRHILVAGGGLTGYYAAAALKRRAPFLDVTLLATPVAPEALADQIACTLPSLCGFQADLGIGEDDGITRAGAGYRLGTRFTGWAEGLPDYVHAYGSYGHPIGPAGFPLHWVRAAKAGPVTPFDAFAPAAQLARAGRFVPPTPGTVFAGHEYGLTLDIARHRAMIRAFALHVGVREITGEIAEVSSDAPGFLSEVRTASGETLSADLFIDATGPAARLRGTIDDERDDWSRWLPCQRLLLGDRPQVENAPVLTPVEAHGAGWGWSSGRQMGLAYASAYLSDGDAAAMLGSLNVTPAAPIAIRAGTRPKPWRGNCVAIGDAATEVEPLEWCNLHLALSAVDRLITMLPDRAMAPIEAADFNRQTLAEAERVRDFLAMHYRTATRPEPMWRAVAQAAPPPSLAHTLAQFEERGRLPFYEEETFTRDSWAAVLLGQGHLPRRVDPLVHAVPPAEAQAAMTRMTGAIAAALPQAPAHAEWRAAQTRRLAR

SEQ ID NO: 87066 - protein, 417 aa, Planctopirus limnophila
  misc_feature (1)..(417): tr|D5SSY0|D5SSY0_PLAL2 Tryptophan halogenase OS=Plancto pirus limnophila (strain ATCC 43296 / DSM 3776 / IFAM 1 008 / 290) OX=521674 GN=Plim_3116 PE=4 SV=1
MIQSLDPEVIVIGGGPAGATAATLLAQAGHRVQLFEREVFPRFHIGESLIPCTYGVFARTGLLERLKDSHFVKKYSVQFVSDTGKVSAPFFFTQYKPVESSQTWQVRRADFDLMLLDHAREAGVQVHENHRVLEAIFEDDRCVGVRVKNEATGEERQVRAQVVIDGSGQSSVLLDRLQLRTWDSELKKAAVWTYYKNAWRDEGENGGATSVIQTEGKKGWFWYIPLHDNITSVGVVADFSHLFNKQRTKDLGELFQEEVDHCPGVKVRLEGAERCDQYRAAKEYSYRAKQAAGQGWVLIGDAYGFLDPLYSSGVLLAVKSGELAADAVHQGLVTNDLTRTTLGAWEPEYVLGMERMRKLVLAYYKGMNFGKLIMKYPETKDDITDLLMGDLFRAELDLTLDKVDSMLEEMAAQPVVA

SEQ ID NO: 87067 - protein, 135 aa, Buttiauxella brennerae
  misc_feature (1)..(135): tr|A0A1B7IV43|A0A1B7IV43_9ENTR Tryptophan halogenase OS =Buttiauxella brennerae ATCC 51605 OX=1354251 GN=M975_0 379 PE=4 SV=1
MFDNLKESWFISKVETVIQTEINSLPLMFRNHTEGLAHAIVLKQYQVRCFVFSKMDGTRLNPKIAAVESVLTFIGLYGGQGQILVNAQDCLGALKIIIVQLLKHLEMESTTAYEDGYIEMFIAPLLRRALPELDT

SEQ ID NO: 87068 - protein, 509 aa, Caulobacter henricii
  misc_feature (1)..(509): tr|A0A0P0P1X5|A0A0P0P1X5_9CAUL Tryptophan halogenase OS =Caulobacter henricii OX=69395 GN=AQ619_12815 PE=4 SV=1
MQDANQNGIRKVVIVGGGSAGWICAAMASHYFHKTGVAVELIESEEIGTIGVGESTIPPFLQLIRSLGIDEQDFIQKTQASFKLAIRFENWRNKGETYYHPFGQIGGPIGRHEFYQCWLRAKANGHPSNLQDFAPATVMADQWKFIPPVRAQKSLLSGANYALHIDAKLVAQYLRDFAEARGVKRTEGIVTDVVSRPDGFVERVIMKNGTEVSGDLFIDCSGFRALLIGKTLDEEYRDWSDVLMCDRAVVAQTENVKDPHPYTVAQAQDAGWRWRIPLQHRAGNGYVFCSKYLSEDEAAATLLSQIEGEVLLGPNFIPFKTGMRKRLFRNNVVAIGLAGGFIEPLESTALHLIYRGMDFLLRYFPDKDFDPGLAAEYNRRMTMDYEEIRDFIVLHYVTTQRDDTPFWRDYQAVVPPESLRERLELFRASGLLRDGVDDMFRAPSWQSVMEGMGVRPRRYQQLVDAVPYAVIQQTLDQSAPILKAQVAALPSHGEFLAEHCPAAPFQRSA

SEQ ID NO: 87069 - protein, 482 aa, Brevundimonas sp.
  misc_feature (1)..(482): tr|A0A0Q5LK48|A0A0Q5LK48_9CAUL Tryptophan halogenase OS =Brevundimonas sp. Leaf168 OX=1736283 GN=ASF81_14215 PE =4 SV=1
MAAAALAHAFAGAGKTVTLVESEAIGIIGVGEATIPEILKFNARLGIDEPDFLRGTKATFKLGIEFDGWRREGERYFHPFGAFGLDMEGIAFHHFWLKACAEGGSEPLETYSMAWQAARRGRFVHPQGGPQSPLSSLGYAYHFDAALYAAFLRLFAEGLGVVRREGRVVEVQQAADGDITGVRLDDGRVVEGDFFIDCTGFVGLLIEQALTSGYEDWSSWLPCDSAVAVPCVREGALSPYTRSTAREAGWQWRIPLQHRVGNGYVYSSAHISHQEAEDALMSRLEGAALAEPRRLRFATGRRKDCWKRNCVAVGLSSGFLEPLESTSIHLIQSAITKLITLFPSHKNSEGLRREFNALMEEEFVTVRDFLILHYKVNQREGPFWSQVRDMPIPDRLAAKIALFEDTGRIVRRDHDIFSESSWLAVAVGQGLTPHGRHPISDVINHDANLGRLSAIRDSIWRTADALPTHEGILTTTMNRKAF

SEQ ID NO: 87070 - protein, 518 aa, Microbulbifer yueqingensis
  misc_feature (1)..(518): tr|A0A1G9DEB4|A0A1G9DEB4_9GAMM 2-polyprenyl-6-methoxyph enol hydroxylase OS=Microbulbifer yueqingensis OX=65821 9 GN=SAMN05216212_2761 PE=4 SV=1
MQQAPLSILVLGGGAAGWLTAAVLAAEHSRARGGDCEITLVESPDLPTVGVGEGTWPSMRETLRRIGLSELRLFTECDASFKQGSLFSSWRSDSKDDRYYHPFSLPHGYFELDLAAYSGQDNYAYTVTPQAAICDASLAPKQLSTPEYAGVLNYGYHFDAVKFGKCLRDHCVEQLGVRHLQAEVERVEGDSDGSVAALVTRDGQRLAADLFIDCSGSAGLIIGEHLGVGWESKASVLFNDRALAAQVPHPSPEAPIASVTRSTGRPHGWIWDIGLPTRRGMGYVYSSEFTNEEEVEADFRRFLADEAAVPLDSDLPVRKLRFSPGHRTIFWQGNCVAVGMAAGFIEPLEASALALIEQSAGLIRDLLPAQASEMEMAAKRFNRQMLSHWDNIIEFLKLHYVLSVRTDSDYWQAHRELSSIPESLRENLALWRHRPPGRQDFPEAQPLFPPASYRYVLNGMGHPCDFARAPRADRNSERARSLLGELERQLASFRQGLPDNRQLIEQLLAREPGRDGAR

SEQ ID NO: 87071 - protein, 522 aa, Sphingomonas sp.
  misc_feature (1)..(522): tr|A0A430CU69|A0A430CU69_9SPHN Tryptophan 7-halogenase OS=Sphingomonas sp. S-NIH.Pt1_0416 OX=1920123 GN=BRX36_ 03005 PE=4 SV=1
MTERAEQGDGSVRHVVVVGGGSAGWIAACRLAARVRRTGDAVRVTLVESRTVPTVGVGEGTWPTMRNTLAKVGITESDFIRSCDAAFKQGARFVGWTDGTPQDGYYHPLNPPAGATEIDMAPHWQHRPEGDAAVFADWVDYQAMLCDAGLAPKTIVMPEYAGHANYAYHLDAGQFATMLRDHGVDVLGVEHVVGDVVCPHMTGHGDIAQLELADGRLIPGDLFVDCTGFAALLIGGVYDVPFRRCGETLFADRAMALQVPYDDEDAPITCHTVSTAQKAGWIWDIGLWSRRGVGHVYSSAHISDDAAEAALRDYVGPRAADLNVRRITIDAGHRERFWQNNCVAVGLSAGFIEPLEASALMLIEASMDAIADRLPRTRSAMDVMARQFNATFTHHWMRIIEFLKLHYVLTRRTDSDFWRDNVAAASIPDGLAERLELWRHHSPAPQDFEHAREVFSWPSYQYVLHGMGFDGACPPIDPAAPEAVLAQRFAARTARAKDELRDRAPRHRDLLRAIREHGLQRV

SEQ ID NO: 87072 - protein, 479 aa, Caulobacter henricii
  misc_feature (1)..(479): tr|A0A0P0P3Z8|A0A0P0P3Z8_9CAUL Tryptophan halogenase OS =Caulobacter henricii OX=69395 GN=AQ619_03595 PE=4 SV=1
MAAALLARALGRRCAITLVESAEIGTVGVGEATIPPIRGFNQTLGLNEAEFVRETKGTYKLGIEFRGWTRPGEAYFHPFGVYGTAPDPGYFHQYWLKLSGLGKAGALEDYSLCAQAARRGRFGQQSQDPRSPLSTFGSAFHFDAGLYARYLRTYAERLGVNRIEGKVVSVDQRGEDGFIEALRLDGDRRVAGDFFIDCSGFRGLLIEEALKTGYEDWSHWLPCDRAMAMPCTREGEPSPFTRSTAQAGGWIWNIPLQHRDGNGYVYSSRYIDDDTAEATLRASLGGTVLAEPNRLRFVTGRRRKAWNKNVLSLGLASGFIEPLESTSIHMIQAGLLKFLSAFPGKAWDPVQADDYNDRIQLDFERIRDFIVLHYHANQRDEPLWRDRREMVLPETLTRRLALFRACGRLSQHPEEMFTATSWQAVLEGQGIRPRTYDPLVDLHDIDRVATEFEQIRRELRQTAEAMSPHAAALPGLVSA

SEQ ID NO: 87073 - protein, 496 aa, Sphingomonas sp.; identical to SEQ ID NO: 86305
  misc_feature (1)..(496): tr|A0A430CI72|A0A430CI72_9SPHN Tryptophan 7-halogenase OS=Sphingomonas sp. S-NIH.Pt1_0416 OX=1920123 GN=BRX36_ 12565 PE=4 SV=1

SEQ ID NO: 87074 - protein, 499 aa, Streptomyces viridifaciens
  misc_feature (1)..(499): tr|A0A1L9DIS0|A0A1L9DIS0_STRVF Tryptophan halogenase OS =Streptomyces viridifaciens OX=48665 GN=BOQ63_14475 PE= 4 SV=1
MTSTDQETFDVVVVGGGPGGSTVATLVAQQGHRVLLLEKETFPRYQIGESLLPSTIHGIGALLGVTDEIEKAGFMRKRGGTFRWGANPEPWSFSFAISPRIAGPTSHAYQVERMKFDQILLDNARRKGVEVREQCAAVEVIEDGGRVQGLVYTGPDGTRRSVRSAFVVDASGNKSRLHQGVGGERVYSDFFQNIALFGYFTGGDRLPEPNRGNIFCAAFDEGWFWYIPLTDDLTSVGAVINRESASEVQGDPRQALARLIDRCEPIRDLLKNSAGVTEGPYGQVRVRKDYSYLNTRFWRPGMVLVGDAACFVDPVFSSGVHLATYSATLAARSINTALDGLVDEERSFQEYEARYRHEYGLFYEFLMSFYDMNADDTSYYWQAKKVTRCADSELESFVGLVGGVASGESAVLGAESLRAKLAATSGELAQSVAAVGAAATADDATPLFQSSIVSEVMREGARTQARAQFGEAFGDAGPMFPGGLMPTADGTRWTAADAQ

SEQ ID NO: 87075 - protein, 504 aa, Sphingomonas sp.
  misc_feature (1)..(504): tr|A0A430CVY0|A0A430CVY0_9SPHN Tryptophan halogenase OS =Sphingomonas sp. S-NIH.Pt1_0416 OX=1920123 GN=BRX36_01 785 PE=4 SV=1
MPDMPDAIRSVLIVGGGTAGWMTAAALAHACPRGLTITLVESDEIGTVGVGEATIPPIRLFNQTLGIDEAEFLRETKGSFKLGIEFVGWGREGHRYFHPFGTHGKSFDLVAVHQHWLAAGGAEGVVPPLDDLSMAWGAAKRGRFAAPMADPHSVASTFDYAYHFDAGLYARFLRRYAEARGVVRVEGRIAGHALEGERGHVASVMLDDGRTLAADLFVDCSGFRGLLIEGALHTGYEDWTHWLPCDRAVAVPCATGGDGLTPYTRSSARAAGWQWRIPLQHRTGNGYVYCSRHISDDEAAATLLAHLDGPALGDPRFLRFTTGRRRLFWNRNVVAIGLSSGFMEPLESTSIHLIQAGVAKLLAYFPTKAFEPPAIEEYNRVAITEYERIRDFLILHYKLTERTDAPLWRECAAMPIPDTLAMKIAHFRDHGRLIARDMDLFGPASWAAVHVGQFNLPRATDPLLAYADPAQSRAFVGKLAGAIGQMAESMPTHADWLRRIGAMA

SEQ ID NO: 87076 - protein, 503 aa, Brevundimonas sp.
  misc_feature (1)..(503): tr|A0A0Q5MSD3|A0A0Q5MSD3_9CAUL Tryptophan halogenase OS =Brevundimonas sp. Leaf168 OX=1736283 GN=ASF81_14510 PE =4 SV=1
MSDQPEPVRHIAIVGGGTAGWMAAAALGRAFTRAQGLALMITLIESESIGTVGVGEATIPPIRQFVQTIGLSEEDFIRSTAATAKLGIAFKDWIAPGSEYFHGFGDYGPTVAGQAWRQYLFRLKAAGRIDGLDPWSMPTAMARAGKFAPPVEDSRSVLSHYSYAYQFDAGLFARRLRTLAEKLGVVRREGRITGVDRDGETGLVRAVTLEDGGEVEADLFIDCSGFRGLLIEQTMQAGYEEWTHWLPCDRAVAVPCSSSLAPEPITTARAREAGWQWRIPLQHRVGNGYVYSSDHVDDQTALDDLLGQIESEPLAEPNRLRFVTGRRREAWKGNVVSLGLASGFVEPLESTSINLIQTGIGRLLEMFPDRSFDPALIREYNRRSAQEFERIRDFIILHYHLAGRAGAMWDRCRETAPPDTLMEKIELFHARGEVGLLEDESFREDSWAAVFTGLGTWPKQPSPLVCIDDLETVDRQARQFAQLIARAAAALPDHSTTFTGYAR

SEQ ID NO: 87077 - protein, 510 aa, Lysobacter sp.
  misc_feature (1)..(510): tr|A0A0Q7Q8I1|A0A0Q7Q8I1_9GAMM Tryptophan halogenase OS =Lysobacter sp. Root494 OX=1736549 GN=ASD14_01230 PE=4 SV=1
MVDGSNEGRVRNIVIVGGGTAGWMAAAALSKALTRDYSIRLIESEEIGTVGVGEGTIPLIKLFNHALELDEADFVRRTKGSFKLGVNFVDWGRLGDSYVHGFGKIGQDLGLVPFYQYWLKMHQAGKARPLDDYSINTVAARQNKFMPAVTDRPNSPLADIAYAYHFDAGLYARFLREYSEARGVQRIEGKVTGYQLRGEDGFVESVTMEDGTLIDGQLFIDCSGFRGLLIEQALKTGFEDWTHWLPCDRAVAVPCASAPGGITPYTRSTARKAGWQWRIPLQHRIGNGHVFCSRYTSEDEATATLMANLDGEALAEPRVLRFATGKRNKTWNKNVVAIGLSSGFMEPLESTSIHLIQSTIARLTAFFPHVGFDQADIDEFNAHSDFETVRIRDFLILHYHATERDDSPFWNYCRTMDIPDTLRQKMDLFRSNGRVFREHTEMFAEPSWVQVMHGQRVHPRGYHALVDLQPEERIAEFLENVRGVIGHCATQMPTHDAFISRLVAKESQAA

SEQ ID NO: 87078 - protein, 538 aa, Burkholderia sp.
  misc_feature (1)..(538): tr|A0A1K1NAB5|A0A1K1NAB5_9BURK Tryptophan halogenase OS =Burkholderia sp. NFACC33-1 OX=1566269 GN=SAMN03159384_ 01348 PE=4 SV=1
MSNPIKNIVIVGGGTAGWMAASYLVRALQQQANITLIESAAIPRIGVGEATIPSLQKVFFDFLGIPEREWMPQVNGAFKAAIKFVNWRKSPDRSRDDYFYHLFGSVPNCDGVPLTHYWLRKREQGFQQPMEYACYPQPGALDGNLAPCLADGTRQMSHAWHFDAHLVADFLKRWAVERGVKRVVDEVVDVHLNERGYISSLSTKEGRTLEADLFIDCSGMRGLLINQALKEPFIDMSDYLLCDSAVASAVPNDDARVGIEPYTSAIAMNSGWTWKIPMLGRFGSGYVFSSKFTSRDQATADFLDLWGLSDKQPLNQIKFRVGRNRRAWVNNCVSIGLSSCFLEPLESTGIYFIYAALYQLVKHFPDTSFDPRLTDAFNAEIVYMFDDCRDFVQAHYFTTSREDTPFWLANRHDLRLSDAIKEKVERYKAGLPLTTTSFDDSTYYETFDYEFKNFWLNGNYYCIFAGLGLLPDRSLPLLRHRPESIDKAEAMFARIRREAERLRTSLPTNYDYLRSLREGDAGRSRSQPGPTLATPEVL

SEQ ID NO: 87079 - protein, 507 aa, Glaciecola sp.
  misc_feature (1)..(507): tr|A0A2N1HZQ0|A0A2N1HZQ0_9ALTE Tryptophan halogenase OS =Glaciecola sp. 33A OX=2057807 GN=CXF81_02630 PE=4 SV=1
MNTVTKRILIVGGGTAGWLTAALLAKQHGQSIEICLVESSDIPTVGVGEGTWPSMRTTLQKIGISESQFITECSATFKQASKFVDWISPANEYFHPFTQPAGYGKVDIAPYWESLSVAPTFCDSVTFQSHMCKMGLAPKNITHKEYETVANYGYHLDAGKFAVLLRNHSVNKLNVKHKVANITQVNQHPDGSISDVETDSAGRLEADFFIDCSGFSSLLLGQTLGVPFIAKNDILFNDTALAMHVPYKDKNDPIACHTISTAQTAGWIWDIGLQHRRGVGYVFSSKHQSLENAERILKNYVGPQAEDLVIRKIQFKTGHRACFWRHNCVAVGLSSGFLEPLEASALMLVETSANFIADQLPMTKAEMKPMEKRFNKVFTAKWRGVIDFLKLHYVLSERQEPFWKDNKKSSSIPETLQEMLMLWQNRVPSEYDFLQSYEAFNAASYQYVLYGGGFKTDFSLLSHTLTHKDRAKRQLEITLKTAQQMALRLPKHRELINQIKLQGFAKL

SEQ ID NO: 87080 - protein, 516 aa, Salinimonas sp.
  misc_feature (1)..(516): tr|A0A5B7Y943|A0A5B7Y943_9ALTE Tryptophan 7-halogenase OS=Salinimonas sp. KX18D6 OX=2572577 GN=FBQ74_01080 PE= 4 SV=1
MHQSDSVNSIIVLGGGTAGWLTAAVIAAEHDIAKRQDLTVTVVESPQVKTLGVGEGTWPTMRDTLRRVGISETEFLVRCDASFKQGTCFKQWTGTNGDDTYYHPFDLPTGFFECDLAHWWAAEQPETAFADMLCAQPALCSASKAPKQPQTPAYAAVANYGYHLDASKFADMLREHCVDILGVKHISAHVQDIQRDKDNYLTALRTDAGEIHGDLFIDCSGFAARLIGQHYGSAFKSVSHVLKNDTAMAVQAPYADAGCDIASATVSTAHRNGWIWDIALPHRKGVGCVYSSDFCSDDEAKDTLLSYLKNDTVTSPVSADAIRKISFTPGYRETPWIKNCVAVGTSAGFFEPLEASALVMTELAALHIARQLPQSRQDMAPVSRQFNRSFATKWQRIIDFLKLHYVLSARTDSEYWRAMGSLDSASDQLQDWLHLWHRRPINQHDFLYQDEVFPQASYLYILNGMGFAQSAPHRNNDDTNRFIQQNEKRKQQLLAGLPSNRDYLNALNQYRHKSAG

SEQ ID NO: 87081 - protein, 516 aa, Sphingomonas sp.; identical to SEQ ID NO: 86340
  misc_feature (1)..(516): tr|A0A430CQT0|A0A430CQT0_9SPHN Tryptophan 7-halogenase OS=Sphingomonas sp. S-NIH.Pt1_0416 OX=1920123 GN=BRX36_ 05170 PE=4 SV=1

SEQ ID NO: 87082 - protein, 505 aa, Caulobacter henricii
  misc_feature (1)..(505): tr|A0A0P0NXA9|A0A0P0NXA9_9CAUL Tryptophan halogenase OS =Caulobacter henricii OX=69395 GN=AQ619_03805 PE=4 SV=1
MNTNPVRKVLIVGGGTAGWMTAAALAKVLRGVEVSLIESDAISTVGVGEATIPPINTFNQMLGIDEADFMRSTQASFKLAIEFVDWTRPGSRYLHPFGAYGLDIEAIKFHQFWLKARAQGSTQSLDDFNLSATAARLGKFMLPSKDPGQVLSSLKYAFHFDAGLYARYLRRYAEARGVVRREGKVVDVSLRGEDGFITSVTTDDGTVLEADLFIDCSGFRGLLIEQALDTGFEDWGHWLPNDRAVAMPCETGGDGLTPYTRATADTAGWRWRIPLQHRTGNGYVYSSRHLGDDEAVARLRATLDGPARAEPNFIRFRAGRRKQIWVKNCVAIGLASGFLEPLESTSIHMIQSGITKLLALFPDRGFDPVEIAEYNRLTILQTELIRDFIILHFKANERSEPYWQQARDMAIPDSLQHRIDLFAARGRLFPTDYDLFAEPSWVAVLLGQNIRPRAYDPLVDTLDETLVRNQMHRLASLVRQTAEALPTHEAFIARYCAASEIEKAR

SEQ ID NO: 87083 - protein, 472 aa, Salinimonas sp.
  misc_feature (1)..(472): tr|A0A5B7YBZ2|A0A5B7YBZ2_9ALTE Tryptophan 7-halogenase OS=Salinimonas sp. KX18D6 OX=2572577 GN=FBQ74_01065 PE= 4 SV=1
MAAAALTRVLKNKVDVTLVESSEIGTVGVGEATIPTLVFFHKLLKLSEQEFMSETNATYKLGINFENWKDLNHSYLHAFGVTGKDCWAAGFQHFWLRGLQEGLSGDFGDYCLERQAAEANKFAHLPNNGLNYAYHIDATSYAKFLRKLSEREGLTRIDAKINNVNLRQQDGFIESLDLDNGQRIEGDFFIDCTGFKGLLIEKAMHTGYEDWSHWLPCDSAVAVQTESTSEPLPYTRCIAHEAGWQWRIPLQHRVGNGMVYCSQYQSDDETIDKLLSNIDGKPLNDPRVIHFRTGRRRKQWNRNCLALGLASGFLEPLESTSIHLIQQGIVRFLRMFPEAGVVQEDINEFNQQADFDIEHIRDFIILHYHVTNRTDTPFWRHCRQMDVPASLRHRIDLFVKTGRIFREGSELFDDSWQQVMIGQGLMPQSYHPIVDTMSRDELEALLTQITSQIRRTVEKLPPHEEYLKRFCQ

SEQ ID NO: 87084 - protein, 517 aa, Glaciecola sp.
  misc_feature (1)..(517): tr|A0A2N1HUY7|A0A2N1HUY7_9ALTE Tryptophan halogenase OS =Glaciecola sp. 33A OX=2057807 GN=CXF81_08840 PE=4 SV=1
MHKPLRKIVIVGGGSAGWLTAGVIAAEHSIDPNVGIEVTLIESADVAPIGVGEGTWPTMRSTLKKMGISETDFLLECDASFKQGSKFSNWHTNTNEHYYHPFTLPHGFNDTNLASFWQPYRHQVTFADAVGVQSQLGEHGLAPKQISTAEYDFNANYGYHLDAGKFAALLQKHCTTKLAVKHIIDHVTQVNSAQSGDIATITTKNNGDIAGDLFIDCTGTASLLLAKHYAVPFVSTKHILFNDSALAVHVPHQDSNSPIASFTCSTAQSAGWIWDIGLPSRRGVGYTYSSRHITDVEAEKALRDYITPIMGESAAKSTKIRKIDFSPGYREKFWHKNCVAVGLSAGFIEPLEATALALIELSAKMISEQLPADREAMDLVAKRFNAKFLHRWLNIVDFLKLHYVLSNRTDSAYWREISDVEQLPDTLKDQLLLWKTRAPYHYDATHTEEMFPPASYQYILYGMDFITQPVNTKRMDESKKAQVLFAENAKHTKQLLSSLPSNRELINKIKLYGLPKI

SEQ ID NO: 87085 - protein, 45 aa, Burkholderia sp.
  misc_feature (1)..(45): tr|A0A1K1NA95|A0A1K1NA95_9BURK Tryptophan halogenase OS =Burkholderia sp. NFACC33-1 OX=1566269 GN=SAMN03159384_ 01349 PE=4 SV=1
MRNLVKSILIVGGGSAGWMTVAHLSEAYGYKVKISLIESLTIPKI

SEQ ID NO: 87086 - protein, 498 aa, Pseudoalteromonas lipolytica
  misc_feature (1)..(498): tr|Z5XTM4|Z5XTM4_9GAMM Tryptophan halogenase OS=Pseudoa lteromonas lipolytica SCSIO 04301 OX=1452721 GN=AT00_06 355 PE=4 SV=1
MEAKKITKVVIAGGGTAGWITAALLNKVLGKSLDITLVESAEIGTVGVGEASIPPILHLNGALGISEKEFIKATGATIKLGIEFENWRSQGHSYMHAFGEIGKDFPFCAFYHFWLKANQTQNAPDFWDFSLNYQAAKAHKFAHLKNIPNTQLAGLHYAYHFDATRYGEFLKELAQSRGVNRIEGKIETISQCDQTGSINALKLEDGSLIEGDLFIDCTGLRALLIEQTLNTGFEDWSHWIPCDSAVAVQSESASNAIPYTRSIARESGWQWQIPLQHRVGNGLVYSSRYLSDENAKQQLLNNLPAKPLTEPRIIKFKTGRRLKQWHKNVVSVGLSSGFLEPLESTSIHLIQSAAIRLIKFFPHQGIKQNLVDEFNKQSKTEFERIRDFIILHYKLTERDDSPFWRLCKGMDIPSSLAKKIALYKTSGKLVREDDELFAEVAWQQVLIGQGLIAEDYHPLTNALTDNQLNELFSNLKTLINSTVEQLPSHSEFLEKIQN

SEQ ID NO: 87087 - protein, 506 aa, Lysobacter sp.
  misc_feature (1)..(506): tr|A0A0Q7PMW2|A0A0Q7PMW2_9GAMM Tryptophan halogenase OS =Lysobacter sp. Root494 OX=1736549 GN=ASD14_07880 PE=4 SV=1
MTESRIRKVVIAGGGTAGWIAATALSHQFRDQLEIVLIESEQIGTIGVGESTIPPIRAFHRFVQIDEREFMREVACTFKLGISFEDWHRPEARYFHPFGITGHGTMACEFHHFWLDSLRRGMASDIGDFCLESVAARAQRFALLQQPEINYAYHLDAGMYARFLRRIAERHGVTRIEGKIRDVRQDPGSGFVEALTLEDGQVVDGDLFIDCTGFRGLLIEQTLQTGYEDWSHWLPCDRAVALQTEAVGPPVPYTRAIGHEAGWRWQIPLQHRVGNGLVYSSRHMSDDEAITKLLRDVEGRPLIQPRVVPFRTGRRLRMWNRNVVALGLASGFVEPLESTSIHLAITGVISLIHLFPFAGIAPSLVDRYNEVTRAELEHVRDFIVLHYHANEREEPMWKQCREMELPESLAARVDAWRERAHAWQEPNELFRVDSWLHVMLGQGLQPAQHHPLARALSDDDMRRLLASIRQPIEQAVAKMPSQQDFIERYCKAGPEVWGARQPALQA

SEQ ID NO: 87088 - protein, 496 aa, Cellvibrio sp.
  misc_feature (1)..(496): tr|A0A4R7BQ92|A0A4R7BQ92_9GAMM Tryptophan halogenase OS =Cellvibrio sp. YR554 OX=2135765 GN=C8K91_101637 PE=4 S V=1
MKKNNRIVIVGGGSAGWMTAAALSNAFGATKQITLIESDAIGTVGVGEATIPAVKSFNKLLGIDEAEFLKTTQGTFKLGIQFENWGAQGDVYMHPFGLVGKDSWMANFQHFWLKASRMGIAKSYFDYSLNIRSALGNKFLIDPNSGVDYAYHFDAGLYAAYLRKYSEARSVTRIEGMIDRVQTRTDDGFVESVTLRGGELIAGDIFIDCSGFRALLIEHTLHTGVEDWSHWLPCDRAIAVQTESVGEPAPYTRSIAHHCGWQWRIPLQHRVGNGLVYCSRYSSDEDAKQLLLANLEGAIRTEPRLIKFKTGRALKQWNKNCIAIGLSSGFLEPLESTSLHLIQTGIVRLIRMFPGAEINPAEVDEYNRQSRYEYERIRDFIILHYHVTQRNDSPFWNFCRTMDIPETLARKIQVYKNTTSVFKEQDELFHEGSWQQVMLGQGITPADYHPVVDKLSNAELQRLMQSIESEHDQCLARFPSHQQFIDHYCKALAPSA

SEQ ID NO: 87089 - protein, 511 aa, Cellvibrio sp.
  misc_feature (1)..(511): tr|A0A4R7BDB1|A0A4R7BDB1_9GAMM Tryptophan halogenase OS =Cellvibrio sp. YR554 OX=2135765 GN=C8K91_10467 PE=4 SV =1
MSIESIQNLVIVGGGTAGWMSAALLGKVLGKQINITLVESDAIGTVGVGEATIPPLLTFHSLLGINENDFVKATQATYKLGIRFENWGKQGVSYIHPFGRYGDNFDMVAFNQYWLRLNALGQAAPLEDFSLCALAARLGRFSRPPTNDPRSIWSTFSYAFHFDAGLYAKFLRQYAEQHGVVRIEGKITHAEQRPDDGFVQSIVLESGKKINGDFFIDCSGFRGLLIEETLKTGYDDWSHWLPCNRAVAIPSASTLAPQPFTRSIALKAGWQWRIPLQHRIGNGHVYSSAYMSDDEAVSVLLNNIDGEPLKDPNYIRFTTGARKKVWNKNVLAIGLASGFLEPLESTSIHLIQRGLSKLISWFPDKKFEQKNIDEYNRLHTREVERVRDFIILHYKTTQRCDSDFWNYCRAMEIPEELQNKLDTFAATGRLIELPGDTFQEASWLSVMLGQGIKPLTYDPIAEFYDLSRLKMVMEKMRGMMAETVQSMPLHSEYIARHCAASSDTFARIKTM

SEQ ID NO: 87090 - protein, 529 aa, Sphingomonas trueperi
  misc_feature (1)..(529): tr|A0A543LTY5|A0A543LTY5_9SPHN Tryptophan halogenase OS =Sphingomonas trueperi OX=53317 GN=FHW45_3218 PE=4 SV=1
MSVSSGIPFFFHGSARVKRVQNIVIVGGGTAGWLTAGVIAARHQSRMPGGFTVTLVESPITPIIGVGEGTWPTLRTTLAKIGVSETDFFRECDAAFKQGALFARWTTGAADDAYYHPLMLPQGFHQLSLVPHWITDSKGRSFCDTVTPQGRICDAGLAPKTIATPEYDGQANYAYHLDAGKFAPFLTRHCTTKLGVRHVLADVRAVELAENGDIAAIDTEQAGQIEGDLFVDCTGFRSLLLGEAMGVKFKDCGDVLFCDAALAAQVPYPEENAPIATHTLSTAQGSGWIWDIGLPTRRGTGYVYSTAHTSDDQAEATLRAYLGPAGADVAVRRIPIRSGHREIFWKNNVVAVGLAAGFLEPLEASAIVLIELSAKLIAEQMPAVREVMDVVAKRFNATTLYRWGRIIDFLKLHYVLTKRTDTAFWRDNLLPETIPERLQELLTLWRYQPPWFHDEFDRVEEVFPPASYQYVLYGMGFRSEVEPQALSGDQRLAERAMRENAAQTERLCAGLPRHRDLIRKIHEHGLQPV

SEQ ID NO: 87091 - protein, 508 aa, Cellvibrio sp.
  misc_feature (1)..(508): tr|A0A4R7BMM4|A0A4R7BMM4_9GAMM Tryptophan halogenase OS =Cellvibrio sp. YR554 OX=2135765 GN=C8K91_101423 PE=4 S V=1
MKIKRIAIVGGGNAGWLAANHLGLEMLRDPEIEITLIESKDIPVIGVGEGTIPLIRTSLQSFGISEADILLQCDATFKTAIKFSNWMSAEKYGSDNFYYHTFDAPFPGGFDVTQYWLGNRSDAYFSKLSPAYYVAERNRCPKRTDYPPYKGVVNYAYHFDAAKFTSLLTSNAKKRFGIRHIHETIEQVVLHADGSIKGLQYASGGSEDFDFYIDCSGFASLLIGEALKVPFIDKSHQILTDTALALQVGTAPDAELFPYTKAVAHGAGWIWDIPLTTRRGTGLVYSAQHMTDEEALATFSRYHGKNLENADVRKIPMKAGYRQKLWEKNCVTLGLAQGFVEPLEATSLFVTDFCAGMIAKKIPLNSEEIPVCEKSCNDISALIWERIFDFIQLHYCISDRRDTPFWRDVTEHVPLSDLLSERLALWQYAIPQRTDFASTFDFFHTESYLSVLYGMNFPTRAPIVGERVSNFSREKIAAHLETSKQMADSLMPQRRWLTELNAFAAKRP

SEQ ID NO: 87092 - protein, 496 aa, Unknown
  misc_feature (1)..(496): tr|H3NUP0|H3NUP0_9GAMM Tryptophan halogenase OS=gamma p roteobacterium HIMB55 OX=745014 GN=OMB55_00012400 PE=4 SV=1
MNQRTVEKVVIAGGGTAGWMAAAALSRLVGRKISVTLVESEEIGTVGVGEATIPTILTINRLLQIPEPDFIKLTSGTFKLGIRFENWQKQGEDYIHSFGDTGKGSWAAGFHHFWLRAKEMGLAEDYGEYCTELKAAEAERFAITSQNKLNYAYHLDASKYGMYLRKLAESSGATRIEGKIQRVETSSEDGFIEALHLEDGQRIEGDLFIDCTGFRALLSEGALQTGFDDWSHWLPANRAWAVQSELNEHPKPYTRAIAHKVGWQWRIPLQHRAGNGLVYSNDFMDEETARDLLLANVPDKPLTDPRPIKFVTGQRKQYWNKNCIAIGLSSGFIEPLESTSIHFIQNGIMWLLLMFPDTCIEPSTVNEYNRTMRSEAEHIRDFIVLHYTLNQRYGDPFWDHCRNMDLPDSLKHRMELFERSARVFKPQDDVFAENSWVQVMMGQGMYPEGYHNIAQAMSESQMTAFLKGIQHEVAQTVAKLPEHGAFVKTLVQHAKV

SEQ ID NO: 87093 - protein, 139 aa, Unknown
  misc_feature (1)..(139): tr|A0A2E0JYY7|A0A2E0JYY7_9PROT Tryptophan halogenase (F ragment) OS=SAR116 cluster bacterium OX=2024888 GN=CMN4 9_04925 PE=4 SV=1
MSERIQKVVIVGGGSAGWLTANILAARFQAGNSGLCITLVESPNVPTVGVGEGTWPSMRTTLKSIGIDEADFIRQCDASMKQGTWFKDWITLGDEPYYHPFSLPEGFDTVNLAEHWLNGEAGELSFAQAVTPQYAVCEL

SEQ ID NO: 87094 - protein, 501 aa, Streptomyces sp.
  misc_feature (1)..(501): tr|A0A1Q4WCL7|A0A1Q4WCL7_9ACTN Tryptophan halogenase OS =Streptomyces sp. CB02056 OX=1703924 GN=AMK13_14325 PE= 4 SV=1
MTASYLKAAFEDRVDITLVESGNISTVGVGEATFSDIRHFFEFLGLKEKDWMPACNATYKLAVRFEDWREPGHYFYHPFEQMRSVNGFPLTDWWLKQGPTSRFDKDCFVMASVIDAGLSPRHLDGALIDQPFDEGADEMQGLTMSEHQGKTQFPYAYQFEAALLAKYLTQYATDRGVKRIVDDVQDVRLDDRGWISGLRTAEHGELTGDLFIDCTGFRGLLLNKALEEPFISYQDTLPNDSAVALQVPMDMAKRGVLPCTTATAQDAGWIWTIPLMGRVGTGYVYAKDYLSPEEAERTLRAFVGPAAADVEANHIRMRIGRSRNSWSRNCVAVGLASGFVEPLESTGIFFIHHAIEQLVKYFPAQDWNPVRRDLYNRAVAHVMDGVREFLVLHYVAAKRTDTQYWRDTKTRKIPDSLAERLELWKAQLPDSETVFPYYHGLPPYSYMSVLLGMGGIEVAHSPALDLSDGAAAEREFAQIREKTERLVATLPKAYDYFARMR

SEQ ID NO: 87095 - protein, 522 aa, Unknown
  misc_feature (1)..(522): tr|H3NUN7|H3NUN7_9GAMM Tryptophan halogenase OS=gamma p roteobacterium HIMB55 OX=745014 GN=OMB55_00012370 PE=4 SV=1
MADQHIQDIVIVGGGTAGWLTANIIAARFRPEQGLGVRVTLVESPNVPTIGVGEGTWPSMRTTLKDIGISEADFIRSCDASFKQGTWFKDWISKGDQPYYHPFSLPEGFDTVNLAEHWLAGAAGEIPFAEAVTPQHAVCELGKAPKQIGIPNYAYTVNYGYHLDAGKFASLLTTNATKKLGVTHVSADVVSVTNDHEGYITSVMTEQAGEIHGDLFIDCSGFQSLLLGQHFGVENVSIDHYLFNNAAVALQVPYAEADAPIATTTHSTAQKNGWIWDIGLQHRRGIGHVFSKAFQTHDQTLQVLDAYLKETGHIAGLDNLAPRLLEFEPGYKRHFWVKNCLGIGLSAGFIEPLEASALVLVELSATALANQMPRHRGDMEVISGRFNREFASRWSQIIDFLKLHYVLSKRDDSAYWQENREVGSIPDSLKENLVVWANRPPWYHDDLRRDEMFPAASYQYVLYGMGFESQPAFMATRSGDRQREVAQRLFAETQKKAGKYGQFLPPNRFLMNQLREQDFARI

SEQ ID NO: 87096 - protein, 510 aa, Streptomyces scabrisporus
  misc_feature (1)..(510): tr|A0A1T3NS36|A0A1T3NS36_9ACTN Tryptophan halogenase OS =Streptomyces scabrisporus OX=159449 GN=B4N89_00365 PE= 4 SV=1
MIRNVVIVGGGTAGWMTATYLKQTFRDEVSVTVVESERVGTVGVGEATFSTIRHFFAYLGLEERDWMPSCAGSYKLGIRYANWREVGTYFYHPFERLPVLDGFTLDDWWLHLDGDVENFDTSCLLLSALCEANRSPRLLDGSLFTTLLDREIGNANEQRTQFPYAYHFDADLLAKFLTTFGVERGVRHVVDDVVEVRRDERGWIDHLVTTEHGDIPGDLFVDCTGFRGLLINGVLEEPFESFEDVLPNNRAVALRVPADPGREMAPYTSATAAEAGWIWTIPLYERVGTGYVYSDEFCDPAEAERTLRRFAAPDRPDLEANHIRMRIGRNRNSWVKNCVAIGLSSGFVEPLESTGIFFIQHGIEQLVNYFPDRDWDPALAVRYNRSVAEVIDGVKEFLVLHYCAAGREDTPYWKAAKSRALPEGLAERLESWRTLLPEPDTIYPRFHGFEAYNWKVMLIGLGKAPARPRPALAGLDPSGAMAEFAAIRRQAERLVAELPSCREYVSRLHG

SEQ ID NO: 87097 - protein, 506 aa, Cellvibrio sp.
  misc_feature (1)..(506): tr|A0A4R7BA20|A0A4R7BA20_9GAMM Tryptophan halogenase OS =Cellvibrio sp. YR554 OX=2135765 GN=C8K91_10678 PE=4 SV =1
MSSSTKRIVILGGGTAGWITANLMATHWEQQGFEITLVESPDIGIIGVGEGSTPPLRGFMNAIGVKESDWMHECGATYKVGITFKDWSVKPGFSHYFHPFVSQPDEFTAPAFFYNSFLRRKGINLEGHPDHFFLATELAKQKLAPVAPPNFPFEINYGYHFDSALLGKFLARVAARKGVKYVQATVNEVVLDQQGNIDYLKSVEGQIIKADFYVDSTGFRSQLLQQALKVPFISCAESLFNDSAVVFPTPQTGDVEVQTIATALKNGWAWTIPLTHRVGNGYVYSSRFCSKDDAETEFRKHLGLLDSAVEARHLQFKVGRAAEHWAKNCLAVGLSQGFIEPLEATALDMVQETVVRFIDAYNRGNFTDQYRAEFNQRISTRFDAVRDYIVCHYRISSRTDTEYWIENGRNEKISPSLRSILSSWVAGKNITDELEKQKLDAYFPNVSWNCLLTGKGLYPLQEQLVAGNEMANKYDVAKLQHFIKGCALNFKPHREQLALLAQFSQQ

SEQ ID NO: 87098 - protein, 499 aa, Cellvibrio sp.
  misc_feature (1)..(499): tr|A0A4R7BB63|A0A4R7BB63_9GAMM Tryptophan halogenase OS =Cellvibrio sp. YR554 OX=2135765 GN=C8K91_107142 PE=4 S V=1
MQAVNNVVIVGGGTAGWLAAAAIGKIYQNKVKVTLLESDAIGTVGVGEATIPTMMAFHKLIGIPEAEMMRATHATFKLGINFKNWGEIGEDYLHAFGQIGRIFWGGEFQHFWARAKKLGVNAPYGAYCFENEAARAGKFAISENPVLNYAFHFDAGLYAKYLRNFSEALGVVRQEGTVESVQQDSDSGYITSVTLESGAVLAGDFFIDCTGFRGLLIEETLNTGYENWQHWLPCDSALAVQSAKTGPATAYTRATAHEFGWQWRIPLQNRTGNGVVYSSQFADRNWAEKTLAKNIDGKMLTEPRLIQFKTGRRKLSWNKNCVALGLSSGFLEPLESTSIHMVTSGLIRLLRLFPLRGIQPVLVEEFNRQSKEEAESIRDFIILHYHATRRTDTDFWNYVRTMSVPDSLRHRIDMFVESGMMFLGGEELFRTNGWSQVLIGQGFAPKNYQPIVDNMADAEFVAYMKGFRDHIAVNVSLLPRHEEFIAQYCSMNEELPQSA

SEQ ID NO: 87099 - protein, 615 aa, Nostocales cyanobacterium
  misc_feature (1)..(615): tr|A0A1Y0RNN4|A0A1Y0RNN4_9CYAN Tryptophan halogenase OS =Nostocales cyanobacterium HT-58-2 OX=1940762 GN=BZZ01_ 17200 PE=4 SV=1
MNTIQQQEYDVVIMGAGFVGVCQARHLLLKVPNIRIALIDPRPEERTDKDLKLGESMVEIATLFVSKELGLHEYLIENHPPKSGLNFHWAKDPAKTETTDDHYHVWSNRRSPIQTFQMNRAKFERDLLKMNKAMGATFYNGRVVDVDLTPGDALKTVKVKLGNEDIELKAKHVIDGSGRKFIIGHKTDNLLFGPENLFGVNSGSAWVRVKYVDRTIFHDGYDPYGATCSHYYATNHWFGHGHWLWMIPTDKDTQEISIGVIHHHDVIPASDINTQEKFYAFLKANHTNLYRLLTSGENVDFHYLPRLAHKSKVMFSPDNWYVLGDAACIFDAFYSLGTTMISFEIESVTEIIRAKLAGEPDAEEKRAIYNSFNVAYTSTVNHAMKDHAKHLGHASIMSWRIYFEYMWFFGFILPMYVGKWFLDPQYIRAYLKNAGVGKRVISDVYEQFSKLVDRGANIGLMDAYRADQLLGHYSTIKHFGNYLENAKLEPKKHNIFTSLTYAYFYLAIWYIMFQWKGFGLKGLLAPRSLYNVFSLLSSSASFGFSALGYWLKTRGVPTNSQVAKMRQEFESYQYRPELQPWTQDITALRVKAQGAGDQQLNSTNVSKVREVAVSG

SEQ ID NO: 87100 - protein, 496 aa, Sphingomonas trueperi
  misc_feature (1)..(496): tr|A0A543LP60|A0A543LP60_9SPHN Tryptophan halogenase OS =Sphingomonas trueperi OX=53317 GN=FHW45_4371 PE=4 SV=1
MDGQKFRVVIAGGGTAGWVAAAALVRHLGPNLDITLVESDAIGTVGVGESTIPTAWTFHKLLGINEQVFLRETNATFKLGISFENWLRDGDRYFHPFGSVGRAMPLCDFQHFWLEAQRRGFGGDLGDYSLETQAALAEKFATGEPMPLAYAYHLDATAYAAFLRGLAEPAGVRRVEGRIIEVEQAQDGDIAALVLEGGLRIEGDLFIDCTGFRALLIEETLKTGFDDWSHWLPTNRAFAVQSETTEAPVPYTRAIAHGAGWRWRIPLQHRMGNGFVYASDYLSDDEAKAQLLAAVPGRTLFDPRLIRFTTGMRKKAWNRNCIALGLSSGFIEPLESTSIHLVMIAVTRLLQNFPFRRDMAALSARFNAQSRAESEHIRDFIILHYKLNDRPEPFWRDHAARAVPDSLAARIALFEEGASTYQEGTDLFRIDSWNAVMLGQGVRPRDHHHMPAQIPSEDLERALGDLRAGIAAQLAKLPGHAEFIARYAAAKVPAAA

SEQ ID NO: 87101 - protein, 507 aa, Caulobacter henricii
  misc_feature (1)..(507): tr|A0A0P0P1U0|A0A0P0P1U0_9CAUL Tryptophan halogenase OS =Caulobacter henricii OX=69395 GN=AQ619_13170 PE=4 SV=1
MNQHAPRRVVIVGGGTAGWMAAAALSKLLKGAYGPVTLIESEEIGTVGVGEATVPPIRLFNHLLGIDENAFLQACQGSFKLGIEFDGWSGEGRRYLHPFGTYGASIDGVSFHQHWLSQRARGDTSELDDYCVAAVAARMGRFSRGDDEPRSVFSTFSYAFHFDAGLYARFLRERAEAQGVTRIEGKIASVQQNGQSGDVTGVRLEDGETVEGDFFIDCSGFRGLLIEGALKTGYEDWTHWLPCDRAVAVPCENGGAFTPYTRSTAREAGWQWRIPLQHRIGNGYVYSSRHISDDDAAATLMANLDGAAQADPRFLRFVTGRRKKLWNRNVVALGLASGFLEPLESTSIHLIQTAIIRLLSLLPLGDDDPVARAEYNRLSILEMEHIRDFIILHYFINGRSGPLWEACRAMAVPDSLHRKLDLFRTRGKVVRYDDELFAEASWVAVLLGQGIVPQGYEPMADARDPADVARRLAGMRGHIARVVERLPTHAAFIAEHCRAPALTCDSR

SEQ ID NO: 87102 - protein, 510 aa, Cellvibrio sp.
  misc_feature (1)..(510): tr|A0A4R7BPI7|A0A4R7BPI7_9GAMM Tryptophan halogenase OS =Cellvibrio sp. YR554 OX=2135765 GN=C8K91_101737 PE=4 S V=1
MPNQQMPHAPVKKIVIVGGGTAGWMAAASLSRFAMGRELKITLIESTIIGTVGVGEATIPSIVNFNNSIGLDELEFIRATRASFKLGIQFEDWRTSGDRFFHPFADYGINFNGVEFQHYFYRLQKNNPTENLRDYSIACQLAAHNHFAQPLETPNNPLADFSYAYHFDATLYAKVLRELAVSRGVVHIDEKVERVNLRETDGFIASVLLANGQVVDGDLFIDCTGFKGLLIEETLKTGYEDWKDWLLCDSAVAVQCEISGEPTPYTRVSALDAGWMWQIPLQHRMGNGYVFSSRFLDKDTAAQTLLHKISGTPITNPKPFSFQAGRRKKVWNKNCYALGLASGFLEPLESTSISLIQTGITHLLTFFPDMSFDPAMISEVNRRHQHEMERIRDFIILHYKLTQRTDSEFWRYCQAMEIPDSLQHKIELFKSCGQILQHEPEAFEKSSWLSIYHGFGVTPLRTDNRIDHLKDADIKMQLEKIKQSLAQAGKNANTHGEFIRKHCTAPDFDQ

SEQ ID NO: 87103 - protein, 502 aa, Cellvibrio sp.
  misc_feature (1)..(502): tr|A0A4R7BLH2|A0A4R7BLH2_9GAMM Tryptophan halogenase OS =Cellvibrio sp. YR554 OX=2135765 GN=C8K91_101736 PE=4 S V=1
MKKIVIVGGGTAGWMSALIMAREWIKKGFSISLLESPEVGIIGVGEGSTPALKMFFDALNIAESEWMPECNATYKCGITFDKWSTKPGYESYFHPFSAALDRQTLPMFTHNVQARLRGADVYAHPDRFFISSRISNQCLAPVAPENFPFDVHYGYHFDAVLLGRFLRKKANELGVQHIIGHVVDVQQQESGDISALLVDNNERIEADFFVDCTGFSALLLQKTLKVPFVSYSNNLLNDAAVALPTDIGEKIPAQTLSTAMKSGWAWKIPLTNRYGNGYVYSSAFCSADEAEQELREHLGVLDADIPVRHLKMKIGRVEQHWSNNCLAVGLSQGFIEPLEATALFLVQQTAAVFAEYFARGDFTNRYQVEFNQRINGHFDGVRDYIVTHYKTSSRTDTEYWRANTADQQDISPVMCELYSAWFAGKELAAEVARLNIGAYYPAPSWYCILSGMGIFPSTQQMRKPNTDEARFDLSSLDEFLRRCTLNFSDHRAVLNNLATAKR

SEQ ID NO: 87104 - protein, 358 aa, Amycolatopsis thailandensis
  misc_feature (1)..(358): tr|A0A229SBY7|A0A229SBY7_9PSEU Tryptophan halogenase (F ragment) OS=Amycolatopsis thailandensis OX=589330 GN=CF P71_13740 PE=4 SV=1
MSVEEFDVVVAGGGPSGSTLATFVAMQGHRVLLLEKELFPRYQIGESLLPSTIHGVCQMLGVTDELAAAGFPIKRGGTFRWGARPEPWTFSFSVSPRITGPSSFAYQVERAKFDQILLNNAKRKGVDVREECSVTDVLEEGERVTGVRYTDRDGNEREVKATFVIDASGNKSRLYSKVGGSRNYSEFFRSLALFGYFEGGKRLSEPYSGNILSVAFDNGWFWYIPLSDTLTSVGAVVRREDADKVQGDREKALSSLIAEAPLIAEYLKDAKRVTTGKYGEIRVRKDYSYNQTEFWRPGMILVGDAACFVDPVFSSGVHLATYSGLLAARSINSVLAGDLDEKTALTEFEARYRREYSV

SEQ ID NO: 87105 - protein, 529 aa, Cellvibrio sp.
  misc_feature (1)..(529): tr|A0A4R7BH22|A0A4R7BH22_9GAMM Tryptophan halogenase OS =Cellvibrio sp. YR554 OX=2135765 GN=C8K91_103267 PE=4 S V=1
MTDQITRVVIVGGGSAGWLAAGIIAASSPAHIQTTLIESPDIKPIGVGEGTWPTMRVTLETMGISETDFFRECDASFKQGSKFSRWTSLSKDDDYYHPFTAPAKYHEINLAPFWLPFKDKINFANAVCPQADICDLGYAPKQMSTAEFGAVLNYGYHLDAGKFAPFLHKHCVEKLGVYYASANVTGINSRENGDIKSVATDACGNIEGDLFIDCTGLQSLLLGKHYAVPFISHKDTLFNDSALAVQIPYSDGANNIASHTLSTAQTNGWIWDIGLQSRRGIGHVFSSAYSTDELAERELRNYIAPAVGQKMAEELAVRKIAFNPGHRQSFWNKNCVAVGLSAGFIEPLEATALVLIELSAKIIGEQFPLNRSAMDIVAKRFNNTLGHHWQRIIDFLKLHYVLTQRTDTEYWRDNCRAETIPTSLRESLELWKVQSPWLQDELLRDEMFPSASYQYIYYGMKANTFVPEMAIQNQVTPKQAASKQLLSKKLKQAENLFMENAQHIQQLKKALQPNRDLIEKIKQFGLQKI

SEQ ID NO: 87106 - protein, 500 aa, Alteromonas macleodii
  misc_feature (1)..(500): tr|K0EGK6|K0EGK6_ALTMB Tryptophan halogenase OS=Alterom onas macleodii (strain Balearic Sea AD45) OX=1004787 GN =AMBAS45_13865 PE=4 SV=1
MTTPHRIVIAGGGTAGWMAANLLAHRWANQAVTITLIESEDIGTIGVGEGSTPTLKRFFQTLDIPEYDWMEECQATYKVNIKFTGWNGNDSHSYSHPFISQLDVFSERAFHVNALTRRLGLDVETRPDKFLMAGYLAKKNLAPLPSHNFPFDIEYGYHFDSLKLGRFLRERAKSKGVYHVVGNIESVHTSPSGDISHLVCQDGQKLDGDLFIDCTGFSGLLLQKTLGVPFRDFSDNLFNDSAVVLPTPACANLPVETESVAMSNGWRWQIPLRNRTGNGYVYSQEYQEKDAAECELRRALGMENTDVEAKHLSMRVGQCERHWEKNCLALGLSQGFIEPLEATALHLVQTSIELFADNYSFNETSAQQRQAFNREVSERFERVRDYIVCHYKLNGRNDSDYWRDNRTNMKLSESLLSLLDVWYRKGDIVEEIKRQGIGRHFSTTSWHCLLSGYGVYPPPALNQPASLKESGDLFEEKKLAAFFNRCSLNFDKQSTLFNAG

SEQ ID NO: 87107 - protein, 431 aa, Acinetobacter sp.
  misc_feature (1)..(431): tr|K9A6X9|K9A6X9_9GAMM Tryptophan halogenase domain pro tein OS=Acinetobacter sp. WC-141 OX=903915 GN=ACINWC141 _0551 PE=4 SV=1
MSTLEKIDVVIIGAGPSGSSAAALLRKKGYTVTVIEKQYFPRFSIGESLLPQSMAFLEEAGLLETVREHVEQYAFQFKNGAAFLRGKQRSFYDFTEKFTDGPGTTWQVRRADFDNLLAKQAQAYGADIRFGHEVLDVDVASEQPLLTVLDEEQQRYQIQTKFLLDASGFGRILPKLLDLESPSNFPVRRALFTHIEDGIADDPEFDRNKILITVHEKDHRAWYWLIPFADGRASFGIVAEQDFFDKYTVENASDNEPEAMFKRILADEPSLSHVLHRAKFDTPVRTLVGYSANVKHLADRNYALLGNAGEFLDPVFSSGVTIALKSSSLAVPLVERVLQGEQVDWLQEYEKPLRRGIQVFRAYVESWYEGEFQDVVFSQNQNEGIRRMISSLLAGYAWDEKNPIHKNAKRRLSTLAEYCREGLTQEQVLEG

SEQ ID NO: 87108 - protein, 497 aa, Cellvibrio sp.
  misc_feature (1)..(497): tr|A0A4R7BK42|A0A4R7BK42_9GAMM Tryptophan halogenase OS =Cellvibrio sp. YR554 OX=2135765 GN=C8K91_103270 PE=4 S V=1
MIGDQHVKNVVIVGGGTAGWMAAASFAKLLGKSIAVTLIESDEISTVGVGEATVPPLILLNRYLEINEQEFLAFVKGSIKLGISFENWKNLNEDYFHMFGTPGKDTWAASFQHFWLRGKELGVNYPLGDYSLEHKAAEHNKFAHMPNSSLNYAYHLDAGFYAKFLRNIAEKAGASRIEGKVVNVALDEDEYIKSIELASGQVVAGDLFIDCSGFRGLLIEQALHTGYEDWSHWLPCDSAVAVQTESVRDPVPYTRSIAHQSGWQWQIPLQHRVGNGLVYCSKYISDDDAKKLLLEHIEGRLISEPKIIKYRTGQRLKHWNKNCVALGLASGFIEPLESTSIHLIQRGITSLIQMFPHTGIRKCDMDEYNEQMKVEILNVRDFIILHYHLTDRDDSPFWQYCKNMPIPESLEKRMRMFRETGKVFVKSYELFSESSWLQVMVGQGLMPENYHPVANEIPAEGLVKFLADIRAQVNQNLRKMPTHKEYLDFYCKASDWD

SEQ ID NO: 87109 - protein, 602 aa, Microcystis aeruginosa
  misc_feature (1)..(602): tr|A0A3N0X535|A0A3N0X535_MICAE Tryptophan halogenase OS =Microcystis aeruginosa FACHB-524 OX=2486203 GN=ED562_0 2460 PE=4 SV=1
MNYTITQSREYDVVIMGAGFAGLCQARHLMLNIPNIRVALIDPRPVERTDKDLKIGESLIEVAALFLCKELGLHDYLIENHPPKSGLNFHWPKDPAKTETLDDYYHVWANRQTPVGSFHLQRAKFEQDLLVMNCQMGADFYEGRVKDVALTSGDELKTVYAKVGEENITLQAKHVIDAAGKNFIIGRKTDNVLSGPENLLGLNNGSAWLRVKNIDRTIFHSGYHPEGASTSHYYATNHYFGQGHWLWMIPIDKHSMELSIGIIHHHDVIPAQSINNLEKFSNFLKSNHTILSRLIESGEVVDFHYWPKIAHKSKVLFSPDNWYVIGDAAHIFDAFYSYGTTMIAFEVESVTEIIRAKLAEEAAAEQKRSAYNDFNLAYARTVNCLYRDHAYQLGHASVMSWRIYFEYMWWFGVHVPTYIGKWHLDLNFIPRYVTIADGNVNGIFADLCQEFHQLVSQGANIGLMDAYRADQLLGGYGTLKHFDDFLENTKFEPRRCNVFASMKAAYFYIAIWYALFQWKAFGIAGWLNPKHWYYFGRMLKLSIQATIAEVIYKRKTRGIADNSQIEKMREEFKNYHYQPQKKSPSVVQNVVGERVTIESFPA

SEQ ID NO: 87110 - protein, 505 aa, Erythrobacter sp.
  misc_feature (1)..(505): tr|A0A1F9ZG08|A0A1F9ZG08_9SPHN Tryptophan halogenase OS =Erythrobacter sp. RIFCSPHIGHO2_12_FULL_63_10 OX=179797 5 GN=A3J40_07870 PE=4 SV=1
MAQEFAPIEQILIVGGGSAGWMTAAALAESLGTACRITLVESEEIGIIGVGEATIPPIKYFNQRLGIDEATFVRETSGSFKLGIQFVDWARIGHSYFHPFGQHGAEFDPVPFYHYWMRESLAGNVEGPIDDFSMAWAMARAGKFSHPLADRRQIQSTFDYAYHFDASLYAAFLRKYAEARGVTRVEGRVVDVALDPESGAIGSITLADGQKLEAEFFVDCSGFRGLLIEDALEAGYENWQHWLPCDRAIAAPCARSAVTTPYTRSTALAAGWQWRIPLQHRTGNGYVHCSSFIREDEATGALVGALDGELLGDPRTVRFVTGRRREFWVKNCVAIGLSAGFMEPLESTALHLIQYGILRLLALFPDREMSPLLAREYNAQTATEYERVRDFLILHYKANQRGDAELWRYCAAMDIPDSLQYKIDHFRNYGLLVSDERELFNNPSWIAVYLGQGIVPRRAPAITAMRPGVPVADRLRAISLAMDEAVAAMPEHDTFIAQHCPSPYR

SEQ ID NO: 87111 - protein, 499 aa, Cellvibrio sp.
  misc_feature (1)..(499): tr|A0A1Y0FZP2|A0A1Y0FZP2_9GAMM Uncharacterized protein OS=Cellvibrio sp. PSBB006 OX=1987723 GN=CBR65_16735 PE= 4 SV=1
MNSEAIQNIVIVGGGVVGWTAAAILARALKSEPIKITLLDLPGLPADDMAESSLPGIRPLHQMLGFDERQLMSITGATFKLGTEYQGNNARSFIHPLGRLATTTAAFDQQVIRLHHAGEHISYDDFFLAAVAARHGKFAFPEQNKKNILSTLSCGLHLNVDAYKKYLRDYAHYLQVTSLQARVQGVELCPDSGFINAVVFDDNTSLSGDLFIDCSGEMSVLIGDPALAVDYCSWAADLPVDRVMNFSIPYGPEESTLRPLTSIQAMPWGWQRTIPLQQHRVQQYIYHSDLLGDETLLAELQRLGLSANATHTSKHIRPGHRTVWWKANCVAIGTAAGNITSLAISELQWAQSALVRLLDYFPHKACKPCNTAEYNRLSLGEFERLRDFHIAHQLLLHTDSAFGRLCQEKSPPITLQHRLDLFRHRGRIGAYEYDVISDQLWAAFFLGLNCWPERYDIMTDALAEKELLQQHQHIRQAVQKTVDAMPNHHEVLARYCPAR

SEQ ID NO: 87112 - protein, 494 aa, Acinetobacter sp.
  misc_feature (1)..(494): tr|N8XK51|N8XK51_9GAMM Uncharacterized protein OS=Acine tobacter sp. CIP 56.2 OX=1144672 GN=F966_02081 PE=4 SV= 1
MLNLRGIQRVCIVGGGTTGWFSALRLRQIFNQSVEVVVISAPEIPIVGVGEGGVVNLLDILAKLEINIKDFIDNTGSTLKLGFRYEQWNTGKKEDYYYHLFPNIDTPEMWDENGYYPFLSLLLNNGLNINSYMEALELCENKVPFNKVIDLLISGNHNFTASLHFDTFKVGQYLKEIALQRSIIHVEDKVEDFCLDAEKGSVTSIQCQNRKIDCDFVIDASGFSRLLIGGKFKTDWISFADTLIMNRALPFHLSHKKEIELVTRATALSSGWVWQIPLQERIGAGYVFNDQFLSDDQAHDEVEKWLGEKIDPIRVIKFEAGYFQKVWVKNVVALGLASGFVEPLEATSIGQMVTQLETLSNFILHNHGVISEQNINYFNKQNGQYWRGIGDFIRMHYDTPREDTPFWKEMKNVPISPEYKELKECWKHRTPRLIDFAEYSLSGTLMFGVPNWFAVGVGTGVIKPESTAAELYALSIDQKRKLAQHLHKMKQKLS

SEQ ID NO: 87113 - protein, 486 aa, Sphingopyxis indica
  misc_feature (1)..(486): tr|A0A239JAL6|A0A239JAL6_9SPHN Tryptophan halogenase OS =Sphingopyxis indica OX=436663 GN=SAMN06295955_109151 P E=4 SV=1
MSAAREPLRRVAVVGAGQVGVLAAIAIKRASPATDVLVVGTPIDPVAFADHIGTALPFTNRLHDRLGVGEEALVRRAGASHRLAMRYTGWAGPGSIGLTAYGGAVDPKLNSAFAREWGGGAHKAAGGAPAGSVGAALAEAGRFMPPGGEAPSPLAEVDYALRWNAPAYRDLLIGIAAQLGVRHHPGPVSAVQTTLDGGIAAIQLAGSDAVAADLLVDASGTAALLSAAQPDRRWIDWRGALPARSLAVAPPAAPRLDLADTIAFTDAGWCWEQAGRDGVTRFLAVPDDVSDAAVEAALGAPPADRFPIDAGRQEQPWTGNVVAIGDAAARFEPLAGVALDLAHRQIDLLLDLFPGRAIDPRERAEYNRRFALMADGARDWIASHYAAPAAAHRLAALERSPALDRMLDQFARRQRLPITEEATVSTSEWAALLHALGVPAQRSALSLAEGEASGRRAAAALDRKVAAALDAAPPYGAWIAHVLREG

SEQ ID NO: 87114 - protein, 277 aa, Caulobacteraceae bacterium
  misc_feature (1)..(277): tr|A0A4Q3TEW0|A0A4Q3TEW0_9CAUL Tryptophan 7-halogenase (Fragment) OS=Caulobacteraceae bacterium OX=1978230 GN= EON96_16020 PE=4 SV=1
MEQADRIRDIVIVGGGTAGWMTASALAKVAGTQSLSITLIESDEIGIVGVGEATIPPILLFNKLLGIDENEFIRETQATFKLGIQFVDWGKLGHTYAHPFGLFGADMNGINFSHYWLRAVRAGADPDNHLFVAEAEAMRLNRFARTPPGGAGDMPRVNYAFQFDASLYAAWLRKYAEKRGVVRREGRIVGATRDGEAGTIRSVTLADGREVKGDLFIDCSGFRGLLIEQEMEAGYEDWTQWLPANRAVAVPCDRVEDPVPYTRSTARESGWQWRIPL

SEQ ID NO: 87115 - protein, 491 aa, Sphingomonas sp.
  misc_feature (1)..(491): tr|A0A1P8PU03|A0A1P8PU03_9SPHN Tryptophan halogenase OS =Sphingomonas sp. LK11 OX=1390395 GN=AV944_09340 PE=4 S V=1
MTDKRIRRIVILGGGTAGWMTAAALSRALAGQGVAITLVESDAIGTIGVGEATIPTIHWFNQIIGLDERQFMAETKATVKLGIEFVGWNGEGSRYFHPFGTYGPPGDGAMFLHRLIRARADGDRAPTEAYSLTARAARAGRFARPVADRRSLLSTLGYAYHFDAGLYARYLRGLAERAGVRRIEGVVASVDQDGESGFVRSLTLDGGQVVAGDLFIDCSGLRALLIGQALDIGFDDWSHWLPCDRAWAAPSAAESDRTPYTRATAAEAGWRWRIPLQHRVGNGYVFSSRFQDEEEARASLIAGMDGPPLAEPRLIRFTPGMRREAWRANVVAIGLSSGFLEPLESTSIHLIQSGIAKLLSLFPAADCSPLLARQFNRVFGQEMLDVRDFLILHYHATTGRDEPMWRERQAMAIPDTLAEKLGHFRGSGRIVLSSDELFRDASWFAVLDGQGERPGDHNPLVEVLGREDNLRQLAALRADIVKTTAAMPPLS

SEQ ID NO: 87116 - protein, 525 aa, Alteromonas sp.
  misc_feature (1)..(525): tr|A0A385N0P4|A0A385N0P4_9ALTE Tryptophan 7-halogenase OS=Alteromonas sp. RKMC-009 OX=2267264 GN=DS731_20230 P E=4 SV=1
MKDTQQLTSVVIAGGGTAGWLTACILAAKHRPGNLSITVIESPGIPTLGVGEGTWPTMRGTLQKIGIDEATFLTACHGSFKQGTSFHHWRKPEASPHQYYHPFSLPFNYFDTDCAAWWQRHQPQMDFASVATSQGAICDRNLAPKQAETPPFAGVVNYGYHLDAVKFAGLLKNHATSESGVTHITGHISSVIPSEDGGIHSVVLDKTGREIEGDIFIDCTGFSARLIGEHCGEPLISCKHILANDSAVAVQCQYAADDSTVASVTRSVAQSKGWIWDIALPERKGAGYVYSSQHCTAEEAIRTLHRYAGSDTSLRDISFGEFSGKAKYFNFEPGYRRSPWQKNCVAIGTSAGFLEPLEASALVMIELAATLLSEQLPRYTNQIAPVARQFNQQLTGKWSRIVDFLKLHYVLSDRDDSAYWQEMRKLSSCSEQLQDWLSMWSTRSPNASDFNLRDEIFPAASYLYVLYGMGFNTAFLPGSADHDSSGHQHAWHKQQQLTRQHLAGLPANRALLNQLTGARQYQVNR

SEQ ID NO: 87117 - protein, 225 aa, Caulobacteraceae bacterium
  misc_feature (1)..(225): tr|A0A4Q3TYW9|A0A4Q3TYW9_9CAUL Tryptophan 7-halogenase (Fragment) OS=Caulobacteraceae bacterium OX=1978230 GN= EON96_04865 PE=4 SV=1
MNSSEQDPRIRSVVIVGGGTAGWMTAAALVQHFRGSPVSITVVESSDIGTIGVGEATIPTIRRFYAQLGLGDAELMAATEATCKLGIRFQDWSGPGSDFIHPFGLYGQELKGIGFHHYWLKARQAGDPAPLADYSLGASLARCGRFTTPSRNPPSTLSVFDWALHLDAGLFAQRLRRYAEEGGCTRIDGRIGEVRLRDDGFVEALALSDGRVVEGDLFVDCSGFR

SEQ ID NO: 87118 - protein, 517 aa, Cellvibrio sp.
  misc_feature (1)..(517): tr|A0A1Y0FZR2|A0A1Y0FZR2_9GAMM Tryptophan halogenase OS =Cellvibrio sp. PSBB006 OX=1987723 GN=CBR65_16730 PE=4 SV=1
MPSQRIQQVVIVGGGTAGWMTAAALARFLPSAICKITLIESEQIGTVGVGEATIPHIRHFNQLLGVDENEFIRATQATYKLGIQFSGWGYPGTSYIHPFGLYGHDISGIDFHHYWLRLRSLGDEAPLENYSIAAVAALAKKFAYPDANPDSPRSDFGYAFHLDASLYAQFLRCYAVQKGVVRIEGKIDQVQFSSTTGFIETVMLESGEQLAGQLFIDCSGFRGLLIEGALKTGYEDWRHWLPCDRAVAMPCERTGDPLPYTRAIAQKVGWQWRIPLQHRTGNGHVYCSDHLSDDEAAYQLRHQIDGEATGEPNFLRFVTGRRKRSWNKNCVAIGLASGFLEPLESTSIYLIQVGILKLLENFPDADFADVDRTEFNRHIDLEYRRVRDFLILHYKANARMGEPFWDACRTMAIPEELERKINLFRESAHIEHYQQGLFMTPSWLAVYIGQGVIPDAYDARVARHTRETIAAYLEKLHQGIRVDVDAMPSHNTAIQHAINAISARYPEASMSLYGLQR

SEQ ID NO: 87119 - protein, 508 aa, Pseudoalteromonas agarivorans
  misc_feature (1)..(508): tr|N6V107|N6V107_9GAMM Tryptophan halogenase OS=Pseudoa lteromonas agarivorans S816 OX=1307437 GN=J139_12578 PE =4 SV=1
MNKAIKTIAVIGGGTAGWLSAAIIASYHQGNKGDGLKVILVESSDIPTIGVGEGTWPTMKNTLQQIGLREVDVFKACNATFKQGGKFVNWTHGNNDFYYHPFTVPLGYGRIDLAPYLDNVENFAQQTNFQHDICEANLAPRGIAQGEYQANCNYAYHLDAGAFAELLKQHCKSKLGIEHIIGTVDQVKLDESGAIDTLTLTDQTRTINADLYIDCTGFSSLLLGQALNVPFKKMDHVLFNDSALAMQVPYDEGDESLASHTIATAQNAGWIWDIGLTHRRGVGHVYSSKFLSDEEAEQNLRNYLGDAAKGLTARKISFESGYREEFWHKNCVAVGMSAGFVEPLEATAIMLVEISSRFVAEHMPADTQVMPIVAKRFNEQMDYRWQRIIDFLKLHYMLTKRPEPYWQAHVQPQSIPQSLQEDLLLWGTRGTLIQDFHGALELFPAASYQYVLYGMGFKPDFTKQAYLYSNDAQANQIIERNSQLTQQMLQTLPPHRAYIEQWLAANPV

SEQ ID NO: 87120 - protein, 518 aa, Pseudoalteromonas agarivorans
  misc_feature (1)..(518): tr|N6WB82|N6WB82_9GAMM Tryptophan halogenase OS=Pseudoa lteromonas agarivorans S816 OX=1307437 GN=J139_01097 PE =4 SV=1
MNQQNKKIKTVVVVGGGIAGWLTAGRLAAHHKSNTPDGLNVVLVESPNVPIIGVGEGTWPTMRSTLIALGISETDFIRECEASFKQGAKFAKWVDGSNDDFYYHPLVLPQGFSKTDMAGHWLNNTAESTSFSNAVCYQEAICEQGLAPKTIRTPEYAALANYAYHLDSAKFAVFLQKHCTQELGVKHFLADVTQVNSAKNGDIASVTTKQQGEISGDLFVDCTGFSSLLLGEHYKVPFMPCDDVLFIDTALAVQVPYENEDESIASHTISTAQEAGWIWDIGLQHRRGVGYVYSSKYSSEAQAREKLKEYVGDKIESLTIRKIPIKSGHRSHFWQNNCVAVGLSAGFLEPLEASALVLVEMSAQMISEQLPHTRDIMDITAKRFNETFSYRWEKIIDFLKLHYILSTRDDNAFWRDNRDPKTIPQSLQDLMKLWQYRAPADHDFTSNNEVFPAASYQYVLYGMGFKSDYSTTSYMLKDTDFAKSQFDKNKSMINQAVTNLPSNRELLNKIKSHGFSTI

SEQ ID NO: 87121 - protein, 517 aa, Fuerstia marisgermanicae
  misc_feature (1)..(517): tr|A0A1P8WC74|A0A1P8WC74_9PLAN Flavin-dependent tryptop han halogenase RebH OS=Fuerstia marisgermanicae OX=1891 926 GN=rebH_2 PE=4 SV=1
MATQTFQNQNNRENLSASRIAIVGGGTAGWMTAALLSHSLSRSECHVTIIDDGKGGIGVGEATIPSIVQLVRTLGGDEAEFLRGCDATWKLGIQFCDWKSDGQTAWHPFGQCGAQIDQRDLFSYWLADQQRPYHSYSVNWAAALAGKSPHARNSLSPIAATGAYAFHLDAAKLAQWLKLRSVANGVEVVGHRVREIVTDDSGQISAVTLDDGSSVAGDLFVDCSGFNSLLMSRRPQEEWVDASEQLLCDRAVTMRLPATKVKAPYTTAKAMSAGWAWDIPLMNRRGVGYVYSSQFVSDDEAAAELQQHVGVTDSAETDTPAFLSMKVGRRVNAWSENVVANGLAAGFVEPLESSGLHLIQTGVERLLKYFPTAKSSQASEAALRTAYNSETAIQFDEIVDFVQLHYLLNDRDEPFWKAAKAAPLSSALQHRLRLYDEIGMLDQLQASAFPDASYYYLLAGNGRLPKRPAALSLAVDKDRLQFVLRAILDQNRNALRELPLHEEMLQQVHATSVAKAS

SEQ ID NO: 87122 - protein, 521 aa, Fuerstia marisgermanicae
  misc_feature (1)..(521): tr|A0A1P8WC54|A0A1P8WC54_9PLAN Flavin-dependent tryptop han halogenase RebH OS=Fuerstia marisgermanicae OX=1891 926 GN=rebH_1 PE=4 SV=1
MNDSTKPDQPSSPTVRFPRRVVILGNDVTVWMAATMLLRHFGRLGIRVTVCPDGPAFTTGFSTYATTTALVDLLKDIGIDEHDMLRACNGTYRLATQFSDWASEGRDFWQPLGMHAQRVDAYPLFDAWFSERKAGRLLRPLHSYAAQWTASLAGKSPHSFSATSAFAKSGHYGFHVDAAGLARWFRSIAVTSGVEEVQAAVEKVAPNGRGGIAQVVCGDGKAVPGDLFLDCRTANDGDASGANWISWNDQFSCDRVASIRTPGKRQVPVFTRVVGHNNGWSRTIPLAAELEHTYAFCSQKESDNDAPKRLQSISNAGMAGSEGVEAKVQVQSIRHGRRSVFWKDNVVALGNAACQLNPVAAMDLHLHQVGIELLMELFPDRKIGRATRAEYNARMSSIADELRDVAELHHALRRSSSANSENGMGTQSAALEQMLAVYDACGAVRATNPESMPSEEIRSFLAGCGRLPDRPSLAIRSIDPNRIQHVLRETVKHNEAAVKDLPLHEELLDWIHAGPFQQSAG

SEQ ID NO: 87123 - protein, 517 aa, Thalassotalea sp.
  misc_feature (1)..(517): tr|A0A4P7JIU5|A0A4P7JIU5_9GAMM Tryptophan 7-halogenase OS=Thalassotalea sp. HSM 43 OX=2552945 GN=E2K93_02195 P E=4 SV=1
MNQSIKHIVIIGGGSAGWLSAGIIASEHKTAADNGVQITLVESPDVQTIGVGEGTWPSMRQTLKKMGISETEFVLNCDASFKQASEFRNWTHGNGDSYFHPFTMPAGYHETNIADFWQQHRQQVSFADATTSQSHICRNGLAPKQISTPEYSFNVNYGYHLDAGKFSTFLQKHCCSKLGVSHVLDHVVKINSHENGDIKSVSTRQHGDIEADLFIDCTGFKSLLLGEHYGIDFISQKHVLFNDRALAVQVPYANDNEPIASHTISTAQSCGWIWDIGLPSRRGIGHVYSSAHISDDAAAAQLREYIRPALGNKADDVALRHIKINPGYRQKFWHKNCVAIGMSAGFIEPLEASALALIELSAKMIAEQLPANRQVMDITAKRFNTKFNHRWQRIIEFLKLHYILSQRDDSQYWRDNRSAESIPEHLQELMQLWQYQSPYGYDSDHSDDLFPAASFQFVLYGMGFETQLPNRQKRHDKSDMANTFFNDNIKQTQQLMRSLGSNRELINKIKKYGFAKL

SEQ ID NO: 87124 - protein, 226 aa, Caulobacteraceae bacterium
  misc_feature (1)..(226): tr|A0A4Q3TDT2|A0A4Q3TDT2_9CAUL Tryptophan halogenase (F ragment) OS=Caulobacteraceae bacterium OX=1978230 GN=EO N96_17215 PE=4 SV=1
VFSGRHLSDDEATATLMAQVEGAPVVNPMVVPFKTGVREKVWDKNVLALGLASGFIEPLESTAIHLIYRGMDFFFRYLPQRDCDPALRDEYNRRMIADYEEIRDFIILHYCTTQRDDTAFWREVRDMEPPANLKHRIELFRVNGTLAEGLDELFRSASWQSVMEGMGIHPRGYHPLVDRIGRDDFPAQLDVARGQLRQTVEGLPTHADFIRDHCAAPTPEPVTMSA

SEQ ID NO: 87125 - protein, 518 aa, Alteromonas sp.
  misc_feature (1)..(518): tr|A0A385MYQ0|A0A385MYQ0_9ALTE Tryptophan 7-halogenase OS=Alteromonas sp. RKMC-009 OX=2267264 GN=DS731_16510 P E=4 SV=1
MSKRVLIVGGGTAGWITAAYMARMLAADTPGGVSITLVESDEIGTLGVGEGTFPIIRKTMKRIGIDESDLIKHADATFKQGIRFNNWKYNPADKSDDNYLHPFQVASQHTDMDLLPYWLLGVAGDVPWAKACSVQSTVIDEKLAPKLITHPQFDAPLNYAYHFDATKLAALVRNKATDTGVRRLVDTIDNVTLAEDGSIASVTAREHGELTADLYIDCTGFRARLIGETLGMPFTSFKKELFCDRAVALQVPYDNPQAGIPSCTYTTAKEAGWIWDIGLHHRRGVGYVYASEYCDEETAVKTLKAHIGPAAEDLSHRLLKFEPGYRQTQWHKNCIGVGLSVGFIEPLEATGISFAEVAALMLCNLFPWSGDYEASARQFNEAMCKRFEHVKDFIKVHYYLSERDDTAFWRDNRAPDSASEYLKGKLAQWRHRPPSFLDIDASHDIFDENSWQYILYGMGFKTDISARADALRFYDDARREFHSIQQQSRNAMTAVPAHRQLINEVASGGFRPRAGGRR

SEQ ID NO: 87126 - protein, 500 aa, Altererythrobacter sp.
  misc_feature (1)..(500): tr|A0A411ZDV5|A0A411ZDV5_9SPHN Tryptophan 7-halogenase OS=Altererythrobacter sp. BPTF-M16 OX=2169535 GN=BPTFM1 6_01541 PE=4 SV=1
MSETGIRKLVIVGGGTAGWIAAAAFARLLGHRISIELVESDAIGTVGVGEATIPQIIRLNTILGLDENDFLKNTYGTFKLGIEFVNWGKLGESYLHTFGDAGLNLANVNFHHYWRRHAQAGSDKDLWHYSLHKMAADQRRFAKLERVGNTAMTGLAYAYHFDASLYAAYLRQYSEARGVKRTEGIVEAVKRDGESGDIRSITLENDVQVDGDFFIDCTGFRSILLGQELGVAYDDWSKWLPCNRALAVPSERLPELPPYTRATAQSAGWQWRIPLQHRTGNGHVYCSEFIEDEQAADILLENLDTKALDEPRPIRFTTGRRQQFWANNCVAIGLASGFLEPLESTSIHLIQSNISRLIELFPRDRINSVDRSEYNRRTIAEFEQIRDFLILHYHQTDRVDSEFWKYCKHMTVPDSLKHKQALFAASGRIGRDFDDLFRDASWVQVMLGQGITPADYNPMADQLSDAQLGQFMGDVRGLIEKSVAGLPSHADYISKHCFAG

SEQ ID NO: 87127 - protein, 267 aa, Caulobacteraceae bacterium
  misc_feature (1)..(267): tr|A0A4Q3SUZ0|A0A4Q3SUZ0_9CAUL Tryptophan 7-halogenase (Fragment) OS=Caulobacteraceae bacterium OX=1978230 GN= EON94_04715 PE=4 SV=1
WTQWLPANRAVAVPCDRVEDPVPYTRSTARESGWQWRIPLQHRTGNGYVFSDAFISEDQATADLMSRLDGAPQADPRVLRFVTGRRRKGWIGNVVAIGLSSGFLEPLESTSIHLIQTAISKLLALFPRARRDDAMADQFNREMDQQYEGVRDFIIAHYKVSTRDDTPFWRHCRDMAVPDSLAAKLELFRARGEVMVENHELFRETNWFPILYGQGLTPEGYHPLADVLSDDDLRLRLSQIRTAIKARVDGLPSHESYLQQCVAGTAR

SEQ ID NO: 87128 - protein, 508 aa, Sphingomonas sp.
  misc_feature (1)..(508): tr|A0A258RY21|A0A258RY21_9SPHN Tryptophan halogenase OS =Sphingomonas sp. 28-63-12 OX=1970434 GN=B7Y47_06300 PE =4 SV=1
MARIERLVILGGGTAGWMTAAALAKTFGRAIAIELLESDAIGTVGVGEATIPTIHWFNQLVGLDEADFVRATKASFKLGIEFVDWARPGHRYFHPFGRYGVELGPVPFHQCWLRAGSDGAKTPLAAYSLATALAAANRFAKPVDDPGSILSTLGYAYHFDASLYAAHLRQRAEANGVRRHEGRVIAIERDPDTGFVTALTSDRGDRLAGDLFVDCSGFRSLLIGNELGAAFEDWSAWLPCDSAVAVPCARAAETTPFTRSTLRPAGWQWRIPLQHRTGNGYVYASRFVSDDEAAATLLANLDGEALADPRVLRFTAGFRRDSWTKNVVAIGLSSGFLEPLESTSIHLIQSGIAKLIALFPDRACDPALARQFNALFGHDMDGIRDFLILHYHATNGHDAPLWRRSRAMTLPDSLVEKEEQYRRTGRLMLSGDELFREASWLAVLNGQGIVAADHSPVADTLDGAANRHQLDQLAAIIARAAPTLPKHDEAIAALLGQAPPRAMALARS

SEQ ID NO: 87129 - protein, 450 aa, Caulobacteraceae bacterium
  misc_feature (1)..(450): tr|A0A4Q3TR86|A0A4Q3TR86_9CAUL Tryptophan 7-halogenase (Fragment) OS=Caulobacteraceae bacterium OX=1978230 GN= EON96_10630 PE=4 SV=1
MHENAIRTVVIVGGGTAGWMTAAALSKRLGRTVAITLIESAEIGTVGVGEATIPPIIDFNKMLEIDENAFVKATQATFKMGIEFRDWGALGDNYLHPFGRFGLDFEGVPFHQQWLKQQAAGQPGDIEAYSLSGTAARAGKFFRPVEDTRNLLSMLAYAFHFDASLYATFLRAYAEERGVVRQEGRVVQVAQRALDGHIESVTLESGAVIAGDLFIDCSGFRGLLIEQTLEAGFEDWAHWLPCDRAVAAPSASSGEPLPLTRSTAREAGWQWRIPLQHRVGNGYVHCSRFISEDEATATLVANLDGELLAEPRTLRFRTGRRQRTWVKNCVAIGLAAGFLEPLESTSIHMIQTAITRLLALFPDRSFDPTLVDEYNRLSKREAERIRDFVILHYHQTTRDDAPLWRQVRTMEVPETLRRKLELFRSRGRYFREDDDLFVEANWLAVMLGQG

SEQ ID NO: 87130 - protein, 492 aa, Shewanella sp.
  misc_feature (1)..(492): tr|A0A411PCZ8|A0A411PCZ8_9GAMM Tryptophan 7-halogenase OS=Shewanella sp. D4-2 OX=2520507 GN=EXU30_00970 PE=4 S V=1
MDSKVNNIVIVGGGSSGWMSAALLCKMYKGTINITLVESDAIGTIGVGEATIPPLKIFNDVLGINEQDFIEKTKASIKLGIEFENWGKQGDAYMHAFGSIGKDIGYSAFHHYWLANKPQSPASLWDFSYNYQVAKQNKFSVQPKIHNDQLAGITHAYHFDAGLYANYLQQYCQQLGIRHIQGLVETINQKDNGDIESLTLQDGQVINGDLFIDCSGLHALLIDKTLNVEFESYQQWLVCDSAWAVPSEKTSPIIPYTRATAHDFGWQWRIPLQHRTGNGMVFSSKYISDEKAKQTLLDNLDAKAIGEPKLIRFKPGRRVKQWQNNCVAIGLSSGFLEPLESTSLHLVQTAIIRLTKLMPHLSITPELVAEYNRQSQTEFEQIRDFIILHYHLNQRQQGELWQYCQTMSIPDTLQHKISLFAQTANLFRQQDELFTQEAWLQVMIGQNLMPQDHNPLANILSQQERKDFLDNLKQIYQHYSAELPAHETFLNL

SEQ ID NO: 87131 - protein, 493 aa, Erythrobacter gangjinensis
  misc_feature (1)..(493): tr|A0A1J0V4A1|A0A1J0V4A1_9SPHN Tryptophan halogenase OS =Erythrobacter gangjinensis OX=502682 GN=BMF35_a0028 PE =4 SV=1
MPPHVVVLGGGSAGWITACLLHKAWGEHGGKVTVVESPEIGIIGVGEGSTPQLKAMFDHLGIAEADWMAACDATYKLGIRFTGWSERPGFESYFHPFPCAVDLHSEPDFTQNCTLARRGFDVPAHPDDWFLASILADAGSGPQPADTFPFPPTYGYHFDAYKLGAFLRDWAVERGVDHRALKAEKVELSGHTDVAALLCEGGERIEGDIFVDCSGFRAMIAGDALGGEFLPFAENLFADRAVVVPTEKVAQFKPQTGAIAMSSGWRWHIPLTTRTGNGYVYSSRYISDEDAAAELLHAVGLKDDETEPRFLRMKVGRMAKSWRGNCLAAGLAQGFIEPLEATALHIVIATALDFAAAYEAGGFSPEHRDHFNRQTALRYEAIRDYIVGHYRLNQRSDAAFWRDNAANQNLSDELKAMITAWFTHKDIAATNAERYSVQAYSAASWHCLFAGYGTFPAPAKMQPLPANLKAADHGAITSMLAACARNFSPVDWS

SEQ ID NO: 87132 - protein, 510 aa, Porphyrobacter sp.
  misc_feature (1)..(510): tr|A0A2Z2PDG3|A0A2Z2PDG3_9SPHN Tryptophan halogenase OS =Porphyrobacter sp. CACIAM 03H1 OX=2003315 GN=CBR61_151 25 PE=4 SV=1
MNAMDRPEVRKLVIVGGGTAGWITAAAFARLLGQRLQIELVESEAIGTVGVGEATIPQIIRLNAILGLDENAFLSATSGTFKLGIEFVDWGRKGSRYLHTFGDTGMTLANVAFHHHWRRSAGTAPDPKGLWDFSLHQLAADQARFGKLDRVGNTAMTGLAYAYHFDASRYALFLRDYAEGRGVTRTESIVESVARDGESGDIRSITLKGGKEVAGDFFIDCTGFRALLLGETLGVGYRDWSKWLPCDRALAVPSERLPVLVPYTRATARDAGWQWRIPLQHRTGNGHVYSSGFATDDAAADLLMAGLDTRALGDPRPIRFTTGRREAFWAHNCAAIGLSSGFLEPLESTSIHLIQSHVSRLIQLFPRAGDPSAMRAEYNRRCEEEFAQIRDFLILHYHRTDREDTEFWRFCKHMDVPDSLTHKIALFASSGRVGRDVDDLFRDASWVQVMLGQGIVPADYDPMADQLSEAQLAEFLANLRMLIARAVGTLPTHEEYLARHCPADASLLAA

SEQ ID NO: 87133 - protein, 515 aa, Sphingomonas sp.
  misc_feature (1)..(515): tr|A0A1P8PVS8|A0A1P8PVS8_9SPHN Tryptophan halogenase OS =Sphingomonas sp. LK11 OX=1390395 GN=AV944_13305 PE=4 S V=1
MTTPSPDAIRSVVIVGGGTAGWMTAAALAHASPRGLSITLVESDAIGTVGVGEATIPPIRLFNQTLGIDEAEFLRETKGSFKLGIEFVGWGRAGHRYFHPFGTHGKSFDLVAVHQHWLAAGGPGSGIAFDDLSMAWGAGQRGRFAAPMADPRSVASTFDYAYHFDAGLYAQFLRRYAEARGVVRVEGKIAGHTLEATRGHVASVTLDDGRVLAGDLFVDCSGFRGLLIEEALATGYEDWTHWLPCDRAVAVPCETGGDGLTPYTRSTAREAGWQWRIPLQHRTGNGYVYCSRHISDDQAAATLMAKLDGAALGDPRFLRFTTGRRKRMWNRNVVAIGLSSGFMEPLESTSIHLIQAGIAKLLAYFPTQAFAPAAIEEYNRVAITEYERIRDFLILHYKLTERTDAPLWHECAAMPIPDTLAMKIAHFRESGRLVARDMDLFGPASWAAVHIGQFNMPEGLDPLLAYGDPAQSRGFVAKLAGAIGQMADSMPTHAQWLTKIGATIQAASTLTLPIR

SEQ ID NO: 87134 - protein, 500 aa, Parvularcula sp.
  misc_feature (1)..(500): tr|A0A371RL10|A0A371RL10_9PROT Tryptophan 7-halogenase OS=Parvularcula sp. SM1705 OX=2292771 GN=DX908_13115 PE =4 SV=1
MGQKRIKKLVIAGGGTAGWITAAAFSRLLGKSLDIHLVESEEIGIVGVGEATIPQIIRLNHMLGLDENEFLRRTYGTFKLGIEFVDWGRLGSRYLHTFGDTGINLANLHFHQYWLRYRQAGGENSLWDYSLHQQAADDNKFARMDRVGSSPMGGLAYAFHFDAALYAAYLREYAEAQGVRRTEGIIASVERTTEDGGIAALKLEDGTRIEGDFFIDCTGFRAFLIGQELKTDYQDWTHWLPCNRAIAVPSEKLSPLPPFTRATAKSAGWQWRIPLQHRTGNGHVFSNEFMSEDEATAILLDGLEGEALSDPRTLKFTTGRRETFWEKNCVAIGLSSGFLEPLESTSIHLIQSNVSRLISLFPRDGLHSADIDEYNRRTAAEFEQVRDFLILHYHQTEREDSPFWQHCRNMEVPEPLNEKMALFRASGRIGRDVDDLFRDTSWMQVMLGQGIEPQDYHPMADNITDAQLDEFLRNVRAIIDNAVTPLPSHEDFIKKFCDAG

SEQ ID NO: 87135 - protein, 489 aa, Sphingomonas sp.
  misc_feature (1)..(489): tr|A0A1P8PSX1|A0A1P8PSX1_9SPHN Tryptophan halogenase OS =Sphingomonas sp. LK11 OX=1390395 GN=AV944_06970 PE=4 S V=1
MSAPIRHVLVAGSGLTAWSAAAALKRRAPFLDVTLLATPAAHDALADRIACTLPSLPGFHADLGISEDNGVTRTGAGYRLGTRFFGWAEGLPDYVHAYGGYGHAIGPAAFHLHWVRAMRDGRAAPFDAYCPAAQLARAGGFVPPSPGTPFAGHDYGLTLDLPRQVAMMRAFALHVGVREVTDSIAQVQVDATGHVTAIAVQHGAALTAHLYIDATGPAALLRGSIDDAWQDWRDWLPCDRVLLGTQVSGEGAPVLTPATAHAAGWRWSSGEQVGMAYGSALLSNAEAAAMLARDQAVVDAPIVIRPGTRARAWRGNCIAIGDAATQVEPLEWCNLHLALSAIDRLVTMLPDTAMAEVEAADFNRQTLAEAERVRDFLAAHYRTARRPEPMWQAVAQAELPASLAHTLGQFGERGRLPFYEEETFTRDSWAAILLGQGYLPRRIDPLVHGVPAPQVNAAMARMTDAIAAALPHIPAHAQWRAAQMRRLAR

SEQ ID NO: 87136 - protein, 272 aa, Pseudoalteromonas sp.
  misc_feature (1)..(272): tr|G7EF55|G7EF55_9GAMM FADH2 O2-dependent halogenase I OS=Pseudoalteromonas sp. BSi20652 OX=388384 GN=prnA PE= 4 SV=1
MHTGYEDWSHLLPCNSAIAVQTKSTSETVLPLTRSIAHKSGWQWRIPLQNRVGNGLVYCSQYMDDEQAKALLLNNIEGEPLTEPRIIKFKTGRRLKGWNKNCLALGLASGFVEPLESTSIHLIMSGIIRFMRLFPFNGITNHAIDEYNKQLKSEIENIRDFIVLHYKVTNRDDSEFWQHCSEMEVPKTLQHKIDLFKQTGRVFLDDGDIFRVDSWVQVMLGQGIEPNQHHLIASMMSDEELTRFLHGIKQQIEQRVSQLPPHHEFLKQYCPA

SEQ ID NO: 87137 - protein, 502 aa, Undibacterium pigrum
  misc_feature (1)..(502): tr|A0A318J8V9|A0A318J8V9_9BURK Tryptophan halogenase OS =Undibacterium pigrum OX=401470 GN=DFR42_10317 PE=4 SV= 1
MQNTTIKNIVIVGGGTAGWMTATALATVLEGQYQIRVVESDEIGIVGVGEATIPMIQRFNQVVGIDENEFLRETQGTFKLAIEFVNWGRQGDRYMHGFGTIGQDFGSLRFDQYWQHMRKLGKADNLAAYSITRMMGKANKFMPARQDMSNSPLHQIAHAYHFDASLYARYLRKIAESRGAMRTEGKIVSVSQREADGFVDAIVLENGERIAGDLFIDCSGFRGLLIEQTLHTGYEDWSHWLPCDRAQAVPCESAPELLPYTRATAHRAGWQWRIPLQHRIGNGHVYCSQYVSDDEAASVLLSNLDGKPLADPRVIKFKTGMRNKTWNKNVVAIGLSSGFLEPLESTSIHLIQSAIARLIDFFPDQSFNAVDIAEYNRQSRFEYERIRDFVILHYKLNQRDDSEFWKACAAMPVPDSLQHKIDLFRASGRLLRVDNELFTEVAWLQVFEGQNLIPERLHPLVNLQTGADTMEYLDSVREVVQKCVAIMPGHAAYIAQHCKARS

SEQ ID NO: 87138 - protein, 198 aa, Caulobacteraceae bacterium
  misc_feature (1)..(198): tr|A0A4Q3TF65|A0A4Q3TF65_9CAUL Tryptophan halogenase (F ragment) OS=Caulobacteraceae bacterium OX=1978230 GN=EO N96_16995 PE=4 SV=1
MSAAGLVGVLKPDQVKVRLVESDDIGTVGVGEATLPQMREFNDRIGIVESEMMRKTNATFKLGIEFRDWGFKGSSYVHPFGAHGHPMGGVGFHHQWTRARLAGEAYDIGDYSYAIVASRRNRFDFPAADKSAVNSTYDYAYHFDAGLYARYLRGWCEARGLTRTEGKVTEVRLDPASGDVAAIVLESGEAITGDLFID

SEQ ID NO: 87139 - protein, 496 aa, Shewanella sp.
  misc_feature (1)..(496): tr|A0A411PL66|A0A411PL66_9GAMM Tryptophan 7-halogenase OS=Shewanella sp. D4-2 OX=2520507 GN=EXU30_17345 PE=4 S V=1
MTAQVKRVVIAGGGTAGWMTAAAITKLMGKNLDVVLVESDQIGTVGVGEATIPTLHLFHRLLGLKEQDVMAATNATFKLGINFENWRDVGKDYLHSFGFLGKDCWACGFAHFWNKGQKLGIVKPIGDYCTEHLAARNGRFAVLPNQDQNHAYHMDATLYAQFLRKMAESLGLKRIEGKIAQVLQHDNGNIKALALENGEMVEGDLFIDCTGFRALLIEQTLNTGFEDWSHYLPCDSAIAVQTRSVGEPVAYTRSIAHQSGWQWRIPLQTRTGNGLVYCSKFLSDADATELLMSNIEGEPLNQPRVIKFKTGTRRKHWNKNCVAIGLSSGFLEPLESTSIHLIQRSIIRLLQQFPSTGINESDINEFNQQTLLEMDYVRDFIILHYKVTERKDSRFWRHCKNMEIPQSLAHRIELFKDSGKVYKQDSDLFGVSSWVQVMLGQGLTPNSYHPIVDMMEDEELNAFLENIRGNVKRKVDALPAHFDFVKHYCPSKVALD

SEQ ID NO: 87140 - protein, 508 aa, Cellvibrio sp.
  misc_feature (1)..(508): tr|A0A1Y0FV89|A0A1Y0FV89_9GAMM Tryptophan halogenase OS =Cellvibrio sp. PSBB006 OX=1987723 GN=CBR65_07525 PE=4 SV=1
MAEELSEGKSISDVLIVGGGTAGWMTAAALANVFSKTHCRIRLVESDQIGTVGVGEATIPVVLKFNQMLGIDEDDFLRSTQGTFKLGIQFVNWGSLGNRYIHPFGSYGTPMGSLSFYHYWLKYHREGKSRDIGEFSIAVQAALNGKFMRPANMPNSPLSQIAYAYHFDAGLYAQYLRSFSEKKGVERIEGEIVDVAIRPDDGFIESVNLKNGEKLSADLYIDCTGFRGLLIEQALNTGFIDWSHYLPCDRAVTVPSKNIGPPDSFTRATAHTAGWQWRIPLQHRTGNGHVYSSKYMRDEEAKDILLKNIEGDTLAEPKFIQFKTGMRQKFWNKNCVAIGLSSGFLEPLESTSIHLIQSSIAKLLALFPTADFVQPVIDKYNQIMCSEFIGVRDFIILHYKATDRSDSAFWNYCRHMDIPQNLADKIELYKSSGRLFRDNNELFDEISLIAVMHGQGIRAQRYHPMVDDINEIEFDRLMKEIKSVIDHSAQAMPRHGDFIAKHCAAKFV

SEQ ID NO: 87141 - protein, 512 aa, Caulobacteraceae bacterium
  misc_feature (1)..(512): tr|A0A4V1UE01|A0A4V1UE01_9CAUL Tryptophan 7-halogenase OS=Caulobacteraceae bacterium OX=1978230 GN=EON95_07330 PE=4 SV=1
MAQERALRRVVIVGGGTAGWMTASALARAFSGPAGLTLPITLVESDAIATVGVGEATIPPIRQFNATVGLDEAEFVRATKATAKLGVDFHDWSGPGSNYFHGFGDYGPMVRGQAWRQYLFRLHAEGRIETMEPWSLPTILFRQNRFAPPVADPRSVLSSYSYAYQFDAGLFARRLRVLAEGLGVVRREGRIVDCPRDPESGLITGVTLDDGSLIEGDLFIDCSGFRGLLIEGVMQAGYEDWTRWLPCDRAVALTYPLSGPPEPCTRATARKAGWQWRIPLQHRIGGGYVYSSAFTSDQEALDDLLGMVGPPLTDPNPLRFTTGRRREAWKGNVVSIGLSSGFIEPLESTSINLIQSGIGRLLELFPDRDFDPALVAAYNKGSAQEYERVRDFIVLHYHLAGRTDGELWRQCRETAPPDSLAEKIELFKARGEIRLLENESFREDSWAAVFTGLGVWPRRATPLVEVPGLDEVAHQAERLRDLIARAAASVPAHSSFFPDRPQAAATSRTRAP

SEQ ID NO: 87142 - protein, 493 aa, Sphingomonas sp.
  misc_feature (1)..(493): tr|A0A1P8PUC9|A0A1P8PUC9_9SPHN Tryptophan halogenase OS =Sphingomonas sp. LK11 OX=1390395 GN=AV944_10225 PE=4 S V=1
MSTPRRIVIAGGGTAGWMAAAAMARTLGRAVTVTLVESDAIGTIGVGESTIPPIITFNRLLGINEAEFMAATQATFKLGIQFDGWKGPEDRYFHSFGLTGKDHWAAGFQHFWLDGLRRGHDAPYDDYCLELIAAREGRFAHLPDERMNYAYQLDSTLYGRFLRGMAEGDGVTRIEGRIAEVELNPDNGDIAALALDDGRRVEGDLFLDCTGFRALLIDRALHVGFDDWSHYLPCDAAVAVQTESVRAPVPYTRAIAHEAGWQWRIPLQRRAGNGIVYCSRYMDHDAARERLLSTVEGQVLTEPNMLRFQTGARRKQWHRNCIAVGLSGGFLEPLESTSIHLIQRAILRLIRLLPGGPISAHDVAEFNDQQMTDMLQIRDFLILHYKVHERRDSAFWRQCADMEVPDSLAHRIALFRETGRVFRRNDELFAENSWVQVMMGQGIMPESHHPITARLSDEELDRLLTTLRQNIATTVRGLPPHADYVAHHCGTAA

SEQ ID NO: 87143 - protein, 526 aa, Undibacterium pigrum
  misc_feature (1)..(526): tr|A0A318J4R5|A0A318J4R5_9BURK Tryptophan halogenase OS =Undibacterium pigrum OX=401470 GN=DFR42_10340 PE=4 SV= 1
MKAVKNVLIVGGGTAGWLTACFMAKHLSSTREREGIQIRLVESKDIGIIGVGEGSFPSIRGTLAAIGVDEARFIKECHGTFKQGIRFDHWVRPAGSPGADHYFHPFSHPSQRGPELLPYWLKGLAARDGQQPAFADAVTMQKCIADASRGPKRFADKDFLGPMNYAYHFDAGRLAALLSEHGQSLGVNRILGTVEHVQLDDQGAIAAVHTQDGQVLAADLFIDCTGFSAGLIGKTLGSPFKSLNDVLFVDRALALQVPYAKPDAPIPSYTISSAQEAGWIWDIGLQERRGTGYVFSSRHTDEARAEQVLRNYIGPAADGMTPRLLKLNVGYRETQWIKNCVAIGLSGGFIEPLESSGIGLIETAAYLLTYLFPFNGEFDAVATQFNQHMKARYERVVDFVKMHFSLSQRTDSAFWRDNRDVASIPESLQEKLKMWSCRPPHRMDFIADLEMYPPSSWQFVLYGMEFQTDMANNKFVYPQDQEATQEFQMIAQMAQRALADLPDHRKLVEHLCRAASPLPSALARQA

SEQ ID NO: 87144 - protein, 504 aa, Erythrobacter gangjinensis
  misc_feature (1)..(504): tr|A0A1J0V4B3|A0A1J0V4B3_9SPHN Tryptophan halogenase OS =Erythrobacter gangjinensis OX=502682 GN=BMF35_a0032 PE =4 SV=1
MMDTVPHTFVIAGGGTAGWMAAAALSRFTPPGTRIVLVESDAIGTVGVGEATIPQIHNFNRALGFDEREFLRATRGTFKLGIEFDGWLRAGERYMHAFGPIGRAHGLLPFQHYWIRARQLGFAKPLSAYSLNETAARQMRMQKGRTSVGIELPYAYHFDAGLYAAFLRDFAEARGVRRVEGVIASVERDGESGDITALALNDGERIEGTFFIDCTGFRALLIGEAMEARFDDWSAYLPCNRAITVPCEGVAEITPYTRATARKAGWQWRIPLQHRIGNGLVYCADFMSDDEAAETLLANLDGEVQADPRPIRFTTGARRQHWVGNCLAVGLSAGFMEPMESTSIHLIQSAISRFLSVVPGGRADPATIDWFNAQSRFEWERIRDFLVLHYTANQREGEPFWDHVRTMDLPDTLSAKIAQWKATGFIHREHEELFTEVGWFQVLAGQGVKAQSYNPLADALPESDLRAMLEGVEGALDAAVQPMTNHTEFLQSYTGGMVRTEIPA

SEQ ID NO: 87145 - protein, 511 aa, Parvularcula sp.
  misc_feature (1)..(511): tr|A0A371RFT4|A0A371RFT4_9PROT Tryptophan 7-halogenase OS=Parvularcula sp. SM1705 OX=2292771 GN=DX908_02835 PE =4 SV=1
MTTAPSSLDKIVIVGGGTAGWMTAAALSKFLRAGKTNIELVESEEIGTVGVGEATIPPINTFNGLLGIDENDFISKTQATFKLGIEFTNWAKKGHTYIHPFGDYGQDVEAIKFYQLWLKLRQISQNVPYIDEFCVSAMAARHGKYLAPARDPRQVLSALAYAFHFDATLYARYLRQFAEDRGVIRTEGKVTKVNLRGEDGFIASLDLEGGRTVEGDLFIDCTGFRGLLIEGALETGYEDWTHWLPCDRAVAVPCENAGPPDPFTRSTAHEAGWQWRIPLQHRMGNGHVWSSGFTDEETATTRLMQNLEGKPLADPRHLRFTTGRRRKFWYKNCVAIGLSAGFLEPLESTSIHLIQAGISKLIALFPDKDFAPIEAEEYNRLTAMQFEQIRDFIILHYHATERDDSEFWNYVRTMSIPESLTRKMDLFKSKGRIFRFEDELFGEANWLSVFLGQNVWPRAYDPMVDTLSDEQITQIAGQIHHAIRTTIEKMPSHQDYITRFCAAPASGVYSS

SEQ ID NO: 87146 - protein, 528 aa, Shewanella sp.
  misc_feature (1)..(528): tr|A0A411PL74|A0A411PL74_9GAMM Tryptophan 7-halogenase OS=Shewanella sp. D4-2 OX=2520507 GN=EXU30_17360 PE=4 S V=1
MQKPISKIVIVGGGAAGWITAGLLAAHHNADKGQLAPSPKLDITLIESPDVATIGVGEGTWPSMRSTLEKIGINETQFLLHCDASFKQGSKFINWCTEATHNPLQSPASYLHPFSLPAGQPQFDISNYWLPHHEQVAFAAAVSNQEAIAKASLAPKLGSTKQYGFINNYGYHLDAGKFSELLREHCTGKLGVNHIRDHVDDIHLAELGDIESVQCRSKGLINGDLFIDCSGVKSLLLGGALNVPFICQKQVLFNDCALAVQVPYDNDDTPIASNTHSTALDNGWVWDIGLPTRRGVGHVYSSDHQSDDQALEQLITYLTPSIGDKASDINPRKLSIAPGYRASCWHKNCVAIGMASGFIEPLEASALALIEWLASQVAEQLPANRQVMDTISTRVNKQFEQHWQQIIEFLKLHYVLSERQSDYWQDHRHETSSSDELRHKLALWRHHVPSVADINHRNPLFPAASYQYVLYGMRPNYTAMPAQLKPSLKRQAQQLFNENQQRTMQLAKALPSNRDLLQQLASHPFPLI

SEQ ID NO: 87147 - protein, 507 aa, Sphingomonas sp.
  misc_feature (1)..(507): tr|A0A1P8PTL5|A0A1P8PTL5_9SPHN Tryptophan halogenase OS =Sphingomonas sp. LK11 OX=1390395 GN=AV944_08315 PE=4 S V=1
MSVVEGQARSILIVGGGTAGWLTAAYLARFLGPATRITLLEDPAIGAIGVGEGAFPTMRSTLRFLGIDEAHFIRAAGATFKQGIRFDDWRHAPDGGRRHRYVHPFEPPFQADGVDLVAHWLAQDPATRAPFAEAVTIQHRVAAAGRGPKQAGEAAFDGPLSYAYHFDAQRLVALLADHAMGLGVRHLEGRLTGAQVGADGLIAHVVTDRQDTLTADLYVDCTGQRAELISGALGEPLLPVRDQLFTNRALACRLPYDAERGHALPTMTIATAHRAGWTWDIGLAEGRGIGTVYSDAHMDDEAALATLAAYLGQDPDRLEPRLLTFEPGYRQRPWIGNCVAIGLAGGFLEPLESTGIVLIEAAVAMLAELFPHRGPIAAPAARFNTLMTARYRTIVDFLKLHYCLSSRDEPFWRDNGAAGTISDRLRDLLEQWRYRPPGRFDFTLDVESFAHFNYQYILYGMGFADGEMRKTCASGEADRLFRKLQMFGDRAVADLPTHGELVAAMRG

SEQ ID NO: 87148 - protein, 529 aa, Acaryochloris sp.
  misc_feature (1)..(529): tr|A0A2W1JMJ0|A0A2W1JMJ0_9CYAN Flavin-dependent tryptop han halogenase PrnA OS=Acaryochloris sp. RCC1774 OX=176 4569 GN=prnA PE=4 SV=1
MNQPIQKILIVGGGTAGWMTASYLTKALGNDVEISLIESDVVKKIGVGEATLPSLQQVFFNFLGIPEEEWMQQVNGSYKVGVKFVNWSQTPSPGRPDKSFYHIFGGMPTCEGIPLQQYWLRKHLAGETAGAMQYACYSEAALLDQKLSPVFCDRNPAMYYAWHFDAHLVAEYLTKWSTERGVNRIVDDVVEVALSPETGNIQSVLTKTGQQLTADLFIDCSGFRSLLLGKALSEPFIEMNDALLCDSAVATPVPHDDDQHGIEPYTSAIAMKHGWTWKTPMQGRFGTGYVYSSQSCSQDEATQEFQQLWNLDERQPLKHLKFRVGRTERAWVKNCVGIGLASSFLEPLESTGIYFIYATLYQLVKHWPSQALEPQLQKQFNRKVTWMFDDCRDFVQMHYFTTGREDTVFWQTNRYDLKKSDSIQEKLDLYKAGLPVGAVVSNSADYYSAFDFEFENFWSNSNYYCVLAGMGVYPDQSPPILEHNPQAVEKAEQIFADIRLRTNALAQQLPSTHQALQSLHQNHSFRAAA

SEQ ID NO: 87149 - protein, 359 aa, Caulobacteraceae bacterium
  misc_feature (1)..(359): tr|A0A4Q3U1L9|A0A4Q3U1L9_9CAUL Tryptophan 7-halogenase (Fragment) OS=Caulobacteraceae bacterium OX=1978230 GN= EON96_03405 PE=4 SV=1
MGPDLSNAGSVRRVVIVGGGTAGWMTAAALVRLVAPSGVDIVLIESAEIGTVGVGESTLPHIRAFNERIGIDEAEFMKATRATFKLGIRFDDWARKGDSYIHPFGDYGAPGGEAPFHHYWLRAQGLAGDDVGPIDDYSLPIVAARQGRFAPPSVDPRSLMSTYGYAYQLDATRYAAFLSQRSQAAGVRRIEGRIIDVTLDAEQGDIVSVTLDRGEVIEGDLFIDCSGFRALLIEQTLKAGFTDWSHWLPCDRAVAMPCASDQPTVPYTRAQALEAGWRFRIPLQHRVGNGYVYASAFVDQEAATCRLEGLLEGEALNTPNHLRFTAGQRTRNWVANCVSVGLSSGFIEPLESTSIYLIQ

SEQ ID NO: 87150 - protein, 505 aa, Caulobacteraceae bacterium
  misc_feature (1)..(505): tr|A0A4Q3S5G1|A0A4Q3S5G1_9CAUL Tryptophan 7-halogenase OS=Caulobacteraceae bacterium OX=1978230 GN=EON95_07325 PE=4 SV=1
MSIAPPIQSIVIVGGGTAGWMTAAAISHVLQGKVKITLVESDAIATVGVGEATIPPIILFNKLLGVDEVAFIKATQATFKLGIEFRNWTRQGHSYFHPFGQYGTRMGAAGFYQYWLRLNAAGLDDDLGDYSPCTMAARLGRFAMPEPDPRSVRSQMTYAFHFDASLYAKFLRGRAEASGVVRREGKVVDVNLREPDGFIESIRLDDGEVLGADFFIDCSGFRGLLIEGALKTGYEDWTHWLPANRAVAVPSTRVADPHPYTRATALEAGWQWGIPLQHRTGNGYVYSSEFISDDDAGTRLLGNLDGKPMADLNFLRFTTGRRKKTWNKNCLSLGLASGFIEPLESTSIHLIQAGITKLLLTFPDTAFAQPDIDNYNKLMQKEFERVRDFVCLHYHATERTDQPLWRMTGAMTVPDSLKEKMDLFRSRGRVYRYEDELFQEASWVAVLLGQGVIPQRADPITDIVPMDELQARLKHIKAMIRDGVERMPTHDQFIRANCQAPAWDS

SEQ ID NO: 87151 - protein, 538 aa, Pseudomonas chlororaphis
  misc_feature (1)..(538): tr|A0A3G7QNW3|A0A3G7QNW3_9PSED Thioredoxin reductase OS =Pseudomonas chlororaphis subsp. aureofaciens OX=587851 GN=C4K14_3874 PE=4 SV=1
MNKPIKNIVIVGGGTAGWMAASYLVRALQQQANITLIESAAIPRIGVGEATIPSLQKVFFDFLGIPEREWMPQVNGAFKAAIKFVNWRKSPDHSRDDHFYHLFGNVPNCDGVPLTHYWLRKREQGFRQPMEYACYPQPGALDGKLAPCLADGTRQMSHAWHFDAHLVADFLKRWAVERGVNRVVDEVVEVRLNDRGYISTLLTKEGRTLEADLFIDCSGMRGLLINQALKEPFIDMSDYLLCDSAVASAVPNDDAREGVEPYTSAIAMNSGWTWKIPMLGRFGSGYVFSSKFTSRDQATADFLNLWGLSDNQPLNQIKFRVGRNKRAWVNNCVSIGLSSCFLEPLESTGIYFIYAALYQLVKHFPDTSFDPRLSDAFNAEIVHMFDDCRDFVQAHYFTASREDTPFWLANRHELRLSDAIKEKVQRYKAGLPLTTTSFDDSTYYETFDYEFKNFWLNGNYYCIFAGLGMLPDRSLPLLQHRPESIEKAEAMFASIQREAERLRTSLPTNYDYLRSLRDGDAGLSRSQPGPTLAAREIL

SEQ ID NO: 87152 - protein, 503 aa, Porphyrobacter sp.
  misc_feature (1)..(503): tr|A0A2Z2PB29|A0A2Z2PB29_9SPHN Tryptophan halogenase OS =Porphyrobacter sp. CACIAM 03H1 OX=2003315 GN=CBR61_130 25 PE=4 SV=1
MAIERIIIVGGGTAGWMAAAALSRIKAGRPVEITLIESEAIGTVGVGEATIPPFVGFNRLLGIDEAEMLAAVGGTFKLGIQFENWGKLGDSYIHPFGAYGYTMGGISFHHVWHRMQAGGDRRPIQVFNLETMAAAFGKFARTEDYKRDDLPPVNYAYHLDAGRYAAFLRRLAESRGVVRQEGKVADVQLDGESGFVTGVTLDDGRAFAGDLFIDCSGFRGLLIEQALKTGYDDWSHYLPCNRAVALPCLREDGSPPPPFTRATAHSAGWQWQVPLQHRNGNGHVYCSAYMEDQQALDILLGNIAGKPQAEPNWLRFVTGRRKKFWNRNVVALGLAAGFMEPLESTSIHLINTGIDKLISLLSLDGITQVQEDTFNRLTGREYARIRDFLILHYNATQRTDSDFWNHLRTMPVPDTLTEKVELFRANGQIFREEDELFTETSWAAVMMGQGIQMGGHNAMADALDPVTTAKEVNEMEQSIRWLVQHMPGHGDYLKRYCPAPMAA

SEQ ID NO: 87153 - protein, 546 aa, Flavobacteriales bacterium
  misc_feature (1)..(546): tr|A0A2D8WDP6|A0A2D8WDP6_9FLAO Uncharacterized protein OS=Flavobacteriales bacterium OX=2021391 GN=CMD04_00650 PE=4 SV=1
MKVENIVIVGGGSSGWMTAAALLKCCPWTNVILIESDKPTVGVGESTLGHFNKYLRALDLEDKDWMPKCNATYKNSIQFTDFREKGTVFQYPFGKYDYNDTVEGMKDWFDLARQRPEEYPPESFAEFFNKENSALVKHNKQWDNKDNRWRNFDWLTDVAYHLDAEKFAEYLRDEYCDNFDDRFTHIRGEVRGSVKDINAGGSPAVSNRYIKQLAVRLNEDKRTVGVIGDLFIDCTGFKSVLLEEYMGTRFIKFNDLANDKAYFARIPYLTQDEREKHMHNVTDCQAAENGWLWSIPLWNRIGVGYCWSSRFAMETETRTEFETWIEQKYGVSPDQYEVGTIDIKHGYHEKAWNLNVVAIGLSYGFVEPLESTGLLTTHENILRLVDVLSRRKGYVTQIERNWYNYAAQREVIGFSKFVAMHYALSQRTDNPYWRWCSQRNEYMTEQFDGMVRVNDNYERLGSSLDLDQTMDVNMNGMNYIAAGQGMMLGRDWYSDRDPDELTFVENSHLKYSKEVNDFVESDDCPTHYEYLRDYIYGGDELRAELI

SEQ ID NO: 87154 - protein, 509 aa, Alteromonas sp.
  misc_feature (1)..(509): tr|A0A385MVA6|A0A385MVA6_9ALTE Tryptophan 7-halogenase OS=Alteromonas sp. RKMC-009 OX=2267264 GN=DS731_10485 P E=4 SV=1
MSAPHRIVIAGGGTAGWIATCLMAHHWRDKPVSITLVESADIATVGVGEGSTPTLKRFFSDLNIAESDWMPACNATYKVNIRFKGWSPQNGPDSYSHPFISQPDAFTERPFHVNCHNRRLGLDVNVTPEQFLLNGWLAGAGKAPVAPTSFPFRIEYGYHFDSALLGRYLKRHAVSLGVNHIEGKIDDVITSLSGHITSLKLQSGEIVDGDFFIDCTGFRSLLLQQTLDIRFNPFSENLFNDRAAVLATPAQARLPVETTSTALSNGWAWSIPLSSRTGNGYVFSSAHLSDDKAEAELRRHLSVQDNEGDVRFLSMRVGQVEKHWHKNCLALGLAQGFIEPLEATALHLVQLSVEFFIEDYEQGNFSPALQDKFNKDVTERFSGVRDYIVAHYKLNTRDDSAYWRENRNNMALSESLLQLLDVWYRKGDFPAEIQRQNIQSHFGITSWHCLLAGYGIFPPLAKQQPGRGDLYKDNDTEAFFKGCLLNFPDHSAYLKDVANSFPAVKSSLY

SEQ ID NO: 87155 - protein, 500 aa, Cellvibrio sp.
  misc_feature (1)..(500): tr|A0A1Y0FW91|A0A1Y0FW91_9GAMM Tryptophan halogenase OS =Cellvibrio sp. PSBB006 OX=1987723 GN=CBR65_07535 PE=4 SV=1
MTIENKKPEKILIVGGGTAGWMAANLLVSRWKDVEIYLLESTDIGIIGVGEGSTPHLKFFFDAADISESEWMPRCNATYKNGISFVNWSSIPGFESYFHPFPAQTDDIFTVPVFFNNIKARMQGSNANVHPDHFFLETYLTRANLGPIPAETFPFGVAYGYHFDSTLLGQFLAEKATSRGVKRIYGTLTEVLHDSDGALTAVRLDDDSLLDADFFIDCSGFKSLLLQGALKASFKSFKENLFNDAAVVMPSAMSEVIPPETRSTALSSGWAWKIPLTNRYGNGYVYSADYISPDQAEIELRQHLGLLDSDVAARHLQMKVGRVEKHWVKNCVAVGLSQGFIEPLEATALALSFDTISRFMTYYENGLYTNKYQDEFNKEINAKFDGVRDYIVCHYKANQRQDTDYWRDNAANTNLSQNLNKILHFWSNSKDFAKDMYMNNLVLSYQPKSWACLLAGYGVLPPLGDSEENARYKSSQDMDQLADFIRRCGLNFKKHNELLI

SEQ ID NO: 87156 - protein, 516 aa, Pseudoalteromonas sp.
  misc_feature (1)..(516): tr|G7EF58|G7EF58_9GAMM Tryptophan halogenase OS=Pseudoa lteromonas sp. BSi20652 OX=388384 GN=P20652_1394 PE=4 S V=1
MTKPITKIVVLGGGTAGWLSAGLLAAEHPHLNITLVESANVPILGVGEGTWPSMRNTLQRIGIKESDFITQCDASFKQGSKFINWRNLSEGENYYHPFMNPQGYEHTNLHASWQRIAPDQKFADVVNMQSFVCQAALAPKQLQTPEYAAVTNYGYHLDAGKFADFLKNHCVKNLNVTHITDDVSHVFNDEHGYIAALKTNNKGDIKGDLFIDCSGSRARLIGEHFNSEFIAQDHILFNNSAVAAQIPNAHTDQPIASATLSTAQSNGWIWDIALPTRRGTGYVFSSNYQSDESATNTLKSYIAKSTSEQQAGQLNYRVLKFSPGYRQKFWIKNCVAVGMSAGFLEPLEASALAMVELSISMISEQLPQNRIHMSQLKTRFNDRFSTRWQRVIEFLKLHYVLSERDDTPYWQDISNLNTAPERLQNLLKLWQFQPPSRFDFIENEEVFSSSSYQYVLYGMGFNTQTVSAQNTFNDPRAGDYYYQQNREKIAQCLNGLPSNRALLNHLLSNNGQPHND

SEQ ID NO: 87157 - protein, 537 aa, Sphingobium sp.
  misc_feature (1)..(537): tr|W1S8A0|W1S8A0_9SPHN Tryptophan halogenase OS=Sphingo bium sp. C100 OX=1207055 GN=C100_13175 PE=4 SV=1
MRMRLPAEPAIACPVEGESAMAKSILIVGGGTAGWLTAGYLARRLGSDLPGGVSIRVVESAEIGILGVGEGTFPTIRRTLATIGIDEAEMIRRCGASFKQGAKFVHWRHAPGQAGPDHYSHPFQVAESPEGMELLPYWLLGQGGTDNWDEVCGPQKKAADAHRAPKLPDHPDYVAPLNYAYHFDAVALAEMLRDKAVENGVAHLSDRVTEVLVGGDGAIDGVRTAQHGLLKADLYIDCTGFRAELIGKALDMPYRSCRDVLFCDSAVAMQVPYATIDDPIASCTIATAQDAGWIWDIGLEKRRGIGHVYSSAHMDDGSAEARLRAYVGPASDRLEFRKLRFEAGYRETNWHKNCVAVGLSSGFFEPLEATGIVFSEIAAGMIANLFPWGGDFESSARQYNANMRKRYERALDFIKLHYCISERRDTDFWRDNVAQSSIPDSLLELLDRWRFRPPNEMDFDLQVDIFSEMSWQYVLYGMGWRTDLTAKAGIYRYHDEARRAFAEVRRQASFAIANLPSNRELISNAHRRGFGTRPAAA

SEQ ID NO: 87158 - protein, 497 aa, Cellvibrio sp.
  misc_feature (1)..(497): tr|A0A1Y0FYD4|A0A1Y0FYD4_9GAMM Tryptophan halogenase OS =Cellvibrio sp. PSBB006 OX=1987723 GN=CBR65_13185 PE=4 SV=1
MINDILILGGGSAGWMTAMIMARAWAKKNIRITLLESAEVGTIGVGEGSTPALKNFFDKMGIAEAEWMPECNATYKCGITFADWSTRPGFNKYYHPFPSVVDSHTLPIFIHQAQQRLAGMDVDAHPNRFFLSHHLAEKSLAPKAHYHFPFDTQYGYHFDAVLLGRFLRKKATEMGVVHRELHVKDVIQDDAGNLRQLVADTGEIVTADFFVDASGFSGLLIQKTLQIPFVSYSQQLFNDAAVAIPSVITEKIPTQTRATALRHGWAWQIPLTNRFGNGYVYSSAFCSADDAELELRKHLSLSDNDIPVRHLKMKVGRVTQHWHKNCLAVGLAQGFIEPLEATALFLIQQTVAIFVELFQQGGFTDRLQHVFNERINNQFDGTRDYIVTHYKTSSRQDSEYWRANTANPDDVSDSLRELYRCWKRGGNLAAEIQRQDIAKYYPASSWYCIFAGMGIFPPVQRGADASAYDLNQLDDFLTRCALNYDDHRTVLAQLRQA

SEQ ID NO: 87159 - protein, 517 aa, Streptomyces sp.
  misc_feature (1)..(517): tr|A0A542TRP8|A0A542TRP8_9ACTN Tryptophan halogenase OS =Streptomyces sp. SLBN-192 OX=1119093 GN=FBY48_2620 PE= 4 SV=1
MLNRVVIVGGGTAGWMTASYLKAAFGDRIDITLVESGKVGTIGVGEATFSDIRHFFEFLGLKESDWMPACNATYKLAVRFENWRKPGHHFYHPFEHMQSVDGFPLAEWWLKNGRSDRFDSDCFVMANICDAERSPRHLDGRMLAQPFDENAEEPRGLTMSEHQGKTQFPYAYHFEAALLAKYLTTYTVERGAKHIIDEVKDVKLDERGWISSVVTAEHGELTGDLFIDCTGFRGVLLNKALEEPFISFQNTLPNDSAVALQVPQDMEARGIRPCTTATAQEAGWTWTIPLYGRIGTGYVYASDYLSADEAERTLREFVGPSAADVEANHIKMRIGRTSRSWVNNCVGIGLTSGFVEPLESTGIFFIHHAAEQLVKHFPGPDWSPVQRDNYNSAVAHVMDGVREFLALHYAAAGRNDTQYWKDTKTRELPDGLAERIERWKHQLPDSETIYPYYHGLPAYSYMCVLLGMGGIDVKPSPALSLADDSAAQKAFQSVHDRAAGLIGQLPTQYEYFTHMRR

SEQ ID NO: 87160 - protein, 498 aa, Planctomycetes bacterium
  misc_feature (1)..(498): tr|A0A517WZU1|A0A517WZU1_9BACT Tryptophan halogenase OS =Planctomycetes bacterium V202 OX=2527965 GN=V202x_4183 0 PE=4 SV=1
MQQFDVVILGAGFGGSLTALLLNQIGLNVALIDRGTHPRFSIGESSTPIADYLLESLSENYDLPQFQPFCKYGTWQERYPQLACGIKRGFSYFAHEPEQFFRQKSNHSSELLVTANLDEASADTHWFRADVDHFFAEEVQKSSVVYLDQTEVVLAQSDDWTIQVERRGERFDFRAQFLIDATGAMGVVPEFLGVERQTEFESCSTAVYGHFENVIPWSEILDQYEFDRSEYPFDCDQAALHHVLSEGWMWQLRFNNDITSAGFVLDSARNARSANELWQNLLSRYPSIQSQFEEASIVSPNFGLCSTGRFQRGWKECAGPKWALLPNTAGFVDPLHSTGIAHTLCGIERLVMILEQCWRNSDELSVALSHYSQSIQAELKLIDALVAGCYRTLKHFDLFTTSTLFYFAAATSFEHQRCNEQKRPLFLCADDVGLSNIISGWLSEVSKINDKNVSEPDEIKRAILNAETMLKPWNRVGLFHPDVPNMYYYTAAPKTEPQ

SEQ ID NO: 87161 - protein, 503 aa, Shewanella colwelliana
  misc_feature (1)..(503): tr|A0A1E5IPJ3|A0A1E5IPJ3_SHECO Tryptophan halogenase OS =Shewanella colwelliana OX=23 GN=BEL05_05350 PE=4 SV=1
MNTKVKHVVIVGGGSAGWMAAAMLSRLMGQQLNITLIESPDIATVGVGEATIPPLQVFNQALGISEPDFIKATQGTFKLGIEFENWYKRGDSYMHAFGQFGKDLALTPFHHYWLKSKPADTASFWDYSLNYQAAKANRFTPLATIKGPSLPGITHAYHFDATLYAALLSERSQQQGVTRIAAKVGDVHLNQYNGFIDSLTLENGQSIKGDLFIDCSGFKGLLIEEALKTGYDDYSHWLLCDSALAVPCKPTTLTIPYTRSIAHQAGWRWRIPLQHRTGNGIVYSSQFMSDEQAQKELLDNLDNEAIGTPKQLRFTPGRRLKQWHKNCVSLGLSSGFLEPLESTSLHLIQSGLIRLIKLFPTLDMPSSYQDEYNRQSKREFEQIRDFIILHYRLNQHQELPFWRYCQTMAIPESLREKIELFEQTGNVFRHQEELFSEAAWVQVMLGQGIVPQRCHPLTEGLTGQQLSQFLSDLSGIYRNSCDQLPSHDQFIHHHCRAPAQHDA

SEQ ID NO: 87162 - protein, 510 aa, Sphingomonas trueperi
  misc_feature (1)..(510): tr|A0A543LP97|A0A543LP97_9SPHN Tryptophan halogenase OS =Sphingomonas trueperi OX=53317 GN=FHW45_4248 PE=4 SV=1
MRGDQIRRIVVVGGGTAGWMAAAALGKLVGALPGLQIELVESDAIGTVGVGEATIPHINLFNRMLGIDEAAFVRETSATYKLGIEFVDWQRIGTRYVHPFGVYGLDMLGVEFHHFWLKARALGHTTPLDAYSIGIAAARRGRFAHPRPDQPNSPLARLGYAFQFDAGLYAGFLRRLAEGLGVRRSEGRIVDVRRDGETGHVTAVRLESGAEIAGDLFVDCSGFRGLLIEQTMGARFCDWTHWLPCDRAVAVPCAPSGDRLPLTRATARAAGWQWRIPLQHRTGNGYVYAGDHLSDDEATATLLTNLDGPALSEPRALRFRAGHRDRAWIGNVVALGLAGGFLEPLESTSIHLIQSGIGRLMALFPSRGFDAPEIDRFNRETAQEYADIRDFLILHYKATERDDTAFWRRCRDMTPPDSLAERIALFRRNGRILREQHELFQDASWLAVMNGQGIVPAGYHPVADLLSDAETLERLNHIAQVIDETANAMPLQDDYLRQIGCALPPLRQAS

SEQ ID NO: 87163 - protein, 503 aa, Sphingomonas trueperi
  misc_feature (1)..(503): tr|A0A543M504|A0A543M504_9SPHN Tryptophan halogenase OS =Sphingomonas trueperi OX=53317 GN=FHW45_1161 PE=4 SV=1
MAVAAPYRIVVAGGGTAGWMAAAALARFLGPGFTVTLVESDAIGTVGVGEATIPQIRMFNASLGIDEDAFVAATHASYKLAIEFVGWTKGGRYMHAFGDVGRDNGLLAFRHTWLRGLAEGVAEPLAAYALNNVAALGNRMQRGPARTARVLPEMPYAFHFDAGLYARFLRSYAEARGVVRHEGRIEAVARNGEDGDVAALHLDGGRRIDGDLFLDCTGFHARLIGEAMGVGYQDWSQWLPCDRALAVPSARARDFTPYTRATAHDAGWQWRIPLQHRTGNGIVYSSHHLSDDEAAARLLAGLDEPALGDPRPLRFRTGRREVAWAGNVIALGLASGFLEPLESTSIHMIQSAVERVLKLLPGRRALEPLRDSYNRQAAQESERIRDFLILHYWANDRDEPFWRERRETPLPDGLAEKIALWRETGEILREDGDLFSDVAWLQVLVGQGITARGYHPLADQPPVAQIAEYLDLLAKLNAREVAQMPSHSDFVRAHGAANAEIAA

SEQ ID NO: 87164 - protein, 509 aa, Marinicauda algicola
  misc_feature (1)..(509): tr|A0A4S2GX51|A0A4S2GX51_9RHOB Tryptophan 7-halogenase OS=Marinicauda algicola OX=2029849 GN=E5163_14690 PE=4 SV=1
MAKPQSHREAPRKVVVVGGGTAGWMAAASLVKFLGRLVEVEVVESEAIGIVGVGEATIPQIRNLNRALEIDEADFVAGTNGSFKLGIEFINWRRLDHSYLHNFGSIGLSVNQIHFHHHVFRAQAEGYGGDLWDYCVNTQAARAGRFAPMERLGSSPLGGVAYAYHFDAALYGQYLRRYAESRGARRTEGRIVEVIQDPESGDVERVRLEDGREVAGEIFVDCSGFRALLIEGALKTGYEDWSRWLKCDSALAVPSRNTRPPRPFTQAIAREAGWQWRIPLQHRTGNGHVFSSGYVDVDTARETLLANLEGEALAEPRLIRFTTGRRRKFWNRNVLALGLASGFLEPLESTSIHLVQSGISRFIQMFPTRPIADAERDEYNRQVTLEFERIRDFLILHYHLNERTDSPFWIDVREMDVPETLTSKIALFKASGRIYRDAQDLFTEASWLQVMHGQGLTPQAWHPMADKLSEAELRDMLANIRQIVTGAAAKLPSHADHIARCCAAPQAAE

SEQ ID NO: 87165 - protein, 544 aa, Luteimonas sp.
  misc_feature (1)..(544): tr|A0A562BXB0|A0A562BXB0_9GAMM Tryptophan halogenase OS =Luteimonas sp. J16 OX=935283 GN=L599_000400001230 PE=4 SV=1
  misc_feature (421)..(421): Xaa can be any naturally occurring amino acid
MSEGRIRRVVIAGGGTAGWIAACALTHQFPKDVLKVVLVESEQIGTVGVGESTIPTIRTFHHLLGIDEREFMSSVAASFKLSISFENWLRPGHRYFHPFGLTGLNTWACEFHHFWLDSRRRGIQSELGDFCLETVASRVDRFVLLGKDGGASQWSTRWASGGLSPDRLQVNYAYHFDAGLYAAYMRERAERQGLERVEGRIEQVRQHPETGFIEALVLEGGRVIEGDLFIDCTGGRAVLSEQALKTGYEDWNHWLPSNRAVALQTEADGPAVPYTRAIAHEAGWHWKIALQHRIGCGIVFSDAFMSDDEATARLLKENPARPLRDPWIIPFRTGRRRKAWNKNVIAIGLSSGFIEPLESTSIHLTLSGVARLLKLFPYDGIDESMVRRYNDISRAEMEHVRDFIILHYHLNQRDEPMWQQXRNMTVPDELAHRIQMFRDRAHALQGEDELFRLDSWTHCMLGQGVEPRSWHPLARTLADNDLKRLFEGIRQPIQQAVAAMPTHQQFLDQYCKAPPSAWELMYERARAHARITGKVAGVGGELRQ

SEQ ID NO: 87166 - protein, 578 aa, Nostocales cyanobacterium
  misc_feature (1)..(578): tr|A0A1Y0RQQ0|A0A1Y0RQQ0_9CYAN Tryptophan halogenase OS =Nostocales cyanobacterium HT-58-2 OX=1940762 GN=BZZ01_ 17195 PE=4 SV=1
MHSTQLPEYDVIVLGTGFAGNCQVRHLLLKIPGIRVALIDPCLEEDLEENFKPGESMIEIGTLFLCKELGLYDYVVENHLPRAGSNFHWPKDPTQTQTTDDHYHIWCNRQPELDSTQINSARFEQDLLRMNKEMGAGFFKGRIVDVDLTPGDVLKTVYVQLGNEKITLKTKHIIDSAGRQFIVGHKTNNLLFEPENHDGVNAGSAWVYVKNVDRDLFHNGYDPYGATCSHYYATNHWFGYGHWLWIIPTDKYTQEISIGVIHHHDVIPTSDINTQEKFYAFLKANHTNLYNLVCSGENVKFYYLPSITHTSKVMFSPDNWYVLGDAACCFDIFYASGTTMISFSIESITEIIRAKLAGEVDAEEKRSAYNNFCVAYARQANHLMKHRAQQLGHASVMSWRIYLEQMWIFGLTLPIYVGKWFLDPQYIRAYLNQAPSVQRVISDVYEELNKLVDKGVNIGLMDIYRADQLFGDYTPVKPQDDYLENAKFEPKHCNVFASLKQTYFYTAILYILLQWKGFGFLGVLAPRHLYNFFSLLKGALETAARERVYLQQTKHIPTNTEVAKMRQEFKNYRYQSQF

SEQ ID NO: 87167 - protein, 476 aa, Sphingomonas trueperi
  misc_feature (1)..(476): tr|A0A543LNT5|A0A543LNT5_9SPHN Tryptophan halogenase OS =Sphingomonas trueperi OX=53317 GN=FHW45_4250 PE=4 SV=1
MSLAQIMVVGGGLTGWSTAAALKRRVPALTVSILPLAPPGDALADRIATTLPSILGFHADLGIGLGDGVVRTGSICRLGTLYRDWVEGLPDYVHAHGPHGEPVDGVSFHHLWARAARGDVVAPFDAFSAAAAMAREGRFVLPAEGGILGAHSFGLILDVPRYLGMLQAFARHVGVRTLDGGLAEVERAADGSVAGVVLTDGLRVTADLYCDCSGPAARVHGVTGSARESWQRWLPCDRLLLEEATPAEDAAPIECVTATAHGWRWTSASQQGAVYSAAHSHREDAAIRFEAGAALEPWRHNVVAIGDAAVAIEPLEWGNLHLAHSAIDRLISMLPAGAPHPLEAAEYNRQALAEARRVRDFVLLHYVTARRAGAFWHDVTSAEPPDSLAHSLRLFRERGRLPFYEEETFDRDGWLSVLFGQGVLPRRIDPLADAVPPARAADAMARHRDRIAQAVRPLPTLAAYRAAQSRHLHERA

SEQ ID NO: 87168 - protein, 510 aa, Alteromonas sp.
  misc_feature (1)..(510): tr|A0A1Z9X5B8|A0A1Z9X5B8_9ALTE Tryptophan halogenase OS =Alteromonas sp. TMED35 OX=1986603 GN=CBB95_14725 PE=4 SV=1
MNSSTNTSSKQRIVIVGGGTAGWLTAAIVAAKHKVAKGQCGLDITLVESSDIPTVGVGEGTWPTMRNTLKDIGLSEKEVFKRCSAAFKQGGKFVNWVKGNGDFYYHPFTVPLGYGRVEMAPYINNIADFANTTNFQQHVCEQNMAPRTLNEEEYSSAQSNYAYHLDAGAFADMLKSFCKEELGVQHKVATVEQVSATSSEHIENITLDDNSTLHADLFVDCSGFRSMLLGEALQEPVVSVNDVLFNNSAIALHVPYEDDFEIKPYTQATAQEAGWIWDIGLSSRRGVGHVYSTDFTDDGRAEELLRRYVGDEKGKLNARVIRFDSGYKKRIWKGNCIGVGLSAGFVEPLEATALMLIEISARYIAEQMPTPASAMPIISQRFNKQMQYRWQRIIDFLKLHYIFNQRSEPYWQANRDIASIPDSLKEDLEIWKYRGPQIADFSAAIELFPAASYQYVLYGMGFSPDFSLQSHFYTERDLADKVMKQNQLITQQKLSSLPNHRDYIEQWLAS

SEQ ID NO: 87169 - protein, 529 aa, Streptomyces scabrisporus
  misc_feature (1)..(529): tr|A0A1T3NS31|A0A1T3NS31_9ACTN Tryptophan halogenase OS =Streptomyces scabrisporus OX=159449 GN=B4N89_00380 PE= 4 SV=1
MDHRIKRLVVLGGGTAGWMTASYLGKALQGAVDITVLEAPTIPRIGVGEATVPNLQSAFFDYLGIPEDEWMRECNASFKAGIRFVNWRTPGNGAAQPRALDGGVDHFYHHFANLPEHDGIPLSHYWHLRTLRGETDVPFDYACFAEAEVLDAKKGPRYRDGSQATGYAWHFDANLVADFLRRFATEKQGVRHVQDEMTEAVLDERGHITALRTKEGRLLEGDLFVDCSGFRGLLINQAMEEPFLDMSDQLLCDSAVATAVPHDDAANGVEPFTSAIAMSSGWTWKIPMLTRFGTGYVYSSKFTGQDEATREFCDLWGLNPDRTPFNHVRFRVGRNRRAWVRNVVSIGLASCFVEPLESTGIYFIYSAVHQLAKHFPDKRFDPTLVDHFNREVESMFDFTRDFIQTHFYFSPRTDTEFWRANKELPLGDDVREKISLYRAGFPVNTSQAGERVYYGNSEVDNKNFWNNTNYWCIFAGLGHLPDRVLPALEYKPASIESVENLFAEVESRRRHLLAELPTTYEFLRQLHGK

SEQ ID NO: 87170 - protein, 494 aa, Cellvibrio sp.
  misc_feature (1)..(494): tr|A0A4V3DWW7|A0A4V3DWW7_9GAMM Tryptophan halogenase OS =Cellvibrio sp. YR554 OX=2135765 GN=C8K91_101821 PE=4 S V=1
MHDKKIKLVIAGGGTAGWMAAAAFSIKFGELLDITLIESDDIGTVGVGEATIPPIRVFHKLLGIDEQEFMRATRATFKIGIAFENWGQQGDRYIHSFGKTGKETWLGDFHHFWLRSRELGMDFEFGDFCLEVQAALANKFFTGPNAEINYAYHLDATRYAKFLRDIYEKKGGKRVEGKITEVKQHPDSGFITGVILASGVTVEGDFFIDCSGFRGLLIEQTLQTGYEDWTHWLPCDSALAVQTESVGPAVPYTRSVAHHAGWRWQIPLQHRVGNGSVYCSRFMSDDEARTKLLQDVDGKTVTEPRPIKFRAGRRNKSWNKNCVALGLASCFIEPLESTSIHLFIMAITRLMRLFPFSGVEPALVNEYNRDTLAEIEPIRDFVILHYKATERDDSPFWRYCKNMDVPASLAHRMELFKKTGHAYQAPGELFRIDSWTQVMLGQRLMPEQYHHIAHLMTENELRQFLTKIKTTVRSNVEKLPTHEDFVQRFCKTVI

SEQ ID NO: 87171 - protein, 513 aa, Pseudoalteromonas lipolytica
  misc_feature (1)..(513): tr|Z5XZM4|Z5XZM4_9GAMM Tryptophan halogenase OS=Pseudoa lteromonas lipolytica SCSIO 04301 OX=1452721 GN=AT00_00 745 PE=4 SV=1
MQQNNVKKVVILGGGTAGWLTAGLIAAQPHLTHNAQITLIESPDIATIGVGEGTWPTMRQTLKTIGISESDFIQTCDASFKQGSRFDGWCEDDGSTHYYHPFSLPVAYQQLNIAPYWFANKEAVSFSHAVASQTYLCDHHKAPKNHLHSAYQGEANYGYHLDAGKFAMLLQTHCTTQLNVEHIVSHVESINNDDEGYISSLETRDHGIITGDLFIDCSGTHAKLLHQHYGVELIEQQDVLFNDRAVAVQVPYASPQQDILSYTKATAQDAGWIWDIGLQSRRGLGMVYSSRFANSDDAKQALGRYIESTQPGTDQSQLTFREIRFTPGYRRTFWHKNCLAIGMSAGFIEPLEASALVMVELGLNNLLANFPTHRAAMPTLAKRFDDQCHYRWQRIIEFLKLHYVLSKRTSPYWQAHKEAASVPAQLQENLALWQYQSPWLNDFDRAQEVFSAASYQYVLYGMKQLPKFPSMAMPAAIVEHFTANQQHAKHALQQLPTNRELLNHIQQFGIQPI

SEQ ID NO: 87172 - protein, 501 aa, Alteromonas sp.
  misc_feature (1)..(501): tr|A0A1Z9XF51|A0A1Z9XF51_9ALTE Tryptophan halogenase OS =Alteromonas sp. TMED35 OX=1986603 GN=CBB95_07045 PE=4 SV=1
MTALGLDSSNNQTPVKNVVIAGGGTAGWMAATALSRLLGKSVSVTLVESKDIGIVGVGEATIPPIRTFHKLLGIDEKAFMRATQATFKLGIEFENWREVNHSYIHSFGITGRECWAGEFHHFWLRAQDYGFGGDFGDYCPELIAAKQNKFATSDAMPLNFAYHFDAVAYGRFLKSLACDAGVTHREGDIEKVTVCPNTGNIQALHLTNGESIGGDFFIDCTGFKGLLIEQALHTGYDDWSHYLFCDRAVAMQTELTSPPVPYTKSVAHKAGWRWQIPLQERMGNGLVYCSRFMSDQEAIDTLKSQVSSTPINEPRVIRFTPGKRRRGWNKNCVALGLSSGFIEPLESTSIHLIMTGLIRLMRLFPFDGITQSAVDEYNNKFDSEMSAILDFIVMHYKVTQREDSPFWQQCQRMEIPASLTHKLDLFAQSGRVFLDDGDIFRVDSWTQVLMGQGMKPQQYHRVVDEMSEQSLKQFMAGLKLQVDNHVAKLPSHNAFLAQYLR

SEQ ID NO: 87173 - protein, 518 aa, Shewanella colwelliana
  misc_feature (1)..(518): tr|A0A1E5IQQ3|A0A1E5IQQ3_SHECO Tryptophan halogenase OS =Shewanella colwelliana OX=23 GN=BEL05_11285 PE=4 SV=1
MSDNSKRPMKVLIVGGGTAGWLAANHLGKKFSASEGLSVEVTLIESPNIPNIGVGEGTVPMMRDTLRYLGIDEGDFIRQTDATFKQSIKFINWTDNPQPDNPTYYHHLFDYPKWDNSALMWLNESAESTSYANSVSPQGYFADLGLGPKTMTQPQYQGETSYAYHLDANKFSVLLRDNAVKRFGVSHILDDVTDVLVDDAKQIQSVTTVNHGVLEADLYVDCTGFSARLIEQACEVPFVDKGDVLFVDTALAVQVPYEQSDTPIPCFTLSTAQEAGWIWDIGLTERRGVGYVYSSRHSTQAEAEQVLRKYLGTAGDKLALRKIEMRIGYRERAWHQNCVAIGLSAGFVEPLEATGLLVFDVTSRMLAECFPAHRDAMPLVAEQFNRRITHTWDKVIDFIKLHYVASKRSDSQFWLDNRQTNTIPESLQQKLALWRYQLPSRYEFASTMEIFNLENYLYVLYGMDFDTDIAPWTVTDAQQSKYQAQQAQLQQYVQAARKQLLPHRELIARIKQYGISKV

SEQ ID NO: 87174 - protein, 501 aa, Marinicauda algicola
  misc_feature (1)..(501): tr|A0A4S2GX84|A0A4S2GX84_9RHOB Tryptophan 7-halogenase OS=Marinicauda algicola OX=2029849 GN=E5163_14685 PE=4 SV=1
MRQGQIERIVVVGGGSAGWMAAAALANAAPRECRITLVESEAIGIVGVGEATIPPIKVFNRLLGISEAEFLRETKGSFKLGIEFPGWRREGTRYFHQFGSFGREFDLVPMHQYWLKMRHEGDDTPIEDFSMAWALARRNRFAPPVSDPRMVQSTHDYAYHFDAVLYGQFLRRYAEARGVVRVEGKVADVRLDAESGDIAGLTLDDGRTVDGEFFLDCTGFRGVLIEGALQTGYHDWRRWLPCDRAIAVPCAHGGDFTPYTRSTAKAAGWRWRIPLQHRIGNGYVHCSEFIGEDEATQALLADLDGAPEADPRVLRFVTGRRKMFWNRNCVAIGLAAGFMEPLESTSIHLIQTGIMRLIALFPDRSDNALARREYNRLTEAEYEHIRDFLVLHYHETAREEPLWRHTRAMEIPDTLRYRLDHYRACGRQVAFGHDLFPNASWLAVMAGQGVEPETYDPIVDKRDTPFRERLAGLKRLIHEAAERAPDHRTALNAVMDAASAA

SEQ ID NO: 87175 - protein, 502 aa, Cellvibrio sp.
  misc_feature (1)..(502): tr|A0A1Y0FZX5|A0A1Y0FZX5_9GAMM Tryptophan halogenase OS =Cellvibrio sp. PSBB006 OX=1987723 GN=CBR65_16530 PE=4 SV=1
MKNSPLQSLVILGGGSAGWMAAAFLAKKFQGATLKISLIESSEIGTIGVGEASVPAIKYFLSELGISEKDFILATHATFKLGIDFESWYERDKKFFHPFAKFGEKIAAVDFTHYWTRMRNAGCPEPLDSYSLPTQMARAGKFAIPRGDTSIDGMASFNYAYHFDAALFAQYLRRYAEGLGVERCDAKVEKVQQHSSTGNIESLSLHDGTEVHGDFFIDCSGFAGLLIEGALQTGYEDWSHWLPCDHALAVPSSPNDSINPYTRCTAMSAGWKWNIPLQHRVGNGYVYASQFIDDSAAQEELLSGLDGEMLASPKLLKFKAGRRKKIWNKNVLALGLAGGFLEPLESTSIYLIQYGLTAFFENFPTKTENNYLQDRVNAMVAEHTLRLRDFLIAHYCLNDRRGETFWDYCRNMVIPGSLEIRIEEYRATGSIRLDELDFFKMNSWAAILSGMQITARYYHPKVEYLEERLVKQELDNMRKGIARVLPIIPDHEQFIKNNCSIR

SEQ ID NO: 87176 - protein, 502 aa, Sphingopyxis indica
  misc_feature (1)..(502): tr|A0A239K6A1|A0A239K6A1_9SPHN Tryptophan halogenase OS =Sphingopyxis indica OX=436663 GN=SAMN06295955_112104 P E=4 SV=1
MGDNRVTKVVIVGGGTAGWMAAAALSRMMGHLSIRLVESDAIGTVGVGEATIPAIRLFNALIDLDEDEFIRETQGTFKLGIEFRDWGRIGDAYMHAFGQIGRSLGILQFPQYWLRGRREGVAGPLADYSLTETAARRNRFARLPRIPNTSLDGITYAFQFDAALYAAHLRRIAERAGARRTEGRIEGVRRNGETGHVEAVILESGEEIGGELFIDCSGFRGLLIEEALETGFEDWSHWLPCDRAVAVPSENAGPPRPYTQAIAQRCGWQWRIPLQHRTGNGHVFCSEFISEDEATATLLANIEGRPLAEPRTLRFRAGMRKRAWTGNVVALGLASGFLEPLESTSIHLIQNGIAKLLSHFPDRDFAAVNIDAYNRRVAFDYERIRDFIILHYCANQRTDSPFWVRCREMAIPDTLARKVELFRSHGRIFREEDELFIEIAWFQVLTGQNIAPQSYHPLADALTHDELAGFFSDIGKIVANTASRLPSHADFIAQHCAAGGSA

SEQ ID NO: 87177 - protein, 506 aa, Alteromonas macleodii
  misc_feature (1)..(506): tr|K0ELI9|K0ELI9_ALTMB NAD(FAD)-dependent dehydrogenase OS=Alteromonas macleodii (strain Balearic Sea AD45) OX =1004787 GN=AMBAS45_14410 PE=4 SV=1
MNKLPQEIVIVGGGTAGWMTACYLARTAELMANNSNVTACAPKITLLESAVISTVGVGEGSTPYLRHFFEFLGISESEWMLKCSATYKMGISFERWTTTAESKTTRPAFTDSDSYFHPFFSSLDIPTADMYFNAVNEYRKGASHDINPSHYFTAAHMVEKGITPDAICSSANIDYAYHFDAGLLGDFLKEYALNKGVSHQIGTVANVESHEQTINSLKLDDGNTLSADFFIDCSGFRGLLGKQALLRKFTSYADTLFNDAAVAIASDATASPKTALQTRSIALSHGWQWHIPLTSRTGNGYVYSSQFCTEAQAEEELRLALEPDQSHQQARHLKMTVGRLEEHWKGNCLCIGLSQGFIEPLEATALMLVQYALHHFIDCWQSNNPRREERYNSEINRMFDGIRDYIAAHYYLNTRDDSAYWVACREDLKVPDTLSYLLNAWDKGASFEQALNEVDNKLVYLRPSWYCIFAGMKRFSNNSTPLAQPNILALRTMQQSVEGAHRVRQP

SEQ ID NO: 87178 - protein, 130 aa, Pseudoalteromonas sp.
  misc_feature (1)..(130): tr|G7EF56|G7EF56_9GAMM FADH2 O2-dependent halogenase I OS=Pseudoalteromonas sp. BSi20652 OX=388384 GN=prnA PE= 4 SV=1
MLGINEQAFMKATQASFKLGISFENWGDENTHYIHSFGATGKECWAGEFHHFWLQGKTLGINNPFGDYCYELQAAKSGKFAFNQQNPINYAYHMDATRYAQFLREFSEPLGVKRVEGKIQKVVKTLKQAI

SEQ ID NO: 87179 - protein, 522 aa, Alteromonas macleodii
  misc_feature (1)..(522): tr|K0EER6|K0EER6_ALTMB Tryptophan halogenase OS=Alterom onas macleodii (strain Balearic Sea AD45) OX=1004787 GN =AMBAS45_02875 PE=4 SV=1
MHQANSPLRRIVVVGGGAAGWLTASIIAVTHKHDDNISVTLVESPDVSILGVGEGTWPTMRSTLLKIGISEETFLAQCNASFKQGTSFHNWRSDTVEHQYYHPFSLPFRYFESDIAAWWQSYAAEQDFAHAVCSQAALCDHHLAPKQRQTPAYAGIANYGYHLDANKFAALLQKHATTVLGVQHIVDHVDDVVGSSSQPIAAIVGREHGNITGDLFIDCTGFAARLIGQHYGVPLTSCSNVLANDSAIAIQAPYVDSSVDIASTTHSTAQDSGWIWDIGLPSRKGVGYVYSSAHCSEDEARATLETYLKHDKKTADVDVSKARKITFSPGYRKTLWVENCVAIGTSAGFLEPLEASALVMIELSATHIAKQLPRTYKECQAAGRQFNQAFEKKWERIIDFLKLHYVLSEREASAYWRDMRNQESCSTQLQDWLTLWKSRSPISSDFELREELFPAASYLFVLYGMGFRSQYNDVYQANLHTPEQRQAYAKHVQSIQQQLSGLPTNRQFLNQVAQSQGLSMHY

SEQ ID NO: 87180 - protein, 517 aa, Cellvibrio sp.
  misc_feature (1)..(517): tr|A0A1Y0G065|A0A1Y0G065_9GAMM Tryptophan halogenase OS =Cellvibrio sp. PSBB006 OX=1987723 GN=CBR65_17680 PE=4 SV=1
MNKATKSIVVVGGGTAGWITAGRIAAMHKANQPDGVQVTLVESPNIPIIGVGEGTWPTMRNTLIKLGISETDFIRECDASFKQGAKFARWVDGSDTDFYYHPLMLPQGFGKVNLAPYWQQHRHNGLEGQSFSAAVCFQEAICEQGLAPKMITTPEFNSVANYAYHLNAGKFSSFLQKHCCEKLGVQHILADVTAVHSAENGDIAAVETQQAGRVEGDLFIDCTGFSALLLGKHFEVPWVDCSDVLFIDRALAVQVPYAGEDAPIASHTISTAQEAGWIWDIGLVHRRGVGHVYASGYTTEEQALQRLADYVGPMFDESAVRRIPIRSGHRQLFWKNNCVAVGLSAGFLEPLEASALVLVELSAAMIAEQLPACRAVMDITARRFNDTFHYRWQRIIDFLKLHYILSKRTDNAFWIDNRDPQTIPESLQELMTLWRYQSPWDHDFTSNNEVFPAASYQYVLYGMGFETHPEFQQHQLDEAQAREQLNKNRRNIEQALRQLPTNRDLLSKIHQYGLQTL

SEQ ID NO: 87181 - protein, 495 aa, Alteromonas sp.
  misc_feature (1)..(495): tr|A0A385MV59|A0A385MV59_9ALTE Tryptophan 7-halogenase OS=Alteromonas sp. RKMC-009 OX=2267264 GN=DS731_10490 P E=4 SV=1
MTSGVRKLVIAGGGTAGWMAAALFKKVLADNIKVELIESEDIGIIGVGEATIPPIQTFNQYLGLDEKAFLKETHASIKLAIRFENWKQEGSSYYHTFGAPGATLGFVGFQHYWLRAAQNGLTQSLWDFDLNYLACLEGKFNKIQTDNPVYQLPYAYHFDATLYGQFLRRMAENAGVKRTEGTIEHVKQNATTGFVEALQLKSGQQIAGDLFLDCTGMRGLLLQKTLGTEYEDWSHWLCADRAWAVPSQRHEHTAPFTRSIARSTGWQWRIPLTHRNGNGLVYSSKYMDDDKARELLMTNLDTPALDEPRKISFRTGRTVKQWSKNVIGIGLSSGFLEPLESTSIHLIQSGLVRLLKMFPHKEINPSMETMYNAESKEEFETIRDFIILHYVVNERDDSEFWRDMQNMSIPARLEQKINAFKDTATIFNEQNDIFRDASWLQVMAGQGIMPRDHHPAANTQTVPQLLDVMGKVLQAKQQPLTQMLPHDEFLKRFTQ

SEQ ID NO: 87182 - protein, 522 aa, Cellvibrio sp.
  misc_feature (1)..(522): tr|A0A1Y0FYV7|A0A1Y0FYV7_9GAMM Tryptophan halogenase OS =Cellvibrio sp. PSBB006 OX=1987723 GN=CBR65_12905 PE=4 SV=1
MTDQITRVVIVGGGSAGWLSAGIIAASGPAHVQVTLIESPDVHPIGVGEGTWPTMRATLQTIGVSETDFFSECDASFKQGSKFSCWTSVSKEDDYYHPFTPPVKYHDINLAPFWLPFKDKIPFANAVCPQAAICDLGYAPKQITTAEFGAVLNYGYHLDAGKFAPFLHKHCVEKLDVNYISANVVHINSQDNGDIASVMTDSHGEVSGDLFIDCTGLSSLLMEKHYKIPFVSQKAILFNDSALAVQIPYAEDQTAIASHTLSTAQTNGWIWDIGLQSRRGIGHVFSSAYTTDEAAERELRSYLVPSVGNKSVEDLAVRKITFNPGHRKTFWHKNCVAIGLSAGFIEPLEATALVLIELSAKMIAQQFPANRTAMDTIAKRFNKALTHHWEQIIDFLKLHYVLTKRTDSAYWRDNCSANTTPDSLNELLELWKVQSPWLHDEILREEMFPSASYQYVYYGMKGTTNIAVSSGTHNRKNLYEKQWKKAETLFMENVQHIQQLKKILQPNRELIEKIKQHGMQTI

SEQ ID NO: 87183 - protein, 511 aa, Sphingomonas trueperi
  misc_feature (1)..(511): tr|A0A543LY58|A0A543LY58_9SPHN Tryptophan halogenase OS =Sphingomonas trueperi OX=53317 GN=FHW45_2351 PE=4 SV=1
MSRHIQSVCIVGGGSAGWLTAALIAARHGPDLQVTLVESVRLGIIGVGEGTWPTMRNTLRKIGISETDFLRTCKASFKQGAKFAGWRTGAADDFYYHPLVLPEGFPTVDLAPFWNAQADAAGTPSFSDAVCFQEFLCEHHLAPKQITSPEYGGIANYAYHLDAVRLGEMLRDHCVGKLGVRHVDDDIVEVQQAENGDVTAVIGQRHGGIAADLFVDCSGFSSLLLGQTLGVPFIDCSDVLFIDRALAVQVPYETDDSPIVSHTVSTAQNHGWIWDIGLQNRRGVGYVYSSRHAGADRVEEALAAYVGPAFADLTPREITIRSGHRETFWKNNVVAVGLAAGFLEPLEASALVLIELSADYIASAMPATRSAMDIVARRFNEMTRYRWDRIIEFLKLHYMLSERDDTAFWRDNREPATIPQPLQDLLQLWRHTPPGEHDFASAHEMFPAASYQYVLYGMGFRTAPRAHALAARHAAEDAFERVAAMKQRLAAAMPTNRALLDKLAQYRFQPV

SEQ ID NO: 87184 - protein, 506 aa, Sphingomonas sp.
  misc_feature (1)..(506): tr|A0A0Q6AWW6|A0A0Q6AWW6_9SPHN Tryptophan halogenase OS =Sphingomonas sp. Leaf407 OX=1736369 GN=ASG37_03550 PE= 4 SV=1
MEQAADTAIRSIAIVGGGTAGWMTAAALAHAIPRGCTITLIESDAIGTVGVGEATIPPIRVFNQTLGIDEAEFLRETKGSFKLGIEFVDWARTGQRYFHPFGTFGKPFDLLAVHQHWLAARAGGSRVPLDELSMAWGAARHGRFAPPVGDPRSVASTFDYAYHFDAGLYAAFLRRYAEARRVERIEGAVVDVTLHGDNGHVASVTLADGRQVAADLFVDCSGFRGLLIEQALGTGYQDWTHWLPCDRAVAVPCATGGEGMTPYTRSTARAAGWQWRIPLQHRTGNGYVYCSRHLSDEEAATTLLANLDGPALGDPHFLRFTTGRRTKFWNRNVVAVGLASGFMEPLESTSIHLIQAAIAKLLAFFPTRDFDPAVVDEYNRVAITECERIRDFLILHYKLTQRSDAPLWRDCAAMAIPDTLAMKIDHFRSTGRLIARDMDLFGPASWLAVHIGQGNDPRGGDPLLAYAAGAQTSSGFVDRLAGAIDAMARSMPGHAAYLQRIGAIQP

SEQ ID NO: 87185 - protein, 504 aa, Sphingomonas sp.
  misc_feature (1)..(504): tr|A0A1I3TI72|A0A1I3TI72_9SPHN Tryptophan halogenase OS =Sphingomonas sp. NFR04 OX=1566283 GN=SAMN03159338_2261 PE=4 SV=1
MAGRQSLRVVIVGGGTSGWMTAAAIARLLPARCSLHLIESEAIGVIGVGEATLPHIRSFVEKLGIREADFMAWTRGTFKLGIEFRDWGKIGDSYVHPFGTFGRGKGEVDFHHYWTRLRRAGADVPPLEAFSYACMLARANRFEVPATDPAQLASTYGYAYQFDALLFAPYLRSIAEGLGAMRSEGKVVEVLRDGTSGDITAVRLDDGQLIEGDLFIDCSGFRSLLLGEALEEPFEDWNHWLPADRAVAMPCRTETSVTPYTSAIAMPAGWRWRIPLQHRTGNGYVFASAFTSDDAAAQALTQAVEGAPLADPRFLRFRAGRRRRSWVNNCVAIGLASGFLEPLESTSIYLVQQAITALIELFPETTISTVDRDEFNRLVDLEYDRIRDFLILHYHATTRSDSDFWHYVRTMAVPDSLAEKIELFRRAGRVVKYREGVFLDASWIAVYVGQGIIPEGYDPRADLPDNDSLMRGMQALRAEIDATVAQVPEHLRYIDQCCAMAAAA

SEQ ID NO: 87186 - protein, 492 aa, Planctomycetes bacterium
  misc_feature (1)..(492): tr|A0A517XLN1|A0A517XLN1_9BACT Tryptophan halogenase OS =Planctomycetes bacterium ETA_A1 OX=2528023 GN=ETAA1_02 960 PE=4 SV=1
MTRLDCDLVVLGSGFGGTLLAIVARSLGLSVAVVERGTHPRFAIGESSTPLADFKLARIADRFGLDWLRPLAKYGPWKATYPHLSCGLKRGFSFFRHRAGESFAPAEGNANALIVAASPTDATADTHWYRPDFDAHLVERAVAAGAHYLDRCEVHTLRHTKPGWEIEGARPDGAVSVRAGLLIDATGTGQALAEALKLEAVDPAQLRTRSRALYSHFRGVAHWHDVLGPAATADHPFPCDAAALHQIIDGGWMWVLRFENGITSAGFSLDPDRHPVRPGESPDAEWRRLLDTYPSLARQFADAVPTRPLVRTGRLQRRLTRAAGPDWALLPHAAGFLDAWLSPGIAQTLYAVNRLANVLADEPAARARRLAGYGDAVLRELAWVDEITGTCFECLDRFPVLATAVMVYFTAAIYCEERERRGEAGPDEGFLLADHPEYRAAAAKLFAAARTTADADAFLAAARRALEPYNSCGLCDPRRRNMYPYTASHAAR

SEQ ID NO: 87187 - protein, 507 aa, Alteromonas sp.
  misc_feature (1)..(507): tr|A0A4Q8UK47|A0A4Q8UK47_9ALTE Tryptophan 7-halogenase OS=Alteromonas sp. KUL49 OX=2480798 GN=EYS00_00870 PE=4 SV=1
MTMNEVNSITNYVVVGGGTAGWISAAILSKALRNQPHKISVVESPDIPTIGVGEATIPSFVDLLEYLQIPLAEFVAKTGATFKLGIKFVDWKQKGHHYWHQFGEVGNKIDGVDFYQHWLKHHLTTQKYEFTDFSPAVALAKQHKFFISSPEHPTNLSKSTFALHFDASKVAKFLKQYCLSHGVEYVPAKVCDVTKHNDGSIYSLVTDEGKELEGDFFFDCSGQRALLIGKALRVGYTNWQHHLPVNSAIAVQSESRGEIPPYTESVALEHGWRWRIPLQERIGNGYVYCSDFCSDENARQTLLANIERPTSEPRKITFTTGVRQKIWDKNCVAVGLSSGFLEPLESTSIYLVMRTMLKFVQSLPSAQLFQPTIDEFNRLMVNEYEYIRDFIILHYCVSERQDSDFWRMWQHMELPDSLKYKLELFKCQGRLMDNYYDLFSHESWYAVLEGMGVRPRSYDPAINNSDDMLVAQALDKSFAALQVSASKCLDHKDYLDKLIAAFYRATA

SEQ ID NO: 87188 - protein, 500 aa, Nocardia sp.
  misc_feature (1)..(500): tr|A0A0M8WH04|A0A0M8WH04_9NOCA Tryptophan halogenase OS =Nocardia sp. NRRL S-836 OX=1519492 GN=ADL03_13165 PE=4 SV=1
MTASYLTAAFGDRVNVTLVESARVGAIGVGEATFSTVRHFFDYLGLEEKEWMPACNATYKLAIRFENWREPGHHFYHPFERQRVVDGFPLTDWWLREPRSDRFDKECFLVGTLCDDLKSPRRLDGTLFERDLGERSSYRTTLAEQTTQFPYAYHFDATLVANYLRDYAVARGVTHVLDDVQDVALDERGWISHVVTKEHGDLTGDLFIDCTGFRSLLLGKALAEPFESYQSSLPNDSAVALRVPQDMENRGLRPCTTATAQEAGWIWTIPLFDRIGTGYVYAGDYTTPEEAERTLRAFVGPAAEHAEANHIKMRIGRSRRHWVNNCVAIGLSSGFVEPLESTGIFFIQHGIEQLVKHFPDARWDDGLRESYNRLVNNVMDGVREFLVVHYYAAKRQDNQYWKDTKSRPLPDGLAERLERWQTRLPDNESVFPHYHGFESYSYVCMLLGLGGLELKSSPALNLMDPASAQHEFKLVEEQAAELARTLPTQYDYFAQLHRAR

SEQ ID NO: 87189 - protein, 495 aa, Alteromonas sp.
  misc_feature (1)..(495): tr|A0A4Q8U3C1|A0A4Q8U3C1_9ALTE Tryptophan 7-halogenase OS=Alteromonas sp. KUL49 OX=2480798 GN=EYS00_18665 PE=4 SV=1
MVIAGGGTAGWLAAATLGNIFANTSTQITLIESSQIGTIGVGEATIPPFIAVIESLGIDLVDFIQQTQASFKWGIQFPNWRKKDHSYFHPFGTVGKTIDGHDFFQCWLKTLEGKDAMPLMAHSKEAILAEQGRFFKPFEAANTPLASAQFALHVDANLVVKYLKRFCEGKGVKHIDGKIEKVSTHPSGDIASLTLDDGQLVNGDFFIDCTGFKGLLIEETLASGYEDWRCYLPCNKAVTVPTQTSEPLNPFTIATAQDAGWTWKIPLQHRTGNGYVFADDYIDDDRALNTLLNQVGEPLQGEPQFIPFKTGIRKQPWKANCLSLGLAQGFLEPLESTAIHLVSKSLALFVRTFPNKENNELLRNEFNRRLRADYEEIRDFLILHYCETEREDTPFWRWCKHEMPIPASLQQKLDFFKRGGGLIPQVEALFQPTSWYAVFEGMGVRPDAYNPTLNALDANALGKSLSAGAKSLQTLANTQPLHKAFLDQYCCAPKP

SEQ ID NO: 87190 - protein, 534 aa, Streptomyces misionensis
  misc_feature (1)..(534): tr|A0A5C6K4K0|A0A5C6K4K0_9ACTN Tryptophan 7-halogenase OS=Streptomyces misionensis OX=67331 GN=FRZ03_01935 PE= 4 SV=1
MTGEDRRIKKVVILGGGTAGWMTAAYLGKALQNTVEITVLEAPTIPRIGVGEATVPNLQRVLFDFLGINEDEWMRECNASFKTAVRFVNWRTEGAGQATARQLPQGGPDHFYHPFGLLPDYDQTPLSHYWYKNKYEGLTDEPFDYACFREPPVMDAKLSPRWLDGRHATRYAWHFDAALVAKFLCRFATEKQGVRHVQDEMTRVEQDERGFVTALHTASGKVLDADLFVDCSGFRGLLINKAMAEPFIDMSDHLLCDSAVATAVPHDDEANGVEPYTSAIAMSSGWSWKIPMLGRFGTGYVYSSKFTGKDEATREFSDMWGLDPENQEFNHIRFRVGRNRRAWVKNVVGIGLSSCFVEPLESTGIYFITAAIYQLAKHFPDRSFNETLINRFNREVETMFDDTRDFIQAHFYFAPRNDSPFWRANKELTLPENIREKIEAYRAGLPINSPVTDESTYYGNFEAEFRNFWTNGSYYCIFAGLGLVPDAPLPALSYKPESVTGAQPLFERVKRQQQDLLDTLPTAYDYLRQLHGRS

SEQ ID NO: 87191 - protein, 517 aa, Tokpelaia hoelldoblerii
  misc_feature (1)..(517): tr|A0A1U9JVN3|A0A1U9JVN3_9RHIZ Tryptophan halogenase OS =Candidatus Tokpelaia hoelldoblerii OX=1902579 GN=BHV28 _12250 PE=4 SV=1
MLDLTQAKRIAIVGGGVAGWFAALVFRRLFGDETEVVVFADEGGMPPVAQDGGLLNMAAALTRNGLDVEEFIRETGATSRLGVAFHNWRKNTQAEAGDVFYHLMPMPGEQVAEIDHMAFGFAPLLAARVAAGADLHSFFPGFSLIRNKSSQREAQAVLATKRSGLSQSWHFDCRRFARYLRGKALTRGVREQAGRVDKLVVNEHGAVTAVAVNGAQAAVDFVVDASGLRRIGLGQTYKESWCSLHSFLPVDTMQPFSRICQQGQLPLLTKATALSSGWLWQVPLANADRGYMGGAYLFSSAHGNVHNMQAELVQHLGAGVQLAQPLRFEAGHFKVAWRNNLVALGAAAGFVEPLEATAMGQMLESLRNIERMISDGGGVVGHQAIFSFNRSSYKTWDTISDFLRMHYEGGRQDTPFWQAVAQLPRSGRYQEIRRAFARRLPRAVDLESYIGYGWGAMFHMVNWLSIGAAVGVVPQQAGVADLKRLPRNMLQEVGPYLKELRKRMGQEMNVSGKQAGQ

SEQ ID NO: 87192 - protein, 506 aa, Phenylobacterium deserti
  misc_feature (1)..(506): tr|A0A328A8A6|A0A328A8A6_9CAUL Tryptophan 7-halogenase OS=Phenylobacterium deserti OX=1914756 GN=DJ018_16810 P E=4 SV=1
MNDRRIQSLVIVGGGTAGWMAAARLAQHFRGTPLKITLVESSEIGTIGVGEATIPTIRSFYGALGLSDAEVMRATQATAKLGIRFTDWSRPGRSFIHPFGLFGHELNGIEFQHWWLRARSLGAAAELGEYSLGASLAAAGRFNLPPRNPPSPLAVFDWALHFDAGLFAQLMRRHAETLGVRRIDAKVRQVKLRPENGFIEGVELDSGETVTGELFIDCSGFRGLLIEEALGAGYEDWSQWLFCDRALAVQSESAGDPAPFTEVTAQPAGWRWKIPLQHRDGNGHVFSSRHMDEPTALRLLTGAVQGRLLHEPRAIRFHPGRRKLAWSRNCVALGLASGFLEPLESTSIALIETGIEKLRQLFPDRSMDPALRDEFNDWSRREMERTRDFIILHYKLNGRTDSDFWREAREMDVPDSLQHKIDLWRARGHFVRYRWEMFQPASWLAIYAGFECLPQVWDPGVDAVEPNSLRARLADMRQAIARAVASAPPHTQFLQQTARAEAAAVG

SEQ ID NO: 87193 - protein, 511 aa, Sphingomonas sp.
  misc_feature (1)..(511): tr|A0A1I3Z7V5|A0A1I3Z7V5_9SPHN Dehydrogenase (Flavoprot ein) OS=Sphingomonas sp. NFR04 OX=1566283 GN=SAMN031593 38_4091 PE=4 SV=1
MSRHIQSVCIVGGGSAGWLTAALIAARHGPDLQVTLVESVRMGIIGVGEGTWPTMRNTLRKIGISETDFLRTCKASFKQGAKFAGWRTGAADDFYYHPLVLPEGFPSVDLAPFWNAQADAAGTPSFSDAVCFQEFLCEHHLAPKQITSPEYGGIANYAYHLDAVRLGEMLRDHCVGKLGVRHVDDDIIEVEQAENGDVTAVIGQRHGGIAADLFVDCSGFSSLLLGQTLAVPFIDCSDVLFIDRALAVQVPYESEDAPIVSHTVSTAQDHGWIWDIGLQNRRGVGYVYSSRHAGADRVEEALAAYVGPAFAELTPREITIQSGHRETFWKNNVVAVGLAAGFLEPLEASALVLIELSADYIASAMPATRSAMDIVARRFNEMTRYRWDRIIEFLKLHYMLSEREDTAFWRDNRDPATIPQPLQDLLELWRHTPPGEHDFASAHEMFPAASYQYVLYGMGFRTASRPGALAARHAAEDAFERVAAMKQRLGAAMPTNRALLDKLAQYRFQPV

SEQ ID NO: 87194 - protein, 513 aa, Sphingomonas sp.
  misc_feature (1)..(513): tr|A0A4V1JWP6|A0A4V1JWP6_9SPHN Tryptophan 7-halogenase OS=Sphingomonas sp. UV9 OX=1851410 GN=EQZ23_00915 PE=4 SV=1
MHEIQNIVIVGGGTAGWLTAGVIAAKHQARRQHGFTVTLVESPNVPTIGVGEGTWPTLRTTLKRMGVSETELFRQCDASFKQGARFNRWTTGTPDDGYYHPLMLPQQFGQVNLAPHWLADEGGTTFCDTVTPQGRICDEGLGPKTIATPEYDGHANYAYHLDAGKFSHFLQRHCCDTLGVRHVKADVTEVRLDESGDIASLDTEQGISIAGDLFVDCTGFAALLIGGAMKVPFRSCTDVLFCDTALAMQVPYDLPDDPIASHTISTAQSAGWIWDIGLPTRRGVGHVFSSSHISADAAEQELRDYIGPAARDLTARRLAIRAGHREQFWVRNCVAVGLAAGFLEPLEASAIVLIELSAKMIAEQMPACREVMDVVARRFNDTTSYRWGRIIDFLKLHYALTKRTDTDFWRDNVRPESIPDRLMGLMELWRFQSPWVHDEFDRAEEVFPSASYQYVLYGMGARTAVMPGTIDGDVALARRARHDNQAQTQRLVSSLPGHRDLIDRIKRHGLQSL

SEQ ID NO: 87195 - protein, 510 aa, Stenotrophomonas pavanii
  misc_feature (1)..(510): tr|A0A246KY35|A0A246KY35_9GAMM Tryptophan halogenase OS =Stenotrophomonas pavanii OX=487698 GN=CEE55_12535 PE=4 SV=1
MVDTESTPAGRIRKVVIAGGGTAGWLAGCALAHQFRDQLEITLVESEQIGTVGVGESTVPPIRTFHRFLQIDEQEFLRAVAGTFKLSISFENWRLPGDRFFHPFGTIGHGTWAAPFHHFWLDSLRRGMPSDLGDFCLESIASRADRFSLQTQPQASYAYHFDAGLYARFLRRRAEGHGLRRIEGRIAQVRQHAHDGSVQALVLQDGQVIEGDLFIDCTGFRGLLIEQTLGTGYEDWHEWLPCDRAVAVQTEAVAPPVPYTRAIAHEAGWRWHIALQHRVGCGLVYSSRHLSDDEATAKLLRDVGAPPLRDPWQVPFRSGRRLKAWNRNVVALGLASGFIEPLESTSIHLTISAVVRLIQLFPFDGIRASLVQLYNDVSRQEIEHVRDFIILHYHATQRTEPMWKACREMRVPESLQQRLQAWRERAHAWQDPGELFRVESWTSVLLGQGIPPGPPHPLARAVSDADLRTLLKGIQQPVQHAAAQMPTQAEFIAQYCRSGADVWRSMATPA

SEQ ID NO: 87196 - protein, 508 aa, Sphingomonas sp.
  misc_feature (1)..(508): tr|A0A0Q6AIB4|A0A0Q6AIB4_9SPHN Tryptophan halogenase OS =Sphingomonas sp. Leaf407 OX=1736369 GN=ASG37_01130 PE= 4 SV=1
MGAERRIAIVGGGTAGWLTAAYLARALGSSVRITLLESPGIGIIGVGEGTFPTIRETLRFLGIDEAQFVTAAGATFKQGVRFDGWRRGGPVPHRYYHPFEPPFPADRLVAHWLRADPATRPPFAQAVTIQHPVAAANRAPKQPGDEDFDGPLAYAYHFDAVRLAGVLADRARASGVTHIEGRIADVVQNDDGTIERIDTDAGPLHADLFVDCTGFRAELIGRLPGAAFRSVADQLFTDRALTCKLPCGDPNAPIESTTIATAHEAGWIWDIGLSGARGIGCVYASRYIDDDRAADLLRAYLGPAADGITPRRLTFDPGWRPRQWIGNCVAVGLSAGFLEPLESTGVVLIEAAAAMIAELLPHAGPVDAPAGRFNAVMAARFAGIVDFLKLHYCLSDRTEPFWRDNADPASWSPRLTDLLDQWRHRPPSRFDFPVDTETFAFFNYQYILYGMGFATVPPPGGAAQQAEAQRLFARIRSYGDHAVRDLPPHRVLVDGLRGLPAIPARTGS

SEQ ID NO: 87197 - protein, 505 aa, Alteromonas sp.
  misc_feature (1)..(505): tr|A0A4Q8UI69|A0A4Q8UI69_9ALTE Tryptophan 7-halogenase OS=Alteromonas sp. KUL49 OX=2480798 GN=EYS00_04580 PE=4 SV=1
MQPHRIVIAGGGTAGWMAANLFAHHWKDACVEISLIEAPNIGIIGVGEGSTPTLKRFFSDLAISEAEWMPKCNATYKTNIRFEGWSPKYAPKGYSHPFFGQLDTFSERAFHVNCRTRRLGLDVETQPDKFLFAGYLANQGLAPVTPDNFPFRIEYGYHFDSGLLGNFLKDRAVTQGVNHIQAEITAVAQHPDGSIKSLECDDGRSIEGDLFVDCSGFKSLLLQSTLKVPFNPFADNLFNNAAVVLPTSAFKDIPVETKSTALSNGWCWQIPLTHRTGNGYVYSNQYLNKDAAETELRAHLGLLDADIEARHLTMNVGQCEQHWAKNCLGLGLSQGFIEPLEATALHLVQIGIEMFIRDYQAGDFTSKHQDKYNSAMSERFERVRDYIVGHYKLNSREDSQYWIDNRENNAISDSLIQLLNTWYQKQDLVKEISRQNIDEHFSASSWHCLLSGYGLFPPKANNQPESLKEQGDLYRDNGLEAFFEGCALNFQSHNNVLKAHTEGAR

SEQ ID NO: 87198 - protein, 528 aa, Erythrobacter lutimaris
  misc_feature (1)..(528): tr|A0A395LK31|A0A395LK31_9SPHN Tryptophan 7-halogenase OS=Erythrobacter lutimaris OX=1538146 GN=DL238_06680 PE =4 SV=1
MAERGGIVTANRVARVVIVGGGTAGWMAAAAMSRFFDDGRRSIVLVESDAIGTVGVGEATIPPIRNFNAMLGIEENEFLRETRGTFKLGIEFVNWGQRGDRYFHPFGEYGHDFHGIQFHQLYLRQKALANPDLGGIGDYSMSTMAAARGAFGRPSAAAKSVVSEIAYAFHFDAGLYAAYLRKMAERQGVIRHEGRITAAHRDAESGDVLSIELENGERIEGDLFIDCSGFRGLLIEEELETGYEDWSHWLPMDRAIALPTTHTTSPDPFTRATAHGAGWQWRIPLQHRMGNGHVFSSRFMDEDEARAILLGSVEGEPLAEPRTLRFLTGMRKKAWNHNVVALGLSSGFIEPLESTSIHLIQNGIARLFALFPDTPISPLERDEYNRGMRELYEDVRDFIILHYKATQRDDTEFWRYVRDMEVPASLARKMDLWRLHARVFRENAELFAQPSWIAVLMGQNIEPRTYDAIADTLDETKIASAMAQLRENYRSVAERLPSQEAFMRQAGAWHASAPAEGQAPLRAHGARV

SEQ ID NO: 87199 - protein, 493 aa, Alteromonas sp.
  misc_feature (1)..(493): tr|A0A4P6BGU3|A0A4P6BGU3_9ALTE Tryptophan 7-halogenase OS=Alteromonas sp. KUL49 OX=2480798 GN=EYS00_17650 PE=4 SV=1
MTNQSKINNVVILGGGTAGWMTAAALSKSLSHLNITLVESDRIGTIGVGEATIPTMQFFNNLLGIPQHEFLKQTQGSYKLGIQFENWRKLDHDYFHAFGSTGKGLWAAGFHDFWRKGVNNNACRDYSKYNIEAVAAKAGKFGRLQTPLNHAYHLDAGLYAKMLRSLSEKQGVKRVEGEVEYVRQDSESGYITGLTLKDGSKLDGDLFVDCSGFKGLLINETMKVPFNDWSHWLPNDRAIAVQTRSDKPPAPYTRSIAHHAGWQWRIPLQHRMGNGIVYASEYMSDDEAEALLLSSVEGEVLTTPRPIKFKTGYRQELWHKNCVAIGLSGGFIEPLESTAIHLIQQGILRLIKLFPEHGIDALEVAEYNLSATLDYEQIKDFIVLHYKVTERDDSPYWQFCKNMDIPESLEKRLNLFKKTGRFIQRQEELFVDSWLQVMIGQGLVPDRYHRIVDEMTDQQLEQFLDKIASSLEQQVATLPSHAEYLKRYCSASM

SEQ ID NO: 87200 - protein, 501 aa, Sphingomonas sp.; identical to SEQ ID NO: 82742
  misc_feature (1)..(501): tr|A0A0Q6AXR0|A0A0Q6AXR0_9SPHN Tryptophan halogenase OS =Sphingomonas sp. Leaf407 OX=1736369 GN=ASG37_05315 PE= 4 SV=1

SEQ ID NO: 87201 - protein, 516 aa, Sphingomonas sp.
  misc_feature (1)..(516): tr|A0A4Q0GTC7|A0A4Q0GTC7_9SPHN Tryptophan 7-halogenase OS=Sphingomonas sp. UV9 OX=1851410 GN=EQZ23_06215 PE=4 SV=1
MDEPIANIVIVGGGTAGWLAACLIAARADPGAARPIRVTLVESPDVATIGVGEGTWPTMRRTLERIGITETDFLLACDAAFKQGSRFDGWRTGSTDDSYFHPFTAPVEGDPRDIVAAWAEHGDRFADSVGAQAELCRQHLAPRQRVMPDYAGTQNYAYHLDAGKLAALLMRHATERLGVRHVRDHVIGIDATEDGDIAAVRTRASGAIPGDLFLDCTGHAGLLIGAHYGVATVDRGGELFNDRALAVQMPVAPDSAIASQTNAAAHAAGWIWDIGLPTRRGIGCVYSSAHLSDDAAADTLTRYLRATAPDAPTPSFRQLQFRSRHRERFWHRNCLAVGLSAGFLEPLEASAIVLIELSLDALLDNFPATRGTMDIHADRFNTLFRYRWDRIVEFLKLHYVLSERDEPYWRDHRDRASIPPRLADLLQLWRHQPPSRADFPMIDEVFPAASYQYVLYGMGFPAPPRGPIATADRSRTNGLLAKVDQRRRMLTAGLPTNRAYLDALRHATLPAMEPIS

SEQ ID NO: 87202 - protein, 450 aa, Caballeronia ptereochthonis
  misc_feature (1)..(450): tr|A0A158C8G3|A0A158C8G3_9BURK Tryptophan halogenase OS =Caballeronia ptereochthonis OX=1777144 GN=AWB83_04058 PE=4 SV=1
MSEATQTGMQDHVQTWDVAVIGGGPAGSTAATLLAERGYRVRVLEKARHPRFHIGESLLPANLRLFDKLGVAEEVRAIGMVKLAAEFVSPQHDNRTQRFLFADAWDKSMPSAYQVRRSELDEILLRNAAKHGAQVSEGCRARDIVFAPDGASAKISAEHEDGRVEEVRARFVVDASGRDTLLANHFKTKRRNARHNSSALYGHFRNARRNEGANEGNITVFWFEHGWFWFIPLADGATSVGAVVWPAYLKRRPKGTSVDAFFRETIALCPPLAERLKDAELMSEVHATGNYSYTGDMTHGRNFLLLGDAFAFIDPVFSSGVMLAMQSAFAGAEAIDAALTHPARAQAALARFDRDVRHGPREFSWFIYRMTSPTMRNLFMGPRNPLRMKEALLSLLAGDIFGTTPIWHSLRAFKGVYYIAATLDWRNSLRAYRMRRRNLNDAERAEMSAN

SEQ ID NO: 87203 - protein, 496 aa, Cellvibrionales bacterium; identical to SEQ ID NO: 83656
  misc_feature (1)..(496): tr|A0A3R7YYD9|A0A3R7YYD9_9GAMM Tryptophan 7-halogenase OS=Cellvibrionales bacterium TMED47 OX=1986841 GN=CBC07 _003080 PE=4 SV=1

SEQ ID NO: 87204 - protein, 497 aa, Sphingomonas sp.
  misc_feature (1)..(497): tr|A0A5B8LGM0|A0A5B8LGM0_9SPHN Tryptophan 7-halogenase OS=Sphingomonas sp. HKS19 OX=1813879 GN=FPZ24_07035 PE= 4 SV=1
MSETPRSIVILGGGTAGWMAANLIAHHLGLEASVTVVESPEIGIIGVGEGSTPQLKAFFDTLDIAEADWMPRCNATYKTGIGFRDWSEAPGFDAYFHPFPTDLDGFTAPAFFANAYARRHGADVWAHPDRFFLPTALAARRLAPIVPDHFPFQIGYGYHFDAHLVGAFLRDHAIGLGVRHLQHRIVDVAVADGNVSHLVAQNDITIPGDFFIDCSGFRSVIAQGALGAKFLPFAANLFNDAAVVMPTPRDPNGTNCQTISTAMQNGWVWDIPLTNRTGNGYVYASGYCSADEAETELRAHLGLLDSPVEARHLKMKVGRIAESWTGNCLALGLSQGFIEPLEATALHVVQATVEGFFRAWRDGGFTPRHRDAFNRAIAARYEGIRDYIVCHYRMNRRTDTAYWRDNATHDELSDSLKAIITCWFTGRDLEEEIARQDIAHYYAPASWHCLLAGYGQFPGRLSADAPAPPTDMAAIDDFITRCALNFPSHDAALEALR

SEQ ID NO: 87205 - protein, 508 aa, Phenylobacterium deserti
  misc_feature (1)..(508): tr|A0A328ABW4|A0A328ABW4_9CAUL Tryptophan halogenase OS =Phenylobacterium deserti OX=1914756 GN=DJ018_16815 PE= 4 SV=1
MSRLQKIVIVGGGTAGWVTAAMLGHHLQGRMAQIELVESDDIGTIGVGESTIPPFITLLRNLGIDEQHFIQATQASFKLGISFRDWLRKGESYFHPFGSIGGAIDIHEFFQCWLKAKLTENHPSNLQDFAPASVMAEKGRFMLPFKAQRTLIGGANYALHVDARLVAQYLRRFAEAKGVKRTEGIVTEVKTRPSDGFVEKLVLKTGEEVTGDLFIDCSGFRALLIEKTLGVGYHDWSDVLLCDRAVAVQTENRGATTPFTVAEAQDSGWRWRIPLQHRTGNGYVFSSKFISDEEATEVLLSKVDGELLTKPMVIPFKTGVRHRIWDKNVVSVGLASGFIEPLESTAIHLVYRAIDMLFRYMPDQDCAPALAAEYNRRMTADYEEIRDFIVLHYCVTEREDTPFWRAAKAITPPASLTERIELYRESGLMREGLDELFRNPSWQSVLDGMGVTPKRYDQLVDRMPFEVIRRTLDEAGPRLAAFVDTLPTHDEFLREHCPAEPPGVIAAQ

SEQ ID NO: 87206 - protein, 515 aa, Novosphingobium subterraneum
  misc_feature (1)..(515): tr|A0A0B9A0D9|A0A0B9A0D9_9SPHN Tryptophan halogenase OS =Novosphingobium subterraneum OX=48936 GN=NJ75_03444 PE =4 SV=1
MIGSVKQVVIVGGGTAGWLSACLLAARRPELAITLVEAPDIPTIGVGEGTWPTMRETLSTIGIPEAEFLAECDASFKQGSRFDGWVDGSAQDSYLHPFTPPPPGDMAAMLQAWHTQAPELSFAALVTPQAAACEDNLAPRQRAMPDYAGALNYGYHLDAGKFAALLKRHATTRLGVTHVSAQVIAIADDEAGNIASLRLLDGREIAGHFFIDCSGLAAILIGDHCGVPWVDRSDVSFNDSALAVQVPVEPGSPIASQTIGTAHEAGWIWDIALPTRCGIGCVFSSRFMDDARAEDVLRNYIAARLPSADLQTLRPRKLTFSTGHRERFWQGNCLAVGLSAGFIEPLEASAIVTIELSIKALAENFPRRSDTLGLLAGRFNELFRYRWDRIVEFLKLHYVLSRRPEPYWLAQRDPATVPARLAECLELWRDQPPSAWDFPRMDELFCAASQQYVLYGMGFPVPGGAADATATQALAEVRQRSRALAAALPSNRTYLDALRPVAAAAPIAMHGAAVK

SEQ ID NO: 87207 - protein, 506 aa, Sphingomonas guangdongensis
  misc_feature (1)..(506): tr|A0A285QZV9|A0A285QZV9_9SPHN Tryptophan halogenase OS =Sphingomonas guangdongensis OX=1141890 GN=SAMN06297144 _2538 PE=4 SV=1
MTDTDLNPERVRSICIVGGGSAGWMTAATMARLLGPTYAKITLVESEEIGIVGVGEATIPQMRTFNRMLGIEEDEFIRQTRGSFKLGIQFVDWSRLGHTYFHPFGSYGVNMGGLSFHAYFLRLNQLGEAPDIDAFSLQAGAASHAKFMRSVDAGTKSPLSDIAYAYHFDAGLYARYLRGYAEARGVERREGRIIDVRLDERGHVGAVVLESGERIEADLYVDCSGFRALLIGQALGNDYVDWKHWLPCDRAVAVPCAGAERMEPYTRSTARAAGWQWRIPLQHRIGNGHVYSSAHVSDDEATAVLLANLDGEPLADPRYVPFRTGHRTRVWDRNVVALGLSSGFMEPLESTSLWMIQSGLSRFMAMFPDRGFDQATIDRYNRIILTEYEEIRDFLILHYHATERTDSAFWDYCRTMPIPDRLAEKMRVYRAHGRVFRENEELFNDTSWFAVMWGQLMRPRGYDPVADAMGLDLTRDRLAEIAAVMRNSVDYMPDHRAYIRQHCAAA

SEQ ID NO: 87208 - protein, 526 aa, Sphingomonas sp.
  misc_feature (1)..(526): tr|A0A4Q0GPN3|A0A4Q0GPN3_9SPHN Tryptophan 7-halogenase OS=Sphingomonas sp. UV9 OX=1851410 GN=EQZ23_00710 PE=4 SV=1
MSKAGGEQGAVRTVVVVGGGSAGWLTACRLAAQSVRSGSDLSVLLVESATVPSVGVGEGTWPTMRNTLRKIGIDETTFIRSCDATLKQGARFAGWTDGSAGDAYYHPLNPPVGVGEIDVAPYWLGLPGSDAQIGAEGISFADWVDYQSTLCDAGLAPKTITAPEYGGHANYAYHLDAGKFATMLREHAVGSLGVEHVVGDVVRANLADNGDIRDVELVDGRTLAGDLFVDCSGFSALLIGGVYDVPFRSCRHILFADRALAMQVPYQGEDDPIACHTISTAQDAGWIWDIGLWTRRGVGHVYSSAYTSDDEAEAALRRYVGPVADALPVRRIAFEPGHRERFWQNNCVAIGLSAGFLEPLEASALMLIETSLDALVDRLPQTRSAMDAIARQFNETFAHHWQRIIEFLKLHYVITQRRDTAFWRDNAAAASIPEGLQERLDLWTHHSPAAQDFAHAREVFSWPSYQYVLHGMRFGGRYRGAPATAEGATVAALVARNDRVRAELVRKSPRHRDLLRAVREHGLQRV

SEQ ID NO: 87209 - protein, 495 aa, Sphingomonas guangdongensis
  misc_feature (1)..(495): tr|A0A285R0U4|A0A285R0U4_9SPHN Tryptophan halogenase OS =Sphingomonas guangdongensis OX=1141890 GN=SAMN06297144 _2540 PE=4 SV=1
MAGNIASVLIVGGGTAGWMVAAALGHKLSGTGIAVTLVESEAIGTVGVGEATVPHIRAFNQALGFDEAAFMAATNATFKLGIEFRNWGRIGDSYIHPFGAFGQPIGGVDFHHQWIALRRSGRAEPFDHYSLPVAMARANRFAHPAADPASLASTYGYAYQFDASLYARFLRAQAEAKGVTRLEGRVVDVTQDERGHVSAVTLDDGRRLSADLFVDCSGFRGLLIEGALASGYDEWTHWLPCDRAWAVPCANVGPIGPYTRATALHAGWAWRIPLQHRAGNGHVFASGFTDEQAALDRLLGQLDAAPLAEPRQLRFTAGKRRRQWIGNTVAIGLAAGFLEPLESTSIHLIQLGIERLLDLFPTADWDPLDAAEFNRLMDLEYERVRDFIILHYAATQRDDTPFWNHVRTMSLPDSLATKMALWRARGVVVNYRQGMFLEPSWLAVYLGQNIVPDGIDPRAGAGAADAAAMLRNIASTVERLPTHESVLPRTLEAAA

SEQ ID NO: 87210 - protein, 507 aa, Shewanella sp.
  misc_feature (1)..(507): tr|A0A2N1ELM5|A0A2N1ELM5_9GAMM Tryptophan halogenase OS =Shewanella sp. ALD9 OX=2058330 GN=CXF88_15300 PE=4 SV= 1
MDQTIIKNIVIVGGGTSGWMTAAMLAKLFKTQLNITLIESDTIGTIGVGEATIPPLQIFNSVLGINEKDFIKATQATFKLGIEFENWHQQGDAYMHAFGNIGRDLGFTSFHHYWLSAQANCSQQNQNSFNANDFWQYSLNYQAAKHNKFQPIQSIAQAQMSGITHAYHFDASLYANLLRQYSTQRGVTRIEGTITSTQLTNDDSIDSITLQNGRCISGDLFIDCSGFSALLIEKALGVEYENWQHWLPCDSAYAVPSESSSPVIPYTKATAHDAGWQWRIPLQHRTGNGIVYSSQHMSDEQAKQHLLANLDGKPLAEPRKINFTTGRRVKQWHKNCVAIGLSSGFLEPLESTSLHLVQSAIIRLTKLFPRNGIQPQHIDEFNRQSQTEFEQIRDFIILHYHLNSKQSADGEHGLWQQCRDMDIPASLQRKIDLFTTTATVFRHQDELFTEAAWIQVMLGQGIIPLDYHPLTQAVTQVDLTDYLTNIRKVIASTVKQMPTHETYIEKI

SEQ ID NO: 87211 - protein, 587 aa, Microcystis panniformis
  misc_feature (1)..(587): tr|A0A552QBK7|A0A552QBK7_9CHRO Tryptophan halogenase OS =Microcystis panniformis Mp_MB_F_20051200_S9 OX=2486223 GN=EWV53_00620 PE=4 SV=1
MNTTQALHYDVVIMGAGFAGLCQARHLMLNIPNIRVALIDPRPENRPDTDLKIGESTVEIAALLICKELGLHDYMIENHPPKAGLNFHWPKNPAETDSIDDYYHVWINRQPPIPTFQINRAKFERDLLKMNKEMGAIFYNGRVVDVDLTEGDQLKTVTVKLEDTTIEITAKHIVDAAGRRFIIGKKTDNLIFGSDQLLGVNNGSAWVRIKDVDRTIFHSGYHPAGTTVSHYYATNHYFGPGHWLWMIPIDRDSKELSLGVIHHHDVIPSATINTQEKFTAFLKANHTVLYKLLQSSELVDFHYLPRVAHKSKVMFSPDNWYVVGDAACIFDAFYSLGTTMIAIAVESITEIVRAKLANEANAEEKRAVYNDFNLAFTDSVNTFMQEHQKQLGHASIMSWRIYFEYMWWFGVLVPMYIGKWHLDPAFLKQFTGPFRTFLNGLFVDVYQDSNQLVERGVNMGLMDAIRADQLIGSYYTFKHFEDFLENSKLEPQRCNIFTSMKNTFFYVAIWYAMFQWKGFGWRGLLKPRNLANFSYLLAQSGLSALGEMRHNFLTRSLPDNSEIEEMRQEFKEYRYQGKLQPWSAELS

SEQ ID NO: 87212 - protein, 523 aa, Bradyrhizobium sp.
  misc_feature (1)..(523): tr|A0A1G7XRH4|A0A1G7XRH4_9BRAD Tryptophan halogenase OS =Bradyrhizobium sp. Rc2d OX=1855321 GN=SAMN05216338_100 3257 PE=4 SV=1
MIGESIVIVGGGSAGWMTAAYLKKALRGVDIALIESANVGTIGVGEASFSTMKLFFDYLGLDESEWMPPCNATYKLAIKFTNWSAGGGHFYHPFQRYEIIGGNNLGEWWLHLKPNETPFDSACFSTPSLCENNRSPRYLNGEVFDHKVKTTFNFASEAPPNTFLSDHRSQYPYGYHFEASLLASFLKDYATALGVRCIKDDVEDVLLSSDGSIDCLRTRRNGAVKGSLYVDCTGFRGLLINQALKEPFVSFQDVLLNDRAIALQVPYQADTSNIQPFTSATALPSGWVWNIPLYNRVGTGYVYCSQFISSEQAESDLRAHLGPRAKDCIANHIKMRIGRCRNSWVKNCFAIGLSSGFVEPLESTGIFFIQFGIEELLRHYSGSTTDPEVVADYNRIIADRIDGVRDFLVLHYRASDRADTPFWKATKEISVPSSVDQRLALWKKRLPNERSINSCYHGFEFYSYSVMLLGLRYRPVNSLPTLRHSNVSAAVAAFQAVRDRTAELVRTLPSHLEYLQHLRRARN

SEQ ID NO: 87213 - protein, 520 aa, Novosphingobium subterraneum
  misc_feature (1)..(520): tr|A0A0B8ZE18|A0A0B8ZE18_9SPHN Putative tryptophan halo genase OS=Novosphingobium subterraneum OX=48936 GN=NJ75 _03042 PE=4 SV=1
MVRAVRDVVIVGGGTAGWLTAAIIAAKHKARIGHDFSVTLVESPNVPIIGVGEGTWPTLRSTLKSVGISETDFFRECDAAFKQGALFAKWTTGAEDDAYYHPLVLPQRFGQLNLAPHWLTGTLNEGGDNGETFCDAVCPQGRLCDENLAPKSMVNAEYEGQANYAYHLDAGKFAPFMQRHCTEKLGVRHVLADMRQVLQDEGGDIRAIATEQAGEISGDLFIDCTGMRSLLLGQTLGVGFKDCNDVLFCDTALAMQVPYPAPDAPVATHTISTAQSAGWIWDIGLPTRRGVGHVYSSRHISREEAEAELRAYVGPAAEGLAVRKIDIRSGHRELFWKNNCVAVGLAAGFLEPLEASAIVLIELSAKMIADQMPPVREVMDVVARRYNEKTLYRWGRIIDFLKLHYVLSQRRDTAFWRDNMDPASIPERLQELMALWQYQGPYMHEEFDRVDEVFPSASYQYVLYGMGFRTEVSARTLEPEVREARRARAENADVTARMLSGLPRHRDLIDRIVKYGLQPV

SEQ ID NO: 87214 - protein, 503 aa, Caulobacter sp.
  misc_feature (1)..(503): tr|J3ADK2|J3ADK2_9CAUL Tryptophan halogenase OS=Cauloba cter sp. AP07 OX=1144304 GN=PMI01_03181 PE=4 SV=1
MTEPSPFKFVIVGGGTAGWMAAAALAHAFKGRVAEIELVESDEIGTVGVGEATIPPIQFLNSLLGIDEIEFIKKTQATFKLGIEFRDWKQLGHSYLHPFGPIGVPIEGVGFHHYWRRLREQGDTRGICDYSMSAVAAAKGKFVIAPRELPPGVPPLAYAYHFDAGLYARFLREYAETRGVKRTEGKIVEVKQRASDGFIEAVELEGGKRIEGDFFVDCSGFRGLLIEQTLKTGYEDWNHWLPCDRALAVPCDSVMPLTPYTRATARTAGWQWRIPLQHRIGNGYVYSSPFISDDEAAATLMANLDGAPRAEPRLLRFTAGRRKQAWNKNVVALGLASGFMEPLESTSIHLIQTGVMRLIALLPTRNHDPATVEEYNRLSKIEYEQIRDFIILHYRATERDDSELWRYCRRMALPDSLTHKIELFRERGKVARYEEQLFAEPSWIAVFLGQGVVPRDHDRLADVPPIADVERALFNIRDKITHIADRLMTHDEFIARHCKADPI

SEQ ID NO: 87215 - protein, 511 aa, Sphingomonas sp.
  misc_feature (1)..(511): tr|A0A5B8LIH0|A0A5B8LIH0_9SPHN Tryptophan 7-halogenase OS=Sphingomonas sp. HKS19 OX=1813879 GN=FPZ24_10555 PE= 4 SV=1
MVPRRSILIVGGGTAGWLTACYLAKFFDLARHPSLSITLVESPDIGIVGVGEGAFPTIRTTLQFLGIDEYDFIRETSATFKQGIRFDDWLRNPHDGRHAHFIHPFEAPLYAHDESLVSHWLASDPATRPPFAEAVTIQHRVSEQQRGPKTAADGGFAAPLNYAYHFDAAALAAMLARRGRELGVRHVEDELVAAAVGADGTIDRLSFKRSGDATADLYIDCTGLRAELLGGALDEPFVSAKSYLFTDRALACRVPYDCADAPLPSYTVAAAHEGGWLWDIGLRDKRGIGCVFSSAHLDEDRARTILAAYPGVGDRGADARLITFEPGWRARQWVGNCVAVGMAGGFVEPLESTGIVVIEAAAAMIAELFPFNGPVDAPADRFNALMTARYDNLVNFLKLHYCLSRRIEPFWRDNADPASTPEALRALLDRWRHRPPSRFDFLIDVETFAFFNYQYILYGMDFHTEPIFGSAKGTGSAGSGTLFERIRGFGDQAVHELPSHRELVEQINAAR

SEQ ID NO: 87216 - protein, 498 aa, Pseudoalteromonas sp.
  misc_feature (1)..(498): tr|A0A4Q6YNY9|A0A4Q6YNY9_9GAMM Tryptophan 7-halogenase OS=Pseudoalteromonas sp. CO133X OX=1777237 GN=EXT40_042 25 PE=4 SV=1
MESKKITKVVIAGGGTAGWITAALLNKVLGKVLDITLVESAEIGTVGVGEASIPPILHLNGALGISEKEFIKATGATIKLGIEFENWRSQGYSYMHAFGEIGKDFPFCEFYHFWLKAHHANNAPDFWDFSLNYQAAKAHKFAHLKHIPNTQLAGLHYAYHFDATRYGEFLKELAQSRGVKRIEGKIESVNQCHQSGHIRSLLLKNGEQIDGDLFIDCTGLRALLIEQTLNTGFEDWSHWLPCDSAIAVQSDSASDAIPYTRSIARDSGWQWQIPLQHRVGNGLVYSSRFLSDETAKQQLLNNLPAKPLTEPRVIKFKTGRRLKQWHKNVVSVGLSSGFLEPLESTSIHLIQSAAIRLIKFFPHQGIKPSLVDEFNQQSKTEFERIRDFIILHYKLTERDDSAFWRFCKGMDIPSSLKKKIELFKTSGKLIREDDELFAEIAWQQVMIGQGLIAEDHHPLTDALSDEQLNELFSNLKTLINSTVEQLPTHSQFLEKVQN

SEQ ID NO: 87217 - protein, 524 aa, Caulobacter sp.
  misc_feature (1)..(524): tr|J3AV38|J3AV38_9CAUL Tryptophan halogenase OS=Cauloba cter sp. AP07 OX=1144304 GN=PMI01_00374 PE=4 SV=1
MRDRQETASGRVKRVVIVGGGTSGWMCAAALSRLVAHAGVEITLVESDEIGTIGVGEATIPSILDFNAALGLDEDEFLRETQGTFKLGIEFVGWNRPDERYIHPFGMFGRDTQAIKFHQLWLKFAQRGDVELGPIEDYNLCAMAARLGRFARPAGRGDSVLSSLRYAFHFDAGLYARYLRGYSERRGVVRREGKITEVLQHADNGFIRAVKLANGEQIEGDLFVDCSGFRGLLIEETLHAGYETWNQWLPCDRAVAAPSSNVGPPPPYTRATADEAGWRWRIPLQHRTGNGYVYCSSFISDDDAEQRLLSTLEGAPLADPRRLKFVAGRRKAFWIKNCVAVGLAGGFIEPLESTSIHLAQNAIARLLALFPDKDFSQPEIDEFNRLNQVEYEQTRDFIILHYKANNRSEPFWRRLAQMPIPDSLQSKIDLFKSRGRALRGVQTLFTEDSWIAVMLGQGIHPDGYDPLVDSLPEDEARRFVRHVREMVGKTAQAMPLHAKFLEGLVVAPAPAGGVEPGSTTRAVR

SEQ ID NO: 87218 - protein, 500 aa, Novosphingobium subterraneum
  misc_feature (1)..(500): tr|A0A0B9AGF0|A0A0B9AGF0_9SPHN Tryptophan halogenase OS =Novosphingobium subterraneum OX=48936 GN=NJ75_01070 PE =4 SV=1
MSNPDLMIRSIAVIGGGTAGWMTAAALAQALRHNCSITLVESDEIGTVGVGEATIPPIRTFNETLQIDEREFVRKTKGSFKLGIEFVDWGSLGNSYFHPFGPHGRAFDIVNLHHYWLRAREAGETAPLDEHSMAWALAKENRFAPPMPDQRNVLSTFDYAYHFDAGLYAKFLREYSEARGVTRIEGKVASVQQDAETGFVTGVTLDDGRAVEAELFVDCSGFRGLLIEGALKAGYEDWTHWLPCDRAMAVPCENAGPLTPYTRSTAREAGWQWRIPLQHRTGNGYVFCSQFLSEDQAADKLLSRLDGKALADPRPLRFVTGRRKTFWEKNVIAVGLSSGFMEPLESTSIHLIQAGISKLLALFPERTFDPIVIEEYNRIAINEYERIRDFLILHYKLTTRDDSELWRYCAAMDIPDTLQTKIEHFRRYGRLVQRDADLFGAPSWLAVHVGQGNIPERTDPLADYRGIDGREWLGKLRAAMHHAALQQPTHEQFIKANCAA

SEQ ID NO: 87219 - protein, 500 aa, Sphingomonas sp.
  misc_feature (1)..(500): tr|A0A1I4A5J0|A0A1I4A5J0_9SPHN Tryptophan halogenase OS =Sphingomonas sp. NFR04 OX=1566283 GN=SAMN03159338_4426 PE=4 SV=1
MVAQQVLIAGGGSAGWMAAALFARLRPAPDTQITLVESEAIGTIGVGEATVPILQDFNRLLGLHEPDFVAATQGSFKLGIEFVGWGATDNRHFHGFGDFGPPIEGIAPHHHWHRLRAAGRITDPIDDWSMPACAAAEDRFAPPEALRGEAAQYRYAYHFDAGLYARLLRGYAEARGVTRIEGRILHADRDPETGDLTALQLDGDRRIEADLFIDCTGFASRLLGDALDTKFVDWSHWLPADRALAQGCTRAGRFTPFTRSTAHAVGWQWRIPLQHRTGNGLVYSSAYLPDDEAAAQLAANLDGDAIGDPRLLRFTTGRRERFWAHNVVAIGLAAGFLEPLESTSLQLVQTGLARLAELLPSAGRADPAIVAEYNRETIGEYARIRDFLIAHYCISRRPEPFWRDMAAMAVPDSLAHKLALWDASARVPLYELESHGEASWVAVLLGQGRMPRGHDPAADRPALDALQHAFDARRAALTTALPRLPAHDHFVARTCRADAA

SEQ ID NO: 87220 - protein, 500 aa, Novosphingobium subterraneum
  misc_feature (1)..(500): tr|A0A0B8ZCX7|A0A0B8ZCX7_9SPHN Tryptophan halogenase OS =Novosphingobium subterraneum OX=48936 GN=NJ75_03447 PE =4 SV=1
MTASHLPRRIVIAGGGTAGWMTAAALARTLGPVAEVTLVESEQIGTIGVGESTIPPLVTYNRLLGINEAEFMRATQATFKLGINFENWRVPGENYFHSFGGTGKDHWSAGFQHFWLNGRERGHTAPYGEYCLELKAAEAGKFAHLPDDRMNYAYQLDSGLYAKFLRAMAEADGTIRIEGKIARVELDGETGDIAALVLEGDRRIAGDLFIDCTGFRALLIEGALRAGYDDWTHWLPCDSAIAIQTSSVRPPVPYTRAIAHEAGWQWRIPLQHRQGNGVVYCSDYLAHEAALKKLLLTVEGEKLVKPNHIRFRTGARRKQWHRNCVAVGLSGGFMEPLESTSIHLIQRAILRIVRMLPAGAISQRDIDEFNDQQFTDMEQIRDFLVLHYKATDRRDTPFWRHCASMEIPASLEHKIELFRETGRVFRKNEELFAENSWVQVMMGQGINPQSHHPVAAKLRDEELKHLLGSLREQVSRTVAALPSHGDYVARYCGAEVPAAA

SEQ ID NO: 87221 - protein, 496 aa, Sphingomonas sp.
  misc_feature (1)..(496): tr|A0A1I4AJM8|A0A1I4AJM8_9SPHN Tryptophan halogenase OS =Sphingomonas sp. NFR04 OX=1566283 GN=SAMN03159338_0041 PE=4 SV=1
MDEQKFRVVIAGGGTAGWVAAAALVRHLGPNLDITLVESDAIGTVGVGESTIPTAWTFHKLLGINEQVFLRETNATFKLGISFENWLRDGEHYFHPFGSVGRALPLCDFQHFWLEAQRRGFDGALADYSLETQAALAEKFATGDPMPLAYAYHLDATAYAAFLRGLAEPAGVRRVEGRITEVEQTENGDIAALVLEAGLRVDGDFFIDCTGFRALLIEETLKTGFDDWSHWLPTNRAFAVQSETTEAPVPYTRAIAHGAGWRWRIPLQHRMGNGFVYASDYLSDDEAKAQLLAAVPGRALFDPRLIRFTTGMRKQAWNRNCVALGLASGFIEPLESTSIHLVMIAVTRLLQNFPFRRDMAALSARFNAQSRAESEHIRDFIILHYKLNDRPEPFWRDHAARAVPDSLAARIALFEEGAATYQEGTDLFRIDSWNAVMLGQGVRPRDHHHMPAQIPSEDLERALGDLRAGIAAQLAKLPGHADFIARYAAAKVPAAA

SEQ ID NO: 87222 - protein, 506 aa, Streptomyces sp.
  misc_feature (1)..(506): tr|A0A1Q5BHX4|A0A1Q5BHX4_9ACTN Tryptophan halogenase OS =Streptomyces sp. TSRI0445 OX=1703925 GN=AMK14_14125 PE =4 SV=1
MTASYLAAAFGERIDVTVVESARVGTIGVGEATFSDIRHFFEFLKLSEPDWMPACNATYKLAVRFENWREPGHHFYHPFEQLGSVDGFPLSDWWLRNPTTSRFDKDCFVMASLCDAERSPRYLDGKLIDQGFVEQQREETSARSTIVEYQGTQFPYAYHFEAALLAKFLTTYATQRGVRHITDDVTDVVLDQDGYIAQVQTAEHGRLEGDLFVDCTGFRALLLNKALDEPFVSYQDTLPNDSAVALQVPLDMDREPMRPCTTATAQEAGWIWTIPLISRIGSGYVYASDYTTPEEAEHTLRAFIGPGAEDVEANHIKMRIGRSRRSWVKNCVGIGLSSGFVEPLESTGIFFIHHAIEQIVKYFPSGREDHRLRDLYNESIAHVQDGVREFLVLHYVGAKRADNQYWKDTKTRRVPDELAERIENWKYKVPDAQTVFPHYHGLPPYSYNCILLGTGGIEVRHSPALDMADERAAIAEFERIRLKADKLVQELPTQNEYFAAMRAGAV

SEQ ID NO: 87223 - protein, 525 aa, Cellvibrionales bacterium; identical to SEQ ID NO: 83684
  misc_feature (1)..(525): tr|A0A424QW78|A0A424QW78_9GAMM Tryptophan 7-halogenase OS=Cellvibrionales bacterium TMED47 OX=1986841 GN=CBC07 _003070 PE=4 SV=1
  misc_feature (11)..(11): Xaa can be any naturally occurring amino acid
  misc_feature (22)..(22): Xaa can be any naturally occurring amino acid
  misc_feature (66)..(66): Xaa can be any naturally occurring amino acid
  misc_feature (81)..(81): Xaa can be any naturally occurring amino acid
  misc_feature (91)..(91): Xaa can be any naturally occurring amino acid
  misc_feature (99)..(99): Xaa can be any naturally occurring amino acid
  misc_feature (105)..(105): Xaa can be any naturally occurring amino acid
  misc_feature (109)..(109): Xaa can be any naturally occurring amino acid
  misc_feature (120)..(120): Xaa can be any naturally occurring amino acid
  misc_feature (136)..(136): Xaa can be any naturally occurring amino acid
  misc_feature (173)..(173): Xaa can be any naturally occurring amino acid
  misc_feature (175)..(175): Xaa can be any naturally occurring amino acid
  misc_feature (179)..(180): Xaa can be any naturally occurring amino acid
  misc_feature (184)..(185): Xaa can be any naturally occurring amino acid
  misc_feature (484)..(484): Xaa can be any naturally occurring amino acid

SEQ ID NO: 87224 - protein, 497 aa, Sphingomonas guangdongensis
  misc_feature (1)..(497): tr|A0A285R2E6|A0A285R2E6_9SPHN Tryptophan halogenase OS =Sphingomonas guangdongensis OX=1141890 GN=SAMN06297144 _1643 PE=4 SV=1
MSVPMTGEQRVRRVVIAGGGTAGWLAAAALSHQLGKLLDITLVESDEIGTVGVGEATIPTVRSFHALIGLDEREFLRATNATFKLGISFENWARIGDRYIHSFGTLGRSTWMGEFHHFWLHARAAGVADEIGAYCLEHEAAAAERFAGGEGQDTSYAFHLDATLYARHLRARSEAAGVRRIEGKIARVDRDGESGEIRALVLDSGAEVPGDLFIDCTGFRALLLGETLGVGFEDWGEWLQTDRALAVQTESTRPAVPYTRAVAHDAGWRWQIPLQNRVGNGLVYASAFLDDDAARERLLASLDGPTRTEPRLIRYRTGRREQSWAANCVSLGLSSGFVEPLESTSIHLIMIGITRLMQLFPFGGCHEGLRRRFNAQSRTELERVRDFIILHYKLTERDDSPFWRRCRDMSVPQSLADRIALWVEDAHAYQGAEDLFRVDSWVQVMLGQRLQPGGHHLLGRIMPDERLRQTFEGMRRSVRERVASMPAHGEFLKRYAA

SEQ ID NO: 87225 - protein, 249 aa, Alphaproteobacteria bacterium
  misc_feature (1)..(249): tr|A0A2N3AVI1|A0A2N3AVI1_9PROT Tryptophan halogenase (F ragment) OS=Alphaproteobacteria bacterium HGW-Alphaprot eobacteria-9 OX=2013672 GN=CVT87_04325 PE=4 SV=1
FTPYTRSTAKAAGWQWRIPLQHRTGNGYVHCSQFISEDEASAELLATLDGKPLADPRPLRFVAGRRRAFWKRNCVAIGLSAGFMEPLESTSLHLIQYGILRLIALLPDSAMSPLLAREYNAQTTAEYERIRDFLILHYKASERDDSELWRYCAAMPIPDSLQYKIDHFRDYGLLVSDERELFTNPSWIAVYLGQGIVPGRAPALAAMRSGVPVAERLAQIRSAMDEAVAAMPSHGEFIARHCAAPLPTT

SEQ ID NO: 87226 - protein, 409 aa, Burkholderia novacaledonica
  misc_feature (1)..(409): tr|A0A2U3IBZ9|A0A2U3IBZ9_9BURK Tryptophan halogenase OS =Burkholderia novacaledonica OX=1544861 GN=NOV72_04924 PE=4 SV=1
MNASVDVAIIGAGPSGAVAAALLRKAGRSVLVLEQQHFPRFSIGESLLPQSMAYLEEAGMLQDVVEAGFQYKNGAQFVHHDRAAAFDFRDKHSDGWGTTFQVERAVFDDLLIRRAAKQGAEVRFGHSVLDMKTGHAPVLEVADEAGTRYQVHARFVFDASGFGRVLPRLLNLEAPTRLPTRAAIFTHIRDGIPPEAHDRNKITVAVHPEHRDVWYWMIPLANGRSSVGCVAEAAFLDVPEAQREAKLRALIRGEPTLNRLIGDAPFLMPVRHIGGYSANVERLHGPGYALLGNAGEFLDPVFSSGVTIALRSAHLAVETLERQLKGEAVDWQAHYDRPLRKGIDTFRAFVENWYTGKLQDIIFARDQTPGIRRMIAAVLAGYAWDETNPYVAEPVRRLNTLHEVCMQRG

SEQ ID NO: 87227 - protein, 510 aa, Pelomonas sp.
  misc_feature (1)..(510): tr|A0A0Q8GLG0|A0A0Q8GLG0_9BURK Tryptophan halogenase OS =Pelomonas sp. Root662 OX=1736580 GN=ASD88_19310 PE=4 S V=1
MSNEQAIRRIVIVGGGSAGWMTAAPLSQMFGTQPGGPANPVGCEIVLVESADIGTVGVGEATLPSIRYYNDALELDNAEFMRKTQASFKLGIEFKDWGHIGNRFFHGFGGFGPPIVNRSSVAHWMRLNRTGGMPSYEDWSTASVMAQRNRFVPPEGGPPSAANSYSYAFHFDAGLYANFLRDYALARGVKREEGTIVDVSLRPGDGFVTAVTLADGRRIEGDLFIDCSGFRALLIEGVMKAGYDDWTHWLPCDSAQAAPCDKVVPLTPYTTSTARSAGWQWRIPLQHRTGNGHVYCSGYTSDEEAGRVLMSNLDGAPQGEPRQLRFKTGMRKRIWEKNVVAVGLASGFLEPLESTSLSLVIHGVSALVELFPDRSCEPHLVDEYNRRMTRQYESIRDFIILHYKETARDDSEFWRYCKAMPIPDTLAHQMDNFRRNGRVVVLDRDSFGEDSWYSLYLGLGMRPEALHPLLAQVDEATLREHFKRLHMAISKTVDDMPDHAAYLGRLVGTR

SEQ ID NO: 87228 - protein, 500 aa, Sphingomonas sp.
  misc_feature (1)..(500): tr|A0A1S6FJ34|A0A1S6FJ34_9SPHN Tryptophan halogenase OS =Sphingomonas sp. LM7 OX=1938607 GN=BXU08_08470 PE=4 SV =1
MTDNRIRNIVIVGGGTAGWMAAATLSRILGPDYARITLIESDEIGIIGVGEATIPQMATFNRMLGIDENEFVRATKGSFKLGIQFVDWGRRGHSYFHPFGKYGVDMQGVSFHAYFLRLHQLGEAPDIDQWSLQAKAGQMDKFMRPVDAGRSPLSDIAYAFHFDAGLYARFLRGYAEARGVTRREGKVVDVTLRGEDGFVQSVTMEDGTTIEGDLFVDCSGFRGLIIEQALDAGFTDWSKYLPCDRAIAVPCESVPEWTPYTRSTAHKAGWQWRIPLQHRTGNGHVFCSEYMSDDEATAILLANLDGKPVADPRTVRFRTGHRNKFWVKNCVALGLAGGFIEPLESTAIWLIQSGLSRFLTMFPDKQFNQADIDRYNRIMATDYEEIRDFIVLHYHATERDDSPFWDYCRNMEIPERLAEKMRVFRSHGRCFRENEELFNDTSWFAVMHGQLMTPQGFDPVAEVMTLDETRARLAHIREAIANSAEYMPNHRDFIQENCAA

SEQ ID NO: 87229 - protein, 509 aa, Xanthomonas citri; identical to SEQ ID NO: 82725
  misc_feature (1)..(509): tr|A0A0U5FRG1|A0A0U5FRG1_XANCI Tryptophan halogenase OS =Xanthomonas citri pv. citri OX=611301 GN=prnA PE=4 SV= 1

SEQ ID NO: 87230 - protein, 505 aa, Xanthomonas translucens
  misc_feature (1)..(505): tr|A0A199P035|A0A199P035_XANCT Tryptophan halogenase OS =Xanthomonas translucens pv. poae OX=227946 GN=A6R73_03 070 PE=4 SV=1
MIAAPLRNLVIVGGGTAGWMAAAALARVLGPDYRITLIESEQIGIVGVGEATVPHIKAFNNLLGINEAEFVRQTQGSFKLGIEFVDWHRQGTSYIHGFGTEIGHSLGLLPFQQYWFKQALAGKAKPLGAYTLNTVAARRGKFMTSASDAPPNSPLGNIAYAYHFDASLYAAFLRRFSEQRGVTRREGIVEQVQLHPESGDVLSVRLASGDTIAGDLFIDCSGFRGLLIEQALHTGYHDFTHWLPCDRALAVPCVKVGPPTPYTRATARAAGWQWRIPLQHRTGNGYVYSSAHLSDDEAAATLLTNLDGAALADPRPLRFVTGRRKQAWNRNVVALGLASGFMEPLESTSIHLIQSGISKLLELFPREGISPVLVQRYNDRIAFEFDRIRDFLVLHYTATERDDSDFWRQCRAMAITPELQATLDLFGDSGRFYRNGDEMFAEISWVQVMVGQGILPRAYHPLVDQVPAADIERFVASIEQTIGHCVDAMPPHQAFIDRYCAAAPR

SEQ ID NO: 87231 - protein, 505 aa, Xanthomonas translucens
  misc_feature (1)..(505): tr|A0A0K2ZI76|A0A0K2ZI76_XANCT Tryptophan halogenase OS =Xanthomonas translucens pv. poae OX=227946 GN=XTPLMG72 8_0893 PE=4 SV=1
MAQIRKVVIAGGGTAGWIAACALAHQFRDLLDITLIESEQIGTVGVGESTVPPIRSFHRFLQIDEQEFLRAVAGTFKLSISFENWRRPGERYLHPFGLTGQSTLACAFHHFWLEAQRRGMLSELGDYCLETVASRMDRFALQQSPPVNYAYHLDAGLYARLLRRHAERYGLKRVEGKIQQVRQHAESGGVEALLLEDGTLVEGELFIDCTGFRGLLIEQTLHTGYEDWQQWLPCDRAVAVQTEAVAAPVPYTRAIAHAAGWRWHIPLQHRVGCGLVFSSAHLSDDEARAKLLHDAAAPPIKEPWLVPFRTGRRRKAWNKNVVALGLASGFIEPLESTSIHLTIAAVMRLITLFPSEGIAPSMVDLYNAVSRAEMEHVRDFIILHYHANQRDEPMWQACREMALPDSLQQRLRAWRERAHAWQGADELFRVDSWIHVLLGQGIVPAQHHPLARALPDQPLQQFLDAIRQPIDRAVAQMPSQQDFIARYCKAGPEVWAGRAPVAAPA

SEQ ID NO: 87232 - protein, 510 aa, Sphingomonas sp.
  misc_feature (1)..(510): tr|A0A1S6FLI8|A0A1S6FLI8_9SPHN Tryptophan halogenase OS =Sphingomonas sp. LM7 OX=1938607 GN=BXU08_13370 PE=4 SV =1
MAEKRRILIVGGGTAGWLTAAYLARFLDLPNKAEIEITLLESRALGIIGVGEGAFPTIRSTLEFIGIDEADFIRSTSATFKQGIRFDDWLYAPTSDGRRHRYLHPFEAPYYTEGTSLIPYWLLQDEAARRPFAEAVTIQGRVAGNCRGPKRPGEGSFSGPLNYAYHFDAHRLAALLGKRAGELGVRALEGLLTGVELDERGHISGIETREHGRLKADLYIDCSGFRAELIGKALGAPFKSVKHLLFADRALACKIPYDRPDAPIESVTIAAAHDAGWTWDIGLEGARGIGCVYASKYMDEAQAAKILRAYIGHDDFSARQLEFEPGYRETQWIGNCVAVGLSGGFVEPLESTGVVLIEAAVGMLAQLFPHAGPIDAPARQFNALMTARFDNIINFLKLHYCLSRREEPFWRDNADPGSIPEALQELLQRWRHRPPNRFDFLLDLESFAFFNYQYILYGMEYPTDLSGGRGDFPNVEAAEKLFDRIRGFSERATADLPEHRSLIAHINEPT

SEQ ID NO: 87233 - protein, 498 aa, Sphingomonas sp.
  misc_feature (1)..(498): tr|A0A1S6FN40|A0A1S6FN40_9SPHN Tryptophan halogenase OS =Sphingomonas sp. LM7 OX=1938607 GN=BXU08_16590 PE=4 SV =1
MRRIVILGGGTAGWMAAACLARTLGTGERSITVVESEEIGTVGVGEATIPLIETFHQILGISAIDVLRNCEATFKLGIEFVDWRRRGDRYLHPFGPVGTDLNGVGFLQHWLRHRAQGGDSDYLDYNLESRAAMAGRFGMTQLRQPGEHQLHFAYHFDAALYAAMLRRYSERLGVVRVEGMVQDVRRDGESGDVTALALRDGSEVAGDFFLDCSGFRGLLIEQTLGAGYDDWSEWLPCNRAVAVQSGRLAQLSPFTRSTALDAGWQWRIPLQHRTGNGYVFCDAFVSEDEATATLLSRLDTPATIEPRMLRFVTGRRRKTWDHNVVALGLAGGFLEPLESTSIYMVQSALAKLIALFPRGDRVNRVAADRFNAMMATEWARVRDFIIAHYKITERDDTPFWKHCRNMTIPDTLAERLALFEEEGLFIEQPHDLFKEGSWASVLIGQGMTPRRFHPVANAAPPEALETQLARMRSAVAARLATLPEHGEYIDQCMGKAAA

SEQ ID NO: 87234 - protein, 510 aa, Sphingomonas sp.
  misc_feature (1)..(510): tr|A0A1S6FHF9|A0A1S6FHF9_9SPHN Tryptophan halogenase OS =Sphingomonas sp. LM7 OX=1938607 GN=BXU08_04150 PE=4 SV =1
MREKREILVVGGGTAGWLTAAYLARFFEGRITVTLLESPDIGIIGVGEGAFPTIRSTLKFLGIDETRFIREASATFKQGIRFNDWLHAPSPDGTRHQYLHPFEAPFYTEGGSLVPYWLLQDADSRPPFAAAMTIQNRVAEARRAPKRPGEGDYAGPLNYAYHFDAARLAQVIEARAVELGVRHLRGLLTGVDLAADGSIAGIRTDAHGTLEADLYIDCSGFRAELIGKALGVPFKSVKHQLFTDRALACKIPYDRPDTPIESFTIATAHEAGWTWDIGLEGARGIGCVYSSAHIGDDRAAEILRRYIGHDDYTARIIPFEPGYRERQWVGNCVAVGLSGGFLEPLESTGVVLIEAAVGMIAELFPHSGPADAPAARFNRLIAARYENIINFLKLHYCLSRRPEPFWRDNADPASIPEPLQELLRQWRHRPPSRFDFLLDLESFAFFNYQYILYGMEFPTDLSASRGDFPNVEAAEKLFARIRNFSEQATQDLPSHRALIREINQGASRGA

SEQ ID NO: 87235 - protein, 525 aa, Erythrobacter citreus
  misc_feature (1)..(525): tr|A0A0L1KGA1|A0A0L1KGA1_9SPHN Tryptophan halogenase OS =Erythrobacter citreus LAMA 915 OX=1306953 GN=J121_968 PE=4 SV=1
MTASTPTDHGQAQAIGSICIVGGGTAGWSAAALLSQVLRGSGCRITLVESSAIPTVGVGEATIPPIFDFLRNIGADEIEFIRRCQATFKLGIQFRDWLHHGHAYWHPFGNLGLTINQRPFHHYYCMNRAAGHGETLADLCPSVALAEDGKFAFPSPDGQWPGGAVAYALHFDAGLVAAFLRDHAVAAGVERLDRRIVGATRGEGERIAAVQFDDGESLEADFYIDCSGFRGLLIEETLGAGFEDWKHWLPCDSAVAAPTAAQEQRAPYTVATARSAGWQWRIPLQHRTGNGLVYASDFISDADAQAQLLAGLDGEAQADPRVLRFTAGLRKRAWVGNCLAIGLSAGFLEPLESTSIHLIHTGLNRLLDLFPDRRFDPALIAAYNRDVHREYAHIRDFLLLHYVPNRREGEPFWDHIRGLDLPDTLAEKIELFTRTGRIMSRQRELFSDISWFYVMHGMGLTPAALDPLAEAAPFGEVRKVIDQLRGAMQAFRSAAPTHDAILDRLLDPAETRRPQFGTGGGWTTR

SEQ ID NO: 87236 - protein, 462 aa, Amycolatopsis decaplanina
  misc_feature (1)..(462): tr|M2ZWI3|M2ZWI3_9PSEU Tryptophan halogenase OS=Amycola topsis decaplanina DSM 44594 OX=1284240 GN=H074_02222 P E=4 SV=1
MRATTQILVIGGGPAGSTAAGLLAKEGFEVTLLERDHFPRYHIGESLLPSCRPILERLGVWDKIAAAGFQPKGGAYYFWGPEEWEVRFRPHGRDGSTSAWQVIRADFDKILLDHAREVGVDVTEGIAVKKLDFDGDRPVAAHWAEAKNPANTGRIEFDYLVDASGRGGVMATKYLKNRKFHNVFRNVAAWSYWKDAKELDRGPSGAITVASVGDGWFWGIPLPDGTLSVGLVTGRDSFNAARNELGGVDPVYHKAIGDCPAIQQLLVEAEQVTEIKVEQDYSYAAEQFQGPGFLLAGDAACFLDPLLSTGVHLGTYSALIGTAAIGSVIRGEISETEAWDFYEVVYRRAYERLLVLVSTFYESYRGKEHHFFRAQQLSEKDWMGMDVQAAFDRFVTGIADLEDTEEVYRRIQGHLLGDESGKHNPLDNLNRVHEHKQAPEKPEKAINGLYLSYEPQIGIRRA

SEQ ID NO: 87237 - protein, 389 aa, Alphaproteobacteria bacterium
  misc_feature (1)..(389): tr|A0A2N3AU80|A0A2N3AU80_9PROT Tryptophan halogenase (F ragment) OS=Alphaproteobacteria bacterium HGW-Alphaprot eobacteria-9 OX=2013672 GN=CVT87_06170 PE=4 SV=1
EAAPDARGLWHYSLHQLAADQARFGKLDRVGNTAMAGLAYAYHFDATRYALHLRDYAEAREGTRTEGMVESVERDGTSGDITAITLDDGRRVAGDFFVDCTGFRALLLGGALGVGYQDWSHWLPCDRALAVPSERLPTLVPFTRATAKSAGWQWRIPLQHRTGNGHVYASGFTDDDAAADTLLAGLDTKPLGDPRPIRFTTGRREALWAQNCVSIGLSSGFLEPLESTSIHLIQSHVSRLIQLFPRGKNAAAERAEYNRRCMAEFDQIRDFLILHYHRTDREDTEFWRYCKHMAVPDSVTHKLELFAASGRVGRDADDLFREASWVQVMLGQGIMPADYDPMADQIDPAQLEEFLASLRNVIERSVAGLSSHADYLQRHCPADSVSTPA

SEQ ID NO: 87238 - protein, 491 aa, Amycolatopsis decaplanina
  misc_feature (1)..(491): tr|M2YW94|M2YW94_9PSEU Tryptophan halogenase OS=Amycola topsis decaplanina DSM 44594 OX=1284240 GN=H074_31722 P E=4 SV=1
MSVEDFDVVVAGGGPGGSTVATLVAMQGHRVLLLEKEVFPRYQIGESLLPATVHGVCRMLGVADELANSGFPIKRGGTFRWGARPEPWTFHFGISAKMAGSTSHAYQVERAVFDDILLKNAKSKGVVVREGCSVNDVVEDGERVTGARYTDADGNAREVSARFVIDASGNKSRLYTKVGGSRNYSEFFRSLALFGYFEGGKRLPEPVSGNILSVAFDSGWFWYIPLSDTLTSVGAVVRREDADKIQGDREKALNTLIAECPMISDYLSNATRVTTGRYGELRVRKDYSYQQDSYWRPGMVLVGDAACFVDPVFSSGVHLATYSALLAARSINSVLAGDLDEKTALNEFEARYRREYGVFYEFLVSFYQMNVNEESYFWQAKKVTQNQSTDVESFVELIGGVSSGETALTAADRIAANSAEFAAAVDKMAAGDGDDMVPMFKSTVVKQAMQEAGQVQMKALLGEDAEPELPLFPGGLVTSPDGMKWLPHHPV

SEQ ID NO: 87239 - protein, 502 aa, Sphingomonas sp.
  misc_feature (1)..(502): tr|A0A1S6FJE0|A0A1S6FJE0_9SPHN Tryptophan halogenase OS =Sphingomonas sp. LM7 OX=1938607 GN=BXU08_08475 PE=4 SV =1
MSAPAIRKVVVVGGGTAGWMTAAALARLTRAGVQVTLIESDSIGIVGVGEATIPPIRSFNAMLGIDENHFLAHTQGSMKLGIEFVDWNQPGHRYLHPFGEYGFSIDGVRFHHVWRKLRAAGRAGLLDEYSMSATAAGLNRFSAPVAEQNSPLSQLVYAYHFDASLYAGYLRGYSEARGVVRREGKITDVALRGEDGFVEAVTLEDGTRIEAELFIDCSGFRGLLIEEALHTGYEDWTHWLPCDRALAVPTENAGLLTPYTRATARPAGWQWRIPLQHRTGNGYVYSSAHVSDDEAAATLLANLEGKPLADPRPLRFTTGRRKLAWNRNVVAIGLSSGFLEPLESTSIHLIQSGISRLLALFPDSGWGNAERDAYNAFTRSQYERVRDFVILHYKTNGRDEPLWRYVREMAVPDSLTQRIELFRNRGRIFRHEDELFAEASWVAVLLGQGVTPTGWDPLADALDSDQVATMLERIRTTFRRAAEAMPDHAAYLSRHCASRGIA

SEQ ID NO: 87240 - protein, 529 aa, Rhodanobacter sp.
  misc_feature (1)..(529): tr|A0A1V3PBI5|A0A1V3PBI5_9GAMM Tryptophan halogenase OS =Rhodanobacter sp. C06 OX=1945854 GN=B0E52_07920 PE=4 S V=1
MQRLRKVLVVGGGTAGWLTACYLAKAVNAADPASVQVHLVESDRIGLIGFGESTFPSIRGTLSAIGLDERRFLAETSAAYKQGIRFRHWVRPPGTPGKEHFFHPFSVPSQRPGGPELLPYWLLGAAPAGLGFADAVTMQSLLVDRSRAPKRARDPDYQGPMNHAYQFDAGRFAMLLAEHGQQALGIRRHVATVERAVPDDHGGIARLVTAELGELEADLYVDCTGMRASLIGEALHSPYRSCGDMLFTDRAVAMQAPYPRPDAPIPSFTLCTAQESGWVWDIGLQQRRGVGYVYSSRHTDATRAEETFRRYLGSAAEGQDATHIRFDNGYRPEAWRGNCVAVGLSGGFMEPLESTGIALVELAAYLVTHLLPGDRDDMGRAARHFNAMMSARYERIVDFIKLHYCLSRRRDSAFWVDNADPAGIPQSLQDKLAQWRHRPPHRLDFVGDLEMFPVSSWQYMLYGMEFETDLELVRGAYPRGVEASREFAMIRQAATQALDDLPDHRALVTHLCEEYRRRPHAPVAHAATA

SEQ ID NO: 87241 - protein, 504 aa, Sphingomonas sp.
  misc_feature (1)..(504): tr|A0A0Q4CQ27|A0A0Q4CQ27_9SPHN Tryptophan halogenase OS =Sphingomonas sp. Leaf10 OX=1735676 GN=ASE59_09435 PE=4 SV=1
MSQPSSAPAPGRLVRQVVVVGGGTAGWMAAAALSRALGPIGRSVTLIESDAIGTVGVGEATIPPIRAFNAMLDIAEGRFLRETMGSYKLGIEFVDWGRIGQRYFHPFGAAGQDFHGVPFHQLWLRHRVRGGTTRLTDYSMCTVAAREGRFGIAAEGDRTPLAHIAHAYHFDATLYAALLRRVAEEQGVVRHEGRVVRVDRDGDSGDVTSVRLADGRTIAGDLFVDCSGFAGLLIEGALETGYHDWRHWLPMDRALAMPTTRLDPLPPYTRATAHAAGWQWRIPLQHRTGNGHVYSSGFTGADAAERVLRDHAPGELCGDVRALSFTTGMRRKPWSHNVVALGLAAGFVEPLESTSIHLIQHGIQRLIALFPGPAVRPAERDAYNADMTRAFEAVRDFVVLHYKATTRNDSDFWRAMRAMTVPDSLAHRIELWRAQGRLIPQAGDVFAIPSWAAVLTGQEIWPAAYEPTVDRLNADSVEAALADMRGAYRRTALSLPTHDAALPR

SEQ ID NO: 87242 - protein, 498 aa, Sphingomonas sp.
  misc_feature (1)..(498): tr|A0A0Q4DGE5|A0A0Q4DGE5_9SPHN Tryptophan halogenase OS =Sphingomonas sp. Leaf10 OX=1735676 GN=ASE59_17625 PE=4 SV=1
MTAAINRVVIVGGGTAGWMAAALIAKVIGPQVKIALIESDEIGIIGVGEATIPPIQHVNAVLGIDEAEFLRETRGSIKLAIRFDDWGAIGQSYYHTFGAAGRNTAFCSFHHYWNRAKRAGIAADYWDYDLNYLCAREGRFAKIQVDDPLWHLPYAYHFDSALYGQYLRRYGEARGVERIEGLVEQVARDGESGHVTSLTLRGGREVSGDLFIDCSGARGLLIQRQLNVGYEDWGHWLPCDRAMAVPTARHDDTPPYTRSTARSAGWQWRIPLQHRVGNGLVYSSRHLSDDRAAELLLGNLDGEVLADPRIIPFRTGRARRQWDHNVVAIGLSSGFLEPLESTSIYLIQSAIVRLLHLFPHAGFDARQIAEYNRQSRIEFETVRDFIILHYHATSRDDSDFWRHVRTMSLPDRLADKIALFRATGTLTQDPLDIFMEPSWVQVLMGQGIEPRDYHPLADGPSDAELAEQLRQLAAMKREPVPNMPMHDRWLRGFGGTAA

SEQ ID NO: 87243 - protein, 501 aa, Sphingomonas sp.
  misc_feature (1)..(501): tr|A0A0Q4DXF2|A0A0Q4DXF2_9SPHN Tryptophan halogenase OS =Sphingomonas sp. Leaf10 OX=1735676 GN=ASE59_03635 PE=4 SV=1
MSNDRIRRIVIVGGGTAGWMAAATFARLLTTDYCDITLVESDAIGTVGVGEATIPQMATFNRMLGIDEAEFLRETQGSFKLGIEFVDWTRVGHRYFHPFGSYGINMNGISFHAYWLRLHGVGEAPAIEPWSLQAMASAQGKFMRPIDAGNSPLSDIAYAYHFDAALYARYLRRYAEARGVVRHEGRIDRVDLRPQDGFVEAVVLEDGRRIEGDLFVDCSGFRGLLIEQTLGAKFVEWSHWLPCDRAVAVPCAGTAAMAPFTRSTARRAGWQWRIPLQHRIGNGHVFSSAHMSDDEATAILLANLDGEPLAEPRFVPFRAGHRDRMWIRNCVAIGLSSGFLEPLESTSIWLIQSGLSRLMAMFPDRRFRSAEIERYNRILSTEYAEIRDFIILHYHATERDDSDFWRHCRTMDVPERLAEKMRVFRTHGRTFRENEELFNDTSWFAVMNGQGMRPEGYDPIAETLSLEETRARLAHIRDAIAASADYMPAHRDFIRGYCAAG

SEQ ID NO: 87244 - protein, 496 aa, Sphingomonas sp.
  misc_feature (1)..(496): tr|A0A0Q4D803|A0A0Q4D803_9SPHN Tryptophan halogenase OS =Sphingomonas sp. Leaf10 OX=1735676 GN=ASE59_05825 PE=4 SV=1
MTDPIAHVVIIGGGTAGWMTAAACGRYLDDGQRRITLVESDAIGTVGVGEATIPSILNFNKLLGIDEAEFLRETRGSFKLGIEFAGWHTADSGYFHPFGNFGRDIEGVNFHQLWAKLKRQDGIGPIGDYSPTTVAARANAFGPPHPDPRSPLSGMAYAYHIDATLYARFLRRRAEADGVTRIEGRIVAVEHHDNGHVAAVRLDNGRRVEGDLFIDCSGFRSLLLGEAMGVGFEDWSRWLPCDRAIAVPTERTEPVLPYTRATAHAAGWQWRIPLQHRTGNGVVYASRYMDDDAAEALLLSRLDAAPTAAPRRLSFTAGRRDAMWAGNVVAIGLSGGFLEPLESTSIHLIQQGISKLFALFPDRGFSAVERDEYNRQMADNYRSIRDFIILHYHATARDDSSFWTHVRTMDVPDSLARKIDLFRQKGRIFRYEDELFAMPSWVAVLLGQGIEPVGYDPIADALDEERLLPAIRQMRSATAAAVATLPQHGAVLARMG

SEQ ID NO: 87245 - protein, 320 aa, Acinetobacter baumannii
  misc_feature (1)..(320): tr|A0A009E9U8|A0A009E9U8_ACIBA Tryptophan halogenase fa mily protein OS=Acinetobacter baumannii 348935 OX=13106 05 GN=J504_3251 PE=4 SV=1
MQQSHGEIEADLFIDCSGFKGLIINQALKEPFIGMSDQLFCNSAVAASIKHDDEENGIEPYTSAIAMKNGWTWKIPMLGRFGSGYVYSDEFSTREQATDEFLKLWNVKEDSISLNHIKFRTGRNKRAWVKNCVAIGLSSCFLEPLESTGLYFIYAAIYQLVKHFPKKEIDEKLVKAFNENIEKMFDDSRDFVQTHYFTTSRTDTAFWKANKNDLKLSDSLKSKLDIYKSGLVVCPPITTNEEDYYGDFDIEFSNFWTNSNYYCMFTGFKSYPNSVYPKILYDNKYDKAREYMQELKKREDNLLESLPSTYEYLKHLHSRK

SEQ ID NO: 87246 - protein, 502 aa, Gammaproteobacteria bacterium
  misc_feature (1)..(502): tr|A0A2N1XD15|A0A2N1XD15_9GAMM Tryptophan halogenase OS =Gammaproteobacteria bacterium HGW-Gammaproteobacteria- 4 OX=2013800 GN=CVV14_10995 PE=4 SV=1
MSIQPIRDIVILGGGTAGWMSAAALSKLLPPSCRIRLIESEEIGIVGVGEATIPNIKHFNAALEIDEDEFLKATQGTFKLGIEFVNWGRLGDRYIHGFGKVGPDTSLVGFHHYWLRLKQLGKASGLDAYSINTVAPRQARFLRYRKDMPGSPLGDIVHAFHFDASLYARWLRGLAEKRGVMRTEGKVKQVLRRAEDGFIEALVMESGERIDGEFFIDCSGIRALLIGDALGVGYDDWSHWLPCDRALAVPSAPVKPLLSMTRSTAHSAGWQWRIPLQHRVGNGHVYSSRFMSDDEAASILLANLDGEKLADPRLIRFRTGMRRKLWERNCVAVGLSSGFLEPLESTSIHLIQTAVSRIATFFPHRGFDAADIDEYNAQGRLEYQQIRDFLILHYKATERSDSAFWNYTRTMPIPATLQRKIDLYRSNGRLFRDGNELFAEPSWLQVMEGQRIHAQGYHPFAGFMPENELHEFVGGVEAVIGKCVGVMPDHAQFIAEHCAALR

SEQ ID NO: 87247 - protein, 505 aa, Sphingomonas sp.
  misc_feature (1)..(505): tr|A0A0Q4D713|A0A0Q4D713_9SPHN Tryptophan halogenase OS =Sphingomonas sp. Leaf10 OX=1735676 GN=ASE59_18875 PE=4 SV=1
MSAPLTSIAIIGGGTAGWMAAAALSRVLGRSVAITLVESEAIGTVGVGEATIPPIQAFNALLGIDEDDFVRATQGSFKLGIEFVDWGAKGERYFHPFGVYGIDFGPIPFEAMWHRLRAAGAAAPLDAYSICAAAAQGNRFQRPLDPPGNTPLHHVGYAFHFDAALYAAYLRRIAEAAGVARREGQVVDVTRDAGDGRIDSVTLAAGGQVAADFFIDCSGFRSLLLGETLGSVFQDWSHWLPNDRAVAVPSANAGPPTPYTRSTARAAGWQWRIPLQHRIGNGYVFSSAHCSEDDATATLLANLDGAPLADPRVLRFRTGRRQDCWVGNCVGLGLSTGFLEPLESTSIHLIQAGIARLLEMLPGRDPDPAMVRRYNRLMAAEFDGIRDFIILHFHATARDDTPYWDHVRTMTVPDTLAERLAEYRATGRVYREADDLFTRTSWLAVLDGQGVRAAGHDPLAMAMPLDEARERLARIAAVTAAAAGRMPAHGAFIAAHCAAPIASPA

SEQ ID NO: 87248 - protein, 499 aa, Sphingomonas sp.
  misc_feature (1)..(499): tr|A0A396RR20|A0A396RR20_9SPHN Tryptophan 7-halogenase OS=Sphingomonas sp. ZDH117 OX=2305907 GN=D1610_02980 PE =4 SV=1
MEDQIVRRVVIAGGGTAGWTVAAALASQLGPLIDIALVESDEIGTVGVGESTIPTVRGFHALLGLDEREFMRATQASFKLGIEFRDWARVGDRYFHSFGQIGRSTWMGDFQHMWLQARAQGFGGDLGDYCFELQAAEAGKFLTGENGRLNYAYHLDATAYGRFLRGFSEPLGVRRIEGRIAEVRQAPETGFIEALALQSGQVVEGDLFIDCTGFRGLLIEQTLKTGYEDWTHWLSTNSAIAVQTQATGPARPYTRAAAHDAGWQWRIPLQHRVGNGLVFASEFLSDDEAHAMLTERVEGEMLTDPRLIRFRTGRRRKAWNKNCIAFGLASGFVEPLESTSIHLIMIGVTRLMQLFPFGGVTDALADRFNLMSQRELEGIRDFIILHYHLNERDDSPFWKRCREMEIPDSLAARIALFREGAHAYQDAHDLFRVDSWVQVMLGQRLAPRAHHQMGRLMPPEQLLKALTDLKANIAGAVAKLPDHQRFLDSYCASTGRENG

SEQ ID NO: 87249 - protein, 510 aa, Microbulbifer thermotolerans
  misc_feature (1)..(510): tr|A0A143HP80|A0A143HP80_9GAMM Tryptophan halogenase OS =Microbulbifer thermotolerans OX=252514 GN=A3224_13775 PE=4 SV=1
MKDKFDLDDRIRHIVVVGGGSTGWIAAAVLAHQFKPDVCKVTLVESEDIGTIGVGESTIPPFIGLLRGLGIDEADFIQKTQASFKLGIQFHDWLEKGQSYFHPFGVLGQRLGIIEFYQAWLWAQLNGHSSELQDHAPCAVMAREGRFYLPQKAQKTPIGGASYALHLDAKLAGRYLRNYAEARGVERVEGRVVEVFSHDNGFIDKVRLTDGREISGDFFIDCSGFRALLIEQQLGVEFEDWKDFLPCNRAVAVQTENTGATTPYTQASAESAGWRWRIPLQHRTGNGYVFDTRFISDDEARARLLEAVDGKPITEPALIPFRTGIRTELWKHNCLSLGLASGFIEPLESTAIHLVTRGMDFFLRFFPGKSCDTELAAEYNRRMRLDYEEIRDFVVLHYCLTRRRDAPFWRWWQEEAEIPQTLRERIALFRCQGALREGIDELFHSPSWFSVFEGMGVRPRRYDARLDNLPAAQIIQHQETARAAIAQMVDTLPSHDDFLREHCPAVTINN

SEQ ID NO: 87250 - protein, 517 aa, Microbulbifer thermotolerans
  misc_feature (1)..(517): tr|A0A143HMI9|A0A143HMI9_9GAMM Tryptophan halogenase OS =Microbulbifer thermotolerans OX=252514 GN=A3224_10280 PE=4 SV=1
MSQPVKSVVILGGGTAGWITAGTLAARFKRDQAEPVSVTLIESPNVPTIGVGEGTWPTMRNTLKRMGVRETDFIRECNVGFKQGAKFARWSTGAKEDFYYHPLVLPEGFNSHNLAPHWLAGDRSVSFSNTVCPQEALCQRNLAPKTIDTPEYAAIANYAYHLDAGKFSKFLQEHCTENLGVRHILADVSGVRESETGDIAALQTDTAGEVSGDLFIDCSGFRSKLLGEHFGIPFHSCKSVLFIDTALAVQVPYEHENSPMATHTISTAQSAGWIWDIGLQNRRGVGHVYSSAHSDESSAYRELASYLNMSEPQLDELGVRKIPIVPGHREKFWHRNCVAVGLSAGFLEPLESSALVLVEISANMIAEQFPASRAAMDVVARRFNESFLYRWDRIIDFLKLHYVLTKRKDSEFWLDNCDPVSVPDSLKELLTLWRYQPPWHDDFDRAVEVFPAASYQYVLYGMGYETKPRPGGISAPNLEMAAQLFEQKNRGLEKMLRLLQPHRDLINKIRKFGLQKI

SEQ ID NO: 87251 - protein, 492 aa, Teredinibacter turnerae
  misc_feature (1)..(492): tr|C5BN16|C5BN16_TERTT Tryptophan halogenase PrnA OS=Te redinibacter turnerae (strain ATCC 39867 / T7901) OX=37 7629 GN=TERTU_0510 PE=4 SV=1
MSEQKTKVVIAGGGTAGWLAAAALSQQLGSAVEVALVESAEIGTVGVGEATIPPMKTFHRLLRIDEQEFMRTTHATFKLGIQFENWRVEGEKYFHSFGTTGRDTLVSEFIHFWLRGRDMGIAKDFGDYCVEFKAALENKCSTQGDTKVNHAFHLDAGLYAKYLRTFAESHGATQVEGNIAEVLQDNNSGYITGLRMASGDIVSGDLFVDCTGFRGLLIEQTLHAGYESWEHWLPCNRAVAVQTASVRDPVPYTRSIAHHAGWRWQIPLQHRVGNGTVFCNRYMSEDEAIAKLLADIQGDVITEPRVIQFQTGRRRKNWVKNCVAMGLSSGFLEPLESTSIHLIMTSIMRLLQLFPGKDIQQATIDEYNMQAAIEFELIRDFIILHYKATEREDSKFWRYCKRMDIPESLAHRIDLFRETGKSYQKEGELFRLDSWTQVMLGQGIYPKRYHPMVDSMQAQELERFLHATAANVAAVVDSMPPHEKFLAEYCAI

SEQ ID NO: 87252 - protein, 491 aa, Sphingomonas sp.
  misc_feature (1)..(491): tr|A0A0Q4DS79|A0A0Q4DS79_9SPHN Tryptophan halogenase OS =Sphingomonas sp. Leaf10 OX=1735676 GN=ASE59_00590 PE=4 SV=1
MTPMRIVIAGGGTAGWLAAALLTRQLASLVEVTLVESEDIGTVGVGEATIPTIRSFHALLGLDEAEFMAATGASFKLGIAFENWARDGDRYLHSFGEVGRSTWMGDFQHFWLEARAQGAAGPIGAYCLEHEAAEAGRFATGPDAPLNYAYHFDAGRYAAYLRTHSEAQGLTRIEGRIDRVELDGQSGNIAALVLDDGRRVTGDLFLDCTGFRALLIEQALGVGFEDWSHWLPTDRALAVQTAATGPAPPYTRAIAHDAGWRWQIPLQHRVGNGLVYSSSHLSDDAARDRLLSSVDGRTLIEPRLIRFRTGRRLATWERNCVALSLSSGFVEPLESTSIHLVMIALTRLVQLLPFGHPGEAARARFSDQSRREIEAVRDFVLLHYHLNQRPEPFWQERRETPPPDTLAERIALFAEGGHAYQSADDLFRVGSWLQVMLGQRLEPHGHHPLAKLMPPGQLAAVLGDLRSNIAAAVATLPTHQQFLDRYCRSES

SEQ ID NO: 87253 - protein, 501 aa, Sphingomonas sp.
  misc_feature (1)..(501): tr|A0A396RQL3|A0A396RQL3_9SPHN Tryptophan 7-halogenase OS=Sphingomonas sp. ZDH117 OX=2305907 GN=D1610_08940 PE =4 SV=1
MRQSAIQSVAIIGGGTAGWMTAAALAHKLAGLPISVTLVESEEIGTVGVGEATVPHIRHFNASLGFDEADFMARTNATFKLGIEFRNWGRIGDSYIHPFGAFGRDIDGVPFHHLWARLRRDGAAPAFDSFSLPVQAARMGRFAHPADDPASPFSTYSYAYQFDAGLYAAYLRAFAEARGTRRIEGKVVDTALDAQTGFIEAVTLDGGKRIAADLFIDCSGFRGLLIEQALKAGYQEWTHWLPCDRAIAVPCANAGPIAPLTRSTALDAGWAWRIPLRHRAGNGHVYSSAFIDDDRAEQAVLAQLEAPPLADSRRLRFTTGKRRRQWIGNCVAIGLSSGFLEPLESTSIHLIQLAITHLIELFPTTDWDPMDAAEFNRVMALEYERVRDFLILHYHATERDDTPFWTHCRTMEIPDSLAHKLALFRERGVVVNYREGMFLEPSWLAVYLGQRVIPRRGDPLAERGDSAELEARAVAMAADYRRAAERLPLHQSLLANVAAAA

SEQ ID NO: 87254 - protein, 503 aa, Sphingomonas sp.
  misc_feature (1)..(503): tr|A0A0Q4DUG1|A0A0Q4DUG1_9SPHN Tryptophan halogenase OS =Sphingomonas sp. Leaf10 OX=1735676 GN=ASE59_00285 PE=4 SV=1
MSEANIRSIVIVGGGTAGWMAAAALSHMLAGSGMTIRVVESEAIGTVGVGEATIPHIQYFNRLLGIDEDDFVRRTCATFKLGIEFVDWGQVGERYIHPFGTYGQEMEGIHFHHFWYRHAQAGRALPLDRYSIGVGAARAGKFMRPDPSRRGSPLAGISYAFQFDAALYAKYLRERAEAAGVVRTEGRIVDVALNGGNGHVDHVVLDDGSNVAGDLFIDCSGFRGLLIEGALKAGYDDWREWLPCDRAVARPCARVGDPTPYTRATATSVGWRWRIPLQSRTGNGHVYCSDYVDDDTALAMLDEGLDGAPLAGPNFLRFTAGVRRKAWDRNVVALGLAAGFLEPLESTSIHLIQTGIARLLTNFPDRSFNQPDIDYYNRRTRQEYEQVRDFLILHYKTTARDDSPFWRRCRDMAIPASLEERIAIFRENARLYRHDNELFSETSWLAVLHGQNIHPKRHHPIADILTEEELDRRMTHIAGAMDAGVRAMPGHMAFIDRFCRSPS

SEQ ID NO: 87255 - protein, 508 aa, Sphingomonas sp.
  misc_feature (1)..(508): tr|A0A396RWU2|A0A396RWU2_9SPHN Tryptophan 7-halogenase OS=Sphingomonas sp. ZDH117 OX=2305907 GN=D1610_02045 PE =4 SV=1
MKVVIVGGGTAGWMCAAALARLLALPDYDITLIESDEIGTVGVGEATLPHIKTFNDMLGIDEAQFMRETRATFKLGIEFVGWDKPGGRYIHPFGTFGEPWAGVDFQHHWVRASLAGQDVGSLQDYSYAVAACREGAFEFPNQDMKSIRSTYAYAYHFDAGLYADFLRRWTIFRGVKRVEGQVVGIVRNAETGHVESLTLKSGARIAGDLFIDCSGFRALLLGQTMNVAWRDWSEWLPCDRALAVPCERAGALTPYTRSIAQPGGWIWRIPLQHRTGNGHVFSSRFCSKEQAYEALMQSLDGPALAEPRLLRFQAGRRAKAWEGNVVAIGLSSGFLEPLESTSIFLIQAAATDLANLMPVGGVIDPRLAAEFNRLFEIHYDRTRDFLVLHYAANARVGEPLWDHVRTMTLPDSLAHKIALFEESAAAPDYTLGLFSRDSWLAVLVGQGIVPRAYNRLADRIAPPDLEAKLSDLKLRISTNAAAMTPHDEFVASYCSAAADAAGDTVSAA

SEQ ID NO: 87256 - protein, 496 aa, Unknown
  misc_feature (1)..(496): tr|Q1YRF4|Q1YRF4_9GAMM Putative tryptophan halogenase O S=gamma proteobacterium HTCC2207 OX=314287 GN=GB2207_03 419 PE=4 SV=1
MTDKNITKVVVVGGGTAGWMAAASLSKLIGPNIRVCVVESDEIGTVGVGEATIPTMMTLHQLLKIDQPEFMAAVQGTFKLGINFENWNKLGDSYMHAFGRTGQDCWAGGFQHFWTRGKELGISEGYGRYSASYVAAKAGKFAVLPDHSLSYAFHMNATLYAKFLRNMAEKHGCERVEGKITQVNTHSDSGYIDSITLESGQKIEGDLFVDCSGFRGLLIDETLQTEYEDWSNWLPCDSAVAVQTESVGEPIPYTRAIARDAGWQWRIPLQSRVGNGMVFCSKYLSDDEAVDSLLKNVEGTPLTKPRIIKFRTGQRKQHWNKNCIALGLASGFVEPLESTSIHLIQRGIIRLLQMFPHQGICQPDVVEFNRQMSDEFVFVRDFIVMHYHLTERDDTPFWRHCQSMPIPDGLRHRLDLFKQTGRVFQEAGDVFAENNWVQVMLGQGLLPEQYHPIVDSMSEAELDNFLKGLAGNIDHLVNQLPSHQSFVSNYCPADSV

SEQ ID NO: 87257 - protein, 504 aa, Pseudoalteromonas byunsanensis
  misc_feature (1)..(504): tr|A0A1S1N947|A0A1S1N947_9GAMM Tryptophan halogenase OS =Pseudoalteromonas byunsanensis OX=327939 GN=BIW53_0868 0 PE=4 SV=1
MQITQDPIKKFVIVGGGTAGWLAGATLGNIFKHSDVEVELIESEDVNIIGVGEATIPPLIDTLESLGIDLSEFISATQASFKWGIKFENWYQEGHSYFHPFGELGKRIDGHEFYQCWLKLKAHGDNTPLMAYSPEAVLAENMRFFVPHQAMNTPLSGARFALHLDAVLAGKYLRNFAQSIGVKRTVGHVELVDKTLDGNIASVTLSSGHTIAGDFFIDCSGFNSLLIGNALNTDYQDWSEYLPCNRAVVVQTTLSEDIAPYTISRAQEAGWSWHIPLQHRMGNGYVYCDKYISDEQATATLMKNISGKALTPPRVIPFRTGLREQVWHKNCLALGLAQGFLEPLESTAIHLVSKSLALFVRMFPTKQHNAILQAEFNRRIHQDYVEIRDFLVLHYCTTKRSDSPFWQDWQHRPIPQTLQQRINFFAQQGGLLRETEALFQATSWYAVLDGMKVNPLSYNPTLDALDAKTLHKSLNMGRTALEQCVLKQPSHLQFLQQYCPAENP

SEQ ID NO: 87258 - protein, 504 aa, Sphingomonas sp.
  misc_feature (1)..(504): tr|A0A0Q4DI70|A0A0Q4DI70_9SPHN Tryptophan halogenase OS =Sphingomonas sp. Leaf10 OX=1735676 GN=ASE59_00280 PE=4 SV=1
MSAPLLRRIVIVGGGSAGWMTAAALSSLLDPKDVAIRLVESDAIGTVGVGEATIPDILAFNQMLGVNEAEFMAATQATFKLGIEFVDWGAKGDRYVHPFGQHGVDMQGIDFHQYWLRAREHGAPQPIEEYSLCAVAARAGRFALPDPNPRAVLSHIRYAYHFDATLYARFLRRYAEKRGVVRVEGIVGAVGQGADGAITGLTLSDGRVVEGDFFFDCTGFRALLAGETLGSGFVDWSHWLPCDTALAVPSEHAGPPTPYTRATARDAGWQWRIPTQRRVGNGHIFSSAFTTEEAASATLLANLDAPALADPRRIRFRAGCRETFWSGNCIAIGLAAGFLEPLESTSIYLIQEGISRFISLFPRGDIPDILRTEYNRHMRTEFEQVRDFIILHYAATTRDDTPFWNHCRTMTLPDTLLHKIDLFRETGRVFRYNDELFTRPSWVAVMLGQGIVPNSSDPIVATLPEADVTRSLASMRDAMAAAVARMPTHGDFLARYCPAQAMAA

SEQ ID NO: 87259 - protein, 512 aa, Sphingomonas sp.
  misc_feature (1)..(512): tr|A0A396RZ84|A0A396RZ84_9SPHN Tryptophan 7-halogenase OS=Sphingomonas sp. ZDH117 OX=2305907 GN=D1610_02675 PE =4 SV=1
MRKDRRVSERESPTIVIAGGGTAGWMAAAAFARFLAPRWRIRLVESEAIGTVGVGEATIPPIRAFNAGLGIDEAEFVRETQGSFKLGIEFAGWNGPDSRYIHAFGGIGRPLGLIGFLPYWLRHRAEGGTRGLWDFAPGAVAAYQNRFGHPQQRAGGPPSGIAWAYHFDASLYAAYLRRYAEARGVERHEGRILDVARDGESGDISALILDGERMIEGDLFVDCTGFAALLAGKALGTPYRDWTHWLPCDRALAAPCARTDPLTPYTRATARAAGWQWRIPLQHRTGNGLVYSSAHIADDAAADMLLANLDGEALGDPRPLRFTTGRREQAWTRNCVSLGLAGGFLEPLESTSIHLVQIGIAELLKFLPGRAIAEADRAAYNRRIAFETDRIRDFIVLHYHANGREGDFWRDCRAMAIPDTLAEKIALFRANGRIVRVDEELFTEVGWMQVMLGQGMEPLGYHPLADALTADQLAEFIALAAADAGRQAAALPLHQDFIAARCAAPSPERIPA

SEQ ID NO: 87260 - protein, 503 aa, Gammaproteobacteria bacterium
  misc_feature (1)..(503): tr|A0A2N1XGS8|A0A2N1XGS8_9GAMM Tryptophan halogenase OS =Gammaproteobacteria bacterium HGW-Gammaproteobacteria- 4 OX=2013800 GN=CVV14_05305 PE=4 SV=1
MDKADRAIRRIVIVGGGTAGWMTAASLANTLGTNCRIDLIESDAIGIVGVGEATIPPIKLFNHALGIDENAFLKASKGTFKLGIEFVDWTRLGQRYFHPFGQFGAEFDAVPLYQYWLRERARGDDTPLQDYAMAWVAARNNKFAPPLTDRQRIQSTYDYAYHFDAGLYAQFLRSYAEPRGVRRTEGKVVDVSLRAEDGFIERVKLDDGTVIEGDLFIDCSGFRGLLIEDALHAGYENWQHWLPCDRAVAVGSAHGDGALTPYTRSTAHQAGWQWRIPLQHRMGNGHVYCSQFSSDDEATTVLLANLEGEPLGTPRPLRFTTGRRKAFWSRNCIAIGLSAGFMEPLESTSIHLIQSAITRLLALFPDRHCEPLLAQEYNRITGQEYERVRDFLILHYKAIKRDDAPLWRYTAAMEIPATLQYKIDQFRSSGRIVAEALELFQNPNWLAVLIGQEVWPQHYSALVDLRSTVDAPRLLASLRRVSEEAGAALPDHAHYIARHCRAG

SEQ ID NO: 87261 - protein, 506 aa, Pseudoalteromonas spongiae
  misc_feature (1)..(506): tr|A0A290T884|A0A290T884_9GAMM Uncharacterized protein OS=Pseudoalteromonas spongiae UST010723-006 OX=1117319 GN=PSPO_b0274 PE=4 SV=1
MAQAVKKIVIVGGGTTGWMAAASLSRYIQDKDMSLTLIESPNINTVGVGEATIPNFVDFNRNLGINDAELIKATQATFKLGIEFEEWSQKGERFFHPFAAYGAPIENLDFHQYINKLNAEGKQLDIEDYSFPIQLAKKGGFAQPNPNQNNPLAQYSYAYHIDAVLYAKFLTEFCSKRGVNHILANVSEVKLNADNGFIQALTLDNGTYIEGDLFIDCSGFKGVLIEGAMGIGLDDLSHLLPCDSAVAVQTELVGEPTPYTRAIAKEAGWQWCIPLQHRMGNGYIYSSKFTTDEEAKQSLLDSVKGRTITDVKTFKFPLGRRKVSWHKNCFALGLAAGFLEPLESLGISLIQTALAKLMTFFPDMSFNQADIDEVNRLHNDELDRIVDFLLVHYKLTQRTDTAFWRYCQEMPIPKTLEHKIAMYKNRGHVVMYDNESFQQASWLSMFYGFNVTPSRYDVRLDHFNSSAIAENLAQMKAQIAMAANNCLSHQAFIDKHCKANNDVKNR

SEQ ID NO: 87262 - protein, 507 aa, Rhodanobacter sp.
  misc_feature (1)..(507): tr|A0A1V3PFT5|A0A1V3PFT5_9GAMM Tryptophan halogenase OS =Rhodanobacter sp. C06 OX=1945854 GN=B0E52_04780 PE=4 S V=1
MTDLRIKHIVIAGGGTAGWMAAAAFAKVLGGDCSIRLVESEEIGTVRVGEGTVPHLKLFNDLLGIDDVEFIRNTSGTFKLGVQFNDWARLGDSYIHGFGSIGHDISLLPFHQFWIKARQRGVAEDIGAYSINTVAAPRGKFMPSATDVPKDSPLANIAYAYHFDAGLYARFLRRYAEQRGVRRSEGKIARVELRPDDGFVAALHLESGERIEGDLFIDCSGFRGLLIEQALHTGFDDCSHWLPCDRAIAVGCERTSPPTPYTRATARPAGWQWRIPLQHRTGNGHVYCSTHMSDDEATALLLANLDGAPLGEPHRLRFTTGMRKQAWNRNVVALGLAAGFLEPLESTSIYMIQSGIARLLEMFPQRDFSPVLVDRYNARSRFEYERIRDFLILHYHATERDDTPFWNYCRTMSIPVQLDEYIRLFRDSGRFYRDGEEMFSTPSWVQVMLGQRIMPRGYHPLVDQMPERDLAGFMASVGQVVNTCVEAMPMHQAFIDRVCPAPAKEMA

SEQ ID NO: 87263 - protein, 500 aa, Sphingomonas sp.
  misc_feature (1)..(500): tr|A0A0Q4D7Y9|A0A0Q4D7Y9_9SPHN Tryptophan halogenase OS =Sphingomonas sp. Leaf10 OX=1735676 GN=ASE59_05735 PE=4 SV=1
MPHEPVRSIVIVGGGTAGWMAATYLARRLAHLKLSITVVDSAAIGTVGVGEATVPAIRDFLSAIELGEPDVLRETGGTIKYGIRFDGWGGDGHRFFHPFGLYGVGAQGVAFHHYWLKLNAIGRAGPLADYCLATQLARGGLFLPPAERPANDLGVFNFALHFDAAKFAALLRRLALANHVTHVDGRIVDVATDPARGHVTQVELDDGRAIAGDLWIDASGFRSLLLGEALGVPYVDWSHWLPCDRAVAIPCRAGPGDPTPYTVATARPAGWQWRIPLRHRIGNGSVYCSAFQSDADAEDALLASLEGAPLADPNRLRFVTGHRTRFWSGNVVGLGLASGFLEPLESTSISLIQSGLERFVALFPDRTCDPRLAATYNRQSVLEFERLRDFLFLHYLANGRDEPFWQSIRAVEPPEPLQIKLDAWRSGGEFVRNEWDTFQDPSWLSLYAGFGDLPLRHSPLADAIGEDDLADSFDRMRAAIARTLAHAEPHGRFLARVAGA

SEQ ID NO: 87264 - protein, 507 aa, Pseudoalteromonas spongiae
  misc_feature (1)..(507): tr|A0A290TBF0|A0A290TBF0_9GAMM Uncharacterized protein OS=Pseudoalteromonas spongiae UST010723-006 OX=1117319 GN=PSPO_b1268 PE=4 SV=1
MQLTHNPIEKFVIVGGGTAGWLAAATLGNIFKDSNTQVELIESDEVNIIGVGEATIPPLIDTLESLGIDLVEFIKATQASFKWGIQFENWYQESHSYFHPFGEVGQKIDGHEFYQCWLKQKAEGDTTPLMAYSPEAVLSEKNRFFVPHQAMNTPLAGARFALHLDAVLAGQYLRKFSENIGVKRTVGHVESISKSIDGNIASVTLKSGETIKGDFFIDCTGFKGLLIGNALNTEYQDWSEHLPCNRAVAVQTKLTGNTKPYTVSRGQKAGWSWHIPLQHRTGNGYVYCDKYISDEEAIQTLLDNVDGEPLTEPRVIPFVTGVRDKVWNKNCLSLGLAQGFLEPLESTAIHLVSKSLALFVRMFPTKTPNAVLQNEFNRRISGDYQEIRDFLVLHYCTTKRDDSAFWRDWQQKQIPASLATRIEFFKQSGGLIPGVEELFQPTSWYAVFDGMGVVPNGYNPTLDALNSEMLAKSLAAGRNALEKCAEAQPSHDDFLQKYSPANEAIFN

SEQ ID NO: 87265 - protein, 503 aa, Sphingomonas sp.
  misc_feature (1)..(503): tr|A0A1S6FN61|A0A1S6FN61_9SPHN Tryptophan halogenase OS =Sphingomonas sp. LM7 OX=1938607 GN=BXU08_16210 PE=4 SV =1
MAFEQPYRIVVAGGGTAGWMTAAALVRFLGPGFSIVLVESEAIGTVGVGEATIPQIRLFNAGLGIDENAFIAATQASFKLGIEFVGWTKGGRYMHAFGDVGRDNGGVAFQHSWLRGLAEGVAEPLAAYSLNNAAALSNRMQRGPARTAQMLPEMPYAFHFDAGLYARFLRNYAEARGVTRHEGKIVEVLRGGESGDVTALRLDGDRSIEGDLFIDCTGFRGLLIAETLGVEFEDWSHWLPCDRALAVPSARARDFTPYTRATAHSAGWQWRIPLQHRTGNGIVYSSAHLSDDEAASRLLANLDEPALAEPRALRFTAGKRKAFWQANVIAVGLASGFLEPLESTSIHLIQSAIERILKLLPGRRISDAQRAEYDRQTNLELDRIRDFLILHYWANDRDEPFWHARRETPLPEGLAHKIELWRACGQIVREDADLFSEVAWLQVLAGQGIAAEGYHPLADQPASGQIAEYLDLLAKLTAREVAQMPDHAAFIRQHCAAREDIAA

SEQ ID NO: 87266 - protein, 439 aa, Burkholderia novacaledonica
  misc_feature (1)..(439): tr|A0A2U3I167|A0A2U3I167_9BURK Tryptophan halogenase OS =Burkholderia novacaledonica OX=1544861 GN=NOV72_01110 PE=4 SV=1
MSEATQTWDVAVIGGGPAGSTAATLLADRGYRVRVLEKARHPRFHIGESLLPANLRLFERLGVADEVRAIGMVKLAAEFVSPQHGDRMQRFLFADAWDKSMPSAYQVRRSELDEILLRNAAKHGAHVSEGCCARDVAFAPDGSGATIDAEHDDGRIEAVRARFVVDASGRDTLLANRFKTKRRNERHNSSALYGHFRNARRNDGQNEGNITVFWFEHGWFWFIPLADGATSIGAVVWPAYLKRRPKGTSVETFFRDTIALCAPLAERLEEAELISEVHATGNYSYTGDMTHGRNFLLLGDAFAFIDPVFSSGVMLAMQSAFAGAEAIDAALCNPADAPAALAKFDRDVRHGPREFSWFIYRMTSPTMRNLFMGPRNPLRMKEALLSLLAGDIFGSTPIWHSLRAFKGVYYVSAALDWRNSLKAYRMRKRNLSDAEPSAN

SEQ ID NO: 87267 - protein, 509 aa, Sphingomonas sp.
  misc_feature (1)..(509): tr|A0A1S6FQ57|A0A1S6FQ57_9SPHN Tryptophan halogenase OS =Sphingomonas sp. LM7 OX=1938607 GN=BXU08_08540 PE=4 SV =1
MDGAAERAIERIVIVGGGTAGWMAAAALSAHLSGTDVAITLVESSEIGTVGVGEATIPTIRRFYGALGMSDAEVMQACDATAKLGICFVDWLRDGHSFVHPFGRFGQDLKGIDFHHYWLKARAAGDRAQLGNYSLGSLLASEGHATLPAPDPGSQLGIFDWALHFDAALFAQHMRRFAEKMGVQRVDARITDVALRGADGFVEALTLDSGARIEGDLFIDCSGFRSLLLGEKLGVSYEDWSHWLLCDGALAVQSERAGLPPSCTTVTARTAGWQWRIPLRKREGNGLVFSSRFQSDDQAREELLAHLLGEPTMEPRKLRFTPGRRQVAWAKNCVALGLASGFLEPLESTSIALIETGIERLKSLFPDKDFDPTVIAEYNEQSAEEMERVRDFLVLHYKLNGRTGAFWQACRDMDVPDSLNAKLALWRARGAFVRYRWEMFSPASWLAIYAGFEDLPTRLDPAVAAVDNAQLTRSLETMRRSLRDTVADTPTHEEFLEIMDGAAAQGRAA

SEQ ID NO: 87268 - protein, 510 aa, Pseudoxanthomonas spadix
  misc_feature (1)..(510): tr|A0A3M6Q3T0|A0A3M6Q3T0_9GAMM Tryptophan 7-halogenase OS=Pseudoxanthomonas spadix OX=415229 GN=D9R12_02825 PE =4 SV=1
MSVSSIRSIVIVGGGTAGWMAAAALARVLGPTYKVTLVESEQIGTVGVGEATVPHIKAFNNLLGLNEAEFVRQTQGTFKLGIEFVDWRRKGASYLHGFGTEIGHRLGLLPFHQYWIKAHRAGWAKPLGAYTLNTVAAPMNRFMTSARDVPAQSPLANIAYAYHFDAALYARLLRTYSEQRGVRRIEGIVEQVIQHPESGDVQSLRLQDGTVIAGDLFIDCSGFRGLLIEQTLHTGYHDYTHWLPCDRALAVPCEKVGPPTPYTRATARQAGWQWRIPLQHRTGNGYVYSSAHISEDQAAATLLANLDGKALGDPRPLRFTTGRRKLCWNKNVVALGLASGFMEPLESTSIHLIQSGISKLLELFPREGISQVLVQRYNDRLAFEFERIRDFLVLHYHATEREDTGFWRQCRDMAIPAELQSTLELFGDSGRFYRNGEEMFAEISWVQVMVGQGIMPASYHPLVDQVPEADLKAFLASVEKTIDHCAQAMPGHQQFIDRYCAAPPLGTAAA

SEQ ID NO: 87269 - protein, 496 aa, Cyclobacterium amurskyense
  misc_feature (1)..(496): tr|A0A0H4PDU7|A0A0H4PDU7_9BACT Uncharacterized protein OS=Cyclobacterium amurskyense OX=320787 GN=CA2015_3234 PE=4 SV=1
MQDFKDVRDIGVIGGGTAGYFTALYLKKKFGDKNITVIESSKIPIIGVGEASTPLLLKFIHSILGFSVHEFFNATKPTLKLGVKFNWGRKEDKHYLNPFGRMDTIASLRYKQSLDYTSLTTRMMAADKAPFISRNGEVLPIKVKSGMAYHIDNELLVKYLKEKIQLAKINHIDAKIEKTFLKKNNSDIDYLQTDQQKELKFDMYFDCTGFSSYLLGKALKSNWVDYGDSLMTNSAILGKASHTNGIKPYTTASTLNHGWLWETPTQRENHLGYVYSDKFCSAEEARSELRKYCPEINDEKVIRFKSGRYEKSWSGNTIAIGNAFAFVEPLESTGLHMIILQLEKFEKYLKNEKNLEAAQARYNSKINRSWDYIKWFIALHFKYNEKKDTPFWKMVREHTDLSGIQDYLNYYKKNGPVFFNENNVLNQQLKNTIFGTFSFDLVMLGSGFGWEHIVDNQPQISAAEKIITFNEKVVANALSHEESLIYLENNLSFCFR

SEQ ID NO: 87270 - protein, 504 aa, Sphingomonas sp.
  misc_feature (1)..(504): tr|A0A0Q4DVY3|A0A0Q4DVY3_9SPHN Tryptophan halogenase OS =Sphingomonas sp. Leaf10 OX=1735676 GN=ASE59_03580 PE=4 SV=1
MAIDQNPVRSVAIVGGGSAGWMTAAALARFLPVDTRVTLIESEAIGTVGVGEATIPQLRLFNQRLGIDEDEFVARTGGSFKLGIEFAGWTGADGRYLHAFGTIGRSLGLVPFHHYWLAAGGGDAPASLWSHSVCAEAAAADRFDRDPGNPQAPSGVAWAYHFDAARYAAYLRERAEAGGVTRVEGRVVAVDLNDAGIDTVTLDDGRLIAADFFIDCSGFAALLIGRLAGDRWDDWSQLLPCDRALAVPCAGTQPITPYTRATARAAGWQWRIPLQARTGNGLVYSSAYLSDDAAAATLLGNLDGTPLADPKALRFTTGRRHAPWIGNCVALGLAAGFLEPLESTSIHLVQSGIARLLSLWPAARPRPADIAEFNRQSAREWLGVRDFLIAHYALNGRDEPFWQERRATPLPDSLAERIALFRESGRIVRDEHELFAEVAWLQLLVGQGVRAEGYHPLADALPADRRTQFLDMSSKHVAATVARMPTHDQFLRAHCPAPDAKVAA

SEQ ID NO: 87271 - protein, 497 aa, Pseudoalteromonas byunsanensis
  misc_feature (1)..(497): tr|A0A1S1N592|A0A1S1N592_9GAMM Tryptophan halogenase OS =Pseudoalteromonas byunsanensis OX=327939 GN=BIW53_1241 0 PE=4 SV=1
MSTQQIKNVVVVGGGTAGWLSASFLAKVMGKLINITVLESADISTVGVGEATIPPLQPFNSALGINEAEFMKATKATIKLGIQFEGWGTKDSSYMHAFGAIGKDFPFCEFHNHWLYAQHQGIGGDFWDYSLNYQAAKHHKFSKLNTIPGTKLPGTSYAYHFDAGLYANFLASHAQKMGVCHIQGTVEQVIKDEVSGNIAALKLVNGQQVQGDLFIDCTGMHALLIDKALNSGFEDWSHWLPCDSALAVPCEHANTEIAPYTRSIAHEAGWQWQIPLQHRVGNGLVYASKHMSDEQAKEKLLSNLPGKALAEPKLIRFRTGRRITPWHKNVVAIGLSSGFLEPLESTSIHLIQTAIVRLVKLFPHNGIEACQVALYNQQSKTEFERIRDFIILHYKLNDRNDSDFWRQCQDMEIPASLKQKITLFKETGKLLREDDELFAEVAWQQVFIGQGLKPKQLHPLLHALSDQQRQELFTSLRTLIEQTVAAMPTHKQFLADN

SEQ ID NO: 87272 - protein, 510 aa, Microbulbifer thermotolerans
  misc_feature (1)..(510): tr|A0A1I1P3P9|A0A1I1P3P9_9GAMM Tryptophan halogenase OS =Microbulbifer thermotolerans OX=252514 GN=SAMN05660479 _03020 PE=4 SV=1
MKDKFDLDDRIRHIVVVGGGSTGWIAAAVLAHQFKPDVCKVTLVESEDIGTIGVGESTIPPFIGLLRGLGIDEADFIQKTQASFKLGIQFHDWLEKGQSYFHPFGVLGQRLGIIEFYQAWLWAQLNGHSSELQDHAPCAVMAREGRFYLPQKAQKTPIGGASYALHLDAKLAGRYLRNYAEARGVERVEGRVVEVFSHDNGFIDKVRLTDGREISGDFFIDCSGFRALLIEQQLGVEFEDWKDFLPCNKAVAVQTENTGATTPYTQASAESAGWRWRIPLQHRTGNGYVFDTRFISDDEARARLLEAVDGKPITEPALIPFRTGIRTELWKHNCLSLGLASGFIEPLESTAIHLVTRGMDFFLRFFPGKSCDTELAAEYNRRMRLDYEEIRDFVVLHYCLTRRRDTPFWRWWQEEAEIPQTLRERIALFRCQGALREGIDELFHSPSWFSVFEGMGVRPRRYDARLDNLPAAQIIQHQETARAAIAQMVDTLPSHDDFLREHCPAVTINN

SEQ ID NO: 87273 - protein, 500 aa, Teredinibacter turnerae
  misc_feature (1)..(500): tr|C5BR00|C5BR00_TERTT Tryptophan halogenase PrnA OS=Te redinibacter turnerae (strain ATCC 39867 / T7901) OX=37 7629 GN=TERTU_1076 PE=4 SV=1
MKNKFIQHIVVVGGGTAGWIAAASLAKILHNRGVRITLVESPEINIIGVGESTLPQVMQFLRNLGIDEKEFMAATQATYKLGTKFFDWSEVGEAFWHPFGNIGVDIDGHNFFAFLQKARKQGDPAQMWQYAPSAVLGEAGRYYSPGAATPESFLSGVNYALHFDAVKVAKYLKRFSEALGIQHVMETVVDASLHDNGFIDSLTLKDGRRLAGDFYIDCTGTNALLIGGVLNTQYINWNNYLLCDSAVIVQSDNSCDIPPYTKAIAHENGWRWEIPLRHRLGNGYVYSSEFCTPSQAENKLLELVQNPALDSLRHFQFQAGRREKLWNKNCLALGFAGGFLEPLESTAIYLSLKGIESFLELYPDNQCSLAIANEFNRRMAIEYENIRDFIILHYCISGRSDSPFWQKNKTMDVPRALLEKIALYQAQGRIYRNDLDLFKSSSWHAIFDGMGIVPDFYNPLIEGSNFKEVLNILSEVRGLMSKMAAGLPAHKEYLDKHCPV

SEQ ID NO: 87274 - protein, 496 aa, Sphingomonas sp.
  misc_feature (1)..(496): tr|A0A0Q4D4R2|A0A0Q4D4R2_9SPHN Tryptophan halogenase OS =Sphingomonas sp. Leaf10 OX=1735676 GN=ASE59_05815 PE=4 SV=1
MDSGEKRKVRVVIVGGGTAGWMTAAGLAGLLPAACEVTLIESEAIGIVGVGEATLPHLRLYLERLGIDEAEFMAATEATYKLGIEFRDFARIGDRYIHPFGTYGRPLSGVAFHHYWLRRAQAGAVPPIGAFSAGVVAAERRRFERPGSDPSDPTTSFGYAYQFDATRFAPFLRDWSEARGVTRIEGRIVSADRQGDTVTAVTLDDGRRVEGDLFVDCSGFRSLLLGEALAEPWEDWSHWLPCDRAVAVPCTSPPDTIEPFTRATAMSAGWRWRIPLRHRVGNGYVYASGHISDDEAAAALLAALNGQPLADPRMLRFRAGRRRRSWAGNVVAVGLASGFLEPLESTSIYLVQAAITSLIEHFPDSRVADADRDGFNAAIDAEYDRIRDFLILHYHATERTDSTFWNHVRTMTVPDTLADKLALWRSSAQVAKYGHGLFLEPSWVAVYLGQRVLPTGWDPRADRPDAAGLDRALGSLAQAIADRVDAMPSHDRALGL

SEQ ID NO: 87275 - protein, 507 aa, Teredinibacter turnerae
  misc_feature (1)..(507): tr|C5BT78|C5BT78_TERTT Tryptophan halogenase OS=Teredin ibacter turnerae (strain ATCC 39867 / T7901) OX=377629 GN=TERTU_1501 PE=4 SV=1
MNTKIKHFAIVGGGTAGWSAAAMLARRFAGQSIAITLVESPEHATIGVGEATVPAITQVHKQLGIDEQAMLVATDATFKLGIEFRDWRVPGEKFFHPFSDFGVPIEGKAFYHAWLCMQQEAKLESHTGNPLEHYSLCASLAQAGKFSLPNNHASTPLAWYGYAYHFDGAKYANFLRDYAQQLGVAYTKGTVSAFVKNPTSGNIDCLVLSDGAQLKADFFIDCTGFKSRLLAQEYGEPFCDWSHWLPCNKAVVVQTAANPTPPPYTISTALDSGWAWSIPLKSRTGNGYVFSDNHITEDQAASQLLRHVTGKPINDPRVITFRAGMRENFWVKNCAAVGLASGFIEPLESTSISMIHTAIGKIIEHLPNGCLDPKATEHANHLNRLEYERIRDFILLHYWLSDRTGSNFWKQFNELSLPDTLQYKIDQWLTNAQLVILEQESFQAQSWLAMYSGFKRYPLSYAIDAPMSTTVRDVSAKMRAAIVKGVSHAPYHHEFLSTLYETDAATQ

SEQ ID NO: 87276 - protein, 497 aa, Ferrimonas marina
  misc_feature (1)..(497): tr|A0A1M5VHV0|A0A1M5VHV0_9GAMM Tryptophan halogenase OS =Ferrimonas marina OX=299255 GN=SAMN02745129_2785 PE=4 SV=1
MKPMERVVILGGGSAGWMAAAMLARMLGPSLVITLVESEQIGTVGVGEAAIPPLQLFNQALGLSEAEFMSATAASIKLGIQFEGWGGAGERYMHAFGQVGKDLGLTPFHHYWLQAGEETERFWDYSLNEQAARAGRVLLPSPPQGKMLGGLVHAYHFDAHRYAQTLRRYSERLGVRRVAGEVVRVPLCPDSGQIQALELADGQRIEGELFIDCSGFAGRLIEQALGSGFEDWGHWLPCDRAWAVPCEGAESIAPYTRSIAREAGWQWQIPLQHRIGNGLVFSSRFQDEQSAKESLLANLPGKPLAEPKLLRFRTGRRRQPWLRNCVALGLASGFLEPLESTSIHLVQSGIMRLLKLFPNHGPMDSLAAEYNRQSQREFEQVRDFLILHYHLNRRDEPLWQHCRSMSLPDSLSHKLVLFAEQGRVLRDSDELFTEVAWVQVMLGQGLRPQQAHPLAAALSPAERRDYLGHLRTIVMGTLQGMPSHRAFLQRYCPQAKE

SEQ ID NO: 87277 - protein, 512 aa, Ferrimonas marina
  misc_feature (1)..(512): tr|A0A1M5YD02|A0A1M5YD02_9GAMM Tryptophan halogenase OS =Ferrimonas marina OX=299255 GN=SAMN02745129_4085 PE=4 SV=1
MTGNGQIREIVIVGGGTAGWLAACHMARKHGDSGLRVTLVESPDIATIGVGEGTVPAMRQTLHYLGIRETDFIRRCDATLKQGIRFVDWRHAPNGTQRHHYYHPFDYPAIDGIDPTPYWLLSGQPGRYADAVGVQAQLCDAGLGPKTLVDAEFTGPAAYAYHLDAAKFAALLTEHATERLGVVHRKAEVLQVELGQNGQIAALHCSDGKLKGDLFVDCTGFAGRLIEGSLNVPWRDRSDTLFVDTALAIQVPYDDPEAPIACQTISTAMPAGWIWDIGLTGRRGIGHVYASSYIHCDQAEQQLRDYIGPAADGLDCRRIPMKVGYREQAWKGNCVAIGLSGGFVEPLEATGILLFDLLSRMLAEQLPGHQDELGAVANRFNRRVNHTWERVIDFIKLHYAVSERDDSAFWRDNRDPQSWSQTLQENLAHWRHALPSRYDFASTMEVFNLENYLYVLYGMGYDTQLLAERFPHAEQARQRAEAIARRHSQLKSQLLGHRQLISRIQQHGLQKV

SEQ ID NO: 87278 - protein, 502 aa, Hirschia baltica
  misc_feature (1)..(502): tr|C6XNJ5|C6XNJ5_HIRBI Tryptophan halogenase OS=Hirschi a baltica (strain ATCC 49814 / DSM 5838 / IFAM 1418) OX =582402 GN=Hbal_2461 PE=4 SV=1
MSNTQIQKIVIVGGGTAGWISAAALAKLLPPSISVTLIESDSIATVGVGEATIPQIRRLNGMLGLNENTFLKATKGTIKLGIEFSNWGKIGESYLHTFGDVGLNLSNLQFHHYWKRAQEEGKQSSLWDYSLHHKVAYSNKFDRLERIGKTGMTGLSYAFHFDAGLYARFLRNFAETSGVTRIEGFVKQTVLNPHTGFIDHVKLENGTQIEGDLFIDCSGFRGLLIDKALGVSYQDWTHWLPCNRAIAVPSQSTRPLVPYTKSIAHTAGWQWCIPLQHRTGNGHVYSDQFMQDETALEVLLSNLDSTPIAEPNHIRFTTGRREKFWHKNCISIGLSSGFLEPLESTSIHLIQSNISRLIELLPTKKMEPANSNEYNRQVSKEYELIRDFIILHYHCTQREDSDFWRYCKNMDIPDSLKQKLELFSATGRIHKEPEDLFREASWVQVMIGQGLIPQSYHAMADRLSTDQLEKFLADIDAIIAQAEAQLPSHEDFLTRNCQLDLQ

SEQ ID NO: 87279 - protein, 502 aa, Hirschia baltica
  misc_feature (1)..(502): tr|C6XNJ6|C6XNJ6_HIRBI Tryptophan halogenase OS=Hirschi a baltica (strain ATCC 49814 / DSM 5838 / IFAM 1418) OX =582402 GN=Hbal_2462 PE=4 SV=1
MNAAPIKTIAIIGGGSAGWMAAAALSNALQKSCQIKLVESEEIGTVGVGEATIPPVKYFNAQLGIDEASFMRETNATFKLGIEFIDWARKNQSYFHPFGQYGAEFDQTPFYQYWMREAIRGNISQSIDIFSMAWKMSEAGKFQHPEKDKRKIQSTFDYAYHFDANLYARFLRKYSELRGVERLEGKVVNVELRAETGDIEKVLLQSGETIEADLYIDCTGFYGVLIEKALQTGYEDWSRWLPCDRAVAAACNAAEGPLLAYTKSTAKAAGWQWRIPLQHRVGNGYVYSSQHLDPHLAEDELMKSIEGDALVGARHLRFVTGRRKKFWNKNCVAIGLSAGFMEPLESTSLHLIQYGIMRLLALFPNADMSPLLADEYNALTSAEYERIRDFLILHYKATERDDTSFWQYCANMPIPDRLAYKMDQFRENGILVSDERELFHNPSWIAVYLGQGIKPKRAPALTSYRMQVPVSERFSQVQAAMQSALKVMPDHRTYVENYCKSN

SEQ ID NO: 87280 - protein, 496 aa, Pelomonas sp.
  misc_feature (1)..(496): tr|A0A0Q6W7C2|A0A0Q6W7C2_9BURK Uncharacterized protein OS=Pelomonas sp. Root1237 OX=1736434 GN=ASC91_21405 PE= 4 SV=1
MGIRRVVILGGGSAGWMSAAALTTGLRGVAVELVESEEIGIIGVGEATFPSIRSFNDILGIDEAEFLAATRGSYKLGIQFCDWKQRGEHYFHTFGDFGPLDGPMALWGQLRRLQTGPGTPLGEFCLPTVMAHQGRFCRPAEGEDSLASRYTYAYHFDATLYAAFLRRLAEGRGARRTEGRVVGVERHEDGRVRALHLADGREVEGDLFIDCSGLASLLIGQTLEQRFIDYGHWLPVDRAWAVPTERAPGDLAPFTRSTALEAGWAWRIPLHDRTGNGHVFSSRFIDEGRAREQLLAQLDAPMLAEPRLLRFRTGHRERFWVKNVVAIGLAAGFLEPLESTAIYMVHNALGRLIPLLGEADHTQAAVGFNVQQLRQYQRIRDFIILHYALSERRDSEFWRTLTSMELPESLDYKLHAWRETGTLHAYDNEAFDTASWLAIHAGMGDWPRRRSPWPDEMPAELAARYLTERHQAIAALAAGMPDHDSFLRARLSGAAG

SEQ ID NO: 87281 - protein, 503 aa, Pararheinheimera mesophila
  misc_feature (1)..(503): tr|A0A3P3QQA2|A0A3P3QQA2_9GAMM Tryptophan 7-halogenase OS=Pararheinheimera mesophila OX=1547515 GN=EIK76_05065 PE=4 SV=1
MSYAANNSIKKIVIVGGGTAGWMTAAALSNALQQGCHITLIESEQIGTVGVGEATIPPIRLFNQSLGINENDFIRATQGSFKLGIQFINWGRQNHSYFHPFGSYGRQFDLVSLHHHWLAAKAQGKADSLDSYCMAWVVAQQGRFAPPVTDPRHVLSTHDYAYHFDAGLYASYLRQYSEAKGVLRIEGKISAVKQNSISGFIEAVQLDNGQLLEGELFIDCSGFRGLLIEDTLKTGYQDWSHWLPCNRAWAVPSERGEFTPYTKSTAHQAGWQWRIPLQHRTGNGHVFSNHFISEQQAQDVLLQNLGAKALAEPRMLQFVTGRRNLFWHKNVVAIGLASGFLEPLESTSIHLIQAGIAKLLALFPDKDFDPLLTEEYNRVAIREIENIRDFIILHYKLTERNDSEMWRYCAAMPVPDPLTYRIEQFKRQGRLIPGEMDLFGNTSWLAVHIGQLNTPQKTDAVLAYRSIEGAERLAKLSQALQAAALSLPTHQQYIDQHCKAASL

SEQ ID NO: 87282 - protein, 513 aa, Youhaiella tibetensis
  misc_feature (1)..(513): tr|A0A5B9DLC6|A0A5B9DLC6_9RHIZ Tryptophan 7-halogenase OS=Youhaiella tibetensis OX=1447062 GN=FNA67_04460 PE=4 SV=1
MAKPSRFVIVGGGTAGWLAAFIIQDSARRMKLDATISVVESSKIRTVGVGEATTAAFRVFLQHFGIDEFEFFRETEATFKLGIRHQDWRRKGFTYYGPIDDPHQVVQPPQGAPSDYLNVYAVSVGKKVQDMHLFGPLLERRKAPYARKADGSLVRLGPFHHAYHFDQSLVGKYLKRKSNGVEIVDAVVEGVERDGESGDITALKLDSGERLEGDFFIDATGFRKRLIVQELQAPWISYARELPVNRALPFWLDIKEGDEIANYTLAWAQENGWMWQIPTQTRYGCGYVYSDEFTTPEQAKLEVERALGHEIEVRDDIRFSIGRLEKAWMGNCVAVGLSSSFLEPLESTSIHGTIVQMMLFAEHYLKEPGRMTPAERDDYNRRVGRQVDDFRTFVNTHYATERDDTPFWRNVRAERLHPETQERLARWRTEMPRAEHFPNYLGGLPHIETQLHYPVLDGLGLLDPAVARAEMARDPKLRAFAKKTHDELVKEYKQAATRAMGHAEFLQAVRDMA

SEQ ID NO: 87283 - protein, 538 aa, Burkholderia anthina
  misc_feature (1)..(538): tr|A0A119DKJ9|A0A119DKJ9_9BURK Tryptophan halogenase OS =Burkholderia anthina OX=179879 GN=WT32_18735 PE=4 SV=1
MSNPIRNIVIVGGGTAGWMSASYLVRALQQQANITLIESAAIPRIGVGEATIPSLQKVFFDFLGIPEREWMPQVNGAFKAAIRFVNWRKSPDGSRSDHFYHLFGNVPNCDGVPLTHYWLRKREQGFQQPMEYACYPQTEALDGKLAPCLADGTRQMSHAWHFDAHLVADFLKRWATERGVKRVVDEVEQVHLDDRGYISRLSTKEGRTLEADLFIDCSGMRGLLINQALKEPFIDMSDHLLCDSAVASAVPADDARDGIEPYTSAIAMNSGWTWKIPMLGRFGSGYVFSSKFTSRDRATADFLGLWGLSDKQPLNQIKFRVGRNRRAWVNNCVSVGLSSCFLEPLESTGIYFIYAALYQLVKHFPDTSFDPRLIDAFNAEIVYMFDDCRDFVQAHYFTTSRDDTPFWRANRHDLRLSDAIKEKVERYKAGLPLTTTSFDDSTYYDTFDYEFKNFWLNGNYYCIFAGLGLLPDRSLPLLRHRPESIDKAEAMFARIRREAERLRTTLPTNHDYLRSLREGDAALSRSEPGPTLATPEIL

SEQ ID NO: 87284 - protein, 496 aa, Pelomonas sp.; identical to SEQ ID NO: 82576
  misc_feature (1)..(496): tr|A0A0Q8GT15|A0A0Q8GT15_9BURK Tryptophan halogenase OS =Pelomonas sp. Root662 OX=1736580 GN=ASD88_26150 PE=4 S V=1

SEQ ID NO: 87285 - protein, 509 aa, Pelomonas sp.
  misc_feature (1)..(509): tr|A0A0Q6WZF4|A0A0Q6WZF4_9BURK Tryptophan halogenase OS =Pelomonas sp. Root1237 OX=1736434 GN=ASC91_01930 PE=4 SV=1
MNKRRILIVGGGTAGWLTAAYLAKALKLSERSHLEVTVLESPDISSVGVGEGTFPTIRSTLQFLGIDEARFIRETSATLKQGIRFVDWARTPTAGQHQQFFHPFEAPFYTEDLNLVPYWLLQDEAGRMPFAEAMTLQVRVAEAHRAPKRAGEAPYAAPLNYAYHFDALKLAKLLAARARELGVRHVEGTVTDVVLDATGAIAHLDTAQLGRFEAELYIDCTGFRAELIGRAMGSNFKSVRHQLFVDRALACKVPLDANAVMESSTIATAHEAGWLWEIGLNGARGIGCVYSSDHLSDDRAADILRGYCGAGNEDLAMRSIPFTPGYREQQWVKNCVAVGLSAGFLEPLEATGLVLIEAAVGMIAEMLPHSGPMHAPARRFNELMTARFENIINFLKLHYCLSQRQEPFWRDNAAPATIPDRLAGLLEEWQLRPPGRFDFVLDTETFAFFNYQYILYGMGFATDLSAGRSDFPQMADADKLFAKIQRFADRAIADLPSHRALIQQINAGR

SEQ ID NO: 87286 - protein, 520 aa, Pelomonas sp.
  misc_feature (1)..(520): tr|A0A0Q6WMI9|A0A0Q6WMI9_9BURK Tryptophan halogenase OS =Pelomonas sp. Root1237 OX=1736434 GN=ASC91_04995 PE=4 SV=1
MSSEVTTAVRRIVVLGGGSAGWLTAATLAAELGGDGPDALQITLIESPDVPSIGVGEGTWPTMRATLHRIGLSEVDLIRECDAAFKQGSCFDGWLYGGAGDRYYHPFTLPHGHGEADLAGAWLQAGGEHAFAESVGAQPHVCDARLAPKQTTTPDFAGVLNYGYHFDAVKLGHLLRRHATTVLGVRHIVDHFVAVRSHENGDIAALATREHGDLEGDLFIDCSGMASLLLGQHYGVGLRCQKGVLFNDSALAVQVPHADAKAPLASATISTAHAEGWTWDIGLPTRRGIGLVFSSGHTDDAAAERALLGHLQRNGLSLGDATPRRLSFSPGYREHFWHRNCVAVGLSAGFIEPLEASALALVELSAAMIRDEMPANRADMDLVAKRFNEAFAYRWSRIIDFLKLHYVLSRRDDADYWREHRSAATQPESLRELLQLWAHRAPSRNDFYRNEEVFPAASYQYVLYGMHFKPALRAPRADQRTQAETGLKDVTTITRRLLGGLPRHRDLIQHIREHGMPPAA

SEQ ID NO: 87287 - protein, 509 aa, Sphingobium barthaii
  misc_feature (1)..(509): tr|A0A4R6FQW7|A0A4R6FQW7_9SPHN Tryptophan halogenase OS =Sphingobium barthaii OX=1054037 GN=DFS08_103257 PE=4 S V=1
MGEPLDIVILGGGTAGWMAATALVTFLPSSRCRVRLVESEEIGIVGVGEATLPQMKNFNDAIGVNEAEMMRATKGAFKLGIEFVDWGTKGSRYIHPFGAHGTADTAHVFHHRWVRALRSGWESDIQEYSFAVQAARMRRFNFPSTDQAAIESTFSYAYHFDASLYSVFLRGLAQQRGVIRTEGKVREIVRDPQSGDVRSLTLESGESITGDLFIDCSGFRSLLLDKTLGVAWEDWSKWLPCDRAFAVPSERGEFTPFTRSTAMEAGWRWRIPLQHRTGNGYVCSSSFIKEDDAAASLLRSLDAKPLAEPRMLRFQAGRRVVSWEKNCVAIGLASGFLEPLESTSIYLIQVAVLQLLPLLPMKRIDPRLRDEFNRLIDMEYERIRDFLILHYKLNTRDDAEIWRYCAAMEVPDSLNHKIEIFRHSGIIKRYHGLFSPPSWLSVFVGQGLVPEGYSRLADIEPEDDMIAGLDALRTMIRDKVGQMPSHDDFIADYCAPEAPLAAVAEEVRP

SEQ ID NO: 87288 - protein, 501 aa, Pelomonas sp.; identical to SEQ ID NO: 84496
  misc_feature (1)..(501): tr|A0A0Q8H485|A0A0Q8H485_9BURK Uncharacterized protein OS=Pelomonas sp. Root662 OX=1736580 GN=ASD88_24995 PE=4 SV=1

SEQ ID NO: 87289 - protein, 442 aa, Caballeronia hypogeia
  misc_feature (1)..(442): tr|A0A157ZM26|A0A157ZM26_9BURK Tryptophan halogenase OS =Caballeronia hypogeia OX=1777140 GN=AWB79_01137 PE=4 S V=1
MTEAAQTLDVVVIGGGPAGSTAATLLADRGYRVRVLEKARHPRFHIGESLLPANLRLFEQLGVADEVRAIGMVKLAAEFVSPQHDNRLQRFMFADAWDKSMPSAYQVRRSELDEILLRNAAKHGAQVSEGCRARDVAFAPDHSSATIAAVHDDGRVEEVRARFVVDASGRDTLLANHFKTKRRNERHNSSALYGHFKNAQRNEGQNEGNITVFWFEHGWFWFIPLADGATSVGAVVWPAYLKRRPKGTPVEAFFRETIALCAPLAARLKDAELISEVHATGNYSYTGDMTHGGNFLLLGDAFAFIDPVFSSGVMLAMQSAFAGAGAIDRALSNPSNARAALAKFDRDVRHGPREFSWFIYRMTSPTMRDLFMGPRNPLRMKEALLSLLAGDIFGTTPIWRSLRAFKGIYYVSAALDWRNSLRAYRQRRRNLSEAERAELPAN

SEQ ID NO: 87290 - protein, 494 aa, Altererythrobacter sp.
  misc_feature (1)..(494): tr|A0A2E6KAZ3|A0A2E6KAZ3_9SPHN Tryptophan halogenase OS =Altererythrobacter sp. OX=1872480 GN=CL575_12145 PE=4 SV=1
MSGGQPVKVVIAGGGTAGWISACALALQLGRLVQVTLVESDAIPTIGVGEATIPTARSFHEYLRIDERAFMAATGATFKLGIRFDDWGALGDSYMHSFGTFEMRNWVAEFQHFWLEGRASGLADGIGAFCLEHEAALAGKFTTEGAPPLNYAYHLDAGRYASFLRAIAERDGVRRVEGRISKVEQHFETGEITALTLNNGERIEGDLFIDCTGFRALLLGQTLEVGYENWSNWLPTNGAWAVQTEDTTAPPPYTVAAAHEAGWRWRIPLQHRTGNGLVFASDYLDAEDAREKLLGAIEGRAVSDPRLIRFETGRRRTMWAKNCVALGLSSGFIEPLESTSIHLIMSGVTRLIQLFPFDGEMDALRDRWNALADRELEHVRDFIILHYHLTQRGDSEFWRSRAEMDIPDSLKARIENFSAQGQAWQDALELFRTESWIYVMLGQGLMPRRWHRLASLVDSERLMGTFARQKEAIAARVAGMPGHGEFITSYAADR

SEQ ID NO: 87291 - protein, 506 aa, Xanthomonas citri; identical to SEQ ID NO: 85891
  misc_feature (1)..(506): tr|A0A0U5FLM9|A0A0U5FLM9_XANCI Tryptophan halogenase OS =Xanthomonas citri pv. citri OX=611301 GN=prnA PE=4 SV= 1

SEQ ID NO: 87292 - protein, 514 aa, Altererythrobacter sp.
  misc_feature (1)..(514): tr|A0A2E6KAF1|A0A2E6KAF1_9SPHN Tryptophan halogenase OS =Altererythrobacter sp. OX=1872480 GN=CL575_10770 PE=4 SV=1
MAIDFEKVVIVGGGTAGWLSAAYLAARRPELQITLVEAPDIPTIGVGEGSWPTMRETLRIIGIPESEFLFECDASFKQGSRFDGWRTGGAEDSYLHPFTPPTPGDVRPFITAWKQTDGRSFAELASPQAAVCMQNLAPRQRSMPDYAAALNYGYHFDAGKFARLLSRHAVNRLGVTHIRDQVTDILSEGPDRIAAVILRRGGQLSGDFFLDCTGMAARLIGEHYGTAWIDRSDVLFNDRALAVQVETQPDSPIASQTIGTAHKSGWLWDIALPTRRGIGCIYSSQFTEDAEAERTLKDYVATNLPWQEPEAIVPRKISFRTGHRERFWRGNCVAIGLSAGFIEPLEASAIVLVELSLKALADSFPVTREALPAYSERFNKLFHYRWERVVDFLKLHYVLSQRSEPYWKAHRDPASIPPSLACQLQLWRDHPPTQWDFPQVDEMFSAASQQYVLYGMGFAEPLSECSEDLEPVQAQLAAVREKARALTAAMPTNRTYLDALRSTHPANPREGEFA

SEQ ID NO: 87293 - protein, 512 aa, Pelomonas sp.; identical to SEQ ID NO: 84485
  misc_feature (1)..(512): tr|A0A0Q8GB93|A0A0Q8GB93_9BURK Tryptophan halogenase OS =Pelomonas sp. Root662 OX=1736580 GN=ASD88_20730 PE=4 S V=1

SEQ ID NO: 87294 - protein, 505 aa, Sphingobium barthaii
  misc_feature (1)..(505): tr|A0A4R6FSF0|A0A4R6FSF0_9SPHN Tryptophan halogenase OS =Sphingobium barthaii OX=1054037 GN=DFS08_103256 PE=4 S V=1
MRPVNDVVVIGRDAPAWMAAAAIVRSLGAAGVKVRVIELPSLLKATDCYSALPALDGYHLRVGLNDRLVWTTCKAVPVAGQRFNGWGGAGAPFLHGYDREIADPPLEFTHFWTKARQDGLRSEFEAFSLAAMAARAGRVPVPQDGASLRATFGYNIDARSYAMLLRHCTLGLGIAAKEAALADVEVDGDRIAAVVLDDGERVEADLFVDASGPEGLLIGRLPGTELESWREWLPCDRVMVASARTLQPLPSFSQISAFAQGWIGLFPMQNRTSVVAVYDSRQMSDQEMAQSLPSLARAPVNSEVAVSPLNQGIRRRCWVGNCVAIGEAAFSLEPLDAVQLHMAHNCISQLMALFPVEAEQFPEAQTYDDIIRCVASNLRDFQILHYKLNHRIGELFWDRCRETAVPETLQRKLDIFAARGHVPLNDFETFQTSSWASSFIGHGLMPQSFDPRLDAIEEREQIAEVHLRMKAVISQVEAFPSVEDFIAPTQQQGQARAAPLRQEQL

SEQ ID NO: 87295 - protein, 514 aa, Sphingobium sp.
  misc_feature (1)..(514): tr|A0A087NCR0|A0A087NCR0_9SPHN Putative tryptophan halo genase OS=Sphingobium sp. ba1 OX=1522072 GN=IL54_2335 P E=4 SV=1
MVHPVRNIVIVGGGTAGWLTAGIIAARHRTRIGQGFSVTLVESPNTPIIGVGEGTWPTLRTTLSRMGVSESDFFRECDAAFKQGARFDRWTTGAVDDGYYHPLMLPQNFGQVNLAPHWLASNQGESFCDSVSAQGRICDDGLAPKTIATAEYDALANYAYHLDAGKFAPFIQRHCCETLGVRHVLADVQQVLMRENGDIRAIQTAQAGEIEGDLFVDCTGFKALLIEGAMNVPFKDCNDVLFCDTALAMQVPYERPDSPMASHTISTAQTSGWIWDIGIQTRRGVGHVFSSSHISDEEAERELRAYIGPAADGLNARKIKIRSGHRETFWKGNCVAVGLAAGFLEPLEASAIVLIELSAKIIAEQMPACREVMDIISSRFNATTHYRWGRIIDFLKLHYVLTKRTDSDFWRDNVRDETIPDRLKELLLLWRYQSPWFHDEFDRVEEVFPAASYQYVLYGMGYHTEVDPASLSRDHRLADRARRENAALTDKLCAGLPRHRDLINKIVAHGLPPV

SEQ ID NO: 87296 - protein, 494 aa, Altererythrobacter sp.
  misc_feature (1)..(494): tr|A0A2E1Y8U5|A0A2E1Y8U5_9SPHN Tryptophan halogenase OS =Altererythrobacter sp. OX=1872480 GN=CL574_07700 PE=4 SV=1
MSGGQPVKVVIAGGGTAGWISACALARQLGRLVQVTLVESDAIPTIGVGEATIPTARSFHEYLRIDERAFMAATGATFKLGIRFDDWGALGDSYMHSFGTFEMRNWVAEFQHFWLEGRASGLADGIGAFCLEHEAALAGKFTTEGAPPLNYAYHLDAGRYASFLRAIAERDGVRRVEGRISKVEQHFETGEITALTLNNGERIEGDLFIDCTGFRALLLGQTLEVGYENWSNWLPTNGAWAVQTEDTTAPPPYTVAAAHEAGWRWRIPLQHRTGNGLVFASDYLDAEDAREKLLGAIEGRAVSDPRLIRFETGRRRTMWAKNCVALGLSSGFIEPLESTSIHLIMSGVTRLIQLFPFDGEMDALRDRWNALADRELEHVRDFIILHYHLTQRGDSEFWRSRAEMDIPDSLKARIENFSAQGQAWQDALELFRTESWIYVMLGQGLMPRRWHRLASLVDSERLMGTFARQKEAIAARVAGMPGHGEFITSYAADR

SEQ ID NO: 87297 - protein, 480 aa, Sphingobium sp.
  misc_feature (1)..(480): tr|A0A087NAG9|A0A087NAG9_9SPHN Putative tryptophan halo genase OS=Sphingobium sp. ba1 OX=1522072 GN=IL54_1538 P E=4 SV=1
MTAAALARTLGPVAQVTLVESEQIGTIGVGESTIPPLVAYNRILGINEADFMRATQATFKLGINFENWRVPGESYFHSFGGTGKDHWSAGFQHFWMHGQAQGHDAPYGDYCLELKAAEAGRFAHLPDDRMNYAYQLDSGLYARFLRRMAEADGAQRIEGRIAKVELDSESGDIAALLLDGDRRIEGDLFIDCTGFRALLIEGALHVGYDDWTHWLPCDGAVAIQTSSVRPPVPYTCAIAHEAGWQWRIPLQHRQGNGIVYCSSFLNPDAALEKLLASVEGDKLVQPNPIRFRTGARRRQWHRNCVAVGLSGGFMEPLESTSIHLIQRAVLRILRMLPAGTVSPLDIAEFNDQQMTDMEQIRDFLILHYKATDRRDTPFWRHCAAMAVPDSLAHRMELFRQTGRAFRKNEELFAENSWVQVMMGQGITPQSHHPIASKLRPDELTHLLASLKDQVSRTVANLPEHAAYIARYCSAQEPVAA

SEQ ID NO: 87298 - protein, 517 aa, Verrucosispora sp.
  misc_feature (1)..(517): tr|A0A372FYV3|A0A372FYV3_9ACTN Tryptophan 7-halogenase OS=Verrucosispora sp. LHW63014 OX=2294034 GN=D0Q02_1441 0 PE=4 SV=1
MIRDVVIVGGGTAGWMTATYLKTAFQDRISVTLVESAAVGTIGVGEATFSTIRHFFDYLGLDEREWMPECSGSYKLAIKYDNWRGDGSHFFHPFERLRTSDGFTAAEWNLALGDPTESFDRGSFITPYLCEAERSPRMLDGTLFTASLDGELGRSTLDEQRAQFPYAYHFDAALMARYLTKLGVAQGVRHVVDDVVGVGQDERGWITHVSTRNQGDVTGDLFVDCTGFRGLLINQTLKEKFVSFTDVLPNNRAVALRVPRDMAEHGIAPYTKATAKEAGWIWTIPLYGRIGTGYVYSDEFCEPEEAERTLREFAAPGQDELEANHIRMRIGRNERSWVNNCVAVGLSSGFVEPLESTGIFFIQHAIEQLVKHFPDNTWDQTLIRGYNDKVARVIDGVKEFLVLHYVASPRQDTDYWRETKVRAIPDGLAERLETAAVRLLDESTIYPYYHGFEVYSWITICLGMGLAPKSPRPALAHIDPVRASAELAGIRADAERLVKTLPSAYEYLSTIQPAAEG

SEQ ID NO: 87299 - protein, 516 aa, Streptomyces hundungensis
  misc_feature (1)..(516): tr|A0A387HB63|A0A387HB63_9ACTN Flavin-dependent tryptop han halogenase RebH OS=Streptomyces hundungensis OX=107 7946 GN=rebH PE=4 SV=1
MLNKVVIVGGGTAGWMTASYLKAAFGERINVTLVESGNIGAVGVGEATFSDIRHFFEFLGLKEKDWMPACNATYKLAVRFENWRERGHYFYHPFEQMRSVNGFPLTDWWLQQGPTDRFDKDCFVMASVIDAGLSPRRLDGALIDQPFDEGADEMHGLTMSEHQGKTQFPYAYQFEAALLAKYLTTYAVERGVRHIVDDVKQVNLDERGWISGVTTAEHGDLTGDLYIDCTGFRALLINKALNEPFISYQDTLPNDSAVALQVPMDMEKRGILPCTTATAQDAGWIWTIPLMGRVGTGYVYAKDYLSPEDAERTLREFVGPAAADVNANHIKMRIGRSRNSWVNNCVAVGLSSGFVEPLESTGIFFIHHAIEQIAKNFPNEDWNPNQRMLYNRSVSHVMDGIREFLVLHYVAAKRQDTQYWRDTKTRAIPDSLAERLEMWKTQVPDSESIFPYYHGLPAYSYMCVLLGMGGIELKPSPALALSDPSAAEREFEAIRDKTRRLTQTLPKAYEYFAQHR

SEQ ID NO: 87300 - protein, 520 aa, Alteromonas confluentis
  misc_feature (1)..(520): tr|A0A1E7Z6Q8|A0A1E7Z6Q8_9ALTE Tryptophan halogenase OS =Alteromonas confluentis OX=1656094 GN=BFC18_20790 PE=4 SV=1
MTNRVVIVGGGAAGWLTAGILAAKNGIHSGCTNPVHIELVESPNVKNLMVGEGTWPTMRDTLRQIGLSEQDFMRFCNAGFKQASKFVNWQYGNGEHYYHPFTAPAGYGAVNLSSHFVKNRPGADFESMVCAQGAVCEQSLAPKTLAMPEYAFAMNYGYHLNAGKFTEMLRLHCTQKLGVVHTLGHVENVNGAANGDIASLTLDDGRQIDGDLFIDCSGFKALLLNGFYNIPLVSKRDQLFNDAALALQVPYKDDTAPIASATVATAQQHGWIWDIALSSRRGIGHVFSRQHCSEEQAREALMNYVKSDPHLDASGAEPRLITFEPGHRSTFWHRNCVGIGVSAGFVEPLEATALVLVEKSVEWISHQFPRCRNAMTVLAKRYNEMTHKRWEEIIDFIKLHYVLSSRDDSEYWRAHREGASIPESLKESLLLWQTQPPWLYETDRRLELFSSASKQYILMGMQATCSDACVGLSQHEMRVADKALGGVQRSTAELLGLLLSNREYLTRLAGKVQENARARA

SEQ ID NO: 87301 - protein, 510 aa, Pelomonas sp.
  misc_feature (1)..(510): tr|A0A0Q6X087|A0A0Q6X087_9BURK Tryptophan halogenase OS =Pelomonas sp. Root1237 OX=1736434 GN=ASC91_26395 PE=4 SV=1
MKEFNRVVIAGGGTAGWMMAALMGKLLGKRLDIKLVESEEIGTVGVGEATIPALHTYHNLLGINEAEFMAATNATFKLGIAFEGWKDIGQDYFHSFGSTGNDHWSAGFQHFWLKGRAEGLSKTYTDYNPETVAAYANRFAHLPRNGLNYAYHMDAGRYAKYLRAMSEGYGVQRIEGKIGAVLMDGPQGKDGDITALQMQDGTRIDGDLFIDCTGFRSMLIGEALGVGYEDWSYWLPCDRAVAVQTASVREAWPYTRSICHPFGWQWRIPLQNRVGNGLVYSSKELSDADAPEVLKKNVEGELLIQPRVIKFLPGQRDKVWHRNCIAVGLASGFVEPLESTSIHLIQRAAIRLMQTFPQGGIQQSDVDEFNLQSKRELEHIRDFIVLHYTVNERTDSKLWKHVREMDLPATLRHRIDLFRETGRVFRPSDELFAENSWVQVMMGQGITPERYHPVADLMGKQELATFLGDIHLKVSRTVAGLPQHQAYVEQLCAPYRNATTAQLAATPLRA

SEQ ID NO: 87302 - protein, 507 aa, Pelomonas sp.
  misc_feature (1)..(507): tr|A0A0Q6W6I3|A0A0Q6W6I3_9BURK Tryptophan halogenase OS =Pelomonas sp. Root1237 OX=1736434 GN=ASC91_21410 PE=4 SV=1
MNKPLRRVVIVGGGAAGWMSAAALSAVLKPPYEIRLVESDEIGIIGVGEATIPPIRMFNGLAKIDEAEFLKATQGTFKLGIEFVNWGRQGERYFHGFGGVGREALWPVDFSQYWLRLRALGRALPLDAYVISNMAAKANRFMLPRPDMQNSPMAALGYAYHFDASLYAKHLRALSEQRGVRRTEGKVVRVLLNEEPGPAEGHVRAVQMQSGELVEGDLFLDCSGFASLLIEKALGTGFEDWSHWLPCDRAVAVPSESTSPLLPYTRSTAHRAGWQWRIPLQHRVGNGHVYSSSHVSDDEAAGVLLKNLDGQPLADPRIIKFRTGMREEAWRRNVVAIGMSAGFVEPLESTALHLIQMGVAKLIEAFPHSGFDALEIAEYNRQSRERYEYVRDFIVLHYHLNQRDDSEFWKACAAMAIPGALRWRMALYASSGRLANVDGDLFREPSWLEVMEGQNLRPKGWLALAELQGVEETAAYFKGVSDTIAQCVAVMPDHAEFVRRYCPAMPV

SEQ ID NO: 87303 - protein, 492 aa, Planctomycetaceae bacterium
  misc_feature (1)..(492): tr|A0A2E6ADN3|A0A2E6ADN3_9PLAN Uncharacterized protein OS=Planctomycetaceae bacterium OX=2026779 GN=CMJ80_0215 0 PE=4 SV=1
MENRIQQFVVVGAGSAGLMSSMAIKRAFPTRKVVLVYAPEIPVIGVGESTTTIFPGFLHRSLGLGYLDFFREVQPSWKLGIRFHWGDPKDTHFNYVFDHCMTHKPAPLRKLTAYYCLNDWTDASRCWALMDRGLSPCHVEPDGRLSTYDAFGYHINNENFLKYLMKKSQELGVEHRPTKIVGVERNACGNLTSLQTDDGNQLTGDLFVDCSGFQSRLLGDVMQQPFVSYRDSLFCDRAVVGGWQRNSPILPYTTVDTMNHGWCWRIEFPDRVTRGYVYSSEFCSDDQAIEELKSKNPELESKPRVLSFQSGRRQNFWVGNVVGIGNATGFVEPLEATALHLVIEQIRLLCRLIDESEGDLPPKLIESANQRYRQLWDEVRDFLAIHYRFNRRKNTPFWQHCREATYLAGAQDLVNLYEEAGPTSLCSTTLDGGHLFGYDGFMSILVGSRAPTRYANRMSIDDLRRWHACQTKNQQAASNALTVRDALDRLGI

SEQ ID NO: 87304 - protein, 513 aa, Erythrobacter sp.
  misc_feature (1)..(513): tr|A0A165Q7V0|A0A165Q7V0_9SPHN Tryptophan halogenase OS =Erythrobacter sp. HI0063 OX=1822240 GN=A3736_12530 PE= 4 SV=1
MAVTQSSETPLSVAIVGGGTAGWMAAAALSKLTGCSVTLIESDAIGTVGVGEATIPQIRLFNRSLGIDEAEFVRETKGTFKLGIEFAGWRKPGESYMHAFGNLGRGAGLLPFHQLWLRGRQLGLAKSLAAYSLNETAARAGRMQAWQQAHGQPDMPWAYHFDASLYAAFLRRFAEARGTSRIEGRIASVERDGESGDIRAVVLEDGAQVEADFFLDCTGFRALLSQGAPGQDFADWSHWLPCDRAVALPCASDGDPVPYTRATAHEAGWQWRIPLQHRTGNGLVYCSDYLSEDEAEATLRSHLDGEPLAEPNRLRFRTGMRSAPWSGNCLALGLAAGFLEPLESTSIHLIQSGIARFLSMLPRRGATATMAAEFNRQARFEWESVRDFLILHYAANVRQGEPFWDRCRAMPLPDSLAARLDLFRATGYLHREHEELFTEPGWVQVLMGQGIMPRATHPNADAIDPAALARLLDEIERGIAANVAAMPTHAELLRRLCAPQSPSRPAATMETAR

SEQ ID NO: 87305 - protein, 561 aa, Ruegeria sp.
  misc_feature (1)..(561): tr|A0A346SHN3|A0A346SHN3_9RHOB Tryptophan 7-halogenase OS=Ruegeria sp. AD91A OX=2293862 GN=D1823_10065 PE=4 SV =1
MSNRLNKITIVGGGTAGWMTALILDMVLSRTSGPTDRPKICLIESPNISTVGVGEATVPRMPVTLRQAGISERSFFRETNASFKLGVKFCNWNNDAKGNRIDYMNPFAHGQMLEGLEAAEFFLRFGNGDRDFTQSISPHDDLARLCKGARQLGQPEFEQRFGYAYHLDAVKFAGMLTRVCTKRGVEHIQDEVQTVELDEQGNVSHLTLEAKGRHDVEMVVDCTGFRGLIINKALGEPFLDYSDYLPNDRAMALQIEHPDPDKIESATRSTALGAGWTWRVPLYNRVGTGYVYSSAHRTDDQAADEYLEWLGDSGKGLTPRVIPMRVGRVRNAWVKNCVAIGLSGGFIEPLESTAIHMIDHAIRWFAEHLPTRDIEPSLRDRYNRQMDKLYNEVLEFICLHYRLGNRTDDQYWIDARTEMKVPDRLAENLELWQYRLPMDHDIEFATLFDSRVYQTVLLGKQVYDTGYGSGIRDRLRPLKKPLWFQGMKNAKVDLAKIIKSMPDHKTLLRDIRGELEQPAFGMAAAMKPTVAMPGAAPAPVVVENMPNFAEIQSGKKDLQLF

SEQ ID NO: 87306 - protein, 504 aa, Pelomonas sp.; identical to SEQ ID NO: 82579
  misc_feature (1)..(504): tr|A0A0Q8GSW4|A0A0Q8GSW4_9BURK Tryptophan halogenase OS =Pelomonas sp. Root662 OX=1736580 GN=ASD88_15085 PE=4 S V=1

SEQ ID NO: 87307 - protein, 528 aa, Luteibacter yeojuensis
  misc_feature (1)..(528): tr|A0A561HIT1|A0A561HIT1_9GAMM Tryptophan halogenase OS =Luteibacter yeojuensis OX=345309 GN=FHW30_101156 PE=4 SV=1
MARLKKVLVVGGGTAGWLVACYLAKAVNAVDPRSVQVHLVESPDIGLLGVGEATFPSIRGTLAAIGLDERRFLVGATATYKQGILYRHWVRPPGSPGADHFFHPFNAPSQRPGGPDLLPYWLLGAAPPGMPFADAVSMQSTVVDHFRAPKRRKDGDYQGPMNHAFHFDAACFARVLAEHGQEALGVVRHVATVERAERDERGGIARVITKEEGELTADLYVDCTGLRGLLVGNVMQSPFRSRADVLFADRAVAMQVPYEAPDTPIPSYTISTAQEAGWIWDIGLQRRRGVGYVYSSRHTTDDKAEAAFRRYLGKAGEGGKAMHIRFETGYRPEHWRQNCVAVGLAGGFVEPLESTGIALIELASYLLTHLLPGDTDDMEGAARHFNEMMVARYDRIIDFIKMHYCLSQRRDSAFWGDNCDIVSIPPTLQDKLEKWKHRPPHRLDFVTDLEMFMPCSWQYILYGMEFQTDLEPMRSAYPHMDAAREEFAMIQRAAGRALGDLPDHRALVEQLCSEYAASSRGRASAAHG

SEQ ID NO: 87308 - protein, 492 aa, Pseudoalteromonas byunsanensis
  misc_feature (1)..(492): tr|A0A1S1N6M0|A0A1S1N6M0_9GAMM Uncharacterized protein OS=Pseudoalteromonas byunsanensis OX=327939 GN=BIW53_12 615 PE=4 SV=1
MTATLINQAYNKHHKLVDIRLIESPDVDIIGVGEATVPAIKDFLQAAGIDEAEFMNYCNATFKNGIMFENWRQPKHGKMHRYVHPFDFERVEKRLDIATSWVLSERQRPFDESVSLASTLIQHNLTPKTRTTKPYHGIVHYSYHMDARLFGQFLRQRAMAAGVTRIEAHVESVNTDNGQISSIATTQGLFESDLFIDCTGFRALLISALEEKSSNWRSYQDELMCDSAVTVQIPHSEEHIPRSYTVAHALSCGWAWSIDLQNRTGNGYVYSSKYCSKEQAELEFRNYLKLDNNVALNHIDMSVGRRKRHWIGNCVAIGLAGGFIEPLESTGLHLIFLAARFLVLHNNFQYCEANIAGFNQTMNATYDELKDFIVTHYVLSDRDDSDFWRDISKTLDACPQLAQKLDLWQSKVCEFFDVSNSTSHMFTDTSYRYILFGMDHIPQIKIPYFDGEFTDVFEFVKSRQQKAVAIALNHVDYFSYDVKGQVTVKLSQ

SEQ ID NO: 87309 - protein, 526 aa, Ferrimonas marina
  misc_feature (1)..(526): tr|A0A1M5YWP5|A0A1M5YWP5_9GAMM Tryptophan halogenase OS =Ferrimonas marina OX=299255 GN=SAMN02745129_4545 PE=4 SV=1
MQNPIQRVVIVGGGAAGWLTAGVLAAKHNADQGRLAPTPPLSITLIESPDVPTVGVGEGTWPSMRSTLETIGIRETEFLRCCDASFKQGSRFRHWGLDDARRLQEGVSDQYLHPFTLPQGQNQLNLADFWLPFREQVTFSEAVCAQEAISQAGLAPKTLTTPEYHFHLNYGYHLDAAKFGQLLQRHCTEKLGVTHLQDHVVEVVSHPSGDIAQVITQGKGAVEGDLFIDCSGRQSMLLGQHLKVPYISQKSVLFNDRAMALQVPYQRADDPIASCTLSTATEHGWIWDIGLPKRRGVGVVFSADHCSEAQAEQHLAHYLGGSIPKGLTPRIIQYRPGHHQVCWQNNCVAVGMAAGFIEPLEASALALIEWTANALADQFPRDRAAMPLLAQRMNRRYRQHWHQIIEFLKLHYVLSRREQGAYWRDHRDPSTCPDSLLEQLDLWQYQPPGDQDVAIKQPLFPAASYQYVLYGMGFETQAMALMKPSDKALARRLFDENQQQVAKLQRLLPSNRALLDQVSQYGFNKI

SEQ ID NO: 87310 - protein, 536 aa, Serratia quinivorans
  misc_feature (1)..(536): tr|A0A4Q8DDT3|A0A4Q8DDT3_9GAMM Tryptophan halogenase OS =Serratia quinivorans OX=137545 GN=EOZ59_4369 PE=4 SV=1
MSKPIKNIVIVGGGTAGWMSASYLVRALQQQANITLIESATIPRIGVGEATIPSLQKVFFDYLGIPEQEWMPQVNGAFKAGIKFVNWRTSPDHSSNDYFYHLFGNVPSCDGVPLTHYWLRKREQGFQQSMAYACYPQPGALDGNLAPCLHDGTRQMSHAWHFDAHLVADFLKRWAVDRGVNRVVDEVVEVNLNEHGFISSLLTKEGRKLEADLFIDCSGMRGLLINQALKEPFIDMSDYLLCDSAVATAVPNDDAQAGVEPYTSSIAMNSGWTWKIPMLGRFGSGYVFSSKFTSRDQATTDFLNLWGLSDNQPLNQIKFRVGRNKRSWVNNCVSIGLASCFLEPLESTGIYFIYAALYQLVKHFPDTSFDPRLADAFNAEITYMFDDCRDFVQAHYFTSSREDTPFWLANQHDLRLSDSIKEKVERYKAGLPLTTTSFDDSTYYETFDFEFKNFWLNGNYYCIFAGLGMLPDRSLPLLQLRPESIEKAEVMFARIQREAERLRASLPTNYDYLRSLRDGEVGLSRPGPTPASPESR

SEQ ID NO: 87311 - protein, 505 aa, Sphingomonas sp.
  misc_feature (1)..(505): tr|A0A396RLW5|A0A396RLW5_9SPHN Tryptophan 7-halogenase OS=Sphingomonas sp. ZDH117 OX=2305907 GN=D1610_11835 PE =4 SV=1
MSKPVDIVIVGGGTSGWMCAAALIAKLDPRRYRVRLIESDEIGTVGVGEATLPQMKEFNDFVGIDEVAFMRATQATFKLGIEFVGWGKPGESYIHPFGTFGRPIGDADFFQYWSRARATGHAEALSDYCFPIAAAKADRFTKPESGGAPDIRTAYSYAYHLDAFLYARFLRGWAEARGLERIEGRIVDVARDERDDGIASVALASGAVIAGDLFVDCSGFRALLIGQTLGVPFESWAEWLPCDRAQAVPCDRAGAFTPYTRSTARKAGWQWRIPLQHRTGNGIVYSSAHIGDDEVAETLLANLDGAAQASPRVLRFEAGKRALSWKHNCVAIGLASGFLEPLESTSIYLVQMGIIYLLTLLPGGRRPDPALVAEFNRTIDVEYDRIRDFLILHYHANQREDSELWRHCREMALPDTLTAKIERFRHRGHVATYRDGLFGAPSWHAVFVGQNVVPQGHDRLADRLPSADLVQRLRSLRADIEAGVQAMPGHDEFVRGYCPADPLPA

SEQ ID NO: 87312 - protein, 500 aa, Ferrimonas marina
  misc_feature (1)..(500): tr|A0A1M5YCN0|A0A1M5YCN0_9GAMM Tryptophan halogenase OS =Ferrimonas marina OX=299255 GN=SAMN02745129_4081 PE=4 SV=1
MNPTPLRSITIVGGGSAGWMTALYLNRYLNHDAPRCDITLVESEDIGIIGVGEATVHSIRFFFAAMGLDEAELMRECCATYKTGILFRNWMAPKEGSTHQYFHPFEEQRVPGVLDLASTWLSGGQTDQMRYDQAASLGSRLMQQGLGPKTPTSPPWQGVVPYGYHLDAVLMGRYLRKKAIEAGVGHVVGTVDRIEHEGERITALYCQQQRFQSDLFIDCSGFRRLLLSPLRQDNWQSFEDALPCNRAVALQLPYQPGVSPRPYTTATALENGWIWEIDLQNRRGNGYVYDGNRLTEAEAEARLREFLGEPEQGKAVHLKMNIGCVKSFWVGNCVAIGLSGGFIEPLESTGLHLINLSVRLLATHLNCAEPDQSSKDSYNRLMNGIYDDLKRFIVLHYCLTDRQDTPFWQQAQRSVDHTPVLAQQLELWRHKVCEFMDLAGSFSTVFTDENYRYVLYGMDHLPQLPPQGAPAACRAALDQLHQRFDQVTLQALPHAEQLPN

SEQ ID NO: 87313 - protein, 500 aa, Sphingomonas sp.
  misc_feature (1)..(500): tr|A0A396RV20|A0A396RV20_9SPHN Tryptophan 7-halogenase OS=Sphingomonas sp. ZDH117 OX=2305907 GN=D1610_11090 PE =4 SV=1
MQQLRRILIAGGGSAGWMTAALLAKLFQGLYEITLVESEEIGTVGVGEATIPAIKKYNELLGLDENEFLQRTQGTFKLGIQFNDWWRKGESYIHGFGVIGQDLGWLRCHQYWLKMRAQGRASDFANFSINTAAALENKFMRAKPDMGESPIGHIANAFHFDAGLYARFLSGYAQERGVRRREGKIAGVALRNEDGFVKSVTMDDGEVIEADFFVDCSGFRGLIIEQAMKTGYEDWTHWLPCDRAIAVPCERSADFTPYTRSTAREAGWQWRIPLQHRTGNGHVYSSKYIDDNAAERVLLDNLDGEQRADPLRLRFVTGKRKRIWNRNCVAVGLAAGFMEPLESTSLHLIQSSVIRMVRLLPDAGFDQAGIDEFNRQTDFEYERIRDFIILHYKATERNDTPFWDYCRTMEVPATLQRKMNLFAANGRIFREDEELFSEESWIQVFLGQGVIPRGYDPLVDIKSDAQVAQFLGNIEAVIAKCVRLMPSHADFVAKTCPAPA

SEQ ID NO: 87314 - protein, 503 aa, Pseudoalteromonas sp.
  misc_feature (1)..(503): tr|A0A0Q0J913|A0A0Q0J913_9GAMM Flavin-dependent tryptop han halogenase RebH OS=Pseudoalteromonas sp. P1-26 OX=1 723759 GN=rebH_2 PE=4 SV=1
MIKKIAIVGGGTAGWLAANHLGHALLQSGIEITLIESPNIASIGVGEGTVPSMRNSLQKFGISESDFINECDVTFKQSIKFVNWLDKHKHGANFYHHLFDHPHIFGEELTQQWLAEGNGNDYADFVSKQHACCENNLAPKTIATPQYAGINGYAYHFDAKKFAAFLKSHATQHFAVKHLFAEIKDVSCDEQGFITHLIDSEGNALEFDFIIDCSGFSAAFIGQKLGVGFVDKSDSLLTDTAITLQVPTQSDDEIPPYTIATAHQAGWIWDIALTERRGVGFVYSSKYMSDEQAHAKLHHYLGNKFEHLTPRKIPMKVGHREKMWHKNCVAIGLSQGFVEPLEATAILIADFSAGLLAKRFPRTRDDINLVAGDYNQQVNYVWQQTFDFIKMHYCISDRTDSAFWRDNKKADQLSEKLKNNLARWQRFTPVREDFASKFDLFDLENYLYVLFGMHYVPTKQQYKQSDNQQVAKFKQQRVKQLLNELPKHRELLNKIKKFGLQKN

SEQ ID NO: 87315 - protein, 510 aa, Pseudoalteromonas byunsanensis
  misc_feature (1)..(510): tr|A0A1S1NCU1|A0A1S1NCU1_9GAMM Uncharacterized protein OS=Pseudoalteromonas byunsanensis OX=327939 GN=BIW53_04 325 PE=4 SV=1
MSHNTKTKRVLIVGGGSAGWLTAGLLASQCRNWKITLIESKHIATIGVGEGTWPTMRTTLQKIGIDEDEFMHQCEASFKQGSEFINWAQRKEHSYYHPFSLPAGYTEQFDIVTPWLGIKDKVDFAHASCSQSYWCDRSLAPKTASDPQYQGRANYGYHLNADKFAQLLKQHCTTKLGVTLIQDDVISVNGQVDENIESVSTQEHGELAAELFIDCTGSRSLLLGKHFGVQWLSKKHILKNDRAVALQVQHNTPESDVASCTKSTAQSYGWIWDIALQSRRGIGYTFASEYCDFEEASSQLLEYISGQGLRVHQDAQVKEIKFSPGYREKFWHRNCVAIGMSAGFIEPLEASALVMIELGAQYVCDNLPESEDMMEVVAQRFNAKFSYHWARIIDFLKLHYVLSERSDTAYWQSMKSEQVPLSLKNLLTLWRHRPPKHGDLDHIDEVFSPASYQYVLYGMGFNTLVNNYSITPQINSLFKQVTQIAQQGLDTQPSNRLLLNNIAKYGIAKV

SEQ ID NO: 87316 - protein, 505 aa, Gammaproteobacteria bacterium
  misc_feature (1)..(505): tr|A0A2N1XD36|A0A2N1XD36_9GAMM Tryptophan halogenase OS =Gammaproteobacteria bacterium HGW-Gammaproteobacteria- 4 OX=2013800 GN=CVV14_11000 PE=4 SV=1
MQIGSTPLRIVIVGGGTAGWMAANLLARRWRSRQVAITLLESPEIGIVGVGEGSTPLLGTFFEKLGIADSDWMPKCNATYKNGIRFSGWSDIKGHESYFHPFASAIDIHGQSAFFMHCALRRNGYDVAANPDRFFIAAELARQRLAPLAAHHFPFRIFHGYHFDAHRVGALLGEHAQRLGVEHLHGTVVTVERGEGGAVLAVGTEDGRRIAGDFFVDCSGFRSLIVQQALGVPFRQFADNLFNDRAVVLPTPTDPTGTNSQTISTALRNGWVWNIPLRHRHGNGYVYSSRFCTPDQAEHELREHLGLLDDPVGARHLQMRVGRVEQVWVHNCLAVGLSQGFIEPLEATALHLVQTTIESFIEQVERDGDLDARRQSFNDGIARDFEGVRDYIVCHYRMNRRTDTEYWRANASHDQLSDSLKAILTCWFTGRNLEQEIARQGIADIYPPMSWHCLLAGYGQFPDPAKLRTPEPGIAVADIAGIDDFRSRCALNFRDHAQVLAEMAA

SEQ ID NO: 87317 - protein, 507 aa, Pseudoalteromonas sp.
  misc_feature (1)..(507): tr|A0A0P9G3L1|A0A0P9G3L1_9GAMM Flavin-dependent tryptop han halogenase RebH OS=Pseudoalteromonas sp. P1-9 OX=17 10354 GN=rebH_3 PE=4 SV=1
MQLNQNPIEKFVIVGGGTAGWLAAATLGNIFKDSNTQVELIESDEVNIIGVGEATIPPLIDTLESLGIDLVEFIKATQASFKWGIQFENWYQESHSYFHPFGEVGQKIDGHEFYQCWLKQKAEGDNTPLMAYSPEAVLSEKNRFFVPHQAMNTPLAGARFALHLDAVLAGQYLRKFSENIGVKRTVGHVESISKTIDGNIASVTLKSGDTINGDFFIDCTGFKGLLIGNALNTEYQDWSEHLPCNRAVAVQTKLTGDTKPYTISRGQKAGWSWHIPLQHRTGNGYVFCDKYISDEEAIQTLLDNVDGEPLNEPRVIPFVTGVRDKVWNKNCLSLGLAQGFLEPLESTAIHLVSKSLALFVRMFPTKTPNAVLQNEFNRRIIGDYQEIRDFLVLHYCTTQRDDSPFWRDWQQKEIPASLSERIAFFKQSGGLIPGVEELFQPTSWYAVFDGMGLTPNGYNPTLDALNSETLAKSLAAGRNALDKCAEAQPLHDEFLQRYCPANEAIFV

SEQ ID NO: 87318 - protein, 508 aa, Luteibacter sp.
  misc_feature (1)..(508): tr|A0A2T5LDC0|A0A2T5LDC0_9GAMM Tryptophan halogenase OS =Luteibacter sp. OK325 OX=2135670 GN=C8J98_105202 PE=4 SV=1
MANGITNIVVVGGGTAGWMAAAALIRVLNKQVTVRLVESEEIGIVGVGEATVPHIKLFNNLLGLNEADFVARTQGTFKLGIQFRDWGKLGDTYIHGFGVIGHDIGLTPFHQYWLKARLSGMHSDADLHDYSVNTVAATRGKFMPAPTDVPAGSPLSTIGYAYHFDASLYARYLREYSEARGVRRTEGKVRSVDLHPETGHVAAVVMESGERIEGDLFIDCSGFRGLLIEGALQSGYEDWSHWLPCDRALAVPCARVEAPTPYTRSTAREAGWQWRIPLQHRTGNGYVYSSQFISEDEAAAKLMANLDGKALADPRPLRFVTGMRKKSWNRNVVALGLASGFMEPLESTSIHMIQAGISKLLELFPSDGVMDPVLIERFNERTRFESERIRDFLVLHYNATTRDDTPFWDYCRTMSIPDSLKTNIDLFRHSGRFFRNADEMFAAVSWIQVMIGQGIMPTGYNPLVDQMPDADLPKFLDSIRDVISKNVDLMPTHQQFIDRECKAAAVVV

SEQ ID NO: 87319 - protein, 506 aa, Pseudoalteromonas sp.
  misc_feature (1)..(506): tr|A0A0P9FSR6|A0A0P9FSR6_9GAMM Flavin-dependent tryptop han halogenase RebH OS=Pseudoalteromonas sp. P1-9 OX=17 10354 GN=rebH_5 PE=4 SV=1
MAQAVKKIVIVGGGTTGWMAAASLSRYIQDKDMSLTLIESPNINTVGVGEATIPNFVDFNRNLGINDAELIKATQATFKLGIEFEEWSQKGERFFHPFAAYGAPIENLDFHQYINKLNAEGKQLDIEDYSFPIQLAKKGGFAQPNPNQNNPLAQYSYAYHIDAVLYAKFLTEFSVKRGVNHILANVSEVKLNAENGFIQALTLDNGKHIEGDLFIDCSGFKGVLIEGAMGIGLDDLSHLLPCDSAVAVQTELVGEPTPYTRAIAKEAGWQWCIPLQHRMGNGYIYSSKFITDEEAKQSLLDSVKGRTITDVKTFKFPLGRRKVSWHKNCFALGLAAGFLEPLESLGISLIQTALAKLMTFFPDMSFNQADIDEVNRLHNDELDRIVDFLLVHYKLTQRTDTAFWRYCQEMPIPKTLEHKIAMYKNRGHVVMYDNESFQQASWLSMFYGFNVTPSRYDVRLDHFNSSAIAENLAKMKAQIAMAANNCLSHQAFIDKHCKANNDVKNQ

SEQ ID NO: 87320 - protein, 493 aa, Hirschia baltica
  misc_feature (1)..(493): tr|C6XQH0|C6XQH0_HIRBI Tryptophan halogenase OS=Hirschi a baltica (strain ATCC 49814 / DSM 5838 / IFAM 1418) OX =582402 GN=Hbal_2796 PE=4 SV=1
MERQTINRVVIAGGGTAGWVTAASLSHNLGPALDITLVESEAIGTIGVGEATIPTHTSFHAMLGINEAEFMRATHATFKLGIQFEGWKDKGESYIHSFGQVGKHTWMAPFHHLWLHARDLGIEGDFEDYCLELKAAKADKFFTSDKQKPLNYAYHLDAVAYAKYLRGFSEKKGVKRVEGKIQNVLQYAESGNIKAVELENGALIEGDLFIDCTGFNGLLIEKTLKTGYDDWRHWLPMDSAYAVQTQKTGPAIPYTRAIAHENGWRWRIPLQHRVGNGFVFTSEKLSNDDAREQFENALEGEALTEPRLIRFITGRRKKVWNKNCVALGLSSGFLEPLESTSIHLFQRGVTELVKHFPYHGITPALADLYNDKISKEVEQIRDFLILHYKVTQRDDSEFWRERQAMDIPDTLAARLSLFEENAHAYNGCDELFLLDSWIQVMFGQGIEPKGYHAIGQLFPKDRLENALKSQREKVASTLAQLPSHQEFIDQYCS

SEQ ID NO: 87321 - protein, 514 aa, Pseudoalteromonas sp.
  misc_feature (1)..(514): tr|A0A0P9FIZ3|A0A0P9FIZ3_9GAMM Flavin-dependent tryptop han halogenase RebH OS=Pseudoalteromonas sp. P1-9 OX=17 10354 GN=rebH_1 PE=4 SV=1
METKPIQSIIILGGGTAGWLAANHLAINLKPKEQQGVKITVIESPDTPTIGVGEGTVPLMRNTLKEFGISEETFIKECDVSFKQGIQFDNWMKPINGKMHSYYHPFDYPVLDNDSVAAWLQNPVLPFSHAMNRQAILCDNHKSPKAITDPEFAGQAAYGYHLDAYKFSDLLKQHAIENLGVEHLMAHIEDVTLSDDGAIDSLISLQGEVFNADFYLDCSGFCSRLLGQALNIPFIEKSDVLFVDKALAIQVPYDSEQPKLPSSTIATACDAGWIWDIALPTRRGIGHVFSSKHCSLDEAKATLANYLNKSVEEISPRLIDMKIGHREKFWHKNCVAIGLSQGFVEPLEATGLLAFDATAKLLAKSFPTNTSQLALAEKRYNTYVNGLWQGVINFIKMHYAVSDRDDTAFWRDNRDTASWPLELQEKLEHWRTHIPNLYDFERGFDAFRLENYLYVLYGMNYPTEIGDTAYRYQAPDNASKQFELIQKHALKLSDYLEDNLTVINKIKQFGLSKV

SEQ ID NO: 87322 - protein, 500 aa, Hirschia baltica
  misc_feature (1)..(500): tr|C6XNI6|C6XNI6_HIRBI Tryptophan halogenase OS=Hirschi a baltica (strain ATCC 49814 / DSM 5838 / IFAM 1418) OX =582402 GN=Hbal_2451 PE=4 SV=1
MNQAAISKIVIVGGGTAGWMAAASLARVLDANRISITLVESESIGSVGVGEATIPPILKFNELLGINEQEFMKATKATFKLGIEFSDWGDVGQKYIHPFGDFGTDIEGIPLHHFWLSQRQRAGYQHSLFGFSLMVKACELGRFKYPEYQNPKSVYSGIHYAYHFDAGLYAAFLRDYAEKIGVVRYEGIVGDVKLDSENGHVKSIVLDDHREIDGELFIDCSGFRGMLIEGALNTGYCDWSHMLPMDSAMAVPSEKVGDPIPYTKAIAHEAGWQWRIPLQHRTGNGCVYSSQFMSDNTARQNLVSGLDGPALVEPKKLQFKTGHRRKFWNKNVIALGLAAGFMEPLESTSISLIQTGLARLMTLMPDKRFSEASRSAYNQRTLEEYEHIRDFLLLHYVASKRNDSEFWQYMRNLPVPASLQEKISLYQDAGRILKFENGLFTPSSWLAVMHGQGIEVYGHDPITLRFTLEETQSRLDGMRNLIDKAALAMPFHSEVLKQLY

SEQ ID NO: 87323 - protein, 510 aa, Hirschia baltica
  misc_feature (1)..(510): tr|C6XNI7|C6XNI7_HIRBI Tryptophan halogenase OS=Hirschi a baltica (strain ATCC 49814 / DSM 5838 / IFAM 1418) OX =582402 GN=Hbal_2452 PE=4 SV=1
MTDRNIRKILIVGGGTAGWMAAAALSRYLPMGRTEITLIESDEIGTVGVGEATIPQIAVFNKMLGINEDEFVKATYATFKLGIEFQDWGRIGETYFHPFGEYGYDLEGIDFHQFWVRSKQSNDFHGLDEYSLNTKAAYAGKFIRLDAVNGGSVLSKMGYAFHFDAGKYASYLSEYAKKRGVRRLEGKVCSVTKRSTDGFLESVQLETGDVIDADLFIDCTGFKALLINGALGVGYEDWSHLLPMDRAVAIPCASVEFAKPYTISKAQSAGWTWKIPLQNRIGNGHVYSSKFMSKEMATQILEKELVGEALADPNHLRFQTGIREKFWEANCVSLGLSSGFLEPLESTSIHLIQSGISKLIALFPDRDFSPTDRDEYNRLLNVSYKHIRDFIILHYIATDRQDSPFWKEMQKIDPPSTLKQKMKLMQEKGRFFRYEDELFSVASWLAVMEGQGMGPQHYNPVADTLSDLNVKQSLENMRSLFTKTVAAMPTHQQFIDRYCKSAGADLGEGR

SEQ ID NO: 87324 - protein, 536 aa, Pelomonas puraquae
  misc_feature (1)..(536): tr|A0A254MXP7|A0A254MXP7_9BURK Tryptophan halogenase OS =Pelomonas puraquae OX=431059 GN=CDO81_26835 PE=4 SV=1
MADTATLFNRHIAARPAQGSTDRPPPVRHVCVVGGGTAGWMTALMLATSAYGPRLQVTVLESPQVGIIGVGEGSTPWLRGFFEGLGIEESEWMPACNATYKSGITFKGWSTRPGFESYFHPFASMLDNLTMHQFVDNVHERLGGADVHAHPDRFFVAAALARQARAPRAPAHFPFDVWYGYHFDATLLGQFLARKATALGVRHLQGHMRQAVLDEAGDIDHLQLDDGSALSADFFVDCTGFSSLLIGQALQTPFISYAENLFNDAAIAIPTPHEGPIESQTVSTALGHGWAWQIPLTTRCGNGYVYSSAHCTADQAETELRRHLGLLDADVPARHLKMRVGRMAQQWHRNCVAVGLSQGFIEPLEATALLFVQRTAAMLVEVLERGDLGPAARAAFNDTMKQRFEHTRDYIVAHYKTNSRTDTDYWRDNAENLHLSESLQGVLMTWLSRKPLIAGLQAGRFGQGYPVVSWYALLAGMGIFPDADELQPPSPHQARHDLAAVDDFVRRSALNFPDHRELLGHIPPRHRGSTLQLYLW

SEQ ID NO: 87325 - protein, 535 aa, Saccharopolyspora hirsuta; identical to SEQ ID NO: 82326
  misc_feature (1)..(535): tr|A0A1H6A529|A0A1H6A529_SACHI Tryptophan halogenase OS =Saccharopolyspora hirsuta OX=1837 GN=SAMN02982929_0214 7 PE=4 SV=1

SEQ ID NO: 87326 - protein, 468 aa, Cytophagaceae bacterium
  misc_feature (1)..(468): tr|A0A4Q3NWY8|A0A4Q3NWY8_9BACT Tryptophan 7-halogenase OS=Cytophagaceae bacterium OX=2026729 GN=EOO38_08935 PE =4 SV=1
MARYLGRKVSITLIESDEISTVGVGEATIPSIRRFHAALGIDEATFMAATGATHKLGIDFIDWHQTGQRYFHPFGKLGTSVAGVGFLHAYLRLREEGLAEPLWRYSPNAVAAAARKFGAATGVDKAVASAFPYAYHLDAGRYAQMLRDYAGARGVERIAGTVGKIERDASGCVTTLSLEDGRKVAGDLFVDCSGGRAILIGDEPDNEWEDWSAFLPCDRAVVVQTEAVRDPVPYTQASAMVAGWRWSIPLQHRVGNGYVYSSAHCDAETAKAELIRSVEGSLINQPRTLSFRTGRRSRFWQGNVVAIGLSAGFLEPLESTSIHLIQTGITSLLNLFPRDRESNDLAAFYNQQMVTAFEGVRDFIILHYIATQRTGSSFWDYIRQMNIPKSLKDRVELFRGRGRFVRDENELFTLDSWVTVMLGQGIDPNAYSVTADGIPIDLLAETAERHVKQIESVVEQMVYYRYRC

SEQ ID NO: 87327 - protein, 499 aa, Caulobacter sp.
  misc_feature (1)..(499): tr|A0A3Q9IJ06|A0A3Q9IJ06_9CAUL Tryptophan 7-halogenase OS=Caulobacter sp. FWC26 OX=69665 GN=CSW63_17575 PE=4 S V=1
MESQRVRKVVIAGGGTAGWMAAAALGRQLGSLLDITLVESEDIGTVGVGESTIPTARTFNALLGIDEAEFMRATQATFKLGISFENWGEIGDRYIHSFGQVGKSTWMGGFHHFWLEAVAQGFGRDLGDYCFELKAAEAQRFYTGEESPLNYAYHLDAGLYGQFLRKMAEADGVRRVEGKIASVRQRETDGFVDALVMESGQLVEGDLFIDCTGFRGLLIEQTLQAGYEDWSHWLPTNSALAVQTRSTEPAVPYTRAIAHRAGWRWKIPLQHRVGNGLVYCSDHMSDDEAMDMLTREIEGETLISPRLIRYRTGRRRKTWDKNVVALGLSSGFVEPLESTSIHLITIGVTRLMQLFPFGGISQAVVDRYNRQADDELEKIRDFIILHYKVTERTDSAFWDRVRTMDIPDSLAHRIALFQESGHVFQAPGELFQVDSWLQVMLGQRIMPRTYHHMGRMMPPQQLMQALDDLKRNIAGAVSRLPQHQAFLDHYCAPPVSKSA

SEQ ID NO: 87328 - protein, 516 aa, Caulobacter sp.
  misc_feature (1)..(516): tr|A0A3Q9IP11|A0A3Q9IP11_9CAUL Tryptophan 7-halogenase OS=Caulobacter sp. FWC26 OX=69665 GN=CSW63_18270 PE=4 S V=1
MTTTHPNALRKIVIVGGGSAGWISAAMLSHYFQNGGCAVELVESEEIGTIGVGESTIPPFLQLLASLGVDEREFIQATQASFKLGIRFEDWKQKGERYYHPFGAIGGPIGPHEFYQCWLRAKANGHPSNLQDFAPGTVMADQWKFIPPIKAQRTLIAGASYALHVDARLVAKFLRDYAEARGVKRTEGIVTDVVTHPDGSVAKVVMKDGREVEGDLFIDCTGFRSLLIGKTLDVPFNDWSDMLLCDRAVVVQTENVGAPHPYTVSKAEDAGWRWRIPLQHRAGNGYVFSSRHLSDDEARATLVKNVEGQMLMNPMFIAFKTGMRQRLWHKNVVAVGLAGGFIEPLESTALHLIYRGMDFLLRFFPDRDFDPALAAEYNRRMTADYEEIRDFIVLHYCTTERADTPFWRDVRNAPIPDSLRDRIALFQAQGVLREGVDDMFRNPSWQSVMEGMGVRPRRYQQLVDTVPYEVITQTLDQSAPILAAQVAGLPSHGEFLEKHCPAPKPEAVVAPFGAVA

SEQ ID NO: 87329 - protein, 538 aa, Burkholderia stabilis
  misc_feature (1)..(538): tr|A0A4Q2A8K9|A0A4Q2A8K9_9BURK Tryptophan 7-halogenase OS=Burkholderia stabilis OX=95485 GN=D1006_36850 PE=4 S V=1
MSNPIKNIVIVGGGTAGWMAASYLVRALQQHTNITLIESEAIPRIGVGEATIPSLQKVFFDFLGIPEREWMPQVNGAFKAAIKFVNWRKSPDRAGDDHFYHLFGSVPNCDGVPLTHYWLRKREQGFQQPMEYACYPQPGALDGKLAPCLPDGTRQMSHAWHFDAHLVADFLKRWAVERGVNRVVDEVVKVRLNDRGYISSLSTKEGRTLEADLFIDCSGMRGLLINQALKEPFIDMSDYLLCDSAVASAVPNADARVGVEPYTSAIAMNSGWTWKIPMLGRFGSGYVFSSKFTSRDQATADFLNLWGLPDNQPLNQIKFRVGRNGRAWVNNCVAIGLSSCFLEPLESTGIYFIYAALYQLVKHFPDTSFDPRLTDAFNAEIVYMFDDCRDFVQAHYFAASREDTPFWLANRHDLRLSDAIKEKVQRYKAGLPLTTTSFDDSTYYETFDYEFKNFWLNGNYYCIFAGLGMLPDRSLPLLRHRPESIDKAEAMFARIRREAERLRTSLPTNYDYLRSLREGDAGRPRSQPGPTFATPEIL

SEQ ID NO: 87330 - protein, 518 aa, Luteibacter sp.
  misc_feature (1)..(518): tr|A0A2T5LGW1|A0A2T5LGW1_9GAMM Tryptophan halogenase OS =Luteibacter sp. OK325 OX=2135670 GN=C8J98_102277 PE=4 SV=1
MARLKKVLVVGGGTAGWLAACYLAKAVNAFDPRSVQVHLVESPDIGLLGVGEATFPSIRGTLAAIGIDERRFLVGATATYKQGIHYRHWVRPPGTPGADHFFHPFNAPSQRPGGPELLPYWLLGAAPEGMSFADAVSMQSALVDHARAPKRARDADYQGPLNHAFHFDAACFARVLAEHGEQTLGVVRHVATVERAELDEHGAIARVVTKEEGELTADLYVDCTGLRSMLIGNVMQSPFRSRADVLFADRAVAMQVPYESPDAPIPSYTISTAQEAGWIWDIGLQKRRGTGYVYSSRHTTDDRAEEVFRRYVGRAGEGLKAMHIKFETGYRPEHWRKNCVAVGLAGGFVEPLESTGIALIELATYLLTHLLPSDTDNMESAARHFNEMMVARYDRIIDFIKMHYCVSQRRDSPFWIDNADVASIPQTLQEKLAKWKQRPPHRLDFVSDLEMFMTSSWQYVLYGMEFKTDLEPVRSAYPDMEAARQEFTMIRQAAARALDDLPDHRELVEQLCREHNCR

SEQ ID NO: 87331 - protein, 390 aa, Myxococcus xanthus
  misc_feature (1)..(390): tr|A0A4Y6C3T9|A0A4Y6C3T9_MYXXA Tryptophan halogenase OS =Myxococcus xanthus OX=34 GN=BHS06_04780 PE=4 SV=1
MSEASYDVAIIGGGPAGAAMAVALRDLAPFLSVVMLERTDYDTHRSGETLSPDLRIPLSRLGVWSSFLRDGHLASRGTSSCWSRAEPRVQDTRMSPWGSAWHLDRARFDERLSLEAARQGVRVLRLTTLLDVESIAKEGYRLHLSQRKTGALTLRARFVVDATGWKATFAMSQGARRRIRDRCFTVHGAFQLRPGESFPTDALVESCPEGWWHSARLPSDCVAVTLVGDGDSLHGLRWATPEPWAALLDQAPVTQARLAACDFAGEPLVAAPVLVGELDQMHGERWLAVGDAACTHDPLSAQGIFSALDSALLAAEALEQYLRGEEDALCAYEQTLHLRFNEHLHRRSCTYLEEQRWPDAPFWKNRHTAFPALPPAAGQRSAPAPTGLAP

SEQ ID NO: 87332 - protein, 507 aa, Hirschia baltica
  misc_feature (1)..(507): tr|C6XS27|C6XS27_HIRBI Tryptophan halogenase OS=Hirschi a baltica (strain ATCC 49814 / DSM 5838 / IFAM 1418) OX =582402 GN=Hbal_3201 PE=4 SV=1
MNQDNNSHHIVIVGGGTAGWLSAAFLSSQLKNRFQKNVNITLVEASDIATIGVGEATIPSLRQTLNACGIDEREFLKACDATFKHGIEFIQWRETPAKAPAESYFHPFGELVSVEGHNPAHQWSKLGKDQREDFADLFSVQPEIAKLGRAPKHSNDRAYDGALAYAYHLDAGKLVEFLKAKFRDVSVAQIIGKVVGASSSENGNFSSVQLDDGRSIEGDFFIDCTGFAARLINADQENEFIDKSSILFVNRAVTTRIPVEDKRDITGYTKCTAQTAGWIWDIALQTRRGIGHVFSTRHMNDEDAVQCLANYTGKPIEDLDVRFLDMKTGYHARQWRKNCVAVGLSSGFLEPLESTGIYLIEMANWALLDMLPRFFSGAQPQERYNEAMRLHYENIVDFLKLHYCLSNRDDSDFWTENRGPQTVPETLKQKLHQWQNSVPSVYDFDRRIQCFSENNYQFVLYGMGWSGHDCVQPLNNDIQQMLDALAVRRERLRQFVLRDTQANLDFY

SEQ ID NO: 87333 - protein, 498 aa, Pseudoalteromonas sp.
  misc_feature (1)..(498): tr|A0A0Q0L322|A0A0Q0L322_9GAMM Flavin-dependent tryptop han halogenase RebH OS=Pseudoalteromonas sp. P1-26 OX=1 723759 GN=rebH_1 PE=4 SV=1
METKKITKVVIAGGGTAGWITAALLNKVLGKVIDITLVESAEIGTVGVGEASIPPILHLNGALGISEKEFIKATGATIKLGIEFENWRSQGHSYMHAFGEIGKDFPFCEFYHFWLKANQANNAPDFWDFSLNYQAAKAHKFAHLKHIPNTQLAGLHYAYHFDATRYGEFLKELAQSRGVKRIEGKIESVNQCHESGYIRSLLLKNGEQIDGDLFIDCTGLRALLIEQTLNTGFEDWSHWLPCDSAIAVQSESAFDAIPYTRSIARDSGWQWQIPLQHRVGNGIVYSSRFLSDEAAKQQLLENLPAKPLTEPRVIKFKTGRRLKQWHKNVVSVGLSSGFLEPLESTSIHLIQSAAIRLIKFFPHQGIKQSLVDEFNQQSKTEFERIRDFIILHYKITERDDSAFWRFCKGMDIPSSLKKKIELFKTSGKLVREDDELFAEVAWQQVMIGQGLIAEDHHPLTDALSDEQLNELFSNLKTLINSTVEQLPSHSQFLEKVQN

SEQ ID NO: 87334 - protein, 513 aa, Pseudoalteromonas sp.
  misc_feature (1)..(513): tr|A0A0Q0H5V5|A0A0Q0H5V5_9GAMM Flavin-dependent tryptop han halogenase RebH OS=Pseudoalteromonas sp. P1-26 OX=1 723759 GN=rebH_3 PE=4 SV=1
MQKNEVKKVVILGGGTAGWLSAGLIAAQPHLTHNAQITLIESPDIATIGVGEGTWPTMRQTLKTIGISESEFIQRCDASFKQGSRFDGWCDDEGDAHYYHPFSLPVAYQQLNIAPYWFANKDAVSFSHAVASQTYLCDHHKAPKNHLHSAYQGEANYGYHLDAGKFAMLLQQHCTTNLNVEHIVSHVESINSDEDGYISSLQTRDHGTIAGDLFIDCSGTHAKLLHQHYGIELIEQHDVLFNDRAVAVQVPYLNPQQEILSYTKATAQDAGWIWDIGLQSRRGLGMVYSSRFASSEDAKQALSHYIAKTQPGTAQNELTFREISFTPGYRRRFWYKNCLAIGMSAGFIEPLEASALVMVELGLNNLLANFPTHRAAMPTLAKRFDEQCHYRWQRIIEFLKLHYVLSKRTSPYWQAHKEANSIPLQLQENLALWQYQSPWLNDFDRAQEVFSAASYQYVLYGMKQLPQFPVLAMPAAIIEHFSANQQQAKRGLQQLPTNRELLNHIQQFGIQPI

SEQ ID NO: 87335 - protein, 589 aa, Myxococcus xanthus
  misc_feature (1)..(589): tr|A0A4Y6CAM4|A0A4Y6CAM4_MYXXA Tryptophan halogenase OS =Myxococcus xanthus OX=34 GN=BHS06_06020 PE=4 SV=1
MELLMSGAWEGKLYDVIVMGGGPAGATLAARLRKDPGLSVAIFESERFPREHIGESFVPSVVSSLQESGALGRVLASDCWIKKGGGYYSWDAVRPWSTFFEHKAYERDGYRRWAFHANRAELDDILLRHAEENGAEVFEGTPIKQVYRRDGFTEVDLGEKGSARCKVFVNASGRYSVTSLGGPREFLSSYRNIAIWSYIRKGKPAQSLPGDWNIFRESGVSPIGSFAFEDGWFWYIPIPLEVDGRREVVHSLGLVTDPRGLKSKRDYMSASVFMETARKVPFLRDLVADAELIYDEFRTTANYSRISHQMCSWENREIRVGDAAFFVDPLFSTGVHFALHHTAAAAVLVRAAFDEAMPEQHREDLWHDYDQMLRKQAQVFSLAIDQWYNEISLAHPGSVYWRERSERATFEVRNATFHYLVNGSLDEDLLHVISQGNDAVEALSETGAWRATFAQLQRLRPADDALVQLMPNVKFRKSVTLEHPIADSAEDKLDARPQAFDHGPYWESPEQHAHEVAPRFGRPSPCLRFYFEDGDPQDTVRILWNRPNSALLARLSQPHAYGPLLAGCSLSERVLLEQLLLKGMMKIIQ

SEQ ID NO: 87336 - protein, 499 aa, Pseudoalteromonas sp.
  misc_feature (1)..(499): tr|A0A0P9GE54|A0A0P9GE54_9GAMM Flavin-dependent tryptop han halogenase PrnA OS=Pseudoalteromonas sp. P1-9 OX=17 10354 GN=prnA PE=4 SV=1
MAIPKKIVVLGGGSAGWMAASLLHHSWANKGSEITLIESDMIGVVGVGEGSTPSLKYFFEKLQIAENEWMPFCNATYKCGISFPDWTSHLEENEYFHPFYSDHDWKTGQAFIHNCNVRRQGFDIQTRPNHYWLQAKLAKNKLSPKLKQAQNKELDYGYHFDSQKLGEFLKNRAIKLGIKHIIGTVDVVNNDDKGVHSLTLSCGKTINGDLFIDATGFASLLLQKTLKVPIISYEDYLLNDSAIAIPTETQTDNEISPQTVSRALSAGWAWTIPLRNRNGNGYVYSSKYITPEDAETELRAYLGISERADIKAHHIKMRLGRVAKHWHLNVLGVGLSQGFIEPLEATALSCIQYTVEHFIETVEQGSNDATTQQQFNQEINTVYDAIRDYISAHYRLNTRDDSAYWRDNRGAASPEKLSKILMSWDDSDSQFESTLQQLNAEVMYFSPSWYCLLAGKGRFSEATHALPQSVKVANVADIDNYCEQQALHFKPHYQALNNE

SEQ ID NO: 87337 - protein, 498 aa, Pseudoalteromonas sp.
  misc_feature (1)..(498): tr|A0A0P9JY06|A0A0P9JY06_9GAMM Flavin-dependent tryptop han halogenase RebH OS=Pseudoalteromonas sp. P1-9 OX=17 10354 GN=rebH_2 PE=4 SV=1
MTNQINNVVIVGGGTAGWLTASLLAKVLGKQISITLVESKDIATIGVGEATIPPIIPFNAAIGIDEKAFIKATNATIKLGIQFENWGQQGEHYMHAFGSFGKDFPFCNFLNYWLKAKEQGDTSSFWDYSINYQAAKRNRFDKLQHLPNTKLAGTSYAYHFDASLYAQFLRNHAEQLGVKRIEGKVIHVETHHNNGFIKSLTLENQEVVTGDLFVDCSGLHGLLLDKTLNVGFEDWRHWLPCDSALAVPCDHGENEIKPYTRSIAHDAGWQWQIPLTNRIGNGLVYASNHLSDDDAKQLLLSNLPGRALAEPKLIRFRTGRRLKQWHKNVVAIGLSSGFLEPLESTSIHLIQTAATRLVKHFPLMGINDGVVAEFNRQSQVEFERIRDFIILHYKLTERTDSAFWRQCKDMDVPNSLRHKMQLFAENALFFRQDDELFSEVAWQQVMLGQGIKPAQYHPLAHNLNNAQIKDLLESLKTLVAHTSDKLPTHNEFLKRFGN

SEQ ID NO: 87338 - protein, 516 aa, Rhodanobacter sp.
  misc_feature (1)..(516): tr|A0A1V3PGE7|A0A1V3PGE7_9GAMM Tryptophan halogenase OS =Rhodanobacter sp. C01 OX=1945856 GN=B0E50_12380 PE=4 S V=1
MEADPPVRRIVVVGGGTAGWMTALTLANTAYGSRLEVTVIESPQVATIGVGEGSTPFLRRFFEDLGIEEAEWMPACNATYKNGITFDKWSTRPGFESYFHAFASMLDNLTMTQFINNVHSRLNHADVYAHPDRFFIASRLARDCRAPKPAHSFPFDIWHGYHFDATLLGAFLLRKALERGVRHVARHVNEVILKDNGDIGSLRLEGDEILDADFFIDCTGFASLLIGKALKTPFVPYAENLFNNAAIALATPIDGPIMSQTVSTALKNGWAWKIPLTNRYGNGYVYSTDYCSPEQAETELRAHLGVLDADVPARHLKMRVGRVAESWNRNCLAVGLAQGFIEPLEATTLLFVQRTAYMFVAALEKGDLGAEARANFNQTINVQFEGTRDYIVTHYKTNTRTDTDYWRANAANTHLSRPLRHLLTTWLASKPIIPGLKKGVFGQGYPTMSWYSLLAGVGLFPDPQHMRPPTSEEAQHDLAQIDNLLERSAMNYPDQRELLQRIPLKSREPSLQVYLW

SEQ ID NO: 87339 - protein, 517 aa, Pseudoalteromonas arctica
  misc_feature (1)..(517): tr|A0A290S3T4|A0A290S3T4_9GAMM Uncharacterized protein OS=Pseudoalteromonas arctica A 37-1-2 OX=1117313 GN=PAR C_a2186 PE=4 SV=1
MNDDIKSIVIVGGGTAGWLSAGIIAAYLQKHHSKKINITLLESSDIPTVGVGEGTWPTMRRTLKDMGIRETEFIKKCNVSFKQGAKFAKWVTGENDDYYYHPLEIPTGMFENNLATSWLNINNAQPPFAQYVSAQQSICESGLAPKQITTPEFSAIANYAYHLDAGLFATFLKNHCIDNLNVKHIVGTVVGVNNCTNGDIKSVSLNNKIEIAGDLFIDCSGFKSLLLGENLGVGFKSCKDVLFADSALAIHMPYKDDEPICSHTLSTAQTSGWIWDIGLQTRRGIGHVYSSKHISDEDAKQQLFDYLNINKDQQSEYKVKKLSFEPGHREKFWHKNCVAVGLSAGFLEPLEASALLLVEISANFVAQQFPANRHVMNITAQRFNRIFSYRWERIIDFLKLHYMLSKRTDSPFWQAHCHQNTIPQSLKDNLSLWEYHTPSDNHFDHSQEVFPAASYQYVMYGMGFTGSSELYGNSESYFKKAIALVNNNQQYTQKLLNKLPTNKALLAQINQFGMQQI

SEQ ID NO: 87340 - protein, 516 aa, Pseudoxanthomonas sp.
  misc_feature (1)..(516): tr|A0A4Q8L5S0|A0A4Q8L5S0_9GAMM Tryptophan 7-halogenase OS=Pseudoxanthomonas sp. NML171200 OX=2480816 GN=EA660_ 17700 PE=4 SV=1
MDEAIRQVVIVGGGSAGWLTAGLIAAEHRDRHGPTLRVSVLESPDVPAIGVGEGTWPTMRDTLRRIGVGEADFVRACDATFKQGSQFVGWVDGGAHDRYTHPFTLPKGYGETQLAVAWAAQGAVPFAHLACFQPHLCDAGRGPKQFATPEFAAVANYAYHLDATRLGAFLRQHCVERLGVRHIVGHMDAVISHENGDIAALAVRDQPALEGDLFVDCTGLRALLLDAHYGIAPVGVSDTLFNDRALALQVPYADPDAPIACQTLSTAQRAGWIWDIGLSARRGVGHVYSSAFTSDEEAEADLRAYVEATGGPAAATLPPARRIDLQPGYRPTPWHRNCVAVGLASGFVEPLEASSLVLVELAAARLADEMPATRADMDLLAARFNETFAYRWQRVIEFLKLHYVLSRRTTPYWQAHREDASVPPRLRELLQLWRHQSPSRSDFPRSEEIFPSASWQYILYGMGVRPEPRPARRSEDLQAAQACFAESAALVQRMLPALPSHRALVEHIKAHGLPRL

SEQ ID NO: 87341 - protein, 491 aa, Shewanella hanedai
  misc_feature (1)..(491): tr|A0A553JUJ9|A0A553JUJ9_SHEHA Tryptophan 7-halogenase OS=Shewanella hanedai OX=25 GN=FN961_00290 PE=4 SV=1
MKKINRIVIVGGGTSGWMAAAALSNKLSVDQFEITLIESSRIGTIGVGEGSTPYLKHFMHSLGFQESDWMSRCDASYKNGIYFDNWNGDKNRYFHPFYFSLDVKPAEVFFNCANARRRGIGPHINGDNFFISGHLAQQHLSPIADKTLPAQAEYGYHFDAAKLAGVLSDLSCSRGVKHISADVIDVNQDDGGDVISLVLDDGGEIQGDHFIDASGFNALLIGKTLQVPFEPFGDELLNDAAVTVSTPRETREKLATYTQSKAMSAGWMWRIPLTSRTGNGYVYSSQYLSKEQAEDELAAELNLDASTVNFRHINMKVGMRSKPWSRNVVAIGLSHGFIEPLEATALMITQWSIEYFIQLLMEVETPNEQCRDKFNTEMTRLMLGVKEYVHGHYVTSKRRDSDYWRKATSEESISLRLSALLAKWKSGEDFDEFLHCNERDMAYFRPSWYALLAGMDYRDESLVMVHQMLDPNLIEQAQGYSKTVAEKYFNE

SEQ ID NO: 87342 - protein, 525 aa, Unknown
  misc_feature (1)..(525): tr|Q1YRF7|Q1YRF7_9GAMM Putative tryptophan halogenase O S=gamma proteobacterium HTCC2207 OX=314287 GN=GB2207_03 404 PE=4 SV=1
MNHKINRVVIVGGGTAGWLSAGIIAAEHCIGTKTSSPENPFQLTLVESPDIATIGVGEGTWPSMRSTLQKMGISETDFFRECSASFKQGTLFKGWRTGADDIYTHPFTPPQGYTEVNLAPHWQTAREQINFAQAVSPQSALFTDKLAPKQISTPEYAFNVNYGYHLDAAKFAEFLRKHCVEKLGVTHIKANVTGINSADNGDIASIATDSHGTIEGELFIDCSGSRALLIGEHFGIPVCSKSDILFNNTALAAQIPYTHENDPIESCTLSTAQSAGWIWEIGLPTRRGIGHVYSSDHNTEERASEELLAYIASTVSDQAAAAATLRKVKFSPGHRAKFWHKNCVAIGMSAGFIEPLEASALVLVELSAAMIAEQLPANRQIMDLVAKRFNDKFLYRWDRIIEFLKLHYILTQRRDTEYWRDNCESSSVPEQLVDLLALWRHQSPWHRDNNNVDDMFPSASFQYVIYGMDFETMPSQTQRRSELAERQRAGALFQENATRTQQLQTSLPSNRDLINKIYTFGFQKI

SEQ ID NO: 87343 - protein, 501 aa, Sphingomonas sp.
  misc_feature (1)..(501): tr|A0A396RRY2|A0A396RRY2_9SPHN Tryptophan 7-halogenase OS=Sphingomonas sp. ZDH117 OX=2305907 GN=D1610_04230 PE =4 SV=1
MNPIRSVVIVGGGTAGWMAAAAAARFLDDGRRTITLVESDAIGTVGVGEATIPPILGFNRLLGIDEAEFVRATQATFKLGIEFVDWGAIGERYLHPFGEHGRDFEGVAFHQFWLKHRAEAGIGPLSDYSMSSVAAAAGRFARPVPDPRSPLSGLGYAYHFDAGLYAAFLRRRAEAHGVTRIEGRIAAVERNGETGFVEAVVLDDGRRVTGELFIDCSGFRSLLLGETLGVGYRDWSHWLPCDRAIAAPCERTEPLLPYTRSTARPAGWQWRIPLQHRTGNGIVYAAAHMADDEAEALLLANLDGAAAGAPRRLSFTAGVRERLWDRNVVALGLSGGFIEPLESTSIHLIQTGISKLFWLFPDTRFSTVERDEYNRLMIDQFEYIRDFIVLHYKATRRDDTPFWRYVRDMPIPDSLAHKIALFREKGRVLRYDHDLFAIPNWVAVMLGQNIMPDGYDPMVDSMDDARVLSAMRQIAEANAAAARQMPTHADYIARHCAASPV

SEQ ID NO: 87344 - protein, 508 aa, Shewanella hanedai
  misc_feature (1)..(508): tr|A0A553JIL9|A0A553JIL9_SHEHA Tryptophan 7-halogenase OS=Shewanella hanedai OX=25 GN=FN961_21385 PE=4 SV=1
MDIKKVVIVGGGTAGWLAANHLGKALLNTEGVSVTLIESPDIPTIGVGEGTVPAIRKSLQSFGISETEFITQCDVTFKQSIKFSNWLNKDNHGSDNSFHHLFNIPSPLGGDLTPFWLNNRDYDYSNLVSPQFVACEALKAPKKITTPEYAGALGYAYHLNAAKFAKLLAKNGRDRFCVEHIIANVSEVKLNVSGAVGSLVTDTHGELVYDFYIDCTGFEALIIEKALKVPFVDKSAQLLVDRAIAVQVPTNINAPIPPFTIATAHQAGWIWDIALTNRRGVGFVYSTKYMDDETAISKLDKYLGGVLSDLSYRVLPMKVGYREKFWHQNCVCLGLAQGFLEPLEATSILLTDFAASYIANRFPKSVEQIQSIQPQFNQVMEYAWERVVEFIKLHYCLSDRTDSQFWIDNRDPSTIPDELKRRLSLWESYVPNREDFFSKFEVFDLDNYLYVLYGMKYHTQVKNLTNEQLHLANQQSLQIAKMGKQLAEELPDHRELLNKIKEHGLQSI

SEQ ID NO: 87345 - protein, 526 aa, Shewanella hanedai
  misc_feature (1)..(526): tr|A0A553JQL9|A0A553JQL9_SHEHA Tryptophan 7-halogenase OS=Shewanella hanedai OX=25 GN=FN961_08640 PE=4 SV=1
MQKPTKKIVIVGGGTAGWITAGWLAAHHRTYDATSRVEVLLVESPNTPTIGVGEGTWPTMRNSLIKMGISETDFIRECDATFKQGAKFAKWVDGTQDDFYYHPLVLPQGFTQQDLAPYWSSQQKQTSLSADKHSFSNAVCFQESVCEQGLAPKTIRTAEYSDVANYAYHLDAGKFTDFLKRHCIEKLGVTYVSADVVAVNAHANGDIASLTTHVDNMPNGDISGDLFVDCTGFSSLLLGKHYQVPFIDCSDVLFIDTALAVHVPYDDADSPIASHTISTAQDAGWIWDIGLQHRRGVGYVYASKYTNEAAAMQALADYIGPKFTSLKVRKIPIHSGHRETFWHKNCVAVGLSAGFLEPLEASAIVLIELSAQMISEQLPANREVMDIVANRFNQTFRYRWDRIIDFLKLHYVLSQRDDTDFWKDNRDPATIPDSLKDLLKIWQHRAPADMDFTSNNEVFPAASYQYVLYGMGFETDFSMTPHMLNDWHTAHKQFAKNEHLIERALASLPTNRELINKIHQYGFNDL

SEQ ID NO: 87346 - protein, 513 aa, Microbulbifer thermotolerans
  misc_feature (1)..(513): tr|A0A1I1PWH9|A0A1I1PWH9_9GAMM Tryptophan halogenase OS =Microbulbifer thermotolerans OX=252514 GN=SAMN05660479 _03263 PE=4 SV=1
MLQGPFYFSLHERVFQVSDGNIKKLVILGGGTAGWMTAALAAKVLGKVIDITLVESDRIGTVGVGEATIPPIIHFNRALGIDEREFLTATKGTIKLGIQFENWLQRGDSYMHAFGSIGKNLAFCDFHHIWNRSRLSGDTSSFWDYSLNYQAAINNKFAPLTHIQGTNLPGISYAYHFDAGLYAQFLRRYSEGRGVKRIEGMVKEVRVRSDNGFIQGLLLESGLEIDGDLFVDCTGMAALLIEKTLGVGYEAWSQWLPCDRAMAVPSASAKPIVPYTRSIAHEAGWQWRIPLQHRTGNGLVYSSKHWSDDRAREALMSNLDGEPLAEPRVIPFRTGRRGEQWCRNVVSIGLSSGFLEPLESTSIHLIQTAATRLMKMFPHRGIRAEEVAEFNRQSRVEIEHIRDFIILHYKANQRRDSDFWRDCEAMGVPDTLSEKVELFRRTGKVFRDYDDLFSEAAWQQVMIGQGIVPEDYHPVADALSDEQLGDLMASLRTLIDGTVNSLPEHEQYLPNVG

SEQ ID NO: 87347 - protein, 530 aa, Xanthomonas translucens; identical to SEQ ID NO: 86477
  misc_feature (1)..(530): tr|A0A0K2ZYD2|A0A0K2ZYD2_XANCT Tryptophan halogenase OS =Xanthomonas translucens pv. poae OX=227946 GN=XTPLMG72 8_2662 PE=4 SV=1

SEQ ID NO: 87348 - protein, 501 aa, Streptomyces sp.
  misc_feature (1)..(501): tr|A0A0A8ENB8|A0A0A8ENB8_9ACTN Tryptophan 5-halogenase OS=Streptomyces sp. 769 OX=1262452 GN=GZL_02919 PE=4 SV =1
MTASYLRAALGESINVTVIESKRIKTIGVGEATFSTVRHFFDYLGLSENDWMPKCNATYKLGIRFENWRAKGHYFYHPFERLRVVDGFPLTEWWLNKKPSDRFDQDVFLMSEICDTMRSPRYLDGTLFEQDFVERGGSMDLERSTLAEQATQFPYAYQFDASLLADFLTGYATARGARHIEDDVVEVVRDERGWISHLKTREHGELAGDLFIDCTGFAGLLLNKTLGEPFVSYQNTLPNDSAVALRVPHDAEHTRLRPCTTATAQEAGWIWTIPLFERIGTGYVYASDYTTPEEAERTLRAFVGPQAADVEANHIRMRIGRSRQSWVNNCVAIGLSSGFVEPLESTGIFFIQQGIEELVKHFPDAKWDPKLRDSYNRTVANAMDGVREFLVLHYRTAARNDNAYWRDAKTRELPDGLAARLEAWQSKLPTEETIFPHYHGFEPYSYHAMLLGLGGFEAKAAPVLAYMDDSRAAQEIQRLKDQARDIAKRLPSQYEYLAQMH

SEQ ID NO: 87349 - protein, 409 aa, Caballeronia arvi
  misc_feature (1)..(409): tr|A0A158HNM1|A0A158HNM1_9BURK Tryptophan halogenase OS =Caballeronia arvi OX=1777135 GN=AWB74_02016 PE=4 SV=1
MNVSVDVAIIGAGPSGAVAAALLRKAGHSVLVLERQHFPRFSIGESLLPQSMAYLEEAGMLQDVVEAGFQYKNGAQFVHRDRAAAYDFRDKHSDGWGTTFQVERAVFDDLLIRRAAKQGAEVRFGHAVLEMKTGDAPVLEVADEAGARYQVHARFVLDASGFGRVLPRLLNLEAPTRLPTRAAIFTHVRDGIAPETHDRNKITVAVHPEHGDVWYWMIPLANGRSSVGCVAQAAFLDVPEAEREAKLRALIRCEPTLNRLIGDAPFLMPVRHIGGYSANVERLHGPGYALLGNAGEFLDPVFSSGVTIAFRSAHLAVQTLTRQLNGEMVDWHAQYDAPLRKGIDTFRAFVENWYTGKLQDIIFAREQTPLIRRMISAVLAGYAWDETNPYVVDPVRRLNALHEVCMQQK

SEQ ID NO: 87350 - protein, 505 aa, Xanthomonas translucens
  misc_feature (1)..(505): tr|A0A199P4S4|A0A199P4S4_XANCT Tryptophan halogenase OS =Xanthomonas translucens pv. poae OX=227946 GN=A6R73_00 120 PE=4 SV=1
MAQIRKVVIAGGGTAGWIAACALAHQFRDLLDITLIESEQIGTVGVGESTVPPIRSFHRFLQIDEQEFLRAVAGTFKLSISFENWRRPGERYLHPFGLTGQSTLACAFHHFWLEAQRRGMLSELGDYCLETVASRMDRFALQQSPPVNYAYHLDAGLYARLLRGHAERHGLKRVEGKIQQVRQHAESGFVEALLLEDGTLVEGELFIDCTGFRGLLIEQILHTGYEDWKQWLPCDRAVAVQTEAVAAPVPYTRAIAHAAGWRWHIPLQHRVGCGLVFSSAHLSDEEARAKLLHDAAAPPIKEPWLVPFRTGRRRKAWNKNVVALGLASGFIEPLESTSIHLTIAAVMRLITLFPSEGIAPSMVDLYNAVSRAEMEHVRDFIILHYHANQRDEPMWQACREMALPDSLQQRLRAWRERAHAWQGADELFRVDSWIHVLLGQGIVPAQHHPLARALPDQPLQQFLDAIRQPIDRAVAQMPSQQDFIARYCKAGPEVWAGRAPVAAPA

SEQ ID NO: 87351 - protein, 498 aa, Pseudoalteromonas spongiae
  misc_feature (1)..(498): tr|A0A290T4M3|A0A290T4M3_9GAMM FADH2 O2-dependent halog enase I OS=Pseudoalteromonas spongiae UST010723-006 OX= 1117319 GN=prnA PE=4 SV=1
MTNQINNVVIVGGGTAGWLTASLLAKVLGKQISITLVESKDIATIGVGEATIPPIIPFNAAIGIDEKAFIKATNATIKLGIQFENWGQQGEHYMHAFGSFGKDFPFCNFLNYWLKAKEQGDTSSFWDYSINYQAAKRNRFDKLQYLPNTKLPGTSYAYHFDASLYAQFLRNHAEQLGVKRIEGKVTHVETHHNNGFIKSLKLENQAFVTGDLFVDCSGLHGLLLDKTLNVGFEDWRHWLPCDSALAVPCEHDENEIKPYTRSIAHDAGWQWQIPLTNRIGNGLVYASYHLSDDDAKQLLLSNLPGKAIAEPKLIRFRTGRRLKQWHKNVVAIGLSSGFLEPLESTSIHLIQTAATRLVKHFPLMGINDRVVAEFNRQSQVEFERIRDFIILHYKLTERTDSAFWRQCKDMDVPNSLRHKIQLFAENALFFRQDDELFSEVAWQQVMLGQGIAPAQYHPLAKNLNDAQIKDLLESLKTLVAHTSEKLPTHNEFLKRFGN

SEQ ID NO: 87352 - protein, 510 aa, Sphingomonas sp.
  misc_feature (1)..(510): tr|A0A1S6FJF0|A0A1S6FJF0_9SPHN Tryptophan halogenase OS =Sphingomonas sp. LM7 OX=1938607 GN=BXU08_08535 PE=4 SV =1
MRATDALRKVCIVGGGTAGWIAAAVMAEHFKGKLFEIELIESDDIGTIGVGESTIPPFMELIAKLGINEQEFVRATQASFKLGIEFEDWHKKGESYFHPFGSIGQPVELSEFYQCWLKAKRSGQPFGLMDFAPAAAMAKDGRFMLPFKAQKTPVGGAAYALHVDAKRVAQFLRGHAEARGVKRTEGIVSDVRLDDRGFVDTLVLKDGREVTADFFIDCSGFRAVLIEKAFGVGYEDWSEWLFCDRAIAAQTQNVGPPRPYTLAQAQDYGWRWRIPLQHRTGNGHVFCSEFLSDDEATRTLLDQVEGDVVAGPIVVPFKTGVRDKIWHKNVLSLGLASGFIEPLESTAIHLVYRGMDFFFRYLPDRHCNPRLADEYNRRMTADYTEIRDFIVLHYCATQRDDTPFWRKCRDMTLPDSLQARIELFRVNGVLREGMDELFRAVSWHSVLEGMGIHPATYHPLVDRIDEAWLFEGMSQVRAQLAQVVGTLPTHQEFIDAHCRADAVDLGKPAR

SEQ ID NO: 87353 - protein, 413 aa, Amycolatopsis decaplanina
  misc_feature (1)..(413): tr|M2Y7R2|M2Y7R2_9PSEU Tryptophan halogenase OS=Amycola topsis decaplanina DSM 44594 OX=1284240 GN=H074_20607 P E=4 SV=1
METRSTETADVVIIGGGPAGSTAAGLLAQQGIDVILLEREKFPRYHIGESLITGCVGVIDELGIRDRLENFGFVKKFGGSLVWGKGGRWSFNFAEGDPEFTNAYNVRRADFDAMLLGRARELGTRVLEEAIVKEVLLEDGRVTGVRHAVRGGAETEIRAKLVIDASGQARVLGRHLTEVHWHEDLRNVAVWTYFQGGVSLTGEETGNIFIEHVPGGWFWYIPLHDGTHSVGFVTPANEAGETRLSMPELFTTKIAESVHLKKYLENATRVSAYRNARDWSYACDRFAGPGWMLMGDAAAFVDPLFSTGVTLAMLAARSVAHAVPVMLGNPERAESIARGYEKSYREFLENILSFVRFFYDAGLNREAYYQYAQQLVDPSRLFFPRKDFVTLVSGLNSLNPIFELDVTGTGTRS

SEQ ID NO: 87354 - protein, 505 aa, Microbulbifer thermotolerans
  misc_feature (1)..(505): tr|A0A143HP58|A0A143HP58_9GAMM Tryptophan halogenase OS =Microbulbifer thermotolerans OX=252514 GN=A3224_13780 PE=4 SV=1
MTTDKRIKSLVIVGGGTAGWMAAASLQRHFSGTPLKITLVESPDIGTIGVGEATTPTFRRFCHRLGLQDLDVMRAIGATCKLGIQFNHWKNQNHSFFHPFSVFGQSLNQVDFLHYWLRARKAGLDAQLTDFSLGAGLALAGKFSPPSPNPPSTLSVYDWALHLDAGRFAALLREKAVAGGVEHVRATVHRVTRAENGFVHSLLLDDGRELAGDLFIDCSGFRGLLIEDALQTGFEDWSHWLLCDGAWVAPSARETAAKPYTQVNAHSAGWQWHIPLQERSGNGRVFSSRYIDAEQVRDEFSQSLGESALDEPRLIRFKPGIRRRAWNKNVIALGLSAGFIEPLESTSIALIETGIERLKTLFPQRDCHPDIATEFNEQTRLEYERVRDFVLLHYALNGREDSDFWRECRAMAKNGNLPESLQRKINVFLSSGYLLRYRWEMFQPASWLAIFAGFDRLPHSWNLAADALDQTQLLQGLRGMRDSVRQAVREAPAHQEFIARYVQKK

SEQ ID NO: 87355 - protein, 531 aa, Sphingomonas sp.
  misc_feature (1)..(531): tr|A0A396RLJ5|A0A396RLJ5_9SPHN Tryptophan 7-halogenase OS=Sphingomonas sp. ZDH117 OX=2305907 GN=D1610_11825 PE =4 SV=1
MGSAGRSAARRRADRTAAGDAFGGEAEGGCDDPSPGGTRGGVIRRVVIVGGGTAGWMAAAALARGLGTTHAITLIESASIGTVGVGEATVPPIRDFNRYLRIDEDEFVRATSGSFKLGIEFVGWNGEGSRYFHPFGFLGPDMAGADFHHVWLRHLAEGGDPDIARINPETAAAREGRFARDTRHGPLHHAFHFDAARYATFLRGYAEARGVARIEGEVTAVERDGESGDIAAVRLASGAAVAGDLFVDCSGFRGLLIEGALETGYVDWTCWLPCDRAVALPTARIADPAPFTRSTAREAGWQWRIPLQHRTGNGYVYCSSFLGDDEAASLLAARVDGEPLAEPNRLRFTAGHRRLFWNRNCVAIGLAGGFLEPLESTSIHLIQTAIIRLLALFPGDHVDPRLAERFNREAQAEYEGVRDFVVAHYAVASGIDTPFWRAIGEAPLPESLAERIAVFRATGTVLYERGDLFGPTNWYAILTGQGCAASAYHPLVGALDGKLVRDRIAALEARCAQMIAGLPGHADFIAAHCGA

SEQ ID NO: 87356 - protein, 501 aa, Sphingomonas sp.
  misc_feature (1)..(501): tr|A0A1S6FIQ8|A0A1S6FIQ8_9SPHN Tryptophan halogenase OS =Sphingomonas sp. LM7 OX=1938607 GN=BXU08_06855 PE=4 SV =1
MAGPFRIVIVGGGTAGWMCAAACASKLDPARYDVRQIESEEIGTVGVGEATLPQMKDFNDFLGIDEAEFMAATQATFKLGIEFVDWGQIGNRYIHPFGNFGRPIGEAEFFHYWLRARETAGPLSDYCLPIVMAWQNRFGFAASDPADPRSAFSHAYHLDASLYARYLRGWAEARGLKRIEGKITQVAQHPESGDIASVTLEAGDVVQGDLFVDCSGFRGLLIEQTLATGIEDWSHWLPCDRAMAVPCERAGALTPYTRSTAVEAGWQWRIPLQHRTGNGYVYASAFLSDDEAATLLLSRLDGAPLADPRPLRFKACKRRKAWNHNIIAMGLAGGFLEPLESTSIYLVQMAVAFLLTLLPDRRGIDPALAAEYNRVMDVEYDRIRDFLILHYHATERDDAEIWRYCRAMPIPDSLADKIERFRHRGHIREYRDGLFGPPSWQAVFIGQGVEPAAHDVIADLIPDAVLAKRMHELRAVIASAAGAMPDHTAMVTRYCPAGPAA

SEQ ID NO: 87357 - protein, 514 aa, Unknown
  misc_feature (1)..(514): tr|Q1YUE3|Q1YUE3_9GAMM Putative tryptophan halogenase O S=gamma proteobacterium HTCC2207 OX=314287 GN=GB2207_09 901 PE=4 SV=1
MTKTVVIVGGGSAGWLTAGIIAARHNPLGEAGQGTKVILLESPDVANLGVGEGTWPTMRDTLRRIGISEGDFLRACDVGFKQGSQFINWQRGEGESYYHPFVPPAGYGSVNLAAHWLDKAVDSTFADAVSPQGKVCDLGLAPKTARTPEYAFGLNYGYHLNAGKFVELLKRHCVDKLGVDYQLGHVDQILSDENGDISALLLTAGDKISGDLFVDCTGFSALLIGQHYQVPFVSQRDCLFNDTALAVQADHADEDTPIASCTKSTAQSSGWVWDIALPTRRGIGHVFSSQHISVEKAEDELQRYLAADPALAKKQHSPRKITFQPGHREHFWHKNCVAVGVSAGFVEPLEASALVLIEKSAEFVSNNLPQDRGAMTVVAKRFNEIISKYWVDIIDFLKLHYVLTERTDSDYWRDHVRPQSIPDSLQDSLELWRSQVPWVSDGNNRAELFSAASVQYILYGMGFATQINSSRYRDWDKDALLADRLMRDNRGKTEALMASQPTNRDLLNLVRRTS

SEQ ID NO: 87358 - protein, 500 aa, Sphingomonas sp.
  misc_feature (1)..(500): tr|A0A396RY77|A0A396RY77_9SPHN Tryptophan halogenase OS =Sphingomonas sp. ZDH117 OX=2305907 GN=D1610_02040 PE=4 SV=1
MSPPAVRAIVVIGRDAPLWLAAATIAKALEPAGVMVTAIELPSALHPADVYPTLPALEALHNQLRIDEAALIRASRGAFSLGQNFVEPASGASGFLHAYGAFGTAIDGKDFFAYWLKARRHGLSVGLEDFSLTAAAARHGRLLIPDAETERYGRSDYGYHLPAAAYAGILKAVAIRDGVTALTASGANAVLASETGDIAALIVDGGEHIGGDLFIDATGGEGDLIGGALGVARESWRSCFPADRVLAANGPALSPLPIYAEVRAWRGGWTALHPTPARTHVAQAYASALASDEEALRGAEAACGFALADPAVRSSDPGRREAAWARNCVAIGSAACAFDPVHGVDLHAVQLGLIHLLACFPVGGAFGAQRAEYNRIMRSSFEQVRDFQSAHYALARYEGAFWASAREAETSPELAHTIATFRARGEVPPMEEQSFAPDSWRALFIGHGVTPESHLPVIDRTTPDEMKAQFRRMLGFVKEQVLRQPTHDEYLGRIADHAGG

SEQ ID NO: 87359 - protein, 502 aa, Sphingomonas sp.
  misc_feature (1)..(502): tr|A0A0Q4D8P6|A0A0Q4D8P6_9SPHN Tryptophan halogenase OS =Sphingomonas sp. Leaf10 OX=1735676 GN=ASE59_18285 PE=4 SV=1
MTDNRIRQIVVLGGGSAGWMAAAALATYLGRSVSVRLVESEEVGIVGVGESSVPHMKTFNSETLGIDERDFVTRTNSTFKLGIRFIDWGRVGDDYIHGFGTIGRGLGPLPFHQLWLKRFLAGRAGPLGDYSLQTVAAPAGKFQWSGPPGTPLSDIAYAYHLDAVLYARFLRELAERRGVERIEGKVVRVEQDGDSGNVQAIVLDDGRRIDGEFFIDCSGFRGLLIEQTLRTGYLDWRHWLPCDRAFAVPSASVGPPMPYTEAAARPAGWQWRIPLQHRVGNGYVYSSAHIDDDAAAATLLDTLDGEPLDTPRQLRFTAGRRAKAWNGNVVALGLAAGFLEPLESTGIYLAQAGIRRLLGLFPARDIDPALADRFNRETAFEYERTRDFLVLHYHATRRDDTPFWNDCRTMDVPDPLKEAIALFRADGRYFRNGEDFFALPSWVQVMIGQGIIPADYHPIVDAMPDAHLDQYLTRIRGEIASAVATMPMHRHFIDRHCKAEVA

SEQ ID NO: 87360 - protein, 490 aa, Sphingomonas sp.
  misc_feature (1)..(490): tr|A0A396RT70|A0A396RT70_9SPHN Tryptophan 7-halogenase OS=Sphingomonas sp. ZDH117 OX=2305907 GN=D1610_08945 PE =4 SV=1
MTQPPPAIVIAGGGVAGWLAAAILAGAYGADATRICVVDEGGEDMSLGPFGRGVVARPEWHAFAAGQGWDEPALMHAAKGAFALGIAFDGWRAPRHSWFMPLGECGAAMRSIAFHHLAGRLRQEGREIRIADYALAAIAAQAGRFAHPSPDPRSPLSSYDYALHLDGVGLAGFLRDAALSRGAREISSRIAGLERRGDGGIAALMLGDGRRVAGDLFIDCTGAPARLVREMAGARFDGWQRWLPCDRAITHHEQLADGAAPYASHAAHNAGWVRHVPLDGAHALALIYASGAMTDQAAQASMDGAPIAYEAGRWREPWIANCVAIGAAAGLGDPLQGFDLQLALGSVLRLVRLLPHVDGGDVEAREYNRLTASVLDRARDAAILPYRTNGRTGQAFWDAARAVDPPETLAHKIALWESRGRVALYDDEALEEDDWVAMFEGMGVRPRRYDPLADAIPVDRIDAHLARLREVLTRAAQAMPRHADYLRGPA

SEQ ID NO: 87361 - protein, 485 aa, Pseudoalteromonas byunsanensis
  misc_feature (1)..(485): tr|A0A1S1N9F1|A0A1S1N9F1_9GAMM Tryptophan halogenase OS =Pseudoalteromonas byunsanensis OX=327939 GN=BIW53_0867 5 PE=4 SV=1
MAAASLSRYAKGKNITITLIESPEINTVGVGEATIPNFVDFNRHLGIADADLIKATQATFKLGIEFEDWYQKGSRFFHPFAAYGAPLENVEFHQYINKLKAQGLTQDIEDYCFASVLAKKGAFAQPNEQSSNPVTHYAYAYHIDAVLYARFLTQFCKEQGVKHILATVSQVTLNAQSGMIESLKLSDEQTIHGDLFIDCSGFKGVLIEGALGIGLDENVNWLPCDSAVAVQTELQGEPTPYTRAIAKEAGWQWCIPLQHRMGNGYIYSSKFMSDEQAKQSLLNSVKGRTITKVKHFKFPKGRRKVIWHKNCFALGLAAGFLEPLESLGISLIQTALAKLLTFFPDKSFNQADIDEVNRLHNSELDRIIDFLLVHYKLTQRDDTAFWRYCQQMPIPQSLAHKLAVYKSQGHVVQYADESFKQASWLAMYYGFNLQPGRFDPRIKGLDNHLIEKNLAQLKDQLETGASQCLSHQAFINQHCKAQSDI

SEQ ID NO: 87362 - protein, 508 aa, Sphingomonas sp.
  misc_feature (1)..(508): tr|A0A396RWT3|A0A396RWT3_9SPHN Tryptophan 7-halogenase OS=Sphingomonas sp. ZDH117 OX=2305907 GN=D1610_01980 PE =4 SV=1
MKPAPIRRVVIVGGGTAGWMAAAVLSRGFAAERLAITLIESPEIGTVGVGEATIPPILTLNRLLGIDEDAMIAATSGTFKLGIEFRDWGAIGDRYFHPFGSFGADLNGVAFHQHWLNLRDGALDDYSLNAQAAKAGRFIRPVDDPGHVHSRMSYALHFDAVRYAAFLRDQAAARGVIHLPRKVVEVRQDARGHVAAVRLDDGAEVAGDLFIDCSGFRGLLIEQTLATGYEDWSHWLPMDRAVAVPTERIAPPVPYTRSTAREAGWHWRIPLQHRTGNGHVYCSRHISDDEAAADLMGALDAPAAGEPRLLRFVTGRRKKAWNANVVALGLASGFVEPLESTSIHLIQQGVVTLMSLFPDTGFAQADIDQYNRLMQAEAEAVRDFVIMHYHLTRRDDSPLWNEVRTMEVPDTLKARMALFRSRGRLFLESSELFREPSWVAVMLGQGLWPDAVDPVAGAMDEAEIRAKLERMRAVIARGVQAMPMHDDFISRHCAHAPERTGAALAATG

SEQ ID NO: 87363 - protein, 500 aa, Sphingomonas sp.
  misc_feature (1)..(500): tr|A0A0Q4CZN5|A0A0Q4CZN5_9SPHN Tryptophan halogenase OS =Sphingomonas sp. Leaf10 OX=1735676 GN=ASE59_09130 PE=4 SV=1
MKAGDRIRRVVILGGGTAGWMTAAALSRSFGRAVGVTLLESEEIGTVGVGEATIPTIHWFNDLIGLDEPAFLRATKATFKLGIEFVDWTAPGHRYFHPFGQYGATLPGVAFHHRWLKAQAEGLDVPLPALSLAAQLAAQGRFAKPAGDARSILSTLGYAYHFDAGLYAAHLRRLSEAAGVRRVEGRLRDVERNGDNGFVTALTTEAGERIEGELFIDCSGFRALLIGGSMGEAFEDWSHWLPCDRAVAVPCARVAATTPYTRSTARSAGWQWRIPLQHRTGNGYVFASRYLSDDEATATLLAHLDGEALAEPRLLRFTAGTRRRPWRGNVVAIGLSSGFLEPLESTSIHLIQSGITKLLTLFPDCDCDPALADRFNTVFARDMDGIKDFLILHYHATSGRSEPLWRHCRTMDLPETLVARAAQYRRSGRLILDSDDLFREASWLAVLNGQGIVAQGYNPLADAIDSATNRAQVRQIAEVIARAAPTLPLHDDALARAMAK

SEQ ID NO: 87364 - protein, 506 aa, Sphingomonas sp.
  misc_feature (1)..(506): tr|A0A0Q4DTV5|A0A0Q4DTV5_9SPHN Tryptophan halogenase OS =Sphingomonas sp. Leaf10 OX=1735676 GN=ASE59_00270 PE=4 SV=1
MTVASDIERVCIVGGGTAGWMTAAALANRLHGLGVRVQLIESDEIGTVGVGEATLPHIRAFNATLGIAESDLMRATEATYKLGIEFCDWGRIGDRYIHPFGNYGPTDDGIPFYHQWLRLREQGDTTRLDEYSFPVIAAENNRFRHPGSDVRQVESSFGYAYQFDASLYARFLRRYAEARGVERVEGKVVDVALDGERGHVRDVTLADGRVLDADLFVDCSGFRGLLIEGALRSGYDDWSNWLPCNRAVAVPTDSRGPLGPYTRATARTAGWQWRIPLQHRVGNGHVYCSSFISDDDAQAQLLANLDAPMQAEPRRLRFTTGRRRDFWKRNVVAIGLASGFLEPLESTSIHLIQDGITELLALFPTRAFDPADIDEYNRRMALHFERVRDFLLLHYVATEREDSEMWRHFRALTLPDSLQAKIDAWLTRGYVVPYQFGLFLPPSWVAVMLGQRLMPKGYDPRVLAQDDATIAARAAALRGAVAQAVQATPDHADYIRRSPAAAGLAA

SEQ ID NO: 87365 - protein, 493 aa, Unknown
  misc_feature (1)..(493): tr|Q1YUE4|Q1YUE4_9GAMM Tryptophan halogenase, putative OS=gamma proteobacterium HTCC2207 OX=314287 GN=GB2207_0 9896 PE=4 SV=1
MMKVVIAGGGTAGWMAACGLSSRLASLLDITLIESDEIGTVGVGEATIPPMRNFHRLMGIDEQEFMRETQATFKLGIEFDNWGNIGDSYIHSFGEIGQRSWMAEFHEFWMEAQAQGFGGSLEDYCLELKAAKAGKFATAIGDTRLNFAFHLDATRYAKYLRKKSEKAGVRRVEGLIEDVQKDPQSGEIKALLLKSGELIEGDLFIDCTGFRSLLLGESLGVEFDDWSHWLFSDRAIAVQTESIDEPVPYTRATAHPSGWQWRIPLQSRVGNGIVYSSRFMSDDEAKQTLLNNISGKMITEPRHIKYRTGRRQKSWHKNCVALGLASGFIEPLESTSIHLVMTAIIRLIRLFPFGDSSTALADRFNQESTTEIETVRDFVILHYKQTNRTDTDFWNAYRTMDIPDTLAHRLDIFKNNGYVWPDDVALFRVDSWVQVMMGQGLTPSGFHSAGKLTGSEGLQQSLAKLKTSIDEKVAKLPTHQQFIDHYCAAPKAD

SEQ ID NO: 87366 - protein, 498 aa, Sphingomonas sp.
  misc_feature (1)..(498): tr|A0A0Q4D9Y6|A0A0Q4D9Y6_9SPHN Tryptophan halogenase OS =Sphingomonas sp. Leaf10 OX=1735676 GN=ASE59_05635 PE=4 SV=1
MVNSIRQVVVIGGGTAGWMAAAVLAQQLAPNQCTVTLVESAEIGTVGVGEATIPPIMQFNRLLGIDEDDLIQATGGTYKLGIEFRDWGAIGDAYFHPFGHYGADLNGIPFHLHWLCNRPGSLGDYSLVAQAAYARRFVRTSDDPKHVHSRMAYALHFDAVRYAKFLSDHAIANGATRIEGRIVDAVRDERGHVSAVRLADGRSVAGDLFIDCSGFRGLLIEEALQTGYVDWSHWLPMDRAVAVPSVPVSAPDPFTRSTAGRAGWRWRIPLQHRVGNGHVYCSRYISDDEATAELLAGLDGEALAEPRQLRFTTGRRAAFWNGNVVALGLAAGFVEPLESTSIHLVQRGIVTLMSLFPDGGFDAATTTEYNRLMTREFEAVRDFIILHYHLTRRDDSLLWNHVRTMDVPDTLKARMELFAAHGRLMLDPHELFREPSWTAVLLGQGLWPRRPDPIAAAQDDVRRAETLWRMKDLIGRGVSAMPSHATFLNHPSRKDTSR

SEQ ID NO: 87367 - protein, 479 aa, Sphingomonas sp.
  misc_feature (1)..(479): tr|A0A0Q4DEV9|A0A0Q4DEV9_9SPHN Tryptophan halogenase OS =Sphingomonas sp. Leaf10 OX=1735676 GN=ASE59_04925 PE=4 SV=1
MSAAALSHALGKRCAITLVESDEIGTVGVGEATIPPIKLFNDTLGIDEAEFLRETKGSFKLGIEFVDWARQGHRYFHPFGTFGKPFDLVAVHQHWLAARAAGSSIPLDDLSMAWGAAKHGRFARPMADPRNVASTFDYAYHFDAGLYAAFLRRYAEERGVVRVEGKVADAALDGQRGHVASVTLHDGRTLAADLFIDCSGFRGLLIEGALATGYDDWTHWLPCDRAVAAPCVTGGDGLTPYTRSTARAAGWQWRIPLQHRTGNGYVYCSRHLSDDEAATTLLANLDGQALADPRFLRFTTGRRRSFWNRNVVAIGLSSGFMEPLESTSIHLIQTGIAKLLAYFPTRDFDPLLTNEYNRVAITEYERIRDFLILHYKLTTRDDALLWRDCANMDVPDTVALKIAHFRHGGRLVARDMDLFGPPSWLAVHIGQWNRPVALDPLLDTTNSTSFVGRLAGAIDGMARSMPTHAAFLQQIGAST

SEQ ID NO: 87368 - protein, 505 aa, Microbulbifer thermotolerans
  misc_feature (1)..(505): tr|A0A1I1P3F7|A0A1I1P3F7_9GAMM Tryptophan halogenase OS =Microbulbifer thermotolerans OX=252514 GN=SAMN05660479 _03019 PE=4 SV=1
MTTDKRIKSLVIVGGGTAGWMAAASLQRHFSGTPLKITLVESPDIGTIGVGEATTPTFRRFCHRLGLQDLDVMRAIGATCKLGIQFNHWKNQNHSFFHPFSVFGQSLNQVDFLHYWLRARKAGLDAQLTDFSLGAGLALAGKFSPPSPNPPSTLSVYDWALHLDAGRFAALLREKAVAGGVEHVRATVHRVTRAENGFVHSLLLDDGRELAGDLFIDCSGFRGLLIEDALQTGFEDWSHWLLCDGAWVAPSARETAAKPYTQVNAHSAGWQWHIPLQERSGNGRVFSSRYIDAEQVRDEFSQSLGESALDEPRLIRFKPGIRRRAWNKNVIALGLSAGFIEPLESTSIALIETGIERLKTLFPQRDCHPDIATEFNEQTRLEYERVRDFVLLHYALNGREDSDFWRECRAMAKNGNLPESLQRKINVFLSSGYLLRYRWEMFQPASWLAIFAGFDCLPHSWNLAADALDQTQLLQGLRGMRDSVRQAVREAPAHQEFIARYVQKK

SEQ ID NO: 87369 - protein, 518 aa, Teredinibacter turnerae
  misc_feature (1)..(518): tr|C5BK75|C5BK75_TERTT Tryptophan halogenase OS=Teredin ibacter turnerae (strain ATCC 39867 / T7901) OX=377629 GN=TERTU_2325 PE=4 SV=1
MSKSVLIVGGGTAGWITAAYMARMLAADTPGGVSITLVESDEIGILGVGEGTFPIIRKTMSRIGLDESELIRDADATFKQGIRFNHWKKNPAECPDDTYFHPFQVASQHTDMDLLPYWLLGVAGEVPWAEACTVQERVVESSLAPKLITHSNYNAPLNYAYHFDASKLAEVVRKRATSMGVRRLIDTVEDVKLDEQGAIASVIGRTHGELTADLYIDCTGFRARLIGETLGSEFTSYRDQLFCNRAVALQVPYEQPGCPIPSCTYATAQEAGWTWDIGLHNRRGIGYVYSSDHCSDDEAAATLKRYIGPAADNLTPRQLAFEAGFRKIQWHKNCVGIGLSVGFIEPLEATGISFAEVAALMLCNLFPWSGDTELSAKQFNAAMTKRFEHVIDFIKLHYYLSERTDTAFWRENRAPETASDNLKNKLEQWRHRPPSFLDIDASHDIFDENSWQYILYGMDFKTDISARADALRFYDDARQEFENIRKQSENAMNAVPTHRDLVSEVVTNGFRPKAKARA

SEQ ID NO: 87370 - protein, 504 aa, Sphingomonas sp.
  misc_feature (1)..(504): tr|A0A396RMD3|A0A396RMD3_9SPHN Tryptophan 7-halogenase OS=Sphingomonas sp. ZDH117 OX=2305907 GN=D1610_08950 PE =4 SV=1
MKDFAGEGRIRSIVIVGGGSAGWMAAATLARILGPDYASITLVESDEIGIVGVGEATIPQMATFNRMLGIDEDAFIRSTKGSFKLGIQFIDWARIGHRYFHPFGQIGVNMAGVSFHGYWLRMHAAGEAGRIEEYSLQALAAERDKFMRPIDAGRSPLSEIAYAYHFDAGLYARFLRSYAEARGVKRREGKIVDVRLRGGDGFVESVVMEDGSALPADLFIDCSGFRSLLLGKALGVGHVDWSHWLPCDRAVAVPCESVAAMTPYTRSTARACGWQWRIPLQHRIGNGHVYASSHMSDDEAAAVLLANLDGAPLAEPRLVPFRTGHRERFWVKNCVALGLASGFMEPLESTSLWLIQSGLARLMAMFPDRGFAQAEIDRYNRILITEYEEIRDFLVLHYKATERDDTPFWDYCRTMEVPERLAEKMRVFEAYGRTWRENEELFNDTSWFAVMLGQLIRPKSHDPVAEAMSLEETRERMAQIRTAVANSADYMPDHRAFIAEHCAA

SEQ ID NO: 87371 - protein, 485 aa, Sphingomonas sp.
  misc_feature (1)..(485): tr|A0A0Q4DEI5|A0A0Q4DEI5_9SPHN Tryptophan halogenase OS =Sphingomonas sp. Leaf10 OX=1735676 GN=ASE59_17620 PE=4 SV=1
MNQRFVILGGGTAGWITAHLLERAWPEASITVVESLEIGTIGVGEGSTPSLKRFFEIIGADEAEWMPRCGATYKAGIRFVDWSAAAPWRDYRHPFTTQIDVHTEEAFVLNCRNRRLGHDVPVRPDDFLLNGVLSAKGLVPVAPPNFPFRIEYGYHFDAGLIGQYLRELAVARGVVHRPAKVTGVERAENGDITALVTDRGESIAGDIFFDCSGFNGLLIERTLGVPFHSFSDNLFNDAAVVLPTEMTGRPPVETVATALSNGWRWSIPLQHRFGNGYVYARDFQSPDAAETELRQTLGVGDAVEARHLTFRVGQVARHWERNCIAVGLSQGFIEPLEATALHLVLGTVEQFIRHYREGGCTDRHRAAFNTVAAERMDGVRDYIVAHYKLNTRTDTDYWRANAANEALSDPLLHILDRWFRRADVAEELARQGQRSHFGNLSWHCLLAGYGAFPPVSEAARDDMDFYAARRVGAFLDGCALNFSPA

SEQ ID NO: 87372 - protein, 589 aa, Microcystis aeruginosa
  misc_feature (1)..(589): tr|A0A552F070|A0A552F070_MICAE Tryptophan halogenase OS =Microcystis aeruginosa Ma_MB_S_20031200_S102 OX=248625 4 GN=EWV92_05560 PE=4 SV=1
MNTTQALHYDVVIMGAGFAGLCQARHLMLKIPNIKVALVDPRPEQRTDKDLKIGESTIEIAALFLAKELGLHDYLIENHAPKQGLNFHWPKNPAKTETIDDYYHAGSNRQVPIPSFQINRSKFEQDLLKMDKAMGINFYNGQVVDVDLTPGDAIKTVKIKVGDERMELQAKHVIDAAGRKFIIGRKTDNLLFGPENLMGLNTGSAWVRVKNVDRTIFHSGYDPLNASTSHYYSTNHYFGEGHWLWMIPIDTQTMELSIGVIHHHDVINSTQVNSREKFHDFLQNNHQILANIIDSGEAVDFHYYPQISDKRNPLFSPDNWYVLGDTDYIFDAFYSYGTTTIALAIEGITEIVRAKLAGEESAEQKRAAYNEFNLAYSRIVNRLYWGHAKQLGQASVMSWRIYFEYMWWFGVQVPMYVGKWHLDLTYIPIFLKTLNSNIDGLFADLNEQFTELADKDVNIGLMDCYRGDQLFKGYHTLKHFDDFLENTKFEPRRCNVFAGLKATCFYAALWYALFQWKGFGIQGCLHPHHIYHFLRLLGLSGQATIGELIYKFKTKGLPANSEIEAMRQEFKTYQYQPKLQPWLAEATNS

SEQ ID NO: 87373 - protein, 516 aa, Streptomyces venezuelae
  misc_feature (1)..(516): tr|F2RDM3|F2RDM3_STRVP Tryptophan halogenase PrnA OS=St reptomyces venezuelae (strain ATCC 10712 / CBS 650.69 / DSM 40230 / JCM 4526 / NBRC 13096 / PD 04745) OX=95373 9 GN=SVEN_6229 PE=4 SV=1
MLNRVVIVGGGTAGWMTASYFKAAFGERIDITLVESGSVGAVGVGEATFSDIRHFFEFLGLKEKDWMPACNATYKLAVRFENWRQPGHYFYHPFEQMRSVNGFPLTDWWLKNGPTDRFDKDCFVMASVIDAGLSPRHRDGTLIDQAFDEDGNEMQGLTMSEHQGKTQFPYAYQFEAALLAKYLTRYSVERGVKHIVDDVTKVELDERGWISAVKTAEHGDITGDVYIDCTGFRGVLINQALEEPFISYQDTLPNDSAVALQVPMDMERRGIRPCTTATAQDAGWIWTIPLTGRVGTGYVYAKDYLSPEDAERTLREFVGPAAADVEANHIKMRIGRTRNSWVKNCVAIGLSSGFVEPLESTGIFFIHHAIEQLAKNFPGEDWNPAHRDLYNNAIAHVMDGVREFLVLHYVAAKRSDTQYWRDTKTRAIPDSLAERIEKWKVQLPDSESIFPYYHGLPAYSYMCILLGMGGIDLAPSPALALSDPSAALQEFELIREKTERLVKVLPKAYDYFTQLG

SEQ ID NO: 87374 - protein, 499 aa, Sphingopyxis lindanitolerans
  misc_feature (1)..(499): tr|A0A2S8B8C8|A0A2S8B8C8_9SPHN Tryptophan halogenase OS =Sphingopyxis lindanitolerans OX=2054227 GN=CVO77_09105 PE=4 SV=1
MSENRQRRRVVIAGGGTAGWMMAAAIARTMGATVDLTLVESEAIGTIGVGESTIPPLVNFNRILGIAEPEFMRAAQATFKLGILFDNWKYDGDSYFHSFGLSGKDHWSAGFQHFWLRARAEGYPHSYDEYCLELVAGLQGKFAHLPEDRMNYAYHVDATLYGRFLRKLAEADGAKRVEGKIQTVELDGESGNIAALLLDGERRVEGDMFVDCTGFRGLLIDGALHAGFEDWGHWLPNDSAVALQSKHQGPPMPYTRAIAHDAGWQWRIPLQHRMGAGIVYSSRYLSRDAALDRLLSSLGEPLVEPIDIKFKGGVRRNQWVRNCVAVGLAGGFVEPLEATTVHLIQRAILRFIRLMPNGRVSERDAIEFNEQQRRDIEQIRDFVILHYKATERRDSPFWRHVAAMPIPDSLQQKIELFRETGRVFRKNEELFGENSWVQVMMGQGIEPQSWHPIAEKLSADELERFMEGLRESAARTAATLPDHQAYVARYCGAQAPQAA

SEQ ID NO: 87375 - protein, 497 aa, Microbulbifer thermotolerans
  misc_feature (1)..(497): tr|A0A143HRB8|A0A143HRB8_9GAMM Tryptophan halogenase OS =Microbulbifer thermotolerans OX=252514 GN=A3224_13675 PE=4 SV=1
MRDGSIKKLVILGGGTAGWMTAALAAKVLGKVIDITLVESDRIGTVGVGEATIPPIIHFNRALGIDEREFLTATKGTIKLGIQFENWLRRGDSYMHAFGSIGKNLAFCDFHHIWNRSRLRGDTSSFWDYSLNYQAAINNKFAPLTHIQGTNLPGISYAYHFDAGLYAQFLRRYSEGRGVKRIEGMVKEVRVRSDNGFIQGLLLESGLEIDGDLFVDCTGMAALLIEKTLGVGYEAWSQWLPCDRAMAVPSASAKPIVPYTRSIAHEAGWQWRIPLQHRTGNGLVYSSKHWSDDRAREALMSNLDGEPLAEPRVIPFRTGRRGEQWCRNVVSIGLSSGFLEPLESTSIHLIQTAATRLMKMFPHRGIRAEEVAEFNRQSRVEIEHIRDFIILHYKANQRRDSDFWRDCEAMGVPDTLSEKVELFRRTGKVFRDYDDLFSEAAWQQVMIGQGIVPEDYHPVADALSEEQLGDLMASLRTMIDGTVNSLPEHEQYLPNVG

SEQ ID NO: 87376 - protein, 516 aa, Pseudoalteromonas byunsanensis
  misc_feature (1)..(516): tr|A0A1S1N858|A0A1S1N858_9GAMM Tryptophan halogenase OS =Pseudoalteromonas byunsanensis OX=327939 GN=BIW53_1261 0 PE=4 SV=1
MNKSHYIENYVVVGGGTAGWISACLLASKLKDDPRKSVTLIEAPDIPIIGVGEGTVPSIRNTLKKIGISETELFRECDATFKQSIKFVNWNDKYRHRGKNFYHHLFDYPMPFGDDLSSYWKQQRNDELTSASFAQFVSIQYDVAESGLAPKDMTNAQYEGVCDYAYHIDAHKFAQLLKTHAIRNLNVQYIQDKVIDLKLDSSGHIQSLLLEQQGEKSYDFYVDCSGFSSFILGQKLQVPFKSQSDIILTDTALTIQVPAVDEAIPPYTISTAHQAGWIWDIALTQRRGVGLVYSSQFMDENAALEKLSRYTQMDLTDSSVRKIDMQIGYREKFWHKNCVAIGLSQGFVEPLEATAILLSDFSANLLCNKLPDSYQQLSLLASRYNQRVEYAWRGVVDFVKLHYCISDRNDSEFWRANRNPNSIPVSLQDKLALWQHCAISKDDFFSKFEVFDIENYLYVLNGMNFTGGSQFMSGQARHNYAEQVQRVKDTAAVYKQKLLSHRELINKIYQYGLPKV

SEQ ID NO: 87377 - protein, 505 aa, Hirschia baltica
  misc_feature (1)..(505): tr|C6XNI9|C6XNI9_HIRBI Tryptophan halogenase OS=Hirschi a baltica (strain ATCC 49814 / DSM 5838 / IFAM 1418) OX =582402 GN=Hbal_2454 PE=4 SV=1
MVDNRVKSVIIVGGGTAGWMAAAGIAKAIGSTNLQVTLIESEDIGIVGVGEATLPHLRYFIQSLGIDEREFMAATDATVKLGIEFVDWARVGDSYIHPFGDYGLPNDGIPFHQFYHKHQSNGPICDYSLPIVAARKAKFELPSQNASSVNSTYRFAYQFDATKFGPFLREHSERLGVKRVEGRIVNIEHSSDGNISALGTEDGRRFSADFFVDCSGFRGLLIDGALKTKWESWTKWLPCDRAIAAPCEHKGKLLPYTRATAKDAGWQWRIPLQSRAGNGYVYSSQFIANENAEREFLNSLEGAKLADPRVLKFETGKRKKLWSKNCLSIGLSGGFLEPLESTSIYLIQQGITYFLELFPEFKDHSIRATEYNRMMDIEFERIRDFLILHYHATEREDTEFWREMKYLDVPQSLKEKMELFKECGRVKTYANGLFLEPSWVAVYYGQRVIPDNYDSRVDMYPEDEVKTNLMRLKSLIARSADNMMPHEQWLKQFCKIPHSPKESLN

SEQ ID NO: 87378 - protein, 513 aa, Teredinibacter turnerae
  misc_feature (1)..(513): tr|C5BK76|C5BK76_TERTT Tryptophan halogenase OS=Teredin ibacter turnerae (strain ATCC 39867 / T7901) OX=377629 GN=TERTU_2326 PE=4 SV=1
MNPSQVKRVIIVGGGTSGWMCAAAIARASPPNTSITLIESSDIGVIGVGEATIPTLIEFNRFLGINENDLIRECHGTFKLGIEFSDWQALGKSYFHPFGFYGRDTPDFPFHQLWLRLKHMETQGLAPAEAAGEISDFNLCTAAAYQGRFAPAQGGADTILATMRHAYHLDSRLYGKMLRRYAEAKGVTRIEANIVKASCSPEGGFIESVLLESGESVCGDLFIDCSGFKSLLIEDAMQSEFVDWSHYLLCDRAIALPTELSGSPLPYTRATAGDAGWRWRIPLQTRMGNGHVYSSQFTDDDTALRDLQNAIDGTSLAEPLPLRFKPGHRHEFWVKNCVAIGLAGGFIEPLESTSIHLTQVGIQRLIQFWPAHGVNYAETAHYNSEMTEDYERIRDFIVLHYKATDREDTAFWRAVKNMAVPDSLSNRMELFRSSGRVVDIPQDLFRPHSWLAVMLGQKVQPRNYDAFVDRIPVESLLANMQHLKDAVNKTAASLPGHQDYINRCCAAAESSRV

SEQ ID NO: 87379 - protein, 514 aa, Altererythrobacter sp.
  misc_feature (1)..(514): tr|A0A2E1Y7Y1|A0A2E1Y7Y1_9SPHN Tryptophan halogenase OS =Altererythrobacter sp. OX=1872480 GN=CL574_05915 PE=4 SV=1
MAIDFEKVVIVGGGTAGWLSAAYLAARRPELQITLVEAPDIPTIGVGEGSWPTMRETLRIIGIPESQFLLECDASFKQGSRFDGWRTGGAEDSYLHPFTPPIPGDVKALITAWKQTDGRSFAELATPQAAVCMQNLAPRQRSMPDYAAALNYGYHFDAGKFARLLSRHAVNRLGVTHIRDQVTDILSEGPDRIAAVILRRGGQLSGDFFLDCTGMAARLIGEHYGTAWIDRSDVLFNDRALAVQVETQPDSPIASQTIGTAHKSGWLWDIALPTRRGIGCIYSSQFTEDAEAERTLKDYVATNLPWQEPEAIVPRKISFRTGHRERFWRGNCVAIGLSAGFIEPLEASAIVLVELSLKALADSFPVTREALPAYSERFNKLFHYRWERVVDFLKLHYVLSQRSEPYWKAHRDPASIPPSLACQLQLWRDHPPTQWDFPQVDEMFSAASQQYVLYGMGFAEPLSECSEDLEPVQAQLAAVREKARALTAAMPTNRTYLDALRSTHPANPREGEFA

SEQ ID NO: 87380 - protein, 497 aa, Pelomonas sp.
  misc_feature (1)..(497): tr|A0A0Q8GWT6|A0A0Q8GWT6_9BURK Uncharacterized protein OS=Pelomonas sp. Root662 OX=1736580 GN=ASD88_13160 PE=4 SV=1
MILGGGTAGWMTALALTKRARPGRPLAVTLVDSAAIGSIGVGEATVPAILDYLTSVQADVPALIRDSRATLKAGIAFQDWRAIGQRYFHGFGLYGASAGGVGFHQVLAWLQAQDGGQDLRLEDFNLCAQMALRGRFAAPPAQPEADHDIYRWALHLDAGLFAQHLRRQALGSGVQHLDGVFEHADIGPDSGAITAITLTDGRRLEADLFIDCSGFRGLLIRQALRQPWVSWRHWLPCDRAVAQPTAGSGPATPYTLAQALPAGWRWRIPLQHRIGNGHVYASAFMSDEQALQLLQAHQDGEALAEPNWIRFDPGHIAQPWVRNVVAIGLSAGFLEPLESTGITLIHSAIDKLLALWPDDPQAPALAAEFNRASLLEMERIRDFLVLHYALSERRDSEFWRHITAAPLPDTLVHKLAVYRANGHFVRHEWETFQDHSWLAVYDGLGVRPQQLDARLARFQAADVRQGCEAMQAAILRRAEQAPLSDAEVLARALQVAP

SEQ ID NO: 87381 - protein, 505 aa, Xanthomonas translucens
  misc_feature (1)..(505): tr|A0A0K3A2U2|A0A0K3A2U2_XANCT Tryptophan halogenase OS =Xanthomonas translucens pv. poae OX=227946 GN=XTPLMG72 8_3230 PE=4 SV=1
MIAAPLRNLVIVGGGTAGWMAAAALARVLGPDYRITLIESEQIGIVGVGEATVPHIKAFNNLLGINEAEFVRQTQGSFKLGIEFVDWHRPGTSYIHGFGTEIGHSLGLLPFQQYWFKQALAGKAKPLGAYTLNTVAAKRGKFMTSASDAPPNSPLGNIAYAYHFDASLYAAFLRRFSEQRGVTRREGIVEQVQLHPESGDVLSVRLASGDTIAGDLFIDCSGFRGLLIEQALQTGYHDFTHWLPCDRALAVPCAKVGPPTPYTRATARAAGWQWRIPLQHRTGNGYVYSSAHISDDEAAATLLANLDGAALADPRPLRFVTGRRKQVWNRNVVALGLASGFMEPLESTSIHLIQSGISKLLELFPREGISPVLVQRYNDRIAFEFDRIRDFLVLHYTATERDDSDFWRQCRAMAITPELQATLDLFGDSGRFYRNGDEMFAEISWVQVMVGQGILPRAYHPLVDQVPAADIERFVASIEQTIGHCVDAMPPHQAFIDRYCAAAPR

SEQ ID NO: 87382 - protein, 503 aa, Pseudoalteromonas spongiae
  misc_feature (1)..(503): tr|A0A290T308|A0A290T308_9GAMM FADH2 O2-dependent halog enase I OS=Pseudoalteromonas spongiae UST010723-006 OX= 1117319 GN=prnA PE=4 SV=1
MIKKVAILGGGTAGWLAANHLGHALSATDIEVTLIESEDVPSIGVGEGTVPFIKDTLQKFGICEVDLLLGCDATFKQGIKFTNWMDKTRHGECNHYYHPFESPYPNEFDVTNYMLGEGSELRFDDVTIQSAVCELGLAPKLVSSAPYQGVLNYAYHFDAAKFALLLARNAKERFNVKHLKATVENVQLDDTGNVKAVTSVNGDTLAFDFFVDCTGFASLLIDKALNVPFVSKADELLTDKALVKQVPLNPKQGIFPYTKATAHQAGWIWDIPLTTRRGTGFVYASEFMSEDDAHRKYARYLNLDADKLDVRKINMEVGYREVSWYKNCVCLGLAQGFLEPLEATSILLTDFTADLLAKNFPKNQSDADVMRDDFNKAVTYAWDRTTDFIKLHYCISDRQDSDFWLKNQSLAHSSEELKTRLAKFKIRPPHRQDFFSRFDLFDEKNYLYVLYGMRYPTSKPHCSEQEVKLSRELLARNKEMLSMAQEKLLLTSEWLTKLKQAVR

SEQ ID NO: 87383 - protein, 508 aa, Planctomycetaceae bacterium
  misc_feature (1)..(508): tr|A0A2E5VMR3|A0A2E5VMR3_9PLAN Uncharacterized protein OS=Planctomycetaceae bacterium OX=2026779 GN=CMJ81_1301 0 PE=4 SV=1
MNQSGQIKNIIIVGGGSAGWMAASLLHQGLGKLGCRITLIESADIGTVGVGEATTPDVVKMVQRLELDADDFMRRCQATYKLAIRFVNWMDGDGEFWHPFGPVGGFIDGRDLFHFWYRSVCEGESQASYCSYSVHQRLAELGKGPRNATEESHIIQHGSYAYHLDATAFAAMLKGIALGKGIVHFFDEVSDVVLDSGGAIESLQTKAGRELTADLYLDCTGFRGTLIEKAMGDEWIDWSDLLLCNRALVASIPQQEDISPYTTSTALSAGWLWEIPLSHRLSAGYVYSDKFLDEEQATKEFVQFAGSKGVGNVRPRSIQFRVGRRENFWHKNCVAIGLAAGFIEPLESTGLALVARGVDAIMQFLPDCRMSPMLAAQYNREVGLLYEEIRDFIVLHYLVNRRVDTGFWKASREVDVPDSLARALQLYDETGLLDRFRKNIFGEPSYYCICSGANRLPQHTLPITRYVEMEKILQVLSQIKSQNEQWVHDLPSHGELIAQIHRRGEKLL

SEQ ID NO: 87384 - protein, 504 aa, Pelomonas sp.; identical to SEQ ID NO: 84555
  misc_feature (1)..(504): tr|A0A0Q8GKL3|A0A0Q8GKL3_9BURK Tryptophan halogenase OS =Pelomonas sp. Root662 OX=1736580 GN=ASD88_13155 PE=4 S V=1

SEQ ID NO: 87385 - protein, 528 aa, Sphingobium barthaii
  misc_feature (1)..(528): tr|A0A4R6FPA6|A0A4R6FPA6_9SPHN Tryptophan halogenase OS =Sphingobium barthaii OX=1054037 GN=DFS08_105106 PE=4 S V=1
MSVDIPSLFTGNFDMVHPVRNIVIVGGGTAGWLTAGVIAARHRSRIGRGFSVTLVESPNVPIIGVGEGTWPTLRTTLSRMGISETDLFRECDAAFKQGARFARWTTGTPDDGYYHPLMLPQNFGQVNLAPHWLAGEGNESFCDSVCPQGRICDEGLAPKTIATAEYDALANYAYHLDAGKFAPFLQRHCCEKLGVRHVLADVEQVLMKENGDIRAIRTTQAGEIEGDLFVDCTGFKALLIEGAMGVPFRDCRDVLFCDTAIAMQVPYERPDSPMASHTISTAQSAGWIWDIGLPTRRGIGHVYSSSHISDEEAERELRAYIGPPADGLNARKIAIRSGHRETFWKGNCVAVGLAAGFLEPLEASAIVLIELSAKIIAEQMPACREVMDIIAARFNATTHYRWGRIIDFLKLHYVLTKRTDSEFWRDNVRDEGIPDRLKELMLLWRYQSPWFLDEFDRVEEVFPAASYQYVLYGMGFRTEVDQPALARDAHLAERARRENAAMMAKLRAGLPRHRDLIDKIVTHGLQPV

SEQ ID NO: 87386 - protein, 361 aa, Burkholderia pseudomallei
  misc_feature (1)..(361): tr|A0A0F6L4T3|A0A0F6L4T3_BURPE Tryptophan halogenase OS =Burkholderia pseudomallei MSHR4000 OX=1435370 GN=prnA PE=4 SV=1
MKHALGQACTFAATHAAVAACDPLQARALVLQLPALNRKRDVPGIVGLLSEFLPARGVPSGWGFVEAAAAMRDIGFFLGSLKRHGHEPVDVVPGLEPVLLDLARATGLPPRETLLHVTVWNPATADAQRSYTGLRDEAHLLESVRISMAALEAAIAATVELSDVPLRSPAFAQGCNALAAYLHKMVESIVYAYRFISVQVFYDELRPFYEPIRVGGQSYLGPGAVEMPLFVLEHVLWGSQADHQAYREFKETYLPYVLPAFRAVYARFAGEPSLVDRALGEARAAGARGEPVGAGLAALDRVFEVLLRFRAPHLKLAERAYEAGRSGPTIGSGGYAPSMLGDLLTLTRAARSRLRAALDGP

SEQ ID NO: 87387 - protein, 342 aa, Xanthomonadales bacterium
  misc_feature (1)..(342): tr|A0A2M7WWV3|A0A2M7WWV3_9GAMM Tryptophan halogenase (F ragment) OS=Xanthomonadales bacterium CG_4_9_14_3_um_fi lter_62_6 OX=1974107 GN=CO182_11735 PE=4 SV=1
HFDASLYAKLLRAYAEARGVRRSEGKVVDVGVRAEDGFLSGVTLADGRVLEADLFIDCSGFRGLLIEGALKTGYEDWSHWLPCDRAVAVPCAHGAALSPYTRSTAHAAGWQWRIPLQHRMGNGLVYCSQFSSDDAAANVLLDHLEGAPLAEPRFLRFTTGRRKQFWHRNCVAIGLASGFLEPLESTSIHLIQSAISRLLALFPDRDFDPIVAREYNRITELEYARVRDFIILHYHANQRDDAPLWRYTRNMPIPEPLQTKIDHFRRHGRLVAEVLELFQNPSWLAIFIGQEVWPERYDPLVDMRSDIDAARLLSGLHRVIAESVQVMPTHQQYIERHCRARA

SEQ ID NO: 87388 - protein, 505 aa, Xanthomonas citri; identical to SEQ ID NO: 85879
  misc_feature (1)..(505): tr|A0A0U5FMK6|A0A0U5FMK6_XANCI Tryptophan halogenase OS =Xanthomonas citri pv. citri OX=611301 GN=prnA PE=4 SV= 1

SEQ ID NO: 87389 - protein, 432 aa, Erythrobacter sp.
  misc_feature (1)..(432): tr|A0A167I999|A0A167I999_9SPHN Tryptophan halogenase (F ragment) OS=Erythrobacter sp. HI0063 OX=1822240 GN=A373 6_14240 PE=4 SV=1
AVQGTFKLGIQFVNWGNLGDSYIHPFGNYGYEVDGVSFHHLWQRNRMRGDKRPIQVFNLETMAAHFGKFARTEDYKRDDMPPMNYAYHIDAGAYARFLRAYAEKRGVVRREGRVAEVRRDGESGDVAALVLEDGSTIAGDLFVDCSGFRGLLIEQALETGYEEWTHWLPCDRAVALPCKRDDGSPPPPFTRATAHRAGWQWQVPLQHRNGNGHVYASAHMEGAEAHDILVANMAGKPTADPNFLRFVTGRRRKFWNHNVVALGLAAGFMEPLESTSIHLINTGINKLVALLSLDGITETQRSAFNRLTNKEYERIRDFLILHYHATARDDSEFWNYCRTMSVPDSLTEKMELFRANGQIFREDDELFTETSWAAVMMGQGIAMGGHNVMAHGIADQGVAKEVDGIEQSIRFLVEHMPGHGEYLQRYCPAPPA

SEQ ID NO: 87390 - protein, 497 aa, Pelomonas sp.; identical to SEQ ID NO: 82574
  misc_feature (1)..(497): tr|A0A0Q8GGY1|A0A0Q8GGY1_9BURK Uncharacterized protein OS=Pelomonas sp. Root662 OX=1736580 GN=ASD88_16480 PE=4 SV=1

SEQ ID NO: 87391 - protein, 510 aa, Pelomonas sp.; identical to SEQ ID NO: 84514
  misc_feature (1)..(510): tr|A0A0Q8GXN1|A0A0Q8GXN1_9BURK Tryptophan halogenase OS =Pelomonas sp. Root662 OX=1736580 GN=ASD88_09340 PE=4 S V=1

SEQ ID NO: 87392 - protein, 507 aa, Pelomonas sp.; identical to SEQ ID NO: 82585
  misc_feature (1)..(507): tr|A0A0Q8GRN2|A0A0Q8GRN2_9BURK Tryptophan halogenase OS =Pelomonas sp. Root662 OX=1736580 GN=ASD88_26340 PE=4 S V=1

SEQ ID NO: 87393 - protein, 501 aa, Sphingopyxis sp.
  misc_feature (1)..(501): tr|A0A1Q3V7W5|A0A1Q3V7W5_9SPHN Tryptophan halogenase OS =Sphingopyxis sp. 65-8 OX=1895852 GN=BGO58_03730 PE=4 S V=1
MSPMRLVIIGGGTAGWMAAACLRRFLPAGWSVSLVESDEIGTVGVGEATIPQIRLFNDALGIDEDEFLAATQGTIKLGIEFNGWTRPGHRYMHAFGAVGRGLGLLEFHQYWLRARAAGVAETLDHYSLNERAAYARRMQRDAPRTSPHLLEMPYAFHFDAALYAAFLRRRAEASGVERIEGKVVDVRLNGETGDVTGVALDDGRSVEGDFFIDCSGFRGLLIEGALETGYEDWSHWLLNNRAVAVPCAHGATPQLPWTGATTRDAGWQWRIPLQHRIGNGYVYCSDHVSDDEAVATLLANLDGPAQAEPNRLRFVSGKRRRMWNRNVVALGLASGFMEPLESTSIHLVQAGISRLLKMLPSGATDPAVAAEFNRQSDFEWERIRDFIILHFKATERRDTAYWRDRAEMPVPDTLAAKIELFRAQGLIFREHEELFTESGWLQVLVGQGVAPRAWHPLAEGIGADDLARYMAGVAAMVEAEVAQMASYDDFLAATSRAAVAA

SEQ ID NO: 87394 - protein, 431 aa, Rhodopirellula baltica
  misc_feature (1)..(431): tr|K5D8X7|K5D8X7_RHOBT Tryptophan halogenase OS=Rhodopi rellula baltica SH28 OX=993517 GN=RBSH_05723 PE=4 SV=1
MKDFYDCVVIGGGPAGGAAASIVADSGVSTLLIERDPVPRFHVGESLMPECYWPLERLGLIDQVKRSGWQTKKSVQFVTHTGKESAPFFFREHDERECSTTWQVERSEFDKMLYDRASELGADCFDQTRLIDVQTEPGETADQPIARAVVVRTADGTEKTIGCKVVVDATGQQAFLAGKMGLKEINPDLKKAAIWTYYRDAVRGEGDNDGATIILNTKSRDSWFWFIPQSRGITSVGCVGDNDYLLKGRGTPEEIFEEELANCPGLQPRLANATRVGKITTAKEFSYMTRRHSGPGWVLIGDALGFIDPVYSSGVYFALEMGVRAGDAIVEGLKKDDLSAEQLGKWTDDFKEGASKVRQLVHAFYNKDFSIGLFMKEHPEYRGNVTDLLIGRVFHEDAGKMFPALDRSIEMARANAMSKAESMAETKPMST

SEQ ID NO: 87395 - protein, 409 aa, Caballeronia hypogeia
  misc_feature (1)..(409): tr|A0A158CKP0|A0A158CKP0_9BURK Tryptophan halogenase OS =Caballeronia hypogeia OX=1777140 GN=AWB79_05552 PE=4 S V=1
MNVCVDVAIVGAGPSGAVAAALLRKAGRSVLVLERQHFPRFSIGESLLPQSMAYLEEAGMLQDVVEAGFQYKNGAHFVHRDRVSAYDFRDKHSDGWGTTFQVERAVFDDLLIRRAAKQGAEVRFGHTVLDMTTGDAPALEVADEAGTRYRVDARFVLDASGFGRVLPRLLNLEAPTRLPARAAIFTHVRDGIAPEAHDRNKITIAVHPEHRDVWYWMIPLANGRSSVGCVAHAEFLDVPEADREAKLRSLIQTEPTLNRLIGDAPFLMPVRHLGGYSANVERLHGPGYALLGNAGEFLDPVFSSGVTIALRSAHLAVETLKRQLNGEAVDWQAGYDQPLRKGIDTFRAFVENWYTGKLQDIIFATGQTPSIRRMISAVLAGYAWDETNPYVVEPVRRLNTLHEVCTRRE

SEQ ID NO: 87396 - protein, 509 aa, Unknown
  misc_feature (1)..(509): tr|A0A244C575|A0A244C575_9BACT Tryptophan halogenase OS =bacterium AM6 OX=1954209 GN=B0X78_00905 PE=4 SV=1
MNTANTTQGPIRRVVIAGGGTAGWLAGCALAHQFRQQLDITLVESEQIGTVGVGESTVPPIRTFHRFLQIDEQEFLRAVAGTFKLSISFENWRRPGERFIHPFGTIGQGTWATPFHHFWLDSLRRGMPSELGDFCLESAASLADRFSLQTQPQVNYAYHFDAGLYARFLRGKAEANGLRRVEGKIREVRQHPHDGSVASLVLDDGRVIEGDLFIDCTGFGGLLTEQTLHTGYEDWNEWLPSDRAVAVQTDSAEPPVPYTRAIAHEAGWRWHIALQHRVGCGLVFSSRHMSDDEAHAKLLRDVDGRPLRDPWLVPFRSGRRLQAWNRNVVALGLASGFIEPLESTSIHLTISAVVRLIQLFPSDGITPSLVALYNDVSRQEMEHVRDFIILHYHANQRDEPMWKACREMALPESLQVRLRAWRERAHAWQDPGELFRVDSWTSVLMGQGIQPGPPHPLAQAIGDADLRTLLHRIRQPVQHTVAKMPTQAAFIERYCKAAPDAWQRGRAVA

SEQ ID NO: 87397 - protein, 531 aa, Planctomycetaceae bacterium
  misc_feature (1)..(531): tr|A0A2E5VU60|A0A2E5VU60_9PLAN Tryptophan halogenase OS =Planctomycetaceae bacterium OX=2026779 GN=CMJ81_24400 PE=4 SV=1
MREQDRARRYKTTQPRRHKRITLMADENPNSPYRKVGIVGGGTAGYLTALALKKQIPHLEVTVVESESIPVIGVGEATTPLIVMFLHQGLGLDAAEFYRVVQPTWKLGIKFEWGLPGDYAFHYPFDRNDSWNAIQQTGDIRNGCLTSVFMKNDKSHMLRSAGGSKLTPIHNKTNYAYHLENECFIGYLRSKLKDAGVEMRLGTIQEVKLNEAGTAIDHLFSPELGNLSFDLYVDCSGFRSVLLEKAMGSKFISYADSLYTDSAWTVTRPNNGQPKPYTTAVTMDHGWTWIIPVRTEDHLGYVYSSGFCDDESALAEMKRKYPDAIDPKLVKFRVGRHEQAFVGNVMSVGNSFGFVEPLESTGIHMIISTILEFVRNFPKSDNDVTSRQTINTTTNATWDNIRWFLGVHFRFNKRFETEFWKTCREKVDISGFETIRQLFYEKGPFLENGIDENPDYRHLGRYTIFPWNAFDLFMLGQGELPHEVATKIPAKTRGDLANKAVVWDQIQLRALPQNEALAAIDTWPSLVGSRN

SEQ ID NO: 87398 - protein, 522 aa, Pelomonas sp.; identical to SEQ ID NO: 84486
  misc_feature (1)..(522): tr|A0A0Q8H6F5|A0A0Q8H6F5_9BURK Tryptophan halogenase OS =Pelomonas sp. Root662 OX=1736580 GN=ASD88_25085 PE=4 S V=1

SEQ ID NO: 87399 - protein, 502 aa, Planctomycetaceae bacterium
  misc_feature (1)..(502): tr|A0A2E7ENZ8|A0A2E7ENZ8_9PLAN Tryptophan halogenase OS =Planctomycetaceae bacterium OX=2026779 GN=CMJ77_17615 PE=4 SV=1
MIRDDTNQIRRILIVGGGTAGWMAAAYLQKHCPCQIALVESPNVPTVGVGEATLPALIDFIAELGLDEDEFMRRCHATYKLGIQFQDWFQTQHSFWHPFGVVGGEIDGVDLFHYWLKGRRLQRDESVYTDYSLQRTLAEAGRAHRRIGGKAVVRNYAYHLDAGALADYLKEVATSQGVRHLLANVEEVVADGQDRIRYVRFDDGRQVDADLYLDCTGFQGLLIEQALGDPYLDWSDTLICDRAVVIRLPANPRMMPCTEVTGGRAGWIWRIPLTHRVGCGYVYSSRHLSDEEAFMELSQFAGLAQIPKDAKQLKMRVGRRAHFWKGNCVSLGLASGFIEPLESTGIFLIQRALECLLDAFPDTSCSQPLQKLFNARMAEAYEETRDFVLLHYYLSQRRDPFWEDARQIALPDSLVERLELFDDTGAVVIPAAAVFPATSFYSIYAGEERLPRTYNPRVDATDFGQVCKLLDQIKNANQNAIAQLPRHQDLMRWLHEGEATSR

SEQ ID NO: 87400 - protein, 415 aa, Pseudomonas fluorescens
  misc_feature (1)..(415): tr|Q4KJH2|Q4KJH2_PSEF5 Putative tryptophan halogenase O S=Pseudomonas fluorescens (strain ATCC BAA-477 / NRRL B -23932 / Pf-5) OX=220664 GN=PFL_0467 PE=4 SV=2
MPTVEMERRQVVVIGAGPSGAIAAALLKRQGHDVLIVERQHFPRFSIGESLLSHCLDFVEEAGMLEAVQAAGFQLKNGAAFAWGEHYSTFDFGDTFSNGKPTTFQVQRADFDKLLADQAALQGVEIRYGEEIVAVEVERPLPQLDCRREDGSQYRIEADFILDASGYGRVLPRLLELEAPSNFPVRRAVFTHVEDRIDCEHFDRNKILITTHPEHRDIWFWSIPFSNGRCSVGVVAAQEHFAGRDGDLDACLRGFISETPSLAKVLQYAEWDTSVRTIGGYSANVSTLHGPGFALLGNAAEFLDPVFSSGVTIAMRSASMAAAVLHRQLQGQGVDWATEFAEPLKRGVDTFRCYVEGWYAGTFQDVIYHPGSSPEIRRMISSILAGYAWDERNPFVSEPKRRLKALSEVCARDRA

SEQ ID NO: 87401 - protein, 421 aa, Amycolatopsis decaplanina
  misc_feature (1)..(421): tr|M2YS06|M2YS06_9PSEU Tryptophan halogenase OS=Amycola topsis decaplanina DSM 44594 OX=1284240 GN=H074_02227 P E=4 SV=1
MSATLHGMPERFDVIVIGGGPAGATCAGLLAKEGHTVLVLERERFPRYHIGESLIPVGMRPLQELDLLERMEARGFERKYGGSLVWGNRDVPWNFSFMKAAEGTYAYHTRRADLDTLILDRARELGAYVVEETTVKDVLQSDTGRVTGVRFTLRGSAGDYEATASLVIDASGQSRVIGRKFSDITWHNELRNVAVWTYYDNCDRLPGDEWTNILIEGTDDGWFWGIPIDKGTMSVGYVTKSDIANADDQSLEQLFVTERDKTTRLKGLLANARQHAGYRTARDWSYTNETFYGDGWALVGDAAAFVDPLFSTGVALATLAGSSLSKVVHRILEHPAIEEKALDRYAGNYRAFFDEIRTFVERFYDRTKYKEYYYDLAQEVVDPEQLHAPSIDFVTLVSGLSGKHPLLNISLDDLIANVTEP

SEQ ID NO: 87402 - protein, 534 aa, Rhodanobacter sp.
  misc_feature (1)..(534): tr|A0A1V3PG17|A0A1V3PG17_9GAMM Tryptophan halogenase OS =Rhodanobacter sp. C06 OX=1945854 GN=B0E52_04940 PE=4 S V=1
MNDARIRRLVIVGGGTAGWLTAALLARALGSQLKILLVESAEIGTVGVGEATIPQILHVNRFLGLDEDDMLRAVHGTFKLGVQLNDFTRVGESYLHAFGDLGLPLGLTPFHHYWLRAVQGRPSAAGAGGAEAPSRGRPGAQSLWAHSLNAAAAAQNRFARMDKVPNSPLGGIRYAYHFDASLYGQYLRQHIAPGIVERIEGKIVDVRLHAEDGHIESLLLDNGSTVEGDFFIDCSGFRGLLIEGTLKTGYENWQHWLPCDRALAVGSAPGGPMRPYTQASARTAGWQWRIPLQTRTGNGHVYCSRFISDDEAAAQLLANLETEALGDPRPLRFVTGMRKLAWSRNCLALGLAAGFMEPLESTSIHLVQSGVNRLLAMFPDRHCDPKLIDEYNRQTRFEYERVRDFLILHYKATERSDTPFWRQCGAMDIPPELARRIELFRRSGMIFREGEELFTETGWLQVLLGQGIAPARHHPLADELSDQQLDHFLADVRTLVGRAVATLPPHHEFVARHCGMPAAAAARATPTTASTETP

SEQ ID NO: 87403 - protein, 490 aa, Planctomycetes bacterium
  misc_feature (1)..(490): tr|A0A517RH51|A0A517RH51_9BACT Tryptophan halogenase OS =Planctomycetes bacterium Pan241w OX=2527973 GN=Pan241w _32920 PE=4 SV=1
MQQFDVVIMGAGFGGSLTALLLDRVGLSVAIVDRGTHPRFAIGESSTPAAGYLLRSLSEQYDLPQFQPFCKHGTWQEHYPGLACGIKRGFSYFSHEPQHNFKAKPSHGSELLVTANLSDSLADTHWYRADVDNFFAEEVQKSKVVYLDQSEVTLERSDGWEITGTRKGEPIALQAAFVIDATGAAGIVPNTLGIERQTEFLTKSSAVYGHFASVVSWAEVLDQSHIDRSDYPFDCDRAALHQVLHEGWMWQLRFNNGITSAGFVLKEDQQTGGAEDVWRQMLEGYPSIAAQFADASLVAPESGLVSTNRLQRGWKKCAGENWALLPHTAGFIDPLHSTGIAHTLCGIERLVAALEQFWGKEELTSVMVDYSDSIQAELSLIDSLVAGCYLSLPHFDLFTASTLFYFAAATGFEHLRCSEGKQPLFLCADDTEFRQAVREWIHLLEQGADEIPQAIERAELLLKPWNRVGLFQPAIPNMYYYTAAPETEPR

SEQ ID NO: 87404 - protein, 424 aa, Rokubacteria bacterium
  misc_feature (1)..(424): tr|A0A2V6SHN9|A0A2V6SHN9_9BACT Tryptophan halogenase OS =Candidatus Rokubacteria bacterium OX=2053607 GN=DMD77_ 18330 PE=4 SV=1
MASAWDFDVAVIGGGPGGSSAATALARRGRTVLLLERDRFPRFHIGESQLPWSNEVFRALDVHDAIAEAGFVKKWGASFRTVDGATEQYADFQFAAETPSPQTFQVPRATFDEVLLRHSERSGAKVLEEHRALDAAFEPDGVVLRFVGPDDTEQAVRVGFVVDASGRTGFLTKKLGHHEFDPVLRNIAVHAQYEGIPRLEGRRAGDIRMFTRADMGWIWLIPISQSVTSVGAVIPQSVHRRESKAVPEDSLTHYLTGTAGLAPLLAHARRVSPARFDADYSYLGSSLAGDRWIAVGDAAAFLDPIFSTGVLLAMQAGLEAAEAIDDSLREGEPARHRFAACERLVRQRYHHFRRFAVGFYDPYFRDLWFRPASRLGIFGAILSVLAGNWRPSWMTRQRIRFFFTLVALRRFFRLPVTSGRIPEP

SEQ ID NO: 87405 - protein, 497 aa, Sphingomonas sp.
  misc_feature (1)..(497): tr|A0A1S6FPC7|A0A1S6FPC7_9SPHN Tryptophan halogenase OS =Sphingomonas sp. LM7 OX=1938607 GN=BXU08_18105 PE=4 SV =1
MTQPRKNVVVVGGGTAGWMVASAIAKLLPHAASVELIESAEIGIVGVGEATLPHLRAFIQTLGLDEAEFMAATHATYKLGIEFRDFGKPGDVYLHPFGVFGQPLNGVPFLHWWLRMHAQGRGGEIAEYSVANVMAVQQRFAVPAADPTTLLSTYGYAYQFDATKFGPFLRGFAEKRGVTRTEGRIVTVDRDGESGDVAAVVLESGARVEGDLFVDCSGFRSLLLGDALGEEWEDWSHWLPCDRATALPCASPRGEIEPVTRATAMAAGWRWRIPLQHRVGNGYVYSSAHLSDDAASDAILAAVDGEPLAEPRMLRFRAGRRKRSWSHNVVAIGLASGFLEPLESTSIYLAQAAITQLLDLFPIGPIEDADRDAFNTQIDYEYDRIRDFLILHYHASTRDDSEFWRYVRHMPIPDSLAEKIELFRRAGRIQRYSRGLFFEPSWIAVMIGQGIIPQAWDQRVDAANPGELGQALDRLRGQIAREVATLPGHRAALGLSA

SEQ ID NO: 87406 - protein, 512 aa, Pseudoalteromonas spongiae
  misc_feature (1)..(512): tr|A0A290TAA1|A0A290TAA1_9GAMM Uncharacterized protein OS=Pseudoalteromonas spongiae UST010723-006 OX=1117319 GN=PSPO_b1267 PE=4 SV=1
MTEDTKTINSIVIVGGGTSGWMTAAALANHAPLKHCKITLIESSKLGTIGVGEATIPTLRRFYQNLGLSDIDVLNATKGSCKLGIEFQGWAGENSRFIHPFGIYGQSTPSTPFHHYWLRAEQAGAHSDLTDYSLGVQMAKHNKFVPPKIKPQNQLEIFDWALHFDASLFAKLMFDYSTNKGVKHIDNTISNIENHPDGSISQLQFEDGSSIVADLFIDCSGFKALLIGENQAVEYENWSHWLLNDSAIAVQTSATTEPITRTLAIAKKGGWQWRIPLQHRVGNGYVYSSKYLSHDEAEQSLLASIDGEILQPPRKFSFTPGRRKSAWHNNCVAIGLSSGFLEPLESTSIALVETAIEKLLLTFTSNHYSAHDVAKFNDVNAQEYERVRDFIILHYKLNGRSDSPMWQYYRDMAIPASLEEKMLTFAKTGELKRLPWEMFGPDSWLAIYHGLNFLPENYQASADNMPLNYLNEHLTKMREMVSSQVNNAPTHSEFLEKHCGYQPIKQQEAVCS

SEQ ID NO: 87407 - protein, 512 aa, Sphingomonas sp.
  misc_feature (1)..(512): tr|A0A1S6FIS8|A0A1S6FIS8_9SPHN Tryptophan halogenase OS =Sphingomonas sp. LM7 OX=1938607 GN=BXU08_07215 PE=4 SV =1
MSADPIRSILIAGGGTAGWMAAAALSAAFKPHQCRITLVESDEIGTVGVGEATIPTIQLFNKLLGIDERDFVRETQGTFKLGIEFVGWLREGERYFHPFGRYGDDFGFAPFHQQWLRARALGNSLPLDAWSLNHQAAYRGKFEIPTPQSPRVFSTWSYAYHFDAALYARYLRSLAESRGVARLEGKIAEVILRPENGFVERLTLADGRSLEADLFLDCTGFRGLITEALGTGYDDWTQWLPCDRALAVPCTRVADPEPYTRSTARKAGWQWRIPLQHRTGNGQVYCSGAIADDEVHADLLASLDGAPEADPRMLRFTTGRRRKAWNRNVVALGLASGFLEPLESTSIHLIQTGISKLLSWFPDRNFDPLLATEYNRLVDAEMESIRDFLVLHYHANAREEPFWRQCRAMPIPDTLAEKMAMFRANGRLIERQYDLFHPPSWLAVLLGQGVHPAAHDPLADTVPPQELAAILAGMRQVIDQTADRMPSHQQYIDRHCRAAPRTTMPLAFQEAL

SEQ ID NO: 87408 - protein, 515 aa, Aliikangiella sp.
  misc_feature (1)..(515): tr|A0A545UHN5|A0A545UHN5_9GAMM Tryptophan 7-halogenase OS=Aliikangiella sp. M105 OX=2592383 GN=FLL46_05150 PE= 4 SV=1
MAHIENIMVVGGGTSGWLTAAILARKFHQNPNRNIQVTLLESSDIPTIGVGEGTFPTMLNTLQYIGIEESEFLKSCQATFKQGIKFVDWLKPPSGDQHSHYYHLFNPPVLANGVDVTREWLAYEKDKPGYSYAVSPQAYICDQNLAPKRVDTGDYRWKTKYAYHLDAGKFVELLKRFATENLNVKHVIATVGQVEQEPETGNISAVVCEQGIRREADFFVDCTGFASLLIGKTLDSPFVDKSDVLFVDKAIAMQVPYLDEKQAIASHTISTAHEAGWSWDIGLKNRRGIGYVYASNYTSGERAEQVLRNYVGSQADNLDVKKISMRVGYREECWRNNCVAIGFSGGFVEPLEATAISMVETGATLLADQFPEDENAIPAIATKYNQIFKLRWEKIVEFIKLHYCLSQRTDSQFWIDNVKSTSIPKALLEKINLWRYFPPVENDFASRFEMFTLASYQYILYGMEFKTELQSAYLSGTRKEVAEMVFSKIHEQGSVALKDLPDHRELIETLNSSIR

SEQ ID NO: 87409 - protein, 528 aa, Aliikangiella sp.
  misc_feature (1)..(528): tr|A0A545UHI3|A0A545UHI3_9GAMM Tryptophan 7-halogenase OS=Aliikangiella sp. M105 OX=2592383 GN=FLL46_05170 PE= 4 SV=1
MMKKVNKVLIVGGGTAGWITAAKLAKNLQADSSDGVEVTLVESPDIPTIGVGEGTWPTMRKTLLELGINEGEFMAYCQATFKQGTKFVNWKKEPGDKAAHTYYHMFSSIFDPSDFNLAPYWLAGIAGENTTFATAVSAQGNTCDLGCAPKKITDRPFDGVLSYAYHLDAGKFAEFLTQFATEKLGVKLIKANATQVHLTENGDIKGISVDRNEQGERESSENMVLEADLFVDCTGFRSLLLGESLNVSFKSVADTLLTDTAIAIQVPYESEDAPIPCQTNSIAQESGWIWDISLFNRRGTGHVFSSNHMHPDEAESVLRKHIGPVAKELESRTIKMNIGYREKFWEKNCVAVGLSAAFVEPLEASAIFLIEAAGNMLVDMFPKTRDAMDYAAQRYNQSFLYRWEKTIEFIKLHYYLSQRESKFWQDNKADETVPEVLRERVAHWRTHPVSKYEFDNVFEPFPHESYQYVIYGMGIHENGRFSRQHLSDQNKAMEYFKRVRQATELINKDLPQHRELLKKAYQYGFQTL

SEQ ID NO: 87410 - protein, 533 aa, Streptomyces sp.
  misc_feature (1)..(533): tr|A0A1U9NTF0|A0A1U9NTF0_9ACTN Tryptophan halogenase OS =Streptomyces sp. fd1-xmd OX=1812480 GN=B1K54_05415 PE= 4 SV=1
MTSTDTRLQKVVILGGGTAGWMTAAYLGKALQGTVDITVLEAPTIPRIGVGEATVPNLQRSFFDYLGIAEDEWMRECNASFKMAVRFVNWRTGGQGESTARELPGGGPDHFYHPFGLLPDYDQTPLSHYWFKRKYEGRTTEPFDYACFREPPVMDAMKAPRWLDGRPATRYAWHFDAQLVADFLRRFATEKQGVNHVQDEMVRVEQDSRGYVTTLHTKGGLALDADLFVDCSGFRGLLINQAMQEPFIDMSDHLLCDSAVATAVPHDDEANGVEPYTSAIAMSSGWAWKIPMLGRFGTGYVYSSKFTDQDTATAEFADMWGLDAESTKFNHIRFRVGRNRRAWVKNVVSIGLSSCFLEPLESTGIYFITAAIYQLAKHFPDKTFNEGLIDSFNHEIEVMFDDTRDFIQAHFFYAPRNDTPFWQANKKLVLPDNIKQKISAYKAGLPINSPITDESTYYGNFEAEFRNFWTNGSYYCIFAGLGLEPDAPLPTLAHRPESVAGAEPLFDTVKRQQQNLLETLPSAYDYLRQLHGA

SEQ ID NO: 87411 - protein, 75 aa, Massilia namucuonensis
  misc_feature (1)..(75): tr|A0A1I7M7L5|A0A1I7M7L5_9BURK Tryptophan halogenase (F ragment) OS=Massilia namucuonensis OX=1035707 GN=SAMN05 216552_10817 PE=4 SV=1
TGRVVVYDKEGFNVPSMVSLLMGLGVVPKQDDPLIDAMNFDHLLGHLASRRDAVARVVKAMPEHAQYISQHCAAP

SEQ ID NO: 87412 - protein, 510 aa, Pelomonas sp.; identical to SEQ ID NO: 87227
  misc_feature (1)..(510): tr|A0A0Q7AXU4|A0A0Q7AXU4_9BURK Tryptophan halogenase OS =Pelomonas sp. Root405 OX=1736529 GN=ASC81_15150 PE=4 S V=1

SEQ ID NO: 87413 - protein, 497 aa, Novosphingobium sp.
  misc_feature (1)..(497): tr|A0A3D1P5D1|A0A3D1P5D1_9SPHN Tryptophan halogenase OS =Novosphingobium sp. OX=1874826 GN=DER67_08250 PE=4 SV= 1
MRIVIVGGGTAGWMSAAALARFAPPGYAVTLVESDAIGTVGVGEATIPAIRLFNEALDIDEGSFLAATKGSFKLGIEFAGWLEDGHSYMHAFGTVGRQLGLLPFRHFWARGRALGLAKPLAHYSANELAARTGRMQVGASGPGIPEVPYAYHFDAGLYAAFLRDYAETRGVTRIEATLAGARRAETGDIAAVVTADGREIAGDFFIDCSGFKGLLIEQELQTGYDDWRHWLPCDRAIAVPCEPSGNFTPYTRSTARPAGWQWRIPLQHRIGNGHVFCSEFMSDDEAAAILLGNLDGPALADPRAIPFVTGRRKQIWNRNVLAVGLSSGFLEPLESTSIHLIQSTITRLLTVLPGKQIDPAVVDGFNRRSAAEFENIRDFLVLHYWANRRDGQPLWDRMRGLELPQSLQQRIGEYLAVNQIQPAHDELFTEVAWFQVLAGQGLIPRSWNPIADRYPEGELAGFLGAVEKDCVETVRPMPLHIDCVAAVCGAAKKEKAA

SEQ ID NO: 87414 - protein, 409 aa, Cupriavidus metallidurans
  misc_feature (1)..(409): tr|Q1LF24|Q1LF24_CUPMC Monooxygenase, FAD-binding:FAD d ependent oxidoreductase:Tryptophan halogenase OS=Cupria vidus metallidurans (strain ATCC 43123 / DSM 2839 / NBR C 102507 / CH34) OX=266264 GN=Rmet_4387 PE=4 SV=
MKKETVDVLIVGAGPAGSVAAGLLRKRGIGVLVIEKETFPRFSIGESLLPQSMAYIEEAGMLQAVVEAGFQYKNGAAFARGDRYTDFDFREKFSPGWGTTYQVQRAHFDDVLIREAQKQGAEVRFRHVVEAVDVSGAAPVVTVRDPDGNVYQVESRFLLDASGFGRVLPRLLDLESPSNFPVRAAIFTHVADRIPGGSFDRNKIRVSVHPEHVDVWYWTIPFSNGRCSQGVVAEKSFLDRYEGDEMTRLRQLVAEEPGLAKLLKDAEWDTPARQIVGYSANVRSLWGNGYALLGNAGEFLDPVFSSGVTIAFKSASLATACVARALAGESVDWETEYARPLKAGVDCFRAFVEAWYEGSFQKLIFHPNAPTDIRDMISSILAGYAWDLNNPFVTESRRRLSVLEQFCDD

SEQ ID NO: 87415 - protein, 415 aa, Novosphingobium sp.
  misc_feature (1)..(415): tr|A0A5C7UFE9|A0A5C7UFE9_9SPHN Tryptophan 7-halogenase (Fragment) OS=Novosphingobium sp. OX=1874826 GN=E6Q63_0 2795 PE=4 SV=1
MTASHLPRRIVIAGGGTAGWMAAAALARTLGPVAQVTLVESEQIGTIGVGESTIPPLVTYNRLLGINEAEFMRATQATFKLGINFENWRVEGENYFHSFGGTGKDHWSAGFQHFWLHGLERGHTEPYGEYCLELKAAEAGKFAHLPDDRMNYAYQLDSGLYAKFLRAMAEADGTTRIEGKIARVELDGESGDIAALVLEGDRRIEGDLFIDCTGFRALLIEGALRAGYDDWTHWLPCDSAIAIQTSSVRPPVPYTRAIAHEAGWQWRIPLQHRQGNGVVYCSDYLSHEAALEKLLSTVEGEKLVKPNHIRFRTGARRKQWHRNCVAVGLSGGFMEPLESTSIHLIQRAILRIVRMLPAGVISQRDIDEFNDQQFTDMEQIRDFLVLHYKATERRDTPFWRHCASMEVPASLEHKM

SEQ ID NO: 87416 - protein, 512 aa, Pseudoalteromonas piratica
  misc_feature (1)..(512): tr|A0A0A7EN29|A0A0A7EN29_9GAMM Tryptophan halogenase OS =Pseudoalteromonas piratica OX=1348114 GN=OM33_20355 PE =4 SV=1
MTEATKTINSIVIVGGGTSGWMTAAALANHAPLKHCKITLIESSKLGTIGVGEATIPTLRRFYQNLGLSDIDVLKATKGSCKLGIEFQGWAGENSRFIHPFGIYGQSTPTTPFHHYWLRAEQAGTHSDLTDYSLGVQMAKHNKFVTPKIKPQNQLEIFDWALHFDASLFAKLMFDYSTNKGVKHIDNTISNIENHPDGSISQLHFEDGSSIAADLFIDCSGFKALLIGENQAVEYENWSHWLLNDSAIAVQTSATSEPITRTLAIAKKGGWQWRIPLQHRVGNGYVYSSKYLSHEEAEKSLLASIDGDILQPPRKFSFTPGRRKSAWHNNCVAIGLSSGFLEPLESTSIALVETAIEKLLLTFTSNHYSTHNVAKFNDVNAQEYERVRDFIILHYKLNGRSDSPMWQYYRDMAIPASLEEKMLTFAKTGELKRLPWEMFGPDSWLAIYHGLNFLPENYQASADNMPLNYLNEHLTKMREMVSSQVNNAPTHSEFLEKHCGYQPIKQQEAVCS

SEQ ID NO: 87417 - protein, 374 aa, Caulobacter vibrioides
  misc_feature (1)..(374): tr|A0A0H3CDD3|A0A0H3CDD3_CAUVN Tryptophan halogenase OS =Caulobacter vibrioides (strain NA1000 / CB15N) OX=5650 50 GN=CCNA_02897 PE=4 SV=1
MRRVLIVGAGIDAWMTAAALATATRGLTQVVVAETGPPPVGRIAALPSLQGLHARLGISEPTLAQATEARPRLAARYGDAIEPFGETGVGIDGVAFHHYWLAAGRPGPLSDWSLAALAAARGRFAPPSPDPRSPLSTLSYGLSLDAAGYAALLKRVALAAGAKVVEGRPDADLKVDASGGERRLVAHETWTDWSARLPNGVALAQDSLVSTFAPAPAKTGRIAQAMRGDTVAVGAAYGAIGAGDGGDLHLLQGDVSRLIALFPTGPAAVAEYNRLAQSALERARDMAILRWGDLSNPPEPLARKIEQFQSRGRVVTYDEEAWPESAWIHAMLARGIVPKRWDPLADRLGTDRTREMLGRMKAMLDQTAEAMPRV

SEQ ID NO: 87418 - protein, 531 aa, Sphingobium sp.
  misc_feature (1)..(531): tr|A0A2W6WEY4|A0A2W6WEY4_9SPHN Tryptophan halogenase OS =Sphingobium sp. OX=1912891 GN=DI547_00100 PE=4 SV=1
MTDDGKAAVRDGGSAIRSIVIVGGGTAGWMAACLLAKRLDRQDVSITVIESHMIGTVGVGEATVPAIRDYFRAIDLDEMEVLRETGGTIKLGIEFRDWLRPGHRFFHPFGLYGLSSRGVPFHQYWLKCLHAGDERPLEDYSLCSELARRGLFMPPVDNPVNELGVFNWAVHFDASLFARQLKTHGMARGVRLVDDVIVDVRLDLASGHVRDVVTEGGQSVAGDLFIDCSGFRALLIGKALNTPWVDWRDLLPRDRAVAMPCALDPALDFPYTVSTARPAGWQWRIPLQHRVGNGYVYSSAHLSDDEAIADLRGRLEGEALGEPNLIRFSAGHRVHFWNGNCVAVGLAAGFLEPLESTSITLIQTAVEKLIDLFPDTGFDPALAAEYNRATTLEFERIRDFLILHYLGNRRLGEPMWDALRAASPPDRLAHKLRLFQARGKLVRYEWEAFLDPSWLSMYAGFGMLPNRHDPMADHFTDAEIASALDRMREAIGAASAHAMPHGAFIARHAAARTSAQTHPPQNTHMEKVLHG

SEQ ID NO: 87419 - protein, 515 aa, Novosphingobium sp.
  misc_feature (1)..(515): tr|A0A5C7UCZ3|A0A5C7UCZ3_9SPHN Tryptophan 7-halogenase OS=Novosphingobium sp. OX=1874826 GN=E6Q63_02780 PE=4 S V=1
MIGSVKQVVIVGGGTAGWLSACLLAARRPELAITLVEAPDIPTIGVGEGTWPTMRETLATIGIHEAEFLSQCDASFKQGSRFDGWVDGSAQDSYLHPFTPPPPGDMAAMLQAWRAQSPDLPFAALMTPQAAACDENLAPRQRAMPDYAGALNYGYHLDAGKFAALLKRHATTRLGVTHVSAQVTAVADDEAGNIASLSLHDGRTIAGDFFIDCSGLAAILIGDHCGVPWVDRSDVSFNDSALAVQVPVEPGSPIASQTIGTAHEAGWIWDIALPTRRGIGCVFSSRFMDDERAEDVLRNYIAARLPSADLQALRPRKLTFSTGHRERFWHRNCLAVGLSAGFIEPLEASAIVTIELSIKALAENFPRRSGTMGLLAGRFNELFCYRWDRIVEFLKLHYVLSRRPEPYWLAQRDPATVPARLAECLELWRDQPPSVWDLPRMDELFCAASQQYVLYGMGFPVPAGAVDAAATQALAEVRQRSRALAAALPSNRTYLDALRPVAAAAPIAMHGAAVK

SEQ ID NO: 87420 - protein, 151 aa, Psychrobacter sp.
  misc_feature (1)..(151): tr|K7W8V2|K7W8V2_9GAMM Tryptophan halogenase (Fragment) OS=Psychrobacter sp. D8 OX=1258816 PE=4 SV=1
GVGEATIPIMVKFLHAYLERDVHELYRKVQPTWKFGVKFEWGQPGDYYFNYAFHPGPVLDSVYYGGDFNEYSLGSMLISNERAPILTGEGGQLTSLIDRIPFAYHLDNGRFVAYLREEAVRDGVERLELSVDSFVPTGDGESLDHIVTDDG

SEQ ID NO: 87421 - protein, 110 aa, Acidimicrobiales bacterium
  misc_feature (1)..(110): tr|A0A520XJX8|A0A520XJX8_9ACTN Tryptophan halogenase (F ragment) OS=Acidimicrobiales bacterium OX=2201156 GN=EX 271_07940 PE=4 SV=1
LHYCATERTDSPFWEYCKNMEIPDTLKQRIELYKENARLYRHDNELFGDVSWFAVLHGQNINPKRFHPNTNMMPENELNQRMSDIRKTWNACLDKMPMHQDFINQNCKAV

SEQ ID NO: 87422 - protein, 517 aa, Acidimicrobiales bacterium
  misc_feature (1)..(517): tr|A0A520XP84|A0A520XP84_9ACTN Tryptophan 7-halogenase OS=Acidimicrobiales bacterium OX=2201156 GN=EX271_04740 PE=4 SV=1
MHDEHFKIIIVGGGTAGWLSAAFLSQQLPITSGRKIQITLIEASDIPTIGVGEATVPSLRQTLAACGISEVDFLSSCGATFKHGIKFVNWKRAPDEDPGESYFHPFGEPLKVGTIDPIRAWSKLAPETRGNIADVFSVQSEMAEAGRAPKHLKDRPYDGALSYAYHLDAGAFADYLKQRFRTEGVSQIIGKVTSVNFDQRTQNINGLVLEDGSEHSADLYIDCTGFAARLINADKQNPFEDKNGVLFVDRAVTTRIEHDGIRNINGYTTCTAQTAGWIWDIVLQNRRGVGHVYSSKYIDDDTAKNQLADYLNVAHDEIETRQLSMRIGYHKEQWRGNCVAIGLASGFLEPLESTGIYLTEMANWALIDLLPRFMADPNSQNGPQAQFTDAMSHHYENIVDFLKLHYAISGRLDSDFWRDNANPDTWPNSLAAHLDAWRNDAPSVYDFGRSIQCFSANNYQFVLYGMGWKGHDEPTPLSPQSETLMQELSIRRSRLKDFVLRDTLPNGEFFKPISDQQ

SEQ ID NO: 87423 - protein, 530 aa, Streptomyces olivaceus
  misc_feature (1)..(530): tr|A0A2R3ZQ36|A0A2R3ZQ36_STROV Tryptophan halogenase OS =Streptomyces olivaceus OX=47716 GN=mymP PE=4 SV=1
MNDIRIKDVVILGGGTAGWMTASYLGKALQGTVNITLLEAPTIPRIGVGEATVPNLQSAFFDYLGIPEQEWMRECNASFKTGIRFVNWRTPGNGSPEPRDLDGGTDYFYHHFANLPEHDHVPLSHYWDFRRRQGEQIADFDRECFGEAAALDAKRGPWYADGTPATGYAWHFDAQLVADYLRRFATRKQGTRHVQDELVDVVLDERGHIESLLTKDGLELRGDLFVDCSGFRGLLINKALGEPFLDMSDHLLCDSAVATAVPHDDEKNGIEPFTSAIAMSSGWTWKIPMLTRFGSGYVYSSKFIEKDTATKEFCDLWGLDPTRTEFNHVKFRVGRNRRAWVKNCVSIGLSSCFVEPLESTGIYFIYSAVYQLAKHFPDKRFDPVLVNHFNREIESMFDFTRDFIQTHFHFSPRNDTEFWRANKELPLGDDIREKIELYRAGLPVNSSVTGERVYYGNSEVENKNFWNNTNYWCIFAGLGFLPDRVMPSLTYKSASLDSVETVFDDVRRREQHLLDKLPATRDILRSLHHR

SEQ ID NO: 87424 - protein, 342 aa, Pseudomonas chlororaphis
  misc_feature (1)..(342): tr|A0A3G8GC29|A0A3G8GC29_9PSED Tryptophan halogenase (F ragment) OS=Pseudomonas chlororaphis OX=587753 PE=4 SV= 1
EREWMPQVNGAFKAAIKFVNWRKSPDHSRDDHFYHLFGNVPNCDGVPLTHYWLRKREQGFRQPMEYACYPQPGALDGKLAPCLADGTRQMSHAWHFDAHLVADFLKRWAVERGVNRVVDEVVEVRLNDRGYISTLFTKEGRTLEADLFIDCSGMRGLLINQALKEPFIDMSDYLLCDSAVASAVPNDDAREGVEPYTSAIAMNSGWTWKIPMLGRFGSGYVFSSKFTSRDQATADFLNLWGLSDNQPLNQIKFRVGRNKRAWVNNCVSIGLSSCFLEPLESTGIYFIYAALYQLVKHFPDTSFDPRLSDAFNAEIVHMFDDCRDFVQAHYFTASREDTPFWL

SEQ ID NO: 87425 - protein, 198 aa, Brevundimonas sp.
  misc_feature (1)..(198): tr|A0A519L772|A0A519L772_9CAUL Tryptophan halogenase (F ragment) OS=Brevundimonas sp. OX=1871086 GN=EON86_02025 PE=4 SV=1
MSERAVSSVLIVGGGTAGWMAAAALARAFRALPIPRRPAVTLVESETIGTVGVGEATIPPIRQFNQSIGLDEADFVAATGATPKLGIAFEDWSAPGSRYFHGFGDHGPEMHGQPYRQHLFRLKSAGRLDSLDPWAVPAVMAREGRFAPPETDPRSILSAYSYAYHFDAGLYAKRLRTLAEAAGVTRIEGRILGVQADA

SEQ ID NO: 87426 - protein, 411 aa, Brevundimonas sp.
  misc_feature (1)..(411): tr|A0A519KSR8|A0A519KSR8_9CAUL Tryptophan 7-halogenase (Fragment) OS=Brevundimonas sp. OX=1871086 GN=EON86_131 60 PE=4 SV=1
MHENAIRTVVIVGGGTAGWMTAAALSKRLGRTVDITLVESAEIGTVGVGEATIPPILDFNKMLEIDENDFVRATQATFKMGIEFRDWGALGDNYLHPFGRFGLDFEGVPFHQQWLKQQAAGQPGDIEAYSLSGTAARAGKFFRPVEDPRNLLSMLAYAFHFDASLYAAFLRSYAEARGVVRLEGRVVDVAQRGLDGHIESVKLESGAVIAGDLFIDCSGFRGLLIEQTLEAGFEDWAHWLPCDRAVAAPSASIGPPSPLTRSTAREAGWQWRIPLQHRVGNGYVHCSRFISEDEAAATLVANLDGELLAEPRTLRFRTGRRQRTWVKNCVAIGLAAGFLEPLESTSIHMIQTAITRLLALFPDRSFDPTLVDEYNRLSRREAERIRDFVILHYHQTTRDDAPLWRQVRTMA

SEQ ID NO: 87427 - protein, 129 aa, Brevundimonas sp.
  misc_feature (1)..(129): tr|A0A519KKG7|A0A519KKG7_9CAUL Tryptophan halogenase (F ragment) OS=Brevundimonas sp. OX=1871086 GN=EON86_17175 PE=4 SV=1
FNREMDQQYEGVRDFIIAHYKVSTRDDTPFWRHCRDMAVPDSLAAKLELFRARGEVMVENHELFRETNWFPVLYGQGLTPEGYHPLADVLSDDDLRLRLSQIRAAIRARVDSLPSHDSYLRQCVAGTAR

SEQ ID NO: 87428 - protein, 511 aa, Streptomyces rugosporus
  misc_feature (1)..(511): tr|A4D0H5|A4D0H5_9ACTN Tryptophan 5-halogenase OS=Strep tomyces rugosporus OX=295838 GN=pyrH PE=1 SV=1
MIRSVVIVGGGTAGWMTASYLKAAFDDRIDVTLVESGNVRRIGVGEATFSTVRHFFDYLGLDEREWLPRCAGGYKLGIRFENWSEPGEYFYHPFERLRVVDGFNMAEWWLAVGDRRTSFSEACYLTHRLCEAKRAPRMLDGSLFASQVDESLGRSTLAEQRAQFPYAYHFDADEVARYLSEYAIARGVRHVVDDVQHVGQDERGWISGVHTKQHGEISGDLFVDCTGFRGLLINQTLGGRFQSFSDVLPNNRAVALRVPRENDEDMRPYTTATAMSAGWMWTIPLFKRDGNGYVYSDEFISPEEAERELRSTVAPGRDDLEANHIQMRIGRNERTWINNCVAVGLSAAFVEPLESTGIFFIQHAIEQLVKHFPGERWDPVLISAYNERMAHMVDGVKEFLVLHYKGAQREDTPYWKAAKTRAMPDGLARKLELSASHLLDEQTIYPYYHGFETYSWITMNLGLGIVPERPRPALLHMDPAPALAEFERLRREGDELIAALPSCYEYLASIQ

SEQ ID NO: 87429 - protein, 492 aa, Brevundimonas sp.
  misc_feature (1)..(492): tr|A0A519LC70|A0A519LC70_9CAUL Tryptophan 7-halogenase OS=Brevundimonas sp. OX=1871086 GN=EON87_02915 PE=4 SV= 1
MSAAGLVGVLKPDQVKVRLVESDDIGTVGVGEATLPQMREFNDRIGIVESDMMRKTNATFKLGIEFRDWGFKGSSYVHPFGAHGRPMGGVGFHHQWTRARLAGQAADIGDYSYAIVASRRNRFDFPATDKTAVNSTYDYAYHFDAGLYARYLRGWCETRGLTRTEGKVMEVRLDPTTGDVAAIVLESGEVVTGDLFIDCSGFRGLIIGGALNGTFEDWTRWLPCDRALAVPTERSEDFTPFTRSTALEAGWQWRIPLQHRTGNGYVYSSSFISDDEAITRLMGNLDGKPLAEPKPIRFKSGRRTASWTKNCIAVGLASGFLEPLESTSIYLTQVAVLTLLDLLPRRPIDPVLAEEFNRVVDNEYDRVRDFLILHYHANTRTDSELWRHCREMEIPDTLREKMSLFGHRGHISQYKDGLFSPPSWLSVFVGQGVLPTGYHPMADTLPLASVLEEMEGIRARVADRVDAMPTHADFVRDYCAGEAPLKAMGAGA

SEQ ID NO: 87430 - protein, 490 aa, Brevundimonas sp.
  misc_feature (1)..(490): tr|A0A519HY27|A0A519HY27_9CAUL Tryptophan halogenase OS =Brevundimonas sp. OX=1871086 GN=EON89_04655 PE=4 SV=1
MTGRPTRVVVVGADAPLWLSALTIHGALHKAGVTVEAVALPSRADPAEVVEARPAIEALHNRLGIREDRLLAAAKGAFMLGRRLAGDPADGPGAFVGYGANGAAFGQEAFLPHWLRARDAGFDAPLEAFNLVASAALQGRRLVPDAEIAAFARADYGYALPARAYARSLAALAGQDGLTTHQTDGLGVDRGEDGRVTALRLDDGRSIAGDLFVDVSRDAVVSEGALQSPTEDWSLLFPTARIVRATAPPLSAAPAYSRVEAYPWGWLARIPTPAATHLLAVFSEDGDAARELDRMGFGSASSEGLVRFGRTAPWRFNCVAIGPAACRLDPIFGLDLHALQLGLIHFVSRFPTSADAALERDDYNGALSALLENLRDFQIAHYRAQRYRGRVWDEARAGGVPPALAHRLALFAARGLLGPLEHETIPADEWQSLLIGHGLRPASHDPMADINPSEAVLGDLRGMLDFIARKVSAFPMNAVPPARTPTSDRP

SEQ ID NO: 87431 - protein, 507 aa, Gammaproteobacteria bacterium
  misc_feature (1)..(507): tr|A0A534EGU3|A0A534EGU3_9GAMM Tryptophan 7-halogenase OS=Gammaproteobacteria bacterium OX=1913989 GN=E6K39_16 100 PE=4 SV=1
MPAQELKSVVIAGGGTAGWMAAAAIAKVMGPRLTITLVESDEIGIIGVGEATIPSIALYNDLLRLDENDFLRQTQGTFKLGIEFVNWYEPGHRYMHAFGGIGKDLAYIPFHHYWLQEVLQGRGDPLWHYSLNWMAAHQDRFARLERIAETPLPGVIYAFHFDASLYAAYLRRLALQMGVRRVEGMIAEVLQNPESGDVSALRLKDGREITGELFIDCTGFRALLIERTLKVGYDDWTRWLPVDRALAIPTERVGPLTPYTRSTALEAGWQWRIPLQHRTGNGHVYSSAFVDDDRAAELLMANLDSRPLADPRPIRFVTGRRRQLWSHNVVCLGLASGFLEPLESTAIHLIQANIQRLILLFPHHGDCDHRRAQFNQAAAAEYEYVRDFIILHYHLNNRVGERFWDTCRQMSVPDSLTHKIELFRETGGIFPTMYDLFHLTSWLQVMWGQGVRPRGAHPFVQTVAPHDRVEYLKNIRDLIAQAASELPRHDEFIARHCRAPAPAAAVT

SEQ ID NO: 87432 - protein, 484 aa, Gammaproteobacteria bacterium
  misc_feature (1)..(484): tr|A0A534JGB5|A0A534JGB5_9GAMM Tryptophan 7-halogenase (Fragment) OS=Gammaproteobacteria bacterium OX=1913989 GN=E6K20_00985 PE=4 SV=1
RGVEITLLESPTVGIIGVGEGSTPWLRGFFDSLGLEESEWMPACHATYKCGIRFDGWSTKPGFGSYFHPFASMLDNLTMKQFVHNVEARINGADLEAHPDRYFIAARLAAKRRAPKASESFPFDIWHGYHFDAVLLGQFLHRKAVDRGVRYKSCHVTHANLDADGNIASVGTEEGETIAADLFVDCSGFAGLLIDKALHTPYVSFSSNLFNDAAVAIPSPMEASIPSETVSTAMKHGWAWKIPLTTRFGNGYVYSSRFCSADEAETELRRHLGLLDGDVPARHLKMKIGRVTRHWNRNCLAVGLSQGFIEPLEATALLFIQQTAATFVEFVERGDLSEAAHERFNDMMNTHFEGIRDYIVTHYKTNTRTDTEYWRANAANLNLSDDLKKLYSLWMAGKSIAPAVGQQVLGKGYPVFSWYSIMAGMGIFPDPQDLRPPTVQEARFSEAEIDNLLERSSANYPDHRAALESIPPRRTEPALQVYFW

SEQ ID NO: 87433 - protein, 373 aa, Gammaproteobacteria bacterium
  misc_feature (1)..(373): tr|A0A534B938|A0A534B938_9GAMM Tryptophan 7-halogenase (Fragment) OS=Gammaproteobacteria bacterium OX=1913989 GN=E6K48_03440 PE=4 SV=1
RRAPKASESFPFDIWHGYHFDAVLLGQFLHKKALERGVRYQSCHVTRANFDADGNIASVGTEEGEAIAADLFVDCSGFAGLLIDKALHTPYVSFSSNLFNDAAVAIPSPMEGSIPSETVSTAMKHGWAWKIPLTSRFGNGYVYSSRFCSADEAETELRRHLGLLDADVPVRHLKMKIGRVTRHWNRNCLAVGLSQGFIEPLEATALLFIQQTAATFVEFVERGDLSDAAHERFNDMMNTHFEGIRDYIVTHYKTNTRTDTEYWRANAANLNLSDDLKKLYSLWMAGKSIAPAVGQQVLGKGYPVFSWYSIMAGMGIFPDPQDLRPPTAQEARFSVAEIDNLLERSSANYPDHRAALESIPPRRTEPALQVYFW

SEQ ID NO: 87434 - protein, 496 aa, Sphingomonas sp.
  misc_feature (1)..(496): tr|A0A5E7Y385|A0A5E7Y385_9SPHN Tryptophan halogenase OS =Sphingomonas sp. EC-HK361 OX=2038397 GN=SPHINGO361_100 451 PE=4 SV=1
MTPRRIVIAGGGTAGWMAAAAIMRTMGRTAEVTLIESDAIGTVGVGESTIPPLITFNRLLGINEAEFMAATQATFKLGIAFDGWKAPGHGYFHSFGLTGKDHWAAGFQHFWLNAQTRGQTQSYDDYCLELIAAREGKFAHLPNDRMNYAYQLDSTLYGRFLRRMAEGDGVTRVEGKIAQVDLDGTSGHIAALLLESGVRIEGDLFVDCTGFRALLIEQALHTGFDDWTNWLPCDAAIAVQTESVAAAVPYTRAMAHDAGWQWRIPLQHRVGNGIVYCRRYLDDDAALDRLLNNVEGRVLTTPNKLRFVTGARRKQWHRNCIAMGLSGGFMEPLESTSIHLIQRAILRLIRMMPHGEISARDIDEFNEQQHLDMLQIRDFLILHYKATDRRDSGFWRQCAAMDVPDSLAHRIALFRETGRVFRKNEELFAENSWVQVMMGQGIMPRTWHPIAEKLSDDDLAKFMAGLRDGVTATVRSLPDHASYVASFCGTPRSDAA

SEQ ID NO: 87435 - protein, 174 aa, Brevundimonas sp.
  misc_feature (1)..(174): tr|A0A519Q8E8|A0A519Q8E8_9CAUL Tryptophan halogenase (F ragment) OS=Brevundimonas sp. OX=1871086 GN=EON88_12025 PE=4 SV=1
MNGPKKTRVVIAGGGTAGWLAAALLTRQLGPLLDVTLVESEQIGTVGVGESTIPTVTRFHSLIGVEERAFMTATGATFKLGISFEGWGRRGDRYIHSFGDVGKSTWMGDFQHFWLEARARGVAGPLGDYSFEHQAAAAGKFAAGGDARLNYAYHLDAGRYARFLRAHAEAAGLT

SEQ ID NO: 87436 - protein, 535 aa, Gammaproteobacteria bacterium
  misc_feature (1)..(535): tr|A0A534BZ36|A0A534BZ36_9GAMM Tryptophan 7-halogenase OS=Gammaproteobacteria bacterium OX=1913989 GN=E6K46_04 705 PE=4 SV=1
MTTATLFNYSYSPTSGRNPDPAPVPLRRIVIVGGGTAGWMTALILARSLIERGVEITLLESPTVGIIGVGEGSTPWLRGFFDSLGLEESEWMPACHATYKCGIRFDGWSTKPGFGSYFHAFASMLDNLTMKQFVHNVEARINGADLEAHPDRYFIAARLAAKRRAPKASESFPFDIWHGYHFDAVLLGQFLHKKALERGVRYQSCHVTRANFDADGNIASVGTEEGEAIAADLFVDCSGFAGLLIDKALHTPYVSFSSNLFNDAAVAIPSPMEGSIPSETVSTAMKHGWAWKIPLTSRFGNGYVYSSRFCSADEAETELRRHLGLLDADVPVRHLKMKIGRVTRHWNRNCLAVGLSQGFIEPLEATALLFIQQTAATFVEFVERGDLSDAAHERFNDMMNTHFEGIRDYIVTHYKTNTRTDTEYWRANAANLNLSDDLQKLYSLWMAGKSIAPAVGQQVLGKGYPVFSWYSIMAGMGIFPDPQDLRPPTAQEARFSVAEIDNLLERSSANYPDHRAALESIPPRRTEPALQVYFW

SEQ ID NO: 87437 - protein, 523 aa, Streptomyces alboflavus
  misc_feature (1)..(523): tr|A0A3Q8TN42|A0A3Q8TN42_9ACTN Halogenase OS=Streptomyc es alboflavus OX=67267 GN=afnX PE=4 SV=1
MSTKNPDRVVIVGGGTAGWMTASYLKKAFGDKISVTLVESGKIGTIGVGEATFSDIRHFFEFLDLKEEEWMPACNATYKLAVRFQDWRRKGHHFYHPFEQMPTVNGFPLTDWWLQDGPTDRFDTDCFVMANLCDAGRSPRFLDGSLIDQGFTEGAKELSGLTMSEHQGKTQFPYAYHFEAALLAKYLTKYSTDRGVHHVIDEVQDVRLDERGWIDHIVTKDHGSLEGDVFVDCTGFRGVLLNKALEVPFISYQDTLPNDSAVALQVPLDMEKRGINPYTQATAQDAGWIWTIPLFGRIGTGYVYAKDYLSPEEAERTLREFVGPEAAEVEANHIRMRIGRSEQSWKNNCVAIGLSSGFVEPLESTGIFFIHHAIEQLVKHFPAADWSPELRKSYNSSIANVMDGVREFLVLHYQGAGRDDTQYWKDTKTRAVPDGLAERLERWKVQLPDSENVFPYYHGLPPYSYMCILLGTGAIPARATPSLGMSDTAAAHKEFAAIRDKARHLIETLPSTYEYFASMRERA

SEQ ID NO: 87438 - protein, 540 aa, Gammaproteobacteria bacterium
  misc_feature (1)..(540): tr|A0A523LLF1|A0A523LLF1_9GAMM Tryptophan 7-halogenase OS=Gammaproteobacteria bacterium OX=1913989 GN=E2O53_08 235 PE=4 SV=1
MQPKRVLVVGGGSAGWMTAAYLNAALNGAGHQVADISLVESPDVPRVGVGEATIPNINHILNVIGIDEVEFMKRVDGTFKQSIRYVNWLHNGGEYYHHPFSRFRPGPVDSTARNWLMSDRSIPFTETVSAQPIICELGLAPKTLAGGNLETPLTYAFHMNALKFADYLTELSTARGVTHYSDHVIDIEMAETGDIQAVVTRGGLRLEADLFIDCTGFAAILIEKKLGVEWIDCSQWLLCDRAITLHVPYDKHYLGFVRPYTTATALSAGWVWDIPLQDRRSLGYVHSSAFLGDAEAEQELRLWEGAHCESLEARSVKFKVGHRAKAWVRNCVAIGLASSFIEPLESTGLYLSDLAAVILTEHFPRDDDMAPMAFRFNRTMTNRFYEILDFINMHYCLTQRTDTEFWREVRKPARINDRLKAKLAFWRIKPPSAADFEDQWFPGQADTPLPTGGLPGDHRSPIDTAGLWNHESYEAILYGMDFLAAECDAWFGKERPRPRMLKKIIEILTAAPRTLPLHDEWLKRVLGMPNYRTSRSKIRQ

SEQ ID NO: 87439 - protein, 81 aa, Gammaproteobacteria bacterium
  misc_feature (1)..(81): tr|A0A534FFW3|A0A534FFW3_9GAMM Tryptophan 7-halogenase (Fragment) OS=Gammaproteobacteria bacterium OX=1913989 GN=E6K30_14180 PE=4 SV=1
MTTATLFNYSYSPTSGRNPHPAPVPVRRIVIVGGGTAGWMTALILARSLIERGVEITLLESPTVGIIGVGEGSTPWLRGFF

SEQ ID NO: 87440 - protein, 362 aa, Brevundimonas sp.
  misc_feature (1)..(362): tr|A0A519JSZ5|A0A519JSZ5_9CAUL Tryptophan 7-halogenase (Fragment) OS=Brevundimonas sp. OX=1871086 GN=EON85_103 50 PE=4 SV=1
MSRRVEQVAVIGRDAAVWLTALALQRALGRTGLKVRVIEMPSLLTAADVFAAVPSLGALHTLLGLKEETVLEAAHGLPVLGQRFVGWGGAQAPYIHGYDTHGVTLGDIPFPQIWLKARADGLTVPFEDFCLAAAAAKQGRSPVTRAGRSAGQPVAPGYHLDALAYVDLLRRAALQAGIEARGADVQSVRREGDRIVSVVLTDGETIEADLFIDASGAAAVLASGAPGPGFESWRSWFAADRLLVASAPRLKPLPAFSQITAFPAGWVGLHPLKTRTAVVAAYDSRTMSDQQVLEMLPALTGLPLAGDAAVEHLHAGMRPAWTGNCIAIGASAVSLPPLDAVQLHMIHIGLSTLISLFPAAAE

SEQ ID NO: 87441 - protein, 535 aa, Gammaproteobacteria bacterium
  misc_feature (1)..(535): tr|A0A534FA14|A0A534FA14_9GAMM Tryptophan 7-halogenase OS=Gammaproteobacteria bacterium OX=1913989 GN=E6K31_06 015 PE=4 SV=1
MTTATLFNYSYSPTSGRNPHPAPVPLRRIVIVGGGTAGWMTALILARSLIERGVEITLLESPTVGIIGVGEGSTPWLRGFFDSLGLEESEWMPACHATYKCGIRFDGWSTKPGFESYFHPFASMLDNLTMKQFVHNVEARINGADLEAHPDRYFIAARLAAKRRAPKASESFPFDIWHGYHFDAVLLGQFLHRKAVDRGVRYKSCHVTHANLDADGNIASVGTEEGETIAADLFVDCSGFAGLLIDKALHTPYVSFSSNLFNDAAVAIPAPMEGSIPSETVSTAMKHGWAWKIPLTTRFGNGYVYSSRFCSADEAETELRGHLGLLDADVPARHLKMKIGRVTRHWNRNCLAVGLSQGFIEPLEATALLFIQQTAATFVESVERGDLSEAAHERFNDMMNTHFEGIRDYIVTHYKTNTRTDTEYWRANAANLNLSDDLKKLYSLWMAGKSIAPAVGQQVLGKGYPVFSWYSIMAGMGIFPDPQDLRPPTAQEARFSEAEIDNLLERSSANYPDHRAALESIPPRRTEPALQVYFW

SEQ ID NO: 87442 - protein, 160 aa, Gammaproteobacteria bacterium
  misc_feature (1)..(160): tr|A0A534H0U5|A0A534H0U5_9GAMM Tryptophan 7-halogenase (Fragment) OS=Gammaproteobacteria bacterium OX=1913989 GN=E6K24_18050 PE=4 SV=1
MAGGAAWAAPSVGAPCGPRHLGRGGHVAGRVTWSAMTTATLFNYSYGPTSGRNPYPAPVPVRRIVIVGGGTAGWMTALILARSLIERGVEITLLESPTVGIIGVGEGSTPWLRGFFDSLGLEESEWMPACHATYKCGIRFDGWSTKPGFESYFHPFASML

SEQ ID NO: 87443 - protein, 512 aa, Gammaproteobacteria bacterium
  misc_feature (1)..(512): tr|A0A534G2R5|A0A534G2R5_9GAMM Tryptophan 7-halogenase OS=Gammaproteobacteria bacterium OX=1913989 GN=E6K30_02 775 PE=4 SV=1
MADAQPMRIVIVGGGSSGWMTAAALAKVLKGRYPITLIESEEIGTVGVGEATIPPIIVFNAMLELDENEFVRQTQATFKLGIEFVNWARLGDRYIHGFGVVGQDTWTVDFHQYWLKQYLAGKAKELEYYSINTMACLHDKFMRPRADMPKSPLSQIAYAFHFDASLYARYLRGYSEARGVQRVEGRIVDVELREGDGYVRAVRLNSGATVEGELFIDCSGFRGLLIEGALHTGFEGWSHWLPCDRAVAVPCRSAHQLHPYTRATARQAGWQWRIPLQHRIGNGYVFSSKYLSEDEATAVLLGNLDGEPLAQPRTIRFTTGRRKLAWNRNVVSVGLASGFLEPLESTSIHLVQKSISHLLAFFPSAGFEAQDRDQYNAVMRQEYEWVRDFIILHYKATERTDTPFWNYTRTMEVPEFLQHRLDLFRTHGRVFREGNELFTKLSWLQVMHGQRNRAQSYHPLADLLTEKEIADYLEEVAGVIETCTRVMPSHARFIAENCTAGTQAPAAAGGAA

SEQ ID NO: 87444 - protein, 412 aa, Gammaproteobacteria bacterium
  misc_feature (1)..(412): tr|A0A534E316|A0A534E316_9GAMM Tryptophan 7-halogenase (Fragment) OS=Gammaproteobacteria bacterium OX=1913989 GN=E6K39_20955 PE=4 SV=1
RYFHTFGPIGHDYGFLPFHQYWLKLFLSGKAEDIGAYSLHSVAAQRGKFMTSATDVPQNSPLYYVAHAYQFDAGLYARYLRSYSEARGVERTEGRVVDVKLRGTDGFIEAVVLEGGETTSGDLFIDCSGFRGLLIEQALHTGYDDWTHWLPCDRAMAVPSEKVGPATPYTRSTARAAGWQWRIPLQHRTGNGYVYSSKYISDDEVHRTLMSNLDGRALAEPRILKFTTGRRRKFWNRNCVAIGLASGFMEPLEATSIYLIQSGIGRLINLMPDRNFSPVLIDRYNKQAAFEFERIRDFLILHYFATERRDTPFWQYCGNMQIPEQLADNIRLFRDSGRFFRDGDEMFALSSWVQVMMGQHFVPHGYHPAVDLTPEQEVVELVASVRNVIARSVEVMPMHEQFIARYCPAAAA

SEQ ID NO: 87445 - protein, 492 aa, Sphingomonas sp.
  misc_feature (1)..(492): tr|A0A5E7Z5Z5|A0A5E7Z5Z5_9SPHN Tryptophan halogenase OS =Sphingomonas sp. EC-HK361 OX=2038397 GN=SPHINGO361_130 011 PE=4 SV=1
MTPPSVVILGGGTAGWMTACLIAKAWPDASVTLVESPEIGIVGVGEGSTPQLRHFFRTLGIDERDWMPAAHATYKVGIAFRGWSREPGYEAYFHPFASAVDLHTEPAFHAAHLARRTGRDVPAHPDRFFLNSRLAEGSLAPLPSESFPFDATYGYHFDATLVGQVLRDHAVGRGVTHLPRRVDEVVIGAEGAVTHLVLDGGETLAGDLFVDCSGFGSVIAQGALGVPFVSYADTLFNDRAVVMPTPLTDAGPRPYTTSTALSAGWAWDIPLITRTGNGYVYSSRYIDADAAEAELRANLGDTNATARHLTMKVGRVAESWKGNCLAVGLAQGFIEPLEATALHIVQATVEGFVQAFTDGGFTPKHRDTFNRTIARRYDGIRDYIFAHYRLNRRGDTEYWRDCAANDRLSDSLKRLFTCWFTGGDLLTEIAEQDIARHYAPLSWGCIFAGYGTFPDAAKLTAVPTRDDGLDDFLTRCALNFPSHAKALEALAA

SEQ ID NO: 87446 - protein, 302 aa, Brevundimonas sp.
  misc_feature (1)..(302): tr|A0A519LC66|A0A519LC66_9CAUL Tryptophan 7-halogenase (Fragment) OS=Brevundimonas sp. OX=1871086 GN=EON87_029 05 PE=4 SV=1
MDRPDRVRHIVIVGGGTAGWMTASALSKVAGTQNQSITLIESDEIGIVGVGEATIPPILLFNKLLGIDENEFIRETQATFKLGIQFVDWGRLGHTYMHPFGLFGADMNGINFSHYWLRSVQGGGDPDNHRFVAEAEAMRLNRFARTPPGGSGDMPRINYAFQFDAGLYAAWLRKYAEKRGVVRREGKITTANKDGETGLIRSVTLSDGREVAGDLFIDCSGFRGLLIEQEMQAGYDDWTRWLPANRAVAVPCERVEDPVPYTRSTARESGWQWRIPLQHRTGNGYVFSDAFISEDQATADLM

SEQ ID NO: 87447 - protein, 512 aa, Brevundimonas sp.
  misc_feature (1)..(512): tr|A0A519L1N7|A0A519L1N7_9CAUL Tryptophan 7-halogenase OS=Brevundimonas sp. OX=1871086 GN=EON87_12780 PE=4 SV= 1
MEAKAPNALRKVCIVGGGTAGWIAAALMAEHFKGKLFDIELVESDDIGTIGVGESTVPPFLQLLAKLGVNEQEFIRETQASFKLGIEFRDWLEKGQSYFHPFGTIGLPIDLSDFYQVWLKAKMAGYDRPLQDFAPASVMAREGKFTLPFKAQRTPLAGASYALHVDAKRVAQFLRRFAEARGVTRTEGIVSDVKTRADGFVETLVLKDGRTVEADFFIDCSGFRALLIGKTLDVGYEDWSHWLLCDRAIAVQTENVGPPPPYTLAQAQDYGWRWRIPLQHRAGNGYVFASQYLSDDEATATLMAQVEGKPVVDPMVVPFKTGMRDRIWDKNVLALGLAGGFIEPLESTAIHLIYRGMDFFFRFLPDRDCASSLADEYNRRMRADYEEIRDFIILHYCVTRRTDTPFWDACRSMTVPDSLQRKIDLFRVNGTVSEGLDELFRDPNWQSVLDGMGVVPRTYHPLVDRIPFGRATEGLDEAVANLERMVAGLPDHQSFIAQHCAADRPAAPAAVA

SEQ ID NO: 87448 - protein, 535 aa, Gammaproteobacteria bacterium
  misc_feature (1)..(535): tr|A0A534GRQ5|A0A534GRQ5_9GAMM Tryptophan 7-halogenase OS=Gammaproteobacteria bacterium OX=1913989 GN=E6K27_00 495 PE=4 SV=1
MTTATLFNYSYSPTSGRNPYPAPVPVRRIVIVGGGTAGWMTALILARSLIERGVEITLLESPTVGIIGVGEGSTPWLRGFFDSLGLEESEWMPACHATYKCGIRFDGWSTKPGFGSYFHPFASMLDNLTMKQFVHNVEARINGADLEAHPDRYFIAARLAAKRRAPKASESFPFDVWHGYHFDAVLLGQFLHRKAVDRGVRYKSCHVTHANLDADGNIASVGTEEGETIAADLFVDCSGFAGLLIDKALHTPYVSFSSNLFNDAAVAIPAPMEGSIPSETVSTAMKHGWAWKIPLTTRFGNGYVYSSRFCSADEAETELRRHLGLLDADVPARHLKMKIGRVTRHWNRNCLAVGLSQGFIEPLEATALLFIQQTAATFVESVERGDLSEAAHERFNDMMNTHFEGIRDYIVTHYKTNTRTDTEYWRANAANLNLSDDLKKLYSLWMAGKSIAPAVGQQVLGKGYPVFSWYSIMAGMGIFPDPQDLRPPTAQEARFSEAEIDNLLERSCANYPDHRAALESIPPRRTEPALQVYFW

SEQ ID NO: 87449 - protein, 410 aa, Pseudomonas fragi
  misc_feature (1)..(410): tr|A0A449INC2|A0A449INC2_PSEFR Tryptophan halogenase OS =Pseudomonas fragi OX=296 GN=pobA_1 PE=4 SV=1
MERRQVVVIGAGPSGAIASALLKRKGHDVLVIERQHFPRFSIGESLLSHCIDFIEEAGMLDAVQAAGFQLKNGAAFAWGEQYSAFDFGDTFSNGKPTTFQVQRADFDKLLADQAALQGVEIRYGETVISTDIERAKPLLHIEREDTSRYQVEADFILDASGYGRVLPRLLDLEAPSNFPLRQAVFTHVEDRIDYAGFDRNKILITTHPTQRDIWFWSIPFSNGRTSVGVVAAAGHFEGRSENLDTCLRSFIDETPSLQRVLANAVWDTPARTLGGYSANVKTLHGPGFALLGNAAEFLDPVFSSGVTIAMRSASMAAGVLHRQLQGEAVDWQSEFAEPLKRGVDTFRCYVEGWYAGTFQDVIYHPGSQPHIRSMISSILAGYAWDESNPFVSESRRRLRMLSDICATEPA

SEQ ID NO: 87450 - protein, 23 aa, Gammaproteobacteria bacterium
  misc_feature (1)..(23): tr|A0A534B6M9|A0A534B6M9_9GAMM Tryptophan 7-halogenase (Fragment) OS=Gammaproteobacteria bacterium OX=1913989 GN=E6K52_06580 PE=4 SV=1
MNNPRLKNIVIVGGGTAGWMAAA

SEQ ID NO: 87451 - protein, 519 aa, Sphingomonas sp.
  misc_feature (1)..(519): tr|A0A5E7XYZ4|A0A5E7XYZ4_9SPHN Tryptophan halogenase OS =Sphingomonas sp. EC-HK361 OX=2038397 GN=SPHINGO361_100 435 PE=4 SV=1
MNQLKRILIAGGGSAGWMTAAMMSRLFQGLYEIILVESDAIGTVGVGEATIPAIKKFNELLGLNENEFLQRTQGTFKLGIRFIDWLRPGSSYTHGFGVIGQDLEWLRCHQYWLKMHGLGRASALDHFSINTAAVHHNKFMRARPDQPQSPIGQIANAFHFDAGLYAAYLADYAQARGVQRREGKIATVTLAPEDGPESGFVRSITMADGETIEADLFIDCSGFRGLIIAEALGAGYDDWSHWLPCDRAVAVPSERSDDFTPYTRSTARPAGWQWRIPLQHRTGNGHVYASRWMNDAEAEAILLDTLDAPAAGDPRRLRFVPGKRTQAWVKNCVAIGLAGGFLEPLESTGLHLIQSAILRLVRLLPDAGFDAANIAEFNRQTDFEYERIRDFIILHYKATERGDTPFWRHVRDMAVPATLQRKIDLFAANGRIFREDDELFAEESWIQVFIGQGIIPRGYDPLVDAKSPDEIAAFLGNIEQVIARCVEVMPTHAEYVAKTCPARPLTASARPVPGFAAAR

SEQ ID NO: 87452 - protein, 218 aa, Brevundimonas sp.
  misc_feature (1)..(218): tr|A0A519KNB1|A0A519KNB1_9CAUL Tryptophan halogenase (F ragment) OS=Brevundimonas sp. OX=1871086 GN=EON87_20775 PE=4 SV=1
VYASDHLSDDEAQARLLSSIDGERLIEPGLIRFRTGRRLKTWEGNCIALSLAAGFVEPLESTSIHLIMTGLARLVQAFPFDGISPAVVDRYNAQSREEMERIRDFIVLHYHLNQRDEPFWKAHRENDVPQTLKDRLALFGEQAQAYQAPDELFRVGSWMQVMLGQNLTPRAHHAMARMMPTDQLAGALNDLKSNIDRAVDRLPTHQAFVDSYCAEASA

SEQ ID NO: 87453 - protein, 539 aa, Gammaproteobacteria bacterium
  misc_feature (1)..(539): tr|A0A523LXM1|A0A523LXM1_9GAMM Tryptophan 7-halogenase OS=Gammaproteobacteria bacterium OX=1913989 GN=E2O53_00 460 PE=4 SV=1
MTPRKILIVGGGSSGWLTAAYLNAALNRDGRKFAQISLVESPDVPRIGVGEATIPNINHVLSVIGIDQREFMRRVDGTFKQSIKYVNWLHNNGDYYHHPFSRYRPGPIDRSGQRWLMSNRSIPFMETISAQPIICEMNLAPLMLGAWDFGRPLSYAYHLNALKFADYLCELSTARGVTHYLDHVVDVVMAENGDIAAVQTKGGKRLEADLFVDCTGFAALLSEQKLGVQWVDCSQWLLCDRAVTMHVPYEQHYPGYVRPYTTASALSSGWVWEIPLQDKRSLGYVHSSAFIGEDEAERELRAFEGAHAGSLDCRIVHFKVGHREKAWVRNCVSIGLAGSFIEPLESTGLYLSDLAAVMLAEHLPFGDDMAAPAYRFNRIMANRFYEILDFINMHYCLSRRTDTEFWREVQRPERITDRLRGKLEYWRVKPPSPTDFEDQYFPGQPDTPLPSGGLPGDHRPPVDTAGLWSHESYETILYGMDFLDKECDDWYGQQRPDSTLVRHVVEKLQQARQKLPPHDVWLQQVLGMPNYAATGRGSN

SEQ ID NO: 87454 - protein, 111 aa, Brevundimonas sp.
  misc_feature (1)..(111): tr|A0A519KN20|A0A519KN20_9CAUL Tryptophan halogenase (F ragment) OS=Brevundimonas sp. OX=1871086 GN=EON87_20825 PE=4 SV=1
MSRPIQRVLIVGRDAALWLTALSLRRALGGLGITVEVVELPSVLRPADAYVSTPSLVSLHHMMGLDEGRVLGATSGSEAYAQRFAGWSKGDHAFMHAYDTVGAGIEQIPFI

SEQ ID NO: 87455 - protein, 530 aa, Brevundimonas sp.
  misc_feature (1)..(530): tr|A0A519Q565|A0A519Q565_9CAUL Tryptophan 7-halogenase OS=Brevundimonas sp. OX=1871086 GN=EON88_14340 PE=4 SV= 1
MGAKRKIVIVGGGTAGWLTAAYLAKALGAGEGGRVDITLLESPDIGIIGVGEGAFPTIRNTLRFLGVDEAEFIREAAATFKQGIRFVDWEREGARFFHPFEAPFFTEEADIVGHWLALDPATRPTFAEAVTIQNRVAEARRAPKRPHEDDFTGPLSYAYHFDAHKLSAVLADCARGLGVRHVEGRLTHVELRSDGAVDHLVTAAGDTFTADLFVDCSGFRAEIIGQALQSPFKSARPILFTDRAVTARVPRAPGEAIESLTVATAHPAGWTWDIGLNGMRGVGCVYSSAHMSDEDAEATLRAYLGAAGADVATRTIAFEAGYREKPWIRNCVAVGLSAGFLEPLEATGLVLIETAVGMIADLLPMSGPIDAPARRFNEVMTARYDNIIAFLKLHYCLSKRPEPFWRDNTDPASIPPRLADLLEQWRYRPPARFDFTLDLESFAFYNYQYILYGMNFGAEPAPEPEEEARVAERVLARIQKFGDQAAHDLPGHDELIAQINRTPQPSGQNSRMAGGPISRTSRLKGAPRRA

SEQ ID NO: 87456 - protein, 506 aa, Brevundimonas sp.
  misc_feature (1)..(506): tr|A0A519HGQ1|A0A519HGQ1_9CAUL Tryptophan 7-halogenase OS=Brevundimonas sp. OX=1871086 GN=EON90_11220 PE=4 SV= 1
MDTRTPEPIRSVVIVGGGTAGWMAAAALVQHFRASPLKITVVESSEIGTIGVGEATIPTIRRFYAQLGISDAEVMRATQATCKLGIRFYDWSGPGSDFIHPFGLYGQDPRGIGFHNFWMQTRKDGDRSALSEFSLGASLAQAGKFTLPSPNPPSPMSVFDWALHLDASLFAQHLRKYAEMGGCERIDAKVQEVRLRPEDGFIRAIALEDGREVEGDLFVDCTGFRGLLIDQALGSRFQDWGQWLPCDAAYAIQSENAPGDDPQPFTRVTARSAGWQWGIPLRHRAGNGLVFSSAHQTDDEAIAELMPELLGKPLMEPRKIPFRPGRRERAWVKNCVSLGLAAGFLEPLESTSIALIETGIERLRALFPDRSFAQPVIDEFNDQSAREMERVRDFIILHYKLNRRDDTAFWRDCRAMAVPDTLQRKLDLWKARGQFVRYRWEMFHPASWLAIYNGFDEMPDVIDPGVAAFDPGQLKASLDEMRAAVAQAVAEAPTHAEFLAPLDRPL

SEQ ID NO: 87457 - protein, 172 aa, Brevundimonas sp.
  misc_feature (1)..(172): tr|A0A519JZB6|A0A519JZB6_9CAUL Tryptophan halogenase (F ragment) OS=Brevundimonas sp. OX=1871086 GN=EON85_05695 PE=4 SV=1
MTQPKKTRVVIAGGGTAGWLAAALLTRQLGPLLDVTLVESEQIGTVGVGESTIPTVTRFHALIGVEERAFMTATGATFKLGISFEGWGRKCDRYIHSFGDVGKSTWMGDFQHFWLEARDRGVAGALGDYCFEHQAADASKFASGGDARLNYAYHLDAGRYARFLRAHAEAAG

SEQ ID NO: 87458 - protein, 144 aa, Brevundimonas sp.
  misc_feature (1)..(144): tr|A0A519L136|A0A519L136_9CAUL Tryptophan 7-halogenase (Fragment) OS=Brevundimonas sp. OX=1871086 GN=EON87_133 30 PE=4 SV=1
MSDDQSIRSVVIVGGGTAGWMTAAALVQHFRNAPVRITVVESSDIGTIGVGEATIPTIRRFYAQLGIGDAELMAATEATCKLGIRFHDWSRLGSDFIHPFGLYGQDLNGIGFHHYWRKAHQAGDPAPLADYSLGASLARAGRFT

SEQ ID NO: 87459 - protein, 177 aa, Brevundimonas sp.
  misc_feature (1)..(177): tr|A0A519Q0R9|A0A519Q0R9_9CAUL Tryptophan halogenase (F ragment) OS=Brevundimonas sp. OX=1871086 GN=EON88_16770 PE=4 SV=1
WIGNVVAIGLSSGFLEPLESTSIHLIQTAISKLLALFPRGRRDDAMADQFNREMDQQYEGVRDFIIAHYKVSTRDDTPFWRHCRDMAVPDSLAAKLELFRSRGEVMVENHELFRETNWFPILYGQGLTPESYHPLADVLSDDDLRLRLSQIRAAIKQRVDGLPSHDDYLRQCVAAVR

SEQ ID NO: 87460 - protein, 535 aa, Gammaproteobacteria bacterium
  misc_feature (1)..(535): tr|A0A523LXH9|A0A523LXH9_9GAMM Tryptophan 7-halogenase OS=Gammaproteobacteria bacterium OX=1913989 GN=E2O53_00 455 PE=4 SV=1
MMKARRVLIVGGGSAGWMTAAYLDAVLNGAGPIPVDIALIESPDVPRIGVGEATIPSINHILAAIGIDEVEFMKRVDGTFKQAIKYVNWLDGQGESYYHAFGRYRESPYDVSSLNWLMSDRSLPFSETISAQPVICEKFFAPKMNGQWDMGAQFTYAFHMNALKFADYLCEIATSRGVKHHRDHVVDVEMAENGDIAALRTRGGDRLEADLFIDCTGFASVLIEKKLGVGWVDCSQWQLCNRALTLQVPYEHNYPGYVRPNTLATALSAGWVWEIPLQNRRAWGYVHASEFISEDDAEKELRAFAGPLGDAFETRMVPFKVGYRTKTWVRNCIAVGLSAGFIEPLESTGLYLSDLAAVMLTEHFPYGGDMAPLAFRYNRIISNRFHEILDFINMHYCLTRRTDTEFWREVQRPERINDRLKAKLDFWRIKPPSPADFEDQWFPGQPDTPLPSSGLPGDHRSPVDTAGIFTLSSYEAILYGMDFLSAECDQWFGKNRPASQVPSGILKRLQVAPQKLVPHDVWLQRFCGMPDYSQD

SEQ ID NO: 87461 - protein, 194 aa, Brevundimonas sp.
  misc_feature (1)..(194): tr|A0A519Q801|A0A519Q801_9CAUL Tryptophan 7-halogenase (Fragment) OS=Brevundimonas sp. OX=1871086 GN=EON88_131 80 PE=4 SV=1
IRNCVAVGLSAGFLEPLEATGLVLIETAVGMIADLLPMSGPIDAPARRFNEVMTARYDNIIAFLKLHYCLSKRPEPFWRDNVDPASIPPRLADLLDQWRYRPPARFDFTLDLESFAFYNYQYILYGMNFGAEASSEPADEARVAEKVLARIQKFGDQAAHDLPGHDELIAQINRAPQPKPAPIPAPPRKTRARA

SEQ ID NO: 87462 - protein, 510 aa, Brevundimonas sp.
  misc_feature (1)..(510): tr|A0A519HY11|A0A519HY11_9CAUL Tryptophan 7-halogenase OS=Brevundimonas sp. OX=1871086 GN=EON89_04650 PE=4 SV= 1
MVDQTQRYRIVILGGGSAGWMTAAMLVSRLSPANYEIALIESDLIGTVGVGEATLPHIKHFNDTLGIDEADFVAQTQATFKLGIEFVGWGRPGERYIHPFGAFGEPWRGVEFQHQWLRNRAMGRPTLPLAAYSYAVAAAEARRFDLPDEDRRSIRSTYAYAYHFDAGLYAAYLRRWAVARGVDRTEGLVEGVDRDAQSGDVTGLRLQSGVTIQGDLFVDCSGFRSVLVGDAQAVPWRDWSAWLPCDRALAVPSARAGDFTPFTRSTAQTAGWTWRIPLQHRTGNGYVYSSQFIDEAAARATLLGAVDSEPLDEPRLLRFQAGRREKAWARNCVAIGLASGFLEPLESTSIFLIQAAAHDLATLMPARGERRVDCRLSDEFNRLFEIHYERARDFLILHYALNGREGEPLWDHVRRMPLPESLAHRIALFRTRAALPSYELGLFSRDSWLSVLVGQGLAPDGYDRLAYALDPEALEARLAAFADRIASNVSTMTSHEDFVAAYRAGAGAAT

SEQ ID NO: 87463 - protein, 134 aa, Brevundimonas sp.
  misc_feature (1)..(134): tr|A0A519QLB4|A0A519QLB4_9CAUL Tryptophan halogenase (F ragment) OS=Brevundimonas sp. OX=1871086 GN=EON88_01650 PE=4 SV=1
KLADQFNRDMAFDYDNVKDFLIAHYKVTEREDTPFWAYCKHMDIPEALKTRLQIFQERGDAMVRQYELFKEGSWWAVLSGQGMIPDSYHPVADVISEEDLRQRLSRIRTAIQDRVNTMPVQEAYLRDAKLSATA

SEQ ID NO: 87464 - protein, 336 aa, Brevundimonas sp.
  misc_feature (1)..(336): tr|A0A519K773|A0A519K773_9CAUL Tryptophan 7-halogenase (Fragment) OS=Brevundimonas sp. OX=1871086 GN=EON86_204 25 PE=4 SV=1
RLVQPQQAVQGADAYTAVPSLGALHSLLGLDEATVLEATRGLPVLGQRFANWSRAKAPFTHGYDTHRVALNDIDFLQFWVKARGEGMGVDLDDFSLAVAAAKQGRSPVSRDGDRPELPVSPGYHLDARAYVDLLRRTALQAGIEGRGADVRSVQRDGARIASVTLADGLTVQADLFIDASGPAAVLASSAPDAAFESWRHWFGADRLLVASAPRLKPLPAFAQIAAFPAGWIGLHPLKDRTAIVAAYDSRMMGDQAVLDALPVLTGLPVSGDAAVEDFHAGVRPAWTGNCVAIGSAAVSLEPLDAVQLHLIHTGLSNLIGLFPTEAAAMPEAEAYN

SEQ ID NO: 87465 - protein, 512 aa, Brevundimonas sp.
  misc_feature (1)..(512): tr|A0A519KX47|A0A519KX47_9CAUL Tryptophan 7-halogenase OS=Brevundimonas sp. OX=1871086 GN=EON87_15825 PE=4 SV= 1
MEAKAPNALRKVCIVGGGTAGWVAAALMAEHFRGKLFEIELVESDDIGTIGVGESTVPPFLQLLAKLGVNEQEFIRDTQASFKLGIEFKDWLEKGQSYFHPFGTIGLPIDLSDFYQVWLKAKMAGYDRPLQDFAPASVMAREGKFTLPFKAQRTPLAGASYALHVDAKRVANFLRRFAEARGVTRTEGIVSDVQTRADGFVEQLVLKDGRTVEADFFIDCSGFRALLIGKTLDVGYEDWSHWLLCDRAIAVQTENVGPPPAYTLAQAQDYGWRWRIPLQHRAGNGYVFASQYLSDDEATATLMAQVEGKPVVDPMVVPFKTGMRDRIWDKNVLALGLAGGFIEPLESTAIHLIYRGMDFFFRFLPDRDCAPELASEYNRRMRADYEEIRDFIILHYCVTRRTDTPFWDACRTMTVPDSLQRKIDLFRINGTVAEGLDELFRDPNWQSVLDGMGVVPRTYHPLVDRIPFGRATDGLDEAVGNLERMVSGLPDHQSFIAQHCAAERPVAPATVA

SEQ ID NO: 87466 - protein, 257 aa, Brevundimonas sp.
  misc_feature (1)..(257): tr|A0A519L0G7|A0A519L0G7_9CAUL Tryptophan halogenase (F ragment) OS=Brevundimonas sp. OX=1871086 GN=EON87_13830 PE=4 SV=1
AMPCAPVPGITPYTRSTAMDAGWRWRIPLQHRTGNGHVYCSDHIDDETALNQLVEGLDGEAMADPRVIKFQTGKRKAFWAKNVCALGLATGFIEPLESTSIHLIHVGIAKMLQHFPDRDFSPANIDIYNRRMDREVQQVRDFVILHYHASERDDSEFWRRVRDMPIPDTLAERVEAFRDRGMIYQVAADEYFSMASWMAVMVGQGIEPRMANPLYRFQNLERAAEGFERVRTTFAQAAEALPTHEAFLRAENLWKTA

SEQ ID NO: 87467 - protein, 454 aa, Brevundimonas sp.
  misc_feature (1)..(454): tr|A0A519JRQ0|A0A519JRQ0_9CAUL Tryptophan 7-halogenase (Fragment) OS=Brevundimonas sp. OX=1871086 GN=EON85_112 95 PE=4 SV=1
MERSNRVRDIVIVGGGTAGWMTASAMAKVIGARDLSITLIESEEIGIVGVGEATIPPIQLFNRLLGVDENEFIRETQATFKLGIQFVDWGRKGHAYMHPFGLFGPEMNGINFSHYWLRALQAGGDADNHRFIAEAEAMRLNRFARTPPGGSGEMPRINYAFQFDAGLYARWLRKYAEARGVVRCEGKITHADRDGESGLIRSVTLADGREVKGDLFVDCSGFRGLLIEQEMQAGYEDWTQWLPANRAVAVPSDRVEDPVPYTRSTARDAGWQWRIPLQHRTGNGYVFSDAFISEEQATSDLMGSLDGAAQAEPRVLRFVTGRRRKGWVGNVVAIGLSSGFLEPLESTSIHLIQTAISKLLALFPRGPRDDLMADQFNHEMDQQYESVRDFIIAHYKVGARDDTPFWRHCRDMDMPDSLKAKLERFRARGEVMVERHELFGESNWFPILYGQGLV

SEQ ID NO: 87468 - protein, 169 aa, Brevundimonas sp.
  misc_feature (1)..(169): tr|A0A519J7R2|A0A519J7R2_9CAUL Tryptophan 7-halogenase (Fragment) OS=Brevundimonas sp. OX=1871086 GN=EON85_158 40 PE=4 SV=1
NCIAIGASAVSLPPLDAVQLHMIHIGLSTLISLFPAAAETMPEAAAYNRAMVSHVVNVRDFQLTHTVLNGRVGEPFWDRARAMELPASLRTRLRIFAARGRVLLNEDESFQPHNWTQILLGHGLMPSDHDPAVDAVPAGDQMARVQGLLTRIAGEVKAMPALDPEFGAV

SEQ ID NO: 87469 - protein, 536 aa, Calothrix sp.
  misc_feature (1)..(536): tr|A0A2H2XG81|A0A2H2XG81_9CYAN Tryptophan halogenase OS =Calothrix sp. NIES-4071 OX=2005469 GN=NIES4071_25750 P E=4 SV=1
MNFDTKIQSIAIVGGGSTGWMAAAYLAKALQGSVKITLIESDRIPTVGVGEATVPSIQPDLFGFLGIPESEWMPECKATFKIGIKYVNWAYQPSVTENNTFYHIFGEAKDCDGIPLTHYWLKKRLEGYQNPMASSCYSSPALCQNYKSPKYLNGDMAANYAYHFDASLVAKFLTRWSTERGVVHVIDDVSDVILDDTGAISYLKTQKGDTYTADLYLDCSGFRGLLINQALKEPFLSYSDNLLCDSAVATAIPTDDNDDNFRPYTTATALSSGWVWEIPLYGRVGTGYVYSQKFLDPEAAEQEFRDFHGLAKDFPVKHLKMRVGRTERAWVKNCVSLGLASGFIEPLESTGIYFIYSALKQLVRYFPDKTMSPALRDKFNERIAYMVDDVRDFIVLHYCTTSREDTPFWKANKYDLKIPESLQELLEVYLAGAPINIPYSDDDGYNRIFDAGFDRFWTNSNYMAILAGVNYLPNSVLPSLNHKPQSLEKAEKIFKNVENTTKNLLQELPSHYEYIRSLNVKAQPSRIKLPLEAVLH

SEQ ID NO: 87470 - protein, 131 aa, Brevundimonas sp.
  misc_feature (1)..(131): tr|A0A519KSZ7|A0A519KSZ7_9CAUL Tryptophan halogenase (F ragment) OS=Brevundimonas sp. OX=1871086 GN=EON86_13065 PE=4 SV=1
DNEYDRVRDFLILHYHANTRTDSELWRHCREMDIPDTLKEKMALFGHRGHIAQYKDGLFSPPSWLSVFVGQGVVPTGYHPMADNLPLATALEEMESIRRRISDRVDAMPGHAEFVRDYCAGEAPLKAGGMA

SEQ ID NO: 87471 - protein, 502 aa, Brevundimonas sp.
  misc_feature (1)..(502): tr|A0A519QB09|A0A519QB09_9CAUL Tryptophan 7-halogenase OS=Brevundimonas sp. OX=1871086 GN=EON88_10200 PE=4 SV= 1
MRPLKRILIVGGGSAGWMAAALLSKLFKGLYEITLIESDAIGIIGVGEATIPAIKKYNELLDLDENAFMQRTQASFKLGIQFVDWDRLGDSYIHGFGVIGRDLGWLRAHHYWLQANQRGTAPDFADLSINTAAALENRFMRAEPKMAESPLGHIGHAFHFDAALYVRYLRGRAEAAGVTRLEGKVEDVTLDPDDGFVRSVTMEGGQVVEADLFIDCSGFRGLITEQALKTGYDDWSRWLPCDRAIALPCPRVEPLLPYTRATARPAGWQWRIPLQHRTGNGHVYSSKFMDDAEAERILVENLDGPALAEPNRIRFLTGKRKKVWNKNCVALGLASGFLEPLESTSIHLVQSILIRLIRLLPDAGFDEATVAEFNRQTDFEYERIRDFIILHYKATHRDDTEFWRYCRDMEVPETLQRKMDLWLANGRIFREDEELFAEESWIQVFLGQGMVPRGHDPMVGLRPDAEIDAFLGNITGVIRKCVDRMPDHAAYVAKVCPATPPT

SEQ ID NO: 87472 - protein, 456 aa, Mycobacterium kansasii
  misc_feature (1)..(456): tr|X7Z701|X7Z701_MYCKA Tryptophan halogenase family pro tein OS=Mycobacterium kansasii 732 OX=1299327 GN=I546_0 044 PE=4 SV=1
MRNSAANPRAHAVVIGASVAGLCAARALADFYATVTVFERDDLPDTPSYRGAVPQDRHLHLLMARGALEFEALFPGLLAELASAGVPMLDNRPDCIYLGAVGHVLGIGRQLRQQFTAYLPSRPHLEWQLRRRVLALSNVEIRQHNVSRPQFDGARDRVTGVLLETGAGDPEFVAADLVIDAAGRGSRLPVWLAQWGYQRPAEDTVDVGIGYASHRLTIPDGLIREKIVVTGVGPGQSLGLGMLCYEDGSWILTTFGVAKATPPGTFEEMRELGYRLLPTRFVDALAQAEPVGGPAFHAFPVSRWRRYDKLSRFPAGIIPFGDAVASFNPTFGQGMTMTALQAGQLRQALQSAPGEPATEFNRAAAKITRPVWTMNAIADRCFQHADGPMPRWYRPVGALYDQFLGAAETNPVLAEWFLRRISLLDSLYTVPSAPIIGRAVAHNMRLWLRERRLGRR

SEQ ID NO: 87473 - protein, 98 aa, Brevundimonas sp.
  misc_feature (1)..(98): tr|A0A519KMG4|A0A519KMG4_9CAUL Tryptophan halogenase (F ragment) OS=Brevundimonas sp. OX=1871086 GN=EON87_21170 PE=4 SV=1
MSRPIQRVLIVGRDAALWLTALGLRRALGGLGITVEVVELPSVLRPADAYASTPSLVSLHHMLGLDEGRVLGATSGSEAYAQRFAGWSKGDHAFMHAY

SEQ ID NO: 87474 - protein, 137 aa, Brevundimonas sp.
  misc_feature (1)..(137): tr|A0A519PFM7|A0A519PFM7_9CAUL Tryptophan halogenase (F ragment) OS=Brevundimonas sp. OX=1871086 GN=EON88_26785 PE=4 SV=1
DAATTAEFNRQTDFEYERIRDFIILHYKATRRDDTEFWRHCRDMEVPETLQRKMDLWMANGRIFREDEELFAEESWIQVFLGQGIVPRGYDPMVGLRPDAEVDAFLGNITGVIRKCVDRMPDHAAYVAQVCPATPPT

SEQ ID NO: 87475 - protein, 138 aa, Gammaproteobacteria bacterium
  misc_feature (1)..(138): tr|A0A534GYM4|A0A534GYM4_9GAMM Tryptophan 7-halogenase OS=Gammaproteobacteria bacterium OX=1913989 GN=E6K24_18 060 PE=4 SV=1
MMNTHFEGIRDYIVTHYKTNTRTDTEYWRANAANLNLSDDLKKLYSLWMAGKSIAPAVGQQVLGKGYPVFSWYSIMAGMGIFPDPQDLRPPTAQEARFSEAEIDNLLERSSANYPDHRAALESIPPRRTEPALQVYFW

SEQ ID NO: 87476 - protein, 498 aa, Gammaproteobacteria bacterium
  misc_feature (1)..(498): tr|A0A534C9X9|A0A534C9X9_9GAMM Tryptophan 7-halogenase OS=Gammaproteobacteria bacterium OX=1913989 GN=E6K43_06 505 PE=4 SV=1
MAAAALAKVLGRECAIRLIESEEIGTVGVGEATVPHLKLFNSVLEIDEVEFIREVRGTFKLGIQFVDWGRCGDRYIHGFGTIGHDYGLLPFHQYWLKLFLAGKAADIGAYSLNTAAAPLGKFMSSAHDVPATSPLANITYAYHFDAGLYAAYLRRYAEARGVRRTEGKVVDVRLRDTDGFIEAVVLEGGEEASADLFIDCSGFRGLLIEQALHTGYEDWTHWLPCDRAMAVPCEKVGPPTPYTRSTARSAGWQWRIPLQHRTGNGYVYSSAYIKDDAVADTLMSNLDGRPLAEPRVLKFTTGMRRKFWNRNCVAVGLASGFMEPLESTSIYLIQSGIARLINLLPDRSFSPVLIERYNEQAAFEFERIRDFLILHYFATERRDSPFWQYCSSMEIPSQLADNIRLFRDSGRFFRNAEEMFAITSWVQVMLGQHILPRNYHPAVDLIPEAELNELVGAVRNVISTCVAAMPMHEQFIARYGQTAAQQAAERPATTRQGR

SEQ ID NO: 87477 - protein, 445 aa, Brevundimonas sp.
  misc_feature (1)..(445): tr|A0A519KZB8|A0A519KZB8_9CAUL Tryptophan 7-halogenase (Fragment) OS=Brevundimonas sp. OX=1871086 GN=EON86_076 10 PE=4 SV=1
MSAAGLVGVLKPDQVRVRLVESDDIGTVGVGEATLPQMREFNDRIGIVESEMMRKTNATFKLGIEFRDWGFRGSSYVHPFGAHGHPMGGVGFHHQWTRARLAGEAHDIGDYSYAIVASRRNRFDFPAADKSAVNSTYDYAYHFDAGLYARYLRDWCEARGLTRTEGKVKEVRLNPHSGDVAAIVLESGEAITGDLFIDCSGFRGLIIGGALNGPFEDWTRWLPCDRALAVPTERSEDFTPYTRSTALEAGWQWRIPLQHRTGNGYVYSSSFISDDEAATRLLGNLDGKPLADPKPIRFRSGRRTASWTKNCIAVGLASGFLEPLESTSIYLTQVAVLTLLDLLPRGPIDPVLAEEFNRVVDNEYDRVRDFLILHYHANTRTDSELWRHCREMEIPDTLREKMALFGHRGHIAQYKDGLFSPPSWLSVFVGQGVVPTGYHPMADTL

SEQ ID NO: 87478 - protein, 507 aa, Gammaproteobacteria bacterium
  misc_feature (1)..(507): tr|A0A534JDA1|A0A534JDA1_9GAMM Tryptophan 7-halogenase OS=Gammaproteobacteria bacterium OX=1913989 GN=E6K20_05 080 PE=4 SV=1
MPAQELKSVVIAGGGTAGWMAAAAIAKVMGPRLAITLVESDEIGIIGVGEATIPSIALYNDLLRLDENDFLRQTQGTFKLGIEFVNWYEPRHRYMHAFGGIGKDLADIPFHHYWLQEVLQGRGDPLWHYSLNWMAAHQNRFARLERIADTPLPGVIYAFHFDASLYAAYLRRLALQMGVRRVEGMIAEVLQNPESGDVSALRLKDGREITGELFIDCTGFRALLIERTLKVGYDDWTRWLPVDRALAIPTERVGPLTPYTRSTALEAGWQWRIPLQHRTGNGHVYSSAFMDDDRAAELLMASLDSRPLADPRPIRFVTGRRRQLWSHNVVCLGLASGFLEPLESTAIHLIQANIQRLILLFPHHGDCDHRRAQFNQAAAAEYEYVRDFIILHYHLNNRVGERFWDACRQMSVPDSLTHKIELFRETGGIFPTMYDLFHLTSWLQVMWGQGVRPRGAHPFVQTVAPHDRVEYLKNIRDLIAQAASELPPHDEFIARHCRAPAPAAAVT

SEQ ID NO: 87479 - protein, 362 aa, Brevundimonas sp.
  misc_feature (1)..(362): tr|A0A519KN28|A0A519KN28_9CAUL Tryptophan 7-halogenase (Fragment) OS=Brevundimonas sp. OX=1871086 GN=EON87_217 45 PE=4 SV=1
QAADASKFASGGDARLNYAYHLDAGRYARFLRAHAEAAGLTRVEGKIETVERDAGSGLITALALDGGRRVEGDVFLDCTGFRGLLIGEAMGVGFEDWGHWLPTNRALAVQTVSTEPAAPYTRAIAHDAGWRWKIPLQHRVGNGLVYASDHLSDDEAKARLLSSIDGERLIEPALIRFRTGRRVKTWEGNCIALSLAAGFVEPLESTSIHLIMTGLARLVQAFPFDGISPAVVDRFNAQSREEMERIRDFIVLHYHLNQREEPFWKAHRENDVPQTLKDRLALFGEQAQAYQAPDELFRVGSWMQVMLGQNLTPRAHHAMARMMPTDQLAGALNDLKSNIDRAVDRLPTHQAFVDSYCAEASA

SEQ ID NO: 87480 - protein, 309 aa, Brevundimonas sp.
  misc_feature (1)..(309): tr|A0A519KN08|A0A519KN08_9CAUL Tryptophan 7-halogenase (Fragment) OS=Brevundimonas sp. OX=1871086 GN=EON87_208 30 PE=4 SV=1
NGHIASVTLESGEVVTGDLFIDCSGFKGLLIGETMESPFEDWTKWLPCDRAMAVPCARSDDFTPYTRSTAREAGWQWRIPLQHRTGNGYVYSSAFISDDEAARTLMDNLDGEALADPRPIRFKAGRRTESWKGNCVAIGLASGFLEPLESTSIYLVQIAINNLVQLWPRKAMDPVLIKEFNRLVDNEYDRVRDFLILHYHANTRDDAELWRYTREMSVPDSLQDKIDRFRHRGDIPFYRSGLFAPPSWVSVMFGQGLKPEGHDRLTERLKLEDVQQRLETLRRKISNRVDAMPTHDQFVRDYCGVKEAA

SEQ ID NO: 87481 - protein, 433 aa, Gammaproteobacteria bacterium
  misc_feature (1)..(433): tr|A0A534H1X5|A0A534H1X5_9GAMM Tryptophan 7-halogenase (Fragment) OS=Gammaproteobacteria bacterium OX=1913989 GN=E6K24_16425 PE=4 SV=1
MAAAAIAKVMGPRLSITLVESDEIGIIGVGEATIPSIALYNDLLRLDENDFLRQTQGTFKLGIEFVNWYEPGHRYMHAFGAIGKDLAYIPFHHYWLQEVLQGRGESLWHYSLNWMAAHQDRFARLERIADTPLPGVIYAFHFDASLYAAYLRRLAQQMGVRRVEGMIAEVLQNPESGDVSALRLKDGREISGELFIDCTGLRGLLIERTLKVGYDDWTRWLPVDRALAIPTERVGPLTPYTRSTALEAGWQWRIPLQHRTGNGHVYSSAFVDDDRAAELLMANLDSRPLADPRPIRFVTGRRRQLWSHNVVCLGLASGFLEPLESTAIHLIQANIQRLVLLFPHHGDCNHRRAQFNQAAAAEYEYVRDFIILHYYLNNRVGERFWDECRHMSVPDSLTHKIELFRETGGIFPTMYDLFHLTSWLQVMWGQGVR

SEQ ID NO: 87482 - protein, 510 aa, Brevundimonas sp.
  misc_feature (1)..(510): tr|A0A519HGP7|A0A519HGP7_9CAUL Tryptophan 7-halogenase OS=Brevundimonas sp. OX=1871086 GN=EON90_11215 PE=4 SV= 1
MTDRPRPLKKICIVGGGSAGWIAAAIMSEFFKGSVAEIELVESDDIGIVGVGESTIPPFLQMLQRLGINEQDFLKEVQGSFKLGILFKDWKEKGEDYIHPFGKFGPPVDHEETYDAWLRARAEGYTRPLEEFAPASVMIREDRFTLPFKATRTPIGDAAYSVHIDARKMARYLRRYSEARGVTRTEGIVEQVVQRPDGFVEAVVLKDGRRVEADFFIDCTGFRALLIGKTLGVGYHDWSPWLLCNRAVALQVTNPTPPGPYTLAHAQDAGWCWRIPLQQRSGVGYVFCDRFISDDEALATLLAQAGGEPVVDPWIIPFKSGMRERLWEKNVLSLGLAGGFIEPLESTALHLIYRGMDFFMRFLPDVDCDANLITEYNRRMEQDYEEIRDFVILHYATTQRDDNAFWRECRDMELPESLQSKIDLFKVNGTVREGVDLMFRSVSWQSVLEGMGQKPRGYHPLMNRLAIEKLPAYLDQGAAAIRQAVAGLPTHEEFLKAHCTAPSADWQAPV

SEQ ID NO: 87483 - protein, 169 aa, Brevundimonas sp.
  misc_feature (1)..(169): tr|A0A519JRP9|A0A519JRP9_9CAUL Tryptophan 7-halogenase (Fragment) OS=Brevundimonas sp. OX=1871086 GN=EON85_112 90 PE=4 SV=1
NCIAIGASAVSLPPLDAVQLHMIHIGLSTLISLFPAAAEAMPEAAAYNRAMVSHVVNVRDFQLTHTVLNRRVGEPFWDRARAMELPASLRTRLRIFAARGRVLLNEDESFQPHNWTQILLGHGLMPSDHDPAVDAVPTGDLMARVQGLLTRIAGEVKAMPALDPEFGGV

SEQ ID NO: 87484 - protein, 82 aa, Gammaproteobacteria bacterium
  misc_feature (1)..(82): tr|A0A534E4L7|A0A534E4L7_9GAMM Tryptophan 7-halogenase (Fragment) OS=Gammaproteobacteria bacterium OX=1913989 GN=E6K36_18075 PE=4 SV=1
YIGLFGEAGRFFRNGTELFAVTSWVQVMLGQGIMPRSYHPVVDWVSDDDLKSFVETVEKLIARCVSIMPRHEDFIARHCAAV

SEQ ID NO: 87485 - protein, 514 aa, Sphingomonas sp.
  misc_feature (1)..(514): tr|A0A0A1Y984|A0A0A1Y984_9SPHN Tryptophan halogenase OS =Sphingomonas sp. BHC-A OX=322611 GN=AI27_06745 PE=4 SV =1
MIHPVRNIVIVGGGTAGWLTAGVIAARHRSRIGNGFTVTLVESPNTPIIGVGEGTWPTLRTTLSRMGISETDLFRECDAAFKQGARFARWTTGTPDDGYYHPLMLPQNFGQVNLAPHWLAGEGDESFCDSVCSQGRICDDGLAPKTIATAEYDALANYAYHLDAGKFAPFLQRHCCEKLGVRHVLADVEQVLMKEDGDIRAIRTTQAGEIEGDLFVDCTGFKALLIEGAMKVPFRDCNDVLFCDTALAMQVPYDRPDSPMASHTISTAQSAGWIWDIGLPTRRGIGHVYSSNHISDEEAERELRAYIGPPAEGLSARKIAIRSGHRETFWKGNCVAVGLAAGFLEPLEASAIVLIELSAKIIAEQMPACREVMDIVASRFNATTYYRWGRIIDFLKLHYVLTKRTDSDFWRDNVREETIPDRLQELMLLWRYQSPWFLDEFDRVEEVFPAASYQYVLYGMGFRTEIDRPALARDAHLADRARRENAAMTAKLRAGLPRHRDLIDKIVTHGLQPV

SEQ ID NO: 87486 - protein, 382 aa, Brevundimonas sp.
  misc_feature (1)..(382): tr|A0A519KSW5|A0A519KSW5_9CAUL Tryptophan 7-halogenase (Fragment) OS=Brevundimonas sp. OX=1871086 GN=EON86_130 60 PE=4 SV=1
MNRRVEQVLVVGRDAAVWLSALALNRALGRTGVKVRVVEMPSLLTPADVYAAVPSLGALHSLLGLEEATVLEATRGLPVLGQRFANWSRAKAPFTHGYDTHRVALNDIDFLQFWVKARGEGMGVDLDDFSLAVAAAKQGRSPVTRDGDRPELPVSPGYHLDARAYVDLLRRTALQAGIEGRGADVRSVQRDGDRIVSVTLADGLTVQADLFIDASGPAAVLASGAPDAPFESWRHWFGADRILVASAPRLKPLPAFAQIAAFPAGWIGLHPLKDRTAIVAAYDSKVMGDQAVLDALPVLTGLPVSGDAAVENFHAGVRPAWTGNCVAIGAAAVSLEPLDAVHLHLIHTGLSNLIGLFPTEAAAMPEAEAYNRAMTSHVGNIR

SEQ ID NO: 87487 - protein, 499 aa, Brevundimonas sp.
  misc_feature (1)..(499): tr|A0A519HKN7|A0A519HKN7_9CAUL Tryptophan 7-halogenase OS=Brevundimonas sp. OX=1871086 GN=EON90_05590 PE=4 SV= 1
MQQLRKILIVGGGTAGWMTAALLSKLFKGLYEITLIESEAIGIIGVGEATIPAIKKYNELLGLDENEFMRKTQGSFKLGIQFVDWFDHGTSYIHGFGVIGRELGWLRCHQYWLQANARGKASDLAAFSINTVAALDNKFMRADPKMVESPLGHIAHAFHFDAALYAKYLRGLAEAAGVRRREGKVADVTLRSEDGFVQSVTMEDGEVIEADLFIDCSGFRGLITEQALKTGYETWTHWLPCDRAMAVPCARVEPFTPYTRATARPAGWQWRIPLQHRTGNGHVYSSQYMDDDEAERILLSNLDGEQLAEPNRIRFVTGKRKKIWNKNCVALGLASGFLEPLESTSIHLIQSSIVRMVRLLPDAGFDEATVAEFNRQTDFEYERIRDFIILHYKATRRDDTPFWRYCRDMEVPDTLQRKMDLWRANGRIFREDEELFAEESWIQVFLGQGEIPRAYDPLVDLKTDEEIDAFLGNVETVIGKCAALMPDHAAYVAKICPAD

SEQ ID NO: 87488 - protein, 498 aa, Brevundimonas sp.
  misc_feature (1)..(498): tr|A0A519LDC8|A0A519LDC8_9CAUL Tryptophan 7-halogenase OS=Brevundimonas sp. OX=1871086 GN=EON87_02910 PE=4 SV= 1
MSRPMKPRVEQVLVVGRDAAAWLTALALHRALGRTGVKVRVVEMPSLLTPADVYSAVPSLGGLHALLGLDEGAVLEATRGLPVLGQRFANWSRARAPFIHGYDTHRVALNDIDFLQFWVKARGEGMRVELEDFSLAAAAAKQGRSPVARDGERPEAPVSPGYHLDARAYVDLLRRTALQAGIEGRSADVRSVERSGDRITSVTLSDGLKVQADLFIDASGPAAVLASGAPDAPFESWRRWFGADRILVASAARLSPLPAFSHIAAFPAGWVGLHPLRDRTALVAVYDSKVMSDQAVLEALPVLTGLPLTGDAAVEDFHPGARPPWSGNCVAIGPAAVSLEPLDAVQLHLIHTGLSTLIGLFPTEADAMPEAEVYNRSMASHLANIRDFLITHYALNQRFDEPVWDRARDMVLPDKLQTRLRVFAARGRVPLYEDESFQQQNWVQILIGHGLIPASYDPMVDTVPVDEQMDKVRGLLARIAEEVQSMPDLDAEFGGSAG

SEQ ID NO: 87489 - protein, 511 aa, Streptomyces olivaceus
  misc_feature (1)..(511): tr|A0A2R3ZQ24|A0A2R3ZQ24_STROV Tryptophan halogenase OS =Streptomyces olivaceus OX=47716 GN=mymM PE=4 SV=1
MIRNIVVVGGGTAGWMTATYLKRTFGDRLDITLVESARVGTVGVGEATFSTIRHFFAHLGLQERDWMPHCAASYKSAIRYADWRKPGTHFYHPFERLRSVDDFSLDEWWLRLDGDVESFDTATMLIPALCENNRSPRFMDGSLFASRLTHAVADIGEQRAQFPYAYHFDAGLLADFLRDYGTARGVRHILDDVVEVRQDERGWISAVTTREHGDIAGQLFVDCSGFRGMLVNQVLNEPFLSYEDVLPNNRAVALRVPVDVEEQDLAPYTTATAVDAGWIWTIPLYGRIGTGYVYSDEFCDPEGAERTLRAFAAPDQPELEANHIRMRVGRNRNSWVKNCVAVGLSSGFVEPLESTGIFFIQQAVEQLVRHFPDDRWDPGLAKAFNARMAEVLDGVKEFLVLHYRCAARDDTPYWKAAKSRPLPDGMAERIEAWRTLMPEDTSIYQPFHGFEGYNWKIMLIGLGAQPPAARPALAGLDPAPARAELAHVRAEAARLVDELPSVHEYLRHLHS

SEQ ID NO: 87490 - protein, 332 aa, Brevundimonas sp.
  misc_feature (1)..(332): tr|A0A519PME6|A0A519PME6_9CAUL Tryptophan 7-halogenase (Fragment) OS=Brevundimonas sp. OX=1871086 GN=EON88_238 75 PE=4 SV=1
MRPLKRILIVGGGSAGWMAAALLSKLFKGLYEITLIESDAIGIIGVGEATIPAIKKYNELLDLDENDFMQRTQGTFKLGIQFKDWDRLGDSYIHGFGVIGRDLGWLRAHHYWLQANQRGTAPDFADMSINTAAALENRFMRAEPKMAESPLGHIGHAFHFDAALYVRYLRGRAEAAGVTRIEGKVEGVALDPEDGFVRSVTLEGGQVVEADLFIDCSGFRGLITEQALKTGYEDWSRWLPCDRAIALPCPRVEPLLPYTRATARGAGWQWRIPLQHRTGNGHVYSSAYMDDAEAERILVESLDGPPLAEPNRIRFLTGKRKKVWNKNCVALG

SEQ ID NO: 87491 - protein, 502 aa, Gammaproteobacteria bacterium
  misc_feature (1)..(502): tr|A0A534I1H3|A0A534I1H3_9GAMM Tryptophan 7-halogenase (Fragment) OS=Gammaproteobacteria bacterium OX=1913989 GN=E6K32_01515 PE=4 SV=1
RLRSILIVGGGTAGWMAAAALAKVLERSCAIRLIESEEIGTVGVGEATVPHLKLYNTILEIDEAEFIREVRGTFKLGIQFVDWGRIGDRYIHGFGTIGHDYGLLPFHQYWLKQFLAGKAADIGAYSLNTAAAPLGKFMTSAQDVPPTSPLANITHAYHFDAGLYAAYLRRYAEARGVRRTEGKVVDVDLRGSDGFIEAVKLEDGERVSADLFIDCSGFRGLLIEQALHTGYENWTHWLPCDRAMAVPCENVGPPTPYTRSTARTAGWQWRIPLQHRTGNGYVYSSAYISDDAARETLMPNLDGRALAEPRILKFTTGKRRKFWNRNCVAIGLASGFMEPLESTSIYLIQSGVARLLNLMPDRSFSPVLIERYNAQAAFEFERIRDFLILHYFATERRDSPFWQYCANMSIPEQLADNIALFRDSGRFFRHAEEMFALTSWVQVMLGQHILPRNYHPAVDLIPEREVNELVSGVRNVIANCVQAMPTHEQFLARYVQAGAAAA

SEQ ID NO: 87492 - protein, 303 aa, Brevundimonas sp.
  misc_feature (1)..(303): tr|A0A519L4A5|A0A519L4A5_9CAUL Tryptophan 7-halogenase (Fragment) OS=Brevundimonas sp. OX=1871086 GN=EON87_106 05 PE=4 SV=1
MAQPLEVVIVGGGTAGWMTAAALTSVVRPEFRRVRLIESDQIGTVGVGEATLPQMKDFNDWIGVIESEMMRETSATFKLAIEFRDWGFKGSSYLHPFGAHGQPISGVAFHQHWLRAAQAGPTPDIEDYSYAIVAARRNRFEFPVADKAAINSTYAYAYHFDASLYAAYLRRFAEARGLARTEGKIVSVHRKPENGHIASVTLESGEVVTGDLFIDCSGFKGLLIGETMESPFEDWTKWLLCDRAMAVPCARSDDFTPYTRSTAREAGWQWRIPLQHRTGNGYVYSSAFISDDEAARTLMDNLD

SEQ ID NO: 87493 - protein, 345 aa, Brevundimonas sp.
  misc_feature (1)..(345): tr|A0A519JSZ8|A0A519JSZ8_9CAUL Tryptophan 7-halogenase (Fragment) OS=Brevundimonas sp. OX=1871086 GN=EON85_103 45 PE=4 SV=1
YARYLRGWCEARGLTRTEGKVREVRLDPGSGDVAALVLENGEVITGDLFIDCSGFRGLIIGGALNGPFEDWTRWLPCDRALAVPTERSEDFSPYTRSTALEAGWQWRIPLQHRTGNGYVYSSSFISDDEATTRLLGNLDGAPLADPKPIRFRSGRRTASWTKNCIAVGLASGFLEPLESTSIYLTQIAVLTLLDLLPRRTVDPVLAEEFNRIVDNEYDRVRDFLILHYHANTREDSELWRHCREMDIPDSLREKIELFTHRGQIPQYRNGLFSPPSWVSVFVGQGMVPTGYHPMADTTALEVVVAEMEAIRRRVSDRVDAMPTHADFVRDYCQGEPPLKATGAIA

SEQ ID NO: 87494 - protein, 364 aa, Brevundimonas sp.
  misc_feature (1)..(364): tr|A0A519KTN1|A0A519KTN1_9CAUL Tryptophan 7-halogenase (Fragment) OS=Brevundimonas sp. OX=1871086 GN=EON87_181 75 PE=4 SV=1
MPANKIRDIVVVGGGTAGWMCAAALSKVMGTEQYNLTVIESDQIGTVGVGEATIPMILLFNNVLGIDEDEFVRETNGTFKLGIEFVDWRRLGHSYFHPFGLFGQDMDGVPFHNFWLRWAKSGGGNGDSGRFNAETEAARLNRFMRTPDPQNGNLPRINYAYQFDAARYAAYLRKFSEKRGANRIEGKITQVHQNPSDGFITSVELEDGQQIRGDLFIDCTGFRGLLIEQTLKAGYDDWSHWLPANRAVAVPCAKSGEMTPYTRATAREAGWQWRIPLQHRTGNGYVFSSEYISEDEATAKLMSRLDGEPLAEPRVLRFVTGRRKKSWDKNVIAMGLSSGFLEPLESTSIHLIQVAISRILAYFP

SEQ ID NO: 87495 - protein, 502 aa, Brevundimonas sp.
  misc_feature (1)..(502): tr|A0A519L3W1|A0A519L3W1_9CAUL Tryptophan 7-halogenase OS=Brevundimonas sp. OX=1871086 GN=EON87_10960 PE=4 SV= 1
MAEPIRSVLVVGGGTAGWMAAAALNSALGPHCKVRLVESDEIGIVGVGEATVPTVRDFNNLIRLNEAEFMRETRATLKLGIEFVDWGRKGTAYFHPFGTFGGGATLGEFAQTWLTLNQRGLKGDVTDWSICAQAAKRGRVGARQADPRSPYLNLYTAFHFDAGLYALYLRKVCEARGVERIEGKITEVVQRPEDGFVNGVKLADERVLEADLFIDCTGFRGLLIEGAMKAGFEDWSHWLPMNRAVAMPCAPVPGITPYTRSTAMDAGWRWRIPLQHRIGNGHVYCSDHIDDETALNQLVEGLDGEAMADPRVIKFQTGKRKAFWAKNVCALGLATGFIEPLESTSIHLIHVGIAKMLQHFPDRDFSPVNIDIYNRRMEREVQQVRDFVILHYHASERDDSEFWRRVRDMPIPDTLAERVEAFRDRGMIYQVAADEYFSMASWMAVMVGQGIEPRIANPLYRFQNLERAAEGFERVRTTFAQAAEALPTHEAFLKAENLWKTA

SEQ ID NO: 87496 - protein, 199 aa, Brevundimonas sp.
  misc_feature (1)..(199): tr|A0A519K395|A0A519K395_9CAUL Tryptophan halogenase (F ragment) OS=Brevundimonas sp. OX=1871086 GN=EON85_03325 PE=4 SV=1
MNIIIVGGGTAGWMSAAGLLGGLKPGQATVRLIESDDIATVGVGEATLPHVRAFNDRIGIEEADMMRATNGTFKLGIEFRDWGFLGSSYVHPFGAHGHAIGGVAFHQQWARARLAGQAADIGDYSYAIVASRRNRFEFPSKDLTAINSTYDHAYHFDAGLYARYLRGWCEARGLTRTEGKVREVRLDPGSGDVAALVLE

SEQ ID NO: 87497 - protein, 501 aa, Brevundimonas sp.
  misc_feature (1)..(501): tr|A0A519QAK1|A0A519QAK1_9CAUL Tryptophan 7-halogenase OS=Brevundimonas sp. OX=1871086 GN=EON88_11595 PE=4 SV= 1
MCIVGGGTAGWIAAALMGEHFKNKLCEIELVESDDIGTIGVGESTVPPFLQMLAKMGVNEQAFVRETQASFKLGIEFKDWLEKGQSYFHPFGAIGVPVDLSDFYQLWLKARLGGYQRPLQDFAPASVMAHAGKFTLPHKAMKTPIGGATYAVHVDAKRVAQFLRRFAEARGVTRTEGIVSDVKTRADGFVEQLVLKDGRTVEADFFIDCSGFRSLLLGKTLGVGYEDWSHWLLCDRAIAVQTENVGPPPPYTLAEAQDYGWRWRIPLQHRAGNGYVFASRYLSDDEATATLMRQVEGRAVVDPMVVPFKTGLRDRCWDKNVLALGLAGGFIEPLESTAIHLIYRGMDFFFRFLPERNCAPDLSREYNRRMRADYEEIRDFIILHYCTTQRTDTPFWDACRTMTVPESLQRKIDLFRVNGTVAEGLDELFREPNWQSVLDGMGVVPRTYHPMVDRIPFGRANQGLDEAHANLQRMVAGLPDHQAFIAQHCAAERPAAPAAVA

SEQ ID NO: 87498 - protein, 504 aa, Brevundimonas sp.
  misc_feature (1)..(504): tr|A0A519LCS1|A0A519LCS1_9CAUL Tryptophan 7-halogenase OS=Brevundimonas sp. OX=1871086 GN=EON87_02080 PE=4 SV= 1
MSDNRLRRIIIVGGGTAGWMAATVIAKSLTPGYCEIDLIESPEIGTVGVGEATIPPLLALNRQLGIDEDEFIRRTQATFKLGIQFRNWGRLGHEYVHPFGVYGADLEGVDFHHHWLRLRDAREAHSLEDYSLATAAMKAGRFIRPATDPRNVLSRMAYAFHFDAGLYGGFLREIAMERGVRRHERKIVDVDLNAETGFVEALKLEDGSRMEGDLFIDCSGFRGLLIEQALKTGYEDWSQWLPMDRAFAVPCEAVGAPTLYTRSTAHEAGWQWRIQLQHRTGNGHVFCSSFTDEDTARERLLQNLDGQALAEPRLLRFVTGRRKKAWNKNVVSLGLASGFIEPLESTSIHLVQSGATTLMSFFPDRSFDQADIDRYNEIIQEEYEHARDFVILHYHATQRDDSAFWRHVAAMDIPDSLKARVELFRSRARISGRREDLFAFTSWVAVMLGQGITPTGHDPMADQMPLDELEQKLTRMREVTGNAVQSMPTHQQFIDRFCKAQPLP

SEQ ID NO: 87499 - protein, 452 aa, Brevundimonas sp.
  misc_feature (1)..(452): tr|A0A521PAJ6|A0A521PAJ6_9CAUL Tryptophan 7-halogenase (Fragment) OS=Brevundimonas sp. OX=1871086 GN=EPO49_002 55 PE=4 SV=1
MSEPIRSILIVGGGTAGWMAAAALQRSLGPHARVSLVESDEIGIVGVGEATVPPIRDFNAMIGLDEAEFMRETKATLKLGIVFRDWGRIGNRYVHPFGTFGRGPTLADFQQTYFALKARGLAGELGDYSICWRAAEAGRVGDRDPDFNSPKNTLFSAYHFDAGLYARYLRKVCEGRGVERIEGRIVDVVQRGEDGFVEGVTLEDGRVLTADLFIDCTGFRALLIEGALKAGYEDWSHWLPVNRAMAVPCAGVKPLTPYTLSTAREAGWQWRIALQHRTGNGYVYCSDHLSDEAARETLLANLDGEALAEPRPLRFVTGRRRKYWDRNVVSLGLSSGFIEPLESTSIHLVQAGIFRLLQHFPDRDFSPVNIQAYNRRLGREVELIRDFVILHYHASQRDDSAFWRQVAAMPIPDTLAERVEAFRERALLYQVGADEYFSQASWLAVMYGQGIV

SEQ ID NO: 87500 - protein, 331 aa, Brevundimonas sp.
  misc_feature (1)..(331): tr|A0A519L0N0|A0A519L0N0_9CAUL Tryptophan 7-halogenase (Fragment) OS=Brevundimonas sp. OX=1871086 GN=EON87_136 05 PE=4 SV=1
EGLGVTRVEGRIADVRMAEHGAVAGVTLADGRTLDADFFLDCSGFRGLLIEQALKAGYEDWSHWLPCDRAVAVPCESSGPPTPFTRSTAREAGWQWRIPLQHRIGNGYVHCSRFISEEDATATLMANLDGRALADPRMLRFKTGRRMASWVKNVVAIGLASGFLEPLESTSIHMIQSAIARLMTLFPDRRFDPAVTAEYNRQTRIEAEQIRDFIILHYHATARMDSPLWNHVRTMEPPESLRQKIDLFRSSGRFFREGDELFSETSWAAVLTGQNVIPERFDPMAATHDPQMMAAKMTRMRDVIGRAVADMPSHADYIARHCRAPHVAFAA

SEQ ID NO: 87501 - protein, 183 aa, Brevundimonas sp.
  misc_feature (1)..(183): tr|A0A519KTN0|A0A519KTN0_9CAUL Tryptophan 7-halogenase (Fragment) OS=Brevundimonas sp. OX=1871086 GN=EON87_181 80 PE=4 SV=1
RPWIGNCVAIGEAAASLEPLDATILQFIHVGLSHLISQFPVDADNQIERDAFNEAFAQHTGNIRDFALMHYTLNRRFDQPMWDWAREVPPSPVLAQKIELFGARGGVALRDGETFEEGSWASCFVGHGLIPKSWNPLVDQLRRAEQIEHFQKILGFVAAHAQDMPSLEAHLEFNAAPPGRGLF

SEQ ID NO: 87502 - protein, 255 aa, Brevundimonas sp.
  misc_feature (1)..(255): tr|A0A519KUX3|A0A519KUX3_9CAUL Tryptophan halogenase (F ragment) OS=Brevundimonas sp. OX=1871086 GN=EON86_11630 PE=4 SV=1
AAVRAPDLFTTSKAFTAGWRWRIPLQHRVGNGYVYASAFTDDDTALQELLADLEAPPAADPNRLRFVTGRRKSAWKGNVVALGLASGFLEPLESTSINLIQTGIGRLLELFPDRDFDPVLSAEYNRRTEQEWLGVRDFIIAHYHLADRTEGALWRHCRETPPPDSLAERLDLFRARGEIEPSTYDSFRQASWTSVLTGLGVWPRKVSPQVAGLDLEQVAQQADRVSALIARAVDTLPDSSAFFATRRVRTAEGLS

SEQ ID NO: 87503 - protein, 127 aa, Brevundimonas sp.
  misc_feature (1)..(127): tr|A0A519L3A3|A0A519L3A3_9CAUL Tryptophan 7-halogenase (Fragment) OS=Brevundimonas sp. OX=1871086 GN=EON87_127 75 PE=4 SV=1
EQSAEEMERVRDFVILHYKLNQRTDTAFWRDCRDREIPETLQRKIALWRARGQFVRYRWEMFHPASWLAIYDGFDVWPDRVDPAVEALDPEQLKRSLEAMRRAVADAVAQTPTHAQFLSAVGRQAVA

SEQ ID NO: 87504 - protein, 413 aa, Brevundimonas sp.
  misc_feature (1)..(413): tr|A0A519QJX1|A0A519QJX1_9CAUL Tryptophan 7-halogenase (Fragment) OS=Brevundimonas sp. OX=1871086 GN=EON88_002 15 PE=4 SV=1
GHSYFHPFGLFGQDMDGVPFHNFWLRWAKSGGANADSGRFNAETEAARLNRFMRTPDTQGGSLPRINYAYQFDAARYAAYLRKFSEKRGANRIEGKITQVHQNPSDGFITSVELEDGQQIRGDLFIDCTGFRGLLIEQTLKAGYDDWSHWLPANRAVAVPCAKSGDMTPYTRSTAREAGWQWRIPLQHRTGNGYVFSSEYISEDEATAKLMSRLDGEPLAEPRVLRFVTGRRKKSWDKNVIAMGLAGGFLEPLESTSIHLIQVAISRVLAYFPRDFIDPKLADQFNRDMAFDYDNVKDFLIAHYKVTEREDTPFWAYCKHMDIPEALKTRLQIFQERGDAMVRQYELFKEGSWWAVLSGQGMIPDSYHPVADVISEEDLRQRLSRIRTAIQDRVNTMPVQEAYLRDAKLSATA

SEQ ID NO: 87505 - protein, 309 aa, Brevundimonas sp.
  misc_feature (1)..(309): tr|A0A519KMB1|A0A519KMB1_9CAUL Tryptophan 7-halogenase (Fragment) OS=Brevundimonas sp. OX=1871086 GN=EON87_211 65 PE=4 SV=1
NGHIASVTLESGEVVTGDLFIDCSGFKGLLIGETMESPFEDWTKWLPCDRAMAVPCARSDDFTPYTRSTAREAGWQWRIPLQHRTGNGYVYSSAFISDDEAARTLMDNLDGEALADPRPIRFKAGRRTASWTGNCVAIGLASGFLEPLESTSIYLVQIAINNLVQLWPRKAMDPVLIKEFNRLVDTEYDRVRDFLILHYHANTRDDAELWRYTREMSVPDSLQDKIDRFRHRGDIPFYRSGLFAPPSWVSVMLGQGLKPEGHDRLTERLKLEDVQQRLETLRRKISDRVDAMPTHAQFVRDYCGVKEAA

SEQ ID NO: 87506 - protein, 504 aa, Brevundimonas sp.
  misc_feature (1)..(504): tr|A0A519JWF3|A0A519JWF3_9CAUL Tryptophan 7-halogenase OS=Brevundimonas sp. OX=1871086 GN=EON85_07815 PE=4 SV= 1
MSDNRLRRIVIVGGGTSGWMAAAVIAKSLARGYCQIDLVESPEIGTVGVGEATIPPLIALNRQLGIDEDEFMRRTQGTIKLGIQFRNWGHLGNEYIHPFGVYGADLEGVDFHHHWMRQRATGDTRSIEDYSLATVAIKHDRFIRPATDPRNVLSRMAYAFHFDASLYAAFLREMAMERGVRRHERKIVDVELNGETGFVEAVKLEDGSRLEGDLFIDCSGFRGLLIEQALKTGYEDWSQWLPMDRAWAVPCEAVGAPTLYTRSTAHEAGWQWRIQLQHRTGNGHVFCSSFTDEETARDRLMQNLDGAALAEPRLLRFLTGRRKKAWNKNVVSLGLASGFIEPLESTSIHLIQSGVTTLMSFFPDLNFNQADIDRYNAIVQEEYEHARDFVILHYHATQRDDSAFWRHVAAMDIPDSLKARVDLFRSRARISGRYEDLFAFTSWVAVMLGQGIIPTGHDPMADQMSLDELQTKLGRMREVIGNAVQAMPTHQQFIDRCCKAPALP

SEQ ID NO: 87507 - protein, 298 aa, Brevundimonas sp.
  misc_feature (1)..(298): tr|A0A519KUW1|A0A519KUW1_9CAUL Tryptophan 7-halogenase (Fragment) OS=Brevundimonas sp. OX=1871086 GN=EON86_116 35 PE=4 SV=1
MTPEPLRKILIVGGGTAGWMTAAALSHVLRGTVRIELVESDAVGTVGVGEATIPPILLFNALLGIDENEFIRETRATIKLGIQFRDWYRQGHEYFHPFGQYGSRIDAASFHQYWLRLNAEGLDDNLDDYSAPAVAARLGRFSRPLADPRSVQSQMTYAFHFDATLYARFLRRRAEAAGVIRHEGRISDVPLTDDGAIAAVRLDDGRALDADFFIDCSGFRGLLIEGALKTGYEDWTHWLPCDRAVALPCARVEPPVPYTRSTALEAGWRWRIPLQHRTGNGYVYCSAHISDDEALARL

SEQ ID NO: 87508 - protein, 542 aa, Westiella intricata
  misc_feature (1)..(542): tr|A0A075XCQ3|A0A075XCQ3_9CYAN Halogenase OS=Westiella intricata UH HT-29-1 OX=1524912 GN=welH PE=4 SV=1
MLTQNTTNVVIVGGGTAGWMTASYLSKALHKNVSITLIESSNITKIGVGEATFSSIKSFFDFLGLQEHEWMPKCNATYKMAIKFVNWNTNKKHFFHPFERLDIVDGFSISEWWMKLKKHSEPFDYSCFAAPTLCDSQRSPRYFNGEVFDSRVKQLFSDEHFSEKRLITLADAEGQYPYAYHFDANLIAKFLKDYAMQRGVKQIVDDVIDVKLTPEGSIDCVHTKGNRRISGDLFVDCTGFRGLLINKALGEPFISFSESLLCDSAIAMQVPTNIKKDGINPYTKATALSSGWVWEIPLYGRNGAGYVYSSAFISKEDAEQEFRQHLGPVCQHQQASHIKMRIGRNRNSWVKNCVAIGLSSGFVEPLESTGIFFIQHGIEELVSHFPSNSLNEELIKSYNQAIAKCIDGVRDFLILHYHASDRTDTPFWKATKHDIQLPDELSQRFKLWKKRLPNKKNINPYFHGFETYSYSVMMLGLNHVPENSLPIMEYMDDHKATAQFRSIKEKTELLNSTLPSQYEYLTYVMKSQEQSEYLNENLLDAV

SEQ ID NO: 87509 - protein, 502 aa, Gammaproteobacteria bacterium
  misc_feature (1)..(502): tr|A0A534HGL8|A0A534HGL8_9GAMM Tryptophan 7-halogenase OS=Gammaproteobacteria bacterium OX=1913989 GN=E6K32_12 895 PE=4 SV=1
MDKRVEDIVIVGGGTAGWMTAAFFSKLLKSGVRIRLIESDEIATIGVGEATIPAIKHYNAALELDENEFLARTQGTFKLGIEFVDWAKLGDFYIHGFGRIGQDLGILKCYQYWLKMRARGLVPGLEHYSINTVAPRQSKFMRSVPEMKQSPLGDIANAFHFDARLYALFLRAYAEARGVTRTEGKIVGIELRAGDGYIDALRMEGGERIPGDLFFDCSGIRGLLIEQALHTGFESWNHWLPCDRAVAVPCESVDPLLPYTRATAHKAGWQWRIPLQHRIGNGYVYSSQYISDDEATAVLLARLDGKASGPPRYIKFLPGKRRKLWNKNCVAVGLSSGFLEPLESTSIHLIQTVIVRLARFFPSCGFNPIDVEEFNRRSDFEYERIRDFIILHYKATERNDSPFWDYCRSMEIPDTLRVKIDLFRSHGRIFRDNEELFAEESWLQVMLGQGIIPEDYDPMVDQYPDEEVMRYLNDIQAVIEKCVAVMPLHKDYIAQQCAAGRG

SEQ ID NO: 87510 - protein, 503 aa, Sphingomonas sp.
  misc_feature (1)..(503): tr|A0A5E7ZSJ9|A0A5E7ZSJ9_9SPHN Tryptophan halogenase OS =Sphingomonas sp. EC-HK361 OX=2038397 GN=SPHINGO361_500 17 PE=4 SV=1
MTPIESVVIVGGGTAGWMAAAAAARFLDDGHRRITLVESDAIGTVGVGEATIPPILGFNRLLGIDEAEFVRETGATFKLGIEFVDWGGRGERYFHPFGEHGRDFQGVAFHQYWLKHRHAARIGVLSDYAMAGVAAAAGRFAPPATDPRAPLSQLAYAYHFDAGLYAAFLRRRAEAQGVVRIEGRISGVETDAQTGFVGAVVLEDGRRVAGDLFIDCSGFRSLLLGETLGVGYRDWSHWLPCDRAVAVPAARAAPLPPFTRATAQAAGWQWRIPLQHRTGNGLVYASAHLSDDAAEDALVAGVDAPLAAPRRLSFTAGVRERLWDRNVVALGLAGGFIEPLESTSIHLIQTGISKLFWLFPDKGFSAVERDTYNRLMTEQFEYVRDFIVLHYKATRRDDTPFWRYVRNMAIPDSLAHKIALFREKGRVMRFDHDLFAVPSWVAVMLGQGIAPQGYDPLVDAMDDARICAAMAEMRAGYAAQALRMPLHADYVAAHCPMPGVSGG

SEQ ID NO: 87511 - protein, 501 aa, Sphingopyxis sp.
  misc_feature (1)..(501): tr|A0A1Y5PPW5|A0A1Y5PPW5_9SPHN Tryptophan halogenase Pr nA OS=uncultured Sphingopyxis sp. OX=310581 GN=SPPYR_09 58 PE=4 SV=1
MGDKFEIVIVGGGTAGWMCAAACAVKLDPARFRVRLVESEEIGTVGVGEATLPQMKDFNDFLGLDEAEFMKATQASFKLGIEFVNWGRAGDRYVHPFGTFGRPIGEADFFSYWIRARRAGTAAPLSDYCFPIVTALQNRFMLPNGDANDVRNAFAYAYQFDAFLYARYLRQWAEARGIERVEGRIVEVEQDGGTGDIAAVKLASGARIAGDLFVDCSGFRGLLMAQTLGVGIEDWSYWLPCDSAAAVPSARSADFHPYTRSTRRTAGWQWRIPLQHRTGNGYVYSSADISDDEAAATLLANLDGEAMAEPRVLRFKACKREKAWAHNCIAMGLASGFLEPLESTSIYLVQMAIMHMLTLLPSGPGIDPALPCELNRVMDVEYDRIRDFLILHYVANEPDAPLWERVTTMAVPDTLADKIDRFRHRGHVQAYRDGLFGPPSWQAVFVGQGIEPLAADRLADALPAATVEERLANLAAMIADAAAAVPSHADFIARYCPAPAP

SEQ ID NO: 87512 - protein, 281 aa, Gammaproteobacteria bacterium
  misc_feature (1)..(281): tr|A0A534IIA5|A0A534IIA5_9GAMM Tryptophan 7-halogenase (Fragment) OS=Gammaproteobacteria bacterium OX=1913989 GN=E6K22_09580 PE=4 SV=1
SFSSNLFNDAAVAIPSPMEASIPSETVSTAMKHGWAWKIPLTTRFGNGYVYSSRFCSADEAETELRRHLGLLDGDVPARHLKMKIGRVTRHWNRNCLAVGLSQGFIEPLEATALLFIQQTAATFVEFVERGDLSEAAHERFNDMMNTHFEGIRDYIVTHYKTNTRTDTEYWRANAANLNLSDDLKKLYSLWMAGKSIAPAVGQQVLGKGYPVFSWYSIMAGMGIFPDPQDLRPPTVQEARFSEAEIDNLLERSSANYPDHRAALESIPPRRTEPALQVYFW

SEQ ID NO: 87513 - protein, 506 aa, Sphingomonas sp.
  misc_feature (1)..(506): tr|A0A5E7Z1C0|A0A5E7Z1C0_9SPHN Tryptophan halogenase OS =Sphingomonas sp. EC-HK361 OX=2038397 GN=SPHINGO361_130 016 PE=4 SV=1
MDKTKTTPSPNVVIVGGGTAGWMAAAAFARFLPAGWTVRLIESDAIGTVGVGEATIPQLRLFNAHLGIDEDAFVRATLGTFKLGIEFVGWSGPKSSGDSRYLHAFGTIGRGMGLVPFHHYWLRGGEAAGDLWDYSPTAIAARGNRFARDLGRTELPSGVAWAFQFDAALYAAFLRRYAEARGVERIEGQVVHVAVDDGNIASITLEGDRKVAGDLFIDCSGFRGLLIEEALHAGYEDWTHLLPCDRALAVPSANAGALTPYTRATAKEAGWQWRIPLQHRCGNGIVYSSAHLSDDRAADILLAGLDGAPLADPRPLRFRAGRRKRAWVGNCIALGLAAGFMEPLESTSIHLVQSGIARLLQLLPAGDSPASAAEFNRQTAREWEAIRDFLIFHYHANGRDEPFWRACREAAIPDSLAARIALFRESGRIVHESHELFTEVAWLQVMTGQGIRPQAYHPLADDLSAAELAEYLALARRHAQGVAARMPTHDAFIAAHAAAAPTTVAA

SEQ ID NO: 87514 - protein, 499 aa, Paraglaciecola sp.
  misc_feature (1)..(499): tr|A0A2N1DCG4|A0A2N1DCG4_9ALTE Tryptophan halogenase OS =Paraglaciecola sp. MB-3u-78 OX=2058332 GN=CXF95_08365 PE=4 SV=1
MKKQDRKINKVVIAGGGTAGWMAAAALSKLIGKNLEVVLVESDEIPTVGVGEATIPSLHTFHQLLKINEQEFMAATNATFKLGINFENWRDVNKDYLHSFGFLGQGCWAADFQHFWLKGQKRGIVSDIGDYVPEHLGAREGRFGVMAGQELNHAYHLDAGLYAKFLRKIAEKNRCIRIEGKIDKVSLDDDSGYIDSLTLDSGQLIEGDLFIDCTGFRGLLIEEALHTGYDDWSHVLPCDSAIAVQTKTVSKPIPYTRAIARDAGWQWRIPLQNRTGNGFVFCSKYLSDAEATKILLNNIEGERLNEPRVIKFKTGQRRKRWNKNCIAMGLSSGFIEPLESTGIHLFQKAILRLLLMFPSQGIKQSDVEEYNDQTREEAENIKDFIILHYHLTDRKDTPFWRYCKTMDVPESLKHRMALFKESAQAFQKDEELFGETSWVQVMLGQGLMPEQYHPIVDMMGDEELRNFLNTIKSGVKKKVQSWPDHNDFIKHYCPSSVNT

SEQ ID NO: 87515 - protein, 500 aa, Marisediminitalea aggregata
  misc_feature (1)..(500): tr|A0A1M5RY03|A0A1M5RY03_9ALTE Tryptophan halogenase OS =Marisediminitalea aggregata OX=634436 GN=SAMN05216361_ 4280 PE=4 SV=1
MHSPLKKIIILGGGSSGWMTAAALGKILKNHPCEIQVIESEDIGTVGVGEATIPQILLFNDLIGLDEDTFIKRTKGTFKLGIQFKDWRKVGHSYYHAFGEVGKNMEGVHFYHYWLKMRQQGKAAPLDEYTLSSLACNEKRFMRPFDAGNSPLSNIAYAFHFDAGLYAKFLRESAEGHGVVRTEGKVSQVTQHPNGDIRSLILENGEEHQADFFIDCSGFRALLIEQTLKAGYEDWHHWLPCDRAVAAPSALTEEPWPFTRAAAQQAGWQWRIPLQHRVGNGHVYSSEFMSDHDAERTLRENIDGELLADPRLIKFVTGKRNKFWHKNCLAVGLAGGFMEPLESTSLHLVQVAISKFFSFFPFQTPTQSDIDEYNAQMDFEFTRIRDFLILHYHVTEREDTPFWRYCKNMSIPDTLQEKIDQFKANGRINRFNNELFNDLSWFEVMYGQGLRPEGYNALADIFPDDELAKRLEGIQRVVRKSVDYMPSHAEFIANTCPAKP

SEQ ID NO: 87516 - protein, 514 aa, Massilia sp.
  misc_feature (1)..(514): tr|A0A0Q6SVL7|A0A0Q6SVL7_9BURK Tryptophan halogenase OS =Massilia sp. Root335 OX=1736517 GN=ASC93_19440 PE=4 SV =1
MSKPIEHVVVVGGGSAGWLTAAILAVEHPRLTVTLVESPGVPPIGVGEGTWPSMRETLQRIGVSEAAFFRECDAAFKQGSRFDRWVDGGDADIYFHPFSLPQGYGEANLAAAWQHGHRDVPFADLVSYQPHLCHQGRAPKQPQTPEYAGVANYGYHLDAGKFGAFLQKHCTEKLRVRHVLAHVVDIISTDAGDAAGDIQALRTREAGVVEGDLFVDCTGMASLLLGRHYGVPFVSQRDVLFNDRALAVQVPYPAPDAPIASQTTSTAQSCGWIWDIGLPARRGIGYVYSSAHCADDAAEQTLRAYLSATGIEGDIPAPRKIAFDPGYRARFWERNVVAIGLSAGFIEPLEASALALVELSAAWLADDLPATRAQMDTIAARFNEAFTYRWERIIDFLKLHYVLSRRTDSAYWLDHRTARTQSQRLRELLALWRTRAPSRRDFPRIEEIFPSASWQYILYGMGFRPEFSGRASDLPEAAAQYFREAARLTARMLPLLPANRAMLDHIRQYGMPAP

SEQ ID NO: 87517 - protein, 505 aa, Massilia sp.
  misc_feature (1)..(505): tr|A0A0Q6T0I0|A0A0Q6T0I0_9BURK Tryptophan halogenase OS =Massilia sp. Root335 OX=1736517 GN=ASC93_16405 PE=4 SV =1
MSDMAIRNIVIVGGGTAGWMTAAPLALRLGTSCNIVLVESPEIGTVGVGESTLPTIRYYNLALGLDGADFIRRTKATFKLGIEFQDWGHVGNRFFHGFSDFGPAIENRPAYMYWLRLSRARKDMPSYEEWSVATAMARAHRFIPPYGDRPSVTNAYSYAFQFDAGLYAAYLRDYATERGVTRIEGTVGDVELHPDTGFITAVTLRDGRRVEGDLFIDCTGFRGLLIEGVYKAGYEDWSAMLPCNSAQAVPSASADKLTPFTRAAAKSAGWTWRIPLQHRTGNGHVYCDAFMSDEEAGRVLLDGLDTEALDAPRQLRFTAGRRRKSWVKNCVAVGLSSGFLEPLESTSINIIELAVGWLLQYFPDRDCRPELADEFNRLVAQRYEFVRDFIVLHYKLTNRDDSEFWRYCANMPIPDSLRHQIDLFRASGRVTLYDPEGFSMDSHASIMLGLGLRPETDDPLIDRMDLKRLDEHFGKVHATIRQAVGAMPDHGEFVAQLAAGTMRKP

SEQ ID NO: 87518 - protein, 519 aa, Caulobacter sp.
  misc_feature (1)..(519): tr|A0A0Q7TUI0|A0A0Q7TUI0_9CAUL Tryptophan halogenase OS =Caulobacter sp. Root1455 OX=1736465 GN=ASD21_22405 PE= 4 SV=1
MDRRRRLLIVGGGTAGWLTAAYLAKSLRVAEQAHLEITLLESPDVGIIGVGEATFPTIRTTLRFLGIDEARFIRETSATFKQGIRFNDWAWAPTDSGERHQYFHPFEAPFSTDGASLAPYWLLQNEATRAPFAEAMTIQARVADAQRAPKRPHEGNFSGPLNYAYHFDAAKLAQVLAERARELGVRHLQGLLTGVELDATGAIDHVICAEHGRLDADLYIDCTGFHAELIGQALKAPFKSARPILFADRALACKIPYDRPDAPIQSFTIATAHEAGWTWDIGLNGARGVGTVYSSDHIDDDRAQAILRGYVGEGVEIAPRALSFEAGYRTKQWVKNCVAVGLSAGFLEPLESTGVVLIEAAVAIIAELFPHNGPISAPAFRFNELMTARFDNIITFLKLHYCLSQRTEPFWRENADPASMPERLVDLLEQWRWRPPTRYDFILDLETFAFFNYQYILYGMGFKTDLSPGRSEFPDVAAADKLFAKIKSFGERATHDLPSHRDLIAQINRFGFDRSLEPA

SEQ ID NO: 87519 - protein, 506 aa, Marisediminitalea aggregata
  misc_feature (1)..(506): tr|A0A1M5RDG9|A0A1M5RDG9_9ALTE Tryptophan halogenase OS =Marisediminitalea aggregata OX=634436 GN=SAMN05216361_ 4143 PE=4 SV=1
MTTPQHICIAGGGTAGWMTAAALANRLPHSHYRITLVESAQIGTVGVGESTIPHIRQFNSALGITEDEFIAATSATCKLGIEFTDWGKVGESYIHPFGELGKPLAGIEFHHLWQAASLQGLDVPIESFSVAAVAARQRKFSPPHASREHLLSTYTYAYHLDASAYARFLRDYAEQRQVIRVEAQIREVKRDHEGGPITALSLDNGEQISADWFIDCTGFRSLLIGDYSQAEFIDWSEWLKTNRAVVLPCEKDGPSRPYTKAMARDAGWQWQIPLQHRIGNGYVYCSDYISDEEAEHTLRSTLPGEALADVRFLDFKAGCRKQLWVQNCVAIGLSAGFLEPLESTSIFLIQMGIAKFLEHLPGTHNDAARNQYNRELTEQYQVIRDFIILHYYLTQRHDTPFWRDCQAMTLPDSLTELILAFRDSGLVDKKQYGLWPAVCIGQHLHPKQVDSRVAAIPPQQLIGMLNQLKSDIAAQVATLPNMDDYLSSLVAQTPLQKSGMRAGGQV

SEQ ID NO: 87520 - protein, 501 aa, Massilia sp.
  misc_feature (1)..(501): tr|A0A0Q6SD44|A0A0Q6SD44_9BURK Tryptophan halogenase OS =Massilia sp. Root335 OX=1736517 GN=ASC93_21745 PE=4 SV =1
MNDNHIRKVVIVGGGTAGWMTAAPLALKLGGRCEIVLVESPEIGTVGVGEATLPTIRYFNHALGIDDADFVRKTQATFKLGIEFKDWGHVGNRFFHGFGDFGPPIEHRPAYMYWLRLSRTFKDMPSYEQWSMATAMARNNRFAPPHDEMPSVSDAYSFAYHFDAGLYAAYLRDYAMGRGVTRVEGMIDGVEQHPETGFITALKLRDGLRVEGDLFVDCSGFRGLLIEGVFKAGYDDWSDMLPCNSAQAVPCAKAEQLTPYTISTAQSAGWTWRIPLQHRTGNGHVYCDAFTSDEEAGRVLMAGLDGEAQGAPRQLRFTTGRRRKSWIKNCVAIGLSSGFLEPLESTSINIIEVAVGWLVEFFPQRDCRPELAAEFNRMITERYQFVRDFIVLHYKVTQRSDSEFWRYCANMPIPDTLKHQIELFRETGHVAIYDPQGFSASSYFSILMGLGVVPKADDPLIDALQFDQLLGHFATRREFINKMVNAMPDHGLYISRHCKAP

SEQ ID NO: 87521 - protein, 491 aa, Sphingomonas aquatilis
  misc_feature (1)..(491): tr|A0A511PZ35|A0A511PZ35_9SPHN Tryptophan halogenase OS =Sphingomonas aquatilis NBRC 16722 OX=1219039 GN=SAQ01S _00970 PE=4 SV=1
MTPPPPSIAILGGGTAGWMAACLMARAWPQARITVIESPDIGIVGVGEGSTPQLKALFDTLGLAEADWMPAADATYKAGIAFHRWADDTPAYFHPFAGQIDLHTQGAFFASTRARRHGADVPAHPDRFFLNGRLAEAGRAPIAPAHFPFRIGYGYHFDAHKVGHVLRDAALARGVVHLPRRVRDVVVDAAGQVAALTLDEGDAIHAELFVDASGFASVIAQKALGVPFRSFADSLLADRAVVMPTPRQSALPVQTKATALSAGWAWDIPLTSRTGNGYVYASRYLSPDAAETELRRHLGLLDAEVAARHLSMRVGRVETSWTANCLAIGLAQGFIEPLEATALHIVQATIEGFIGAYQAGSRDAFNAAIARRYDGIRDYIVAHYRLNRRSGSFWRDVAANDDLSDDLKAIMTAWFTGGDVAAVVEGRGLAGYYAPMSWEVLLAGYGTFPDATRLRTAPPVADLAAIETLLSGCLLNFPDHQAALDGHRRMP

SEQ ID NO: 87522 - protein, 502 aa, Sphingomonas sp.
  misc_feature (1)..(502): tr|A0A1H7UNU5|A0A1H7UNU5_9SPHN Tryptophan halogenase OS =Sphingomonas sp. JS21-1 OX=1855283 GN=SAMN05216382_304 8 PE=4 SV=1
MTPTNIVIAGGGSAGWMVAAAFAHFLPPNAYRIRLVESEAIGTIGVGEATIPQIQLFNQALGLDEDAFLRATGGTFKLGIEFAGWTRPGERYMHAFGDVGRESGLLGFHHRWLRARAERDGEIAALGDYSLNEVAARANRMQRGPARTAAMLPAMPYAFHFDAALYARLLRRFAEARGVERVEGRIVSVERSGETGDVAGLVLDGGARVEGTLFVDCTGFRALLIGEAMGASYDDWTRWLPCDRALAVPSARATDFTPYTRATAHGAGWQWRIPLQHRTGNGIVYSSAHLSDDAAAAQLLANLDGAAEGDPRPIRFTTGKRREMWRGNVVAVGLASGFMEPLESTSLHLVQTAIARLLKMLPGRATGQVQRDEYNRQADFEYERIRDFLILHYWANARDEPFWQERRAADLPDTLRHKIALWQEQAHVTREHEELFTEVAWIQVLIGQGVIPHGYHPIADAETRADNDEYLELMRQLIAREAAQMPRHDAFVAQHCAARASV

SEQ ID NO: 87523 - protein, 506 aa, Caulobacter sp.
  misc_feature (1)..(506): tr|A0A0Q7TJY3|A0A0Q7TJY3_9CAUL Tryptophan halogenase OS =Caulobacter sp. Root1455 OX=1736465 GN=ASD21_08440 PE= 4 SV=1
MTDNRIRKIVVVGGGTAGWMAAAALSRFIEGAPVAIEVVESAEIGTVGVGEATIPPIRLFNATLGLDEIDFIKKTQATFKLGIEFNGWGKPGSRYFHGFGDFGPPIDGVPPHHHWLRMRAAGETAGLQEHSLVTMMADLGRFRPPTPDPRSVYSTYSYAFQFDATLYGRYLRGFAEANGVRRTEGKIVDVALRADDGFVEAVVLESGARVEADLFVDCSGFRGLLIEGALKTGYEDWSRWLPVDRALAVPSQNVGPPTPFTSATARSAGWQWRIPLQHRTGNGYVYCSQYIDDDAAAQTLLANLDGAALDVPRPLRFVTGRRRKFWNRNVVALGLAGGFMEPLESTSIHLIQNGIGHLIEFFPDRACDPKLADAFNAKSGEEYERIRDFLIAHYCTNQRVGEPFWDAVRTMSLPDSLKATLETFRATGSMGLNTYEAFFEPSWLSVLLGQQVWPKDYDRRADALPLAELSHGLKLRRGAVRQAAEASPGHADFIARYCRADPPPDA

SEQ ID NO: 87524 - protein, 504 aa, Sphingomonas aquatilis
  misc_feature (1)..(504): tr|A0A511PZ59|A0A511PZ59_9SPHN Tryptophan halogenase OS =Sphingomonas aquatilis NBRC 16722 OX=1219039 GN=SAQ01S _00920 PE=4 SV=1
MADTPLTTPMTTIVIAGGGTAGWMAAAAFGGLLESGYRIRLVESEEIGTVGVGEATIPQIRLFNQALGLDEDAFLRATGGTFKLGIAFDGWREPGHSYMHAFGDVGRDVGLIAFQHYWLRARQLGLAKSLDAYALNEVAARAGRMHRGGPITAQTLPTMPYAFHFDAGLYAAYLRRFAVNRGVERTEGTIDRVERNGDTGDIAALVLASGERVVGDLFLDCTGFRGLLIEGALETGYDDWTHWLPCDRAVAVPSANIDAPLPYTRAIAREAGWQWRIPLQHRTGNGYVYCSRYLSDDAAAAALLANIEGEAQSDSRHLRFVTGRRKRAWNRNVVALGLASGFLEPLESTSIHMIQSAIARLVKLLPALPIPQALRDEYNRQTDFEIERIRDFLILHYWANGRTEPFWKERREADLPDTLRTKIALWQQAGTITREHEELFTEDGWLQVLAGQGVEATAYHPLADQIGVEDLGEYMETLELLYRREAQAMPPHADVIARHCAVRP

SEQ ID NO: 87525 - protein, 506 aa, Xanthomonas bromi
  misc_feature (1)..(506): tr|A0A1C3NPR2|A0A1C3NPR2_9XANT Tryptophan halogenase OS =Xanthomonas bromi OX=56449 GN=XBLMG947_3119 PE=4 SV=1
MIPAPLRNIVIVGGGTAGWMAAAAFARVLGPTFNVQLIESEQLGTVGVGEATVPHIKAFNNLLGIDEAEFVRQTQGSFKLGIEFVDWQRPGTAYMHGFGTQIGHPLGLLPFHQYWIKQHARGKAQPLGAYTLNTVAAARGKFMTSAGDVPANSPLANIAYAYHFDATHYAHFLRRYSEQRGVTRIEGLVEQVQLHPESGHVQSLQLASGQVVHGDLFIDCSGFRGLLIEEALHTGYHDFTHWLPCDRAFAVPCEKVGPPTPYTRSTARAAGWQWRIPLQHRTGNGYVYCSAHISDDEAAATLLANLDGKPLADPRPLRFTTGRRKQFWNRNVVALGLASGFLEPLESTSIHLIQSGISKLLELFPREGISPVLVQRYNDRSAFEFDRIRDFLLLHYHATERDDSAFWRHCRSMPITPELQTTLDLFRDSGRFYRNAEEMFAEISWVQVMVGQGIVPQGYHPLVDQVPDRDAEGFLASVAQTISHCVDVMPTHQQFIDRYCKAPALP

SEQ ID NO: 87526 - protein, 512 aa, Caulobacter sp.
  misc_feature (1)..(512): tr|A0A0Q7T4F0|A0A0Q7T4F0_9CAUL Tryptophan halogenase OS =Caulobacter sp. Root1455 OX=1736465 GN=ASD21_16160 PE= 4 SV=1
MQDSAHEGRIRDIVIVGGGTAGWMAAASLRRHFGAAPVNITLIESSEIGTIGVGEATIPTIRRFYQSMGLSDIDVLRATGGTCKLGIRFNDWLTPGSSFIHPFGLYGQDLKGVSFHHYWMRLRALGEAAPIGEYSLGASLAAGGKFTTPSRNPPSTLSVFDWALHFDASLFARLMRQVAEQNGVKRIDAKIVEVNLRAGDGFIESVSLDTGATVPGDLFIDCSGFRGLLIEEALHTGYEDWSQWLLCDSAMAVQSEGKGDPPPYTDVTAREAGWQWRIPLQHRWGNGYVYSSRHTSDEEARAVLTGSLDERLLHEPRKIGFHPGRRLKAWNKNCIALGLASGFLEPLESTSIALIETGIEKIKSLFPNRDFDPAVVEEFNEMSRLEMERVRDFIILHYKLNQRTDDPTGFWTHCREMSVPDSLQKKMDLWRVQGHFVRYRWEMFAPPSWLAIYAGFDLLPRTYDLSVDGFDAAQLSGALAEMRKAVADTVAATRAHGEFIEQYARPQSVAAE

SEQ ID NO: 87527 - protein, 517 aa, Paraglaciecola sp.
  misc_feature (1)..(517): tr|A0A2N1D8Z9|A0A2N1D8Z9_9ALTE Tryptophan halogenase OS =Paraglaciecola sp. MB-3u-78 OX=2058332 GN=CXF95_16810 PE=4 SV=1
MKTRVVIVGGGTAGWLTAGIIAARHCADSTSSEQTEVVLVESPEVKNLGVGEGTWPTMRDTLRQIGISERMFLSCCDASFKQASKFVGWSQGKNEHYYHPFTAPVGYGGISAAEHWLATAQEVDFESWVCAQGAVCKETLAPKLPQMPEYAFHLNYGYHLNAGKFVTMLQHHCVEKLSVKYIQGHVQHVLPADNGDIKAIELADGEQITGELFIDCSGFAAILIAKHYQIPITSKQHILFNDTALALQVDHATDEVPIASCTVASAQESGWIWDIALQNRRGIGHVFSSDFTSAEQAEQALLKYVQNDPYLAAQEISPRTIKFTPGHRETFWHHNCVAIGVSAGFVEPLEATALVLIEKSAEWISEQLPRERSAMTVLAKRFNTLTRQRWQEIIDFLKLHYVLTQRQDSEYWREHQQLDSIPDSLQEALTLWRSQAPGLYESNQRFELFSSASKQYVLYGMDLKSEQKHPASFAQKEASLIKRLRNETVHTTEKLLSVLPTNRQFLRRVMEGQGQKK

SEQ ID NO: 87528 - protein, 512 aa, Altererythrobacter atlanticus
  misc_feature (1)..(512): tr|A0A0F7KRZ8|A0A0F7KRZ8_9SPHN Flavin-dependent tryptop han halogenase RebH OS=Altererythrobacter atlanticus OX =1267766 GN=rebH PE=4 SV=1
MDKVENIVIVGGGTAGWLTAGVIASRHQGRRPHGFSVTLVESPNVPTIGVGEGTWPTLRTTLRKMGVSETEFFRECDAAFKQGARFNRWTTGEADEGYYHPLMLPQGFARLNLVPHWLEDGEDSFCDAVTPQGRLCDRGLAPKTIATPEFESVANYAYHLDAGKFSDFLRRHCCEKLGVRHVLADVTEIETGPNGDVTRLKTEQGPSISGDLFVDCTGFRALLIGGAMQVPFRECSDVLFCDTALAVQVPYQDPADPVASHTISTAQSAGWIWDIGLPTRRGVGHVFSSAHIDADEAERELRAYIGPAADDLTVRRIPIRSGHRETFWKGNVVAVGLSAGFLEPLEASAIVLIELSAKMIAEQLPPNRAVMDVIARRYNDTTAYRWGRIIDFLKLHYSLTKRTDTDFWRDNTRPETIPDRLRGLMELWKYQAPWLHDEFDRAEEVFPAASYQYVLYGMGYRTALPRGAHDAERELAQRALRENRAHTARLMDGLPPHRDLLDKITEHAMMPV

SEQ ID NO: 87529 - protein, 495 aa, Marisediminitalea aggregata
  misc_feature (1)..(495): tr|A0A1M5H348|A0A1M5H348_9ALTE Tryptophan halogenase OS =Marisediminitalea aggregata OX=634436 GN=SAMN05216361_ 1289 PE=4 SV=1
MPQTIQNVVIAGGGTAGWMTAALLRRVLSPTIRIELVESEQIGIVGVGEATIPPIQTFNQFLGIDEKAFLRETHATIKLAIKFENWKTQGDSYYHTFGAPGTTMGFCSFHHYWLKAKQAGLAQSLWDFDLNYLSCLQGKFNKINTPNPLYEMQYAYHFDSALYGQFLRKTAEQAGVVRTEGIIEYVQQDPDSGFITALQLTNGQQIQGDLFIDCTGLSGLLIQQALGVSYEDWSHWLPADSAQAVPSERFDKTLPYTRSIAHRVGWQWRIPLTHRNGNGIVYSSQYLSDDEAGQTLLNNLDTKALDTPRTIRFKTGRTDQQWCKNVVAIGLSSGFLEPLESTSIHLIQSGIVRLMKMFPNQGISQAMVDLYNAESKDEFETIRDFIILHYHVNQRDDSDFWRDMRNMAIPDRLAQKIAAFEDTAAIFNEQSDIFRDASWVQVMMGQGLDPKDYHPAADAMDNAQLMDAMQQIYKAKQQPLDKLMNHDEFIKRYTA

SEQ ID NO: 87530 - protein, 510 aa, Caulobacter sp.
  misc_feature (1)..(510): tr|A0A0Q7T9L3|A0A0Q7T9L3_9CAUL Tryptophan halogenase OS =Caulobacter sp. Root1455 OX=1736465 GN=ASD21_17370 PE= 4 SV=1
MTDQAVRNILIVGGGTAGWMTAAALSAKLAGLPIAIRLVESAEIGTVGVGEATVPHIRHFNAALGLDEADFMRKTQATYKLGIEFRDWGKLGDSYVHPFGAYGAAIGGVGFHHHWLRARQGGDPTPLEAYSLPIQAARLGRFVPPSSDPRSLASTYSYAYQFDAGLYALYLRAYAEARGVVRTEGKVADVVLRGEDGFIEAITMENGERVEADLFIDCSGFRGLLIEQTLKAGYEDWTRWLPCDRAAAVPCDTVEPSAPYTRSIADKAGWRWRIPLQHRVGNGYVYCSDHISDDEAAAALLAGLEGKALAEPRFLRFVTGRRKKQWSKNCVAVGLSSGFLEPLESTSIHLIQVAVTTLLELFPDRGCDQADQDEYNRVMDLEFERIRDFLVLHYHATQRTDAPFWNERRTMSIPDSLAYKMDLFRERGVVVKYKDGFFLEPSWLAVYLGQNVVPRAYDPVSDSVPDAVLTQRLKAIRDSVADTTRSMPSHADWIARFCAAAPPSASGEAA

SEQ ID NO: 87531 - protein, 519 aa, Novosphingobium sp.
  misc_feature (1)..(519): tr|A0A2V5BLF5|A0A2V5BLF5_9SPHN Tryptophan halogenase OS =Novosphingobium sp. GV010 OX=2135477 GN=C7493_10734 PE =4 SV=1
MHATTSPPPHADAPGAIRSVLIAGGGTAGWMAATYLAARLQGTGVAITVLESSAIGTVGVGEATVPAIRDFFRAIGLHDFDVLRATGGTPKLGIDFHDWAGEGTRFFHPFGLYGLPSRGVPFHHYWLKLARAGDRRDLGDYSLCTEMARGGNFMLPVDHPVNDLATFNWAVHFDAARFAAMLRDHGQRQGITRIDDIITHVARDAQSGHIAAVDTQGGLALTADLFIDCTGFRSLLLGQTMGSAWVDWTNLLPCDRAVAMPCASAGTFDRPYTTSTARDAGWQWRIPLQERVGNGYVYASACLSDDEAVSILRGSLEGEALAEPNLIRFGAGHRRAFWSGNCVGLGLAAGFLEPLESTAITLIQTGLEKLVDLFPDRACSPALASEFNRATTLEYERIRDFILLHYHGNRRHGQPLWDNMRAAALPDKLAHKLDLWRARGKLVRYEWEAFLDPSWLSMYAGFGLMPAAHDPLADYFDTAQMADALDHMREAIRAAAAHARPARDFLARLAGAAMPAGTA

SEQ ID NO: 87532 - protein, 499 aa, Pseudoalteromonas tetraodonis
  misc_feature (1)..(499): tr|A0A1E3WWD8|A0A1E3WWD8_9GAMM Tryptophan halogenase OS =Pseudoalteromonas tetraodonis OX=43659 GN=BCD66_09370 PE=4 SV=1
MQNKQIKDVVIAGGGTAGWITAALLNKVLGNVVNITLVESEQIGTVGVGEASIPPILHLNAALGIPENEFIKATQATIKLGIEFENWRAPQHSYMHAFGDIGKDFPLCEFYHFWLRAKQQGSKTDFWDFSLNYQAAKKHKFTYLKQIPNTQLTGLNYAYHFDATLYGEFLKELTISRGVKRVEGKIAHVHQCEESGFVRALKLDDGQLISGDLFIDCTGLNALLIEQTLNTGFEDWSHWLPCDSALAVQTKSANDPVPYTRSIAHDAGWQWQIPLQHRIGNGLVFSSRHMTDEQAKQQLLDNLPGEPITEPRVIRFKTGRRRKQWHKNVVAIGLSSGFLEPLESTSIHLIQSAVTRLIKLFPHHGVSDALVTEFNKQSITEIEHIRDFIILHYKLTERKDTPFWRQCKQMEIPQSLAHKMDLFKQTGKVVRENDELFAEVAWQQVMIGQGLLPDDYGALADSLTNEQLAELFSNLKTLINSTVEQLPSHTVFLSSLKPK

SEQ ID NO: 87533 - protein, 476 aa, Marisediminitalea aggregata
  misc_feature (1)..(476): tr|A0A1M5RDF4|A0A1M5RDF4_9ALTE Tryptophan halogenase OS =Marisediminitalea aggregata OX=634436 GN=SAMN05216361_ 4142 PE=4 SV=1
MSKLFQRDLFETPTNTHGRALKSIWVVGDDVHGLSTAVAFATALKPFGIKVGVVSLTTATAKQASLHSCNGHLFEFHRRYQIPERAFMQSQGVAFFTAMSLATASRPNEPVWLANDTWLPLFNGIELHQVKRWLSDVAPVETSFAAAAAKAGKTVFPSGQQGTLGNSFELGAVVDTKAYCAFLTQHAVERGVTFVTSEDIAFEQCPHSGDITTLVLSNNQRIQCDWVVDATGPQARVIGQALKRPFESWHAYSPISLLGETTEQSASNTPGIAVSVNYTGYQQVQYLGGKKRTATFAVVRSGVGESEAGFREPVSNNCLAVGPAAYHIDVPGMSSLHITHRIIERFLNVVPCLPAPVTWGRAFNRSTKQDCEHLRDFGCLLLSAMATRQQETGKPWQVLPKLSDSLDQALTLFNESARCTVPPDAMIHRQRWLDALALASSNEQAFEPLLNAVSQTSGQQFLQRIATQIQSLVSQC

SEQ ID NO: 87534 - protein, 512 aa, Sphingopyxis sp.
  misc_feature (1)..(512): tr|A0A0Q7YGF4|A0A0Q7YGF4_9SPHN Tryptophan halogenase OS =Sphingopyxis sp. Root1497 OX=1736474 GN=ASD67_15110 PE =4 SV=1
MAKRSILIVGGGTAGWLTAAYLARFFDLARNPRLSITLLASDEIGSIGVGEGAFPTIRNTLQYIGVDESEFVRRASATFKQGIRFDDWVRTPRDGRSSHFLHPFEAPYHGDGHSLVSYWLLQDEATRRPFAEAMTIQNRVAEAQRAPKRPGEEAFGGPLNYAYHFDATRLAQVLSNQARALGVDHLPGTLTGVGLHPESGAIDHVVTAEHGVLTADLYIDCSGFRAELIGALGAPFRSVKHQLFTDRALACKIPYDAPDAPLESYTIAAAHEGGWTWDIGLAGARGVGCVYSSDHLSDDRAADILSGYTGGRSQDVGVRSIPFAAGYRPTPWVKNCVAVGLSGGFLEPLESTGLVTIETAAAMIAEMFPLGGPVAAPARRFNELMTARYENIVNFLKLHYCLSRRDEPFWRDNADPASIPDRLKELLDEWRYRPPGRFDFILDLESFAFFNYQYILYGMEYRTDLTPVREEFPDVAEAERIFARIRSFGAQAAHELPLHRALVDQINAASYA

SEQ ID NO: 87535 - protein, 503 aa, Marisediminitalea aggregata
  misc_feature (1)..(503): tr|A0A1M5ELS2|A0A1M5ELS2_9ALTE Tryptophan halogenase OS =Marisediminitalea aggregata OX=634436 GN=SAMN05216361_ 0448 PE=4 SV=1
MSGIKHIVIAGNGLAVNMTALALQQQLPPDINLTLINSAKYADLDCLYGSTSAPDMYAFNLMLNVSEPDLLFNTNSTFCWGNYFDRWAMTPCSWLQGFHLPFPAMRGVGLHHFVTRHGETELASYLINTQADKTGKFAHPPEDNRHPLSRAEYGYQFDASALSALYASKLSSKVTVINASIADVITNPAADSTGNINITGLQLDNGQRIEADLYIDCTGPNAKVYSALEQNSQDANSQQKSARTLFAIHSTLQRGEALPTHRRIRACEFGWQADTYLRDSIQRLTVCTPEQKSQAIDAHGIEASIAMAFSAGHRQQAWTGNCVAIGQAASVIEPLTPAPLMMLMRDIQRLLELIPVTNSMSAEATEYNRRFIADVEHTGLFQGALFALEHLPDSLPEQAYWQQAAQFVQSEKLSRKLTQYHHRGILVKYDLEPFNEQDWLILHSGMQRRPQTYDIVADQVPRAEMANQLNGMGNVIQQVVSQMPPHGIYLEKLMAYLSQKRNQ

SEQ ID NO: 87536 - protein, 498 aa, Marisediminitalea aggregata
  misc_feature (1)..(498): tr|A0A1M5RXJ1|A0A1M5RXJ1_9ALTE Tryptophan halogenase OS =Marisediminitalea aggregata OX=634436 GN=SAMN05216361_ 4276 PE=4 SV=1
MNSTQPATKPHVVIAGGGTAGWMTAAALARKLGPLVRITLVESSDIPTIGVGEATIPPLRVFHQLLGINEAEFMRATSATFKLGIEFADFGQLNQRYIHSFGQTGQSSWLAEFIHFWREGLDRGIATDYGSYCLELEAAKANKFYTSAQNAPLNYAYHLDAGAYATFLKHISVQAGVNHVVDTIEQVTLNDAGHIDALQLRQTGNLHGDLFVDCTGFRARLLGESLDVGYEDWSHWLFCDRALAVQTELTPPLKPYTIASAHSAGWRWEIPLKHRMGNGFVYSSQYLDETTAHDTFTALLRNTPLQDVRSLQFTTGRRLKAWHKNCVAIGLSSGFVEPMESTSIHLIVMGITRLMQLFPYSGDYQHLQDEYNAQTQIELERIRDFIVLHYHVTQRDDSAFWRACKDMVIPDSLSERIELFKEHGHAFQKANELFRVDSWSQVMLGQGLLPKNWHPAAKMMSDEQLAGALKKGQMEISQRVAQLPDHEAFVAQYCGQNR

SEQ ID NO: 87537 - protein, 506 aa, Massilia sp.
  misc_feature (1)..(506): tr|A0A0Q6SXY7|A0A0Q6SXY7_9BURK Tryptophan halogenase OS =Massilia sp. Root335 OX=1736517 GN=ASC93_17035 PE=4 SV =1
MSLKQLRRVVVVGGGSAGWMVAAALSRLLLRDEGRQHWEIELVESEEIGTVGVGEGTIPAIRAFNAALGISEDEFLRETKGTFKLGIEFVDWNAPGSRYFHGFSDVGRPIDGLPFHQYWLRLRKAGLAHDFADYSVNSVAALQGRFMRPRPDMAHSPLGEIGHAFHFDANRYGRYLRRRAEQQGVVRTEGRIDEVLRDPHNGNIAGLRLAGGRLIEGDLFIDCSGARALLIEQACAAGFEDWSHWLPCDRALAVPSEPALPPSPYTRSTARSAGWQWRIPLQHRIGNGHVYSSAFMQDGDAADVLLSTLDGKPLAEPRLIRFAAGRRKRTWVGNCVAIGLSSGFVEPLESTSIHLVQSAITRLMDLFPHAGLDAADIAVYNRQTQFELERIRDFIILHYKLTTRADSPFWNYCRQMPIPDTLAEKMALFATNARVYRTEMELFREASWVQVMLGQGLVPSGYHPVCDIHPLQRLQAFADDVRDVVRRCVATMPMHADLVAGLAVPA

SEQ ID NO: 87538 - protein, 519 aa, Caulobacter sp.
  misc_feature (1)..(519): tr|A0A0Q7SUU3|A0A0Q7SUU3_9CAUL Tryptophan halogenase OS =Caulobacter sp. Root1455 OX=1736465 GN=ASD21_17380 PE= 4 SV=1
MTPSPIGAPIRPSPIRKVLVLGGGTAGWMTAAALSKVLGGQVEVVLIESEQIGTIGVGEATIPPILTFNAMLGIDEREFMRATRATFKLGIEFRDWTRIGDRYIHPFGSFGLDIEALKFHQVWRKVRDQVGPIEDFNLAAVAARQNRFAMPDPDPAKVLSSLKYAFHFDAGLYARFLRGFAEARGATRVEGKVRDVALRGEDGFIQSVTLEDGRVFEADLFIDCTGFRALLIGQTLGGTYVDWSHWLPNDRAVALPCDTGGDGLTPYTRATADKAGWRWRIPLQHRTGNGYVYSSAHIGDDQALDSLLAGLDGPAQADPNFLRFQPGRRDRAWIKNCVAIGLSSGFLEPLESTSIHLIQAAITKLLALFPDTSFDPLEIDEYNRLTAQQVELVRDFIILHFKATERSDTPYWDYLRTMEIPESLARKIDLFAGRGRLFQSDYDLFAEPSWIAVLMGQGIVPRQYDALVDSLPQAALVQRLQRMSALIGQTAQAMPSHQVFIARYCAAEAAANTPVSRPA

SEQ ID NO: 87539 - protein, 496 aa, Caulobacter sp.
  misc_feature (1)..(496): tr|A0A0Q7UEC5|A0A0Q7UEC5_9CAUL Tryptophan halogenase OS =Caulobacter sp. Root1455 OX=1736465 GN=ASD21_00195 PE= 4 SV=1
MQEQVVKRVVVAGGGTAGWMAAAALAKQLGPLLEISLIESDEIGTVGVGESTIPTARTFNALLNIDEPAFMRATQATFKLGISFENWGQVGDRYIHSFGQVGKSNWMGSFHHFWLQAKAAGFGGELGDYCFELKAALADKFSVGEGPELNYAYHLDATLYGRFLRQMSEGLGVKRIEGKISQVQQNAETGFIEALVMENGDRVEGDLFIDCTGFRGLLIEQTLKAGYEDWGQWLPTNTALAVQTKSTGPAVPYTRAIAHKAGWRWKIPLQHRVGNGLVYCSDYMSDDEARETLLSALDGERLIEPRLIRYATGRRRKTWHKNCVALGLASGFVEPLESTSIHLIMIGVTRLMQLFPFNGVSDALVDRYNQQAVDELEKIRDFIILHYKLTERTDSPFWDHCRTMTVPDSLAQRIELFRDSAQAYQAPGELFQVDSWLQVMLGQRLQPTGYHQMGRLMPPEQLRGALADLSGNIARAVGALPGHQAFLDRYCGIPAS

SEQ ID NO: 87540 - protein, 497 aa, Mycobacteroides sp.; identical to SEQ ID NO: 82350
  misc_feature (1)..(497): tr|A0A0R3FQP4|A0A0R3FQP4_9MYCO Tryptophan halogenase OS =Mycobacteroides sp. H002 OX=1720566 GN=AOT84_19605 PE= 4 SV=1

SEQ ID NO: 87541 - protein, 497 aa, Pseudoalteromonas tetraodonis; identical to SEQ ID NO: 83404
  misc_feature (1)..(497): tr|A0A290TES3|A0A290TES3_9GAMM FADH2 O2-dependent halog enase I OS=Pseudoalteromonas tetraodonis OX=43659 GN=pr nA PE=4 SV=1

SEQ ID NO: 87542 - protein, 492 aa, Caulobacter sp.
  misc_feature (1)..(492): tr|A0A0Q7U904|A0A0Q7U904_9CAUL Tryptophan halogenase OS =Caulobacter sp. Root1455 OX=1736465 GN=ASD21_00130 PE= 4 SV=1
MGAPSSIVVAGRDAALWLSACVLRAALRPAGVSVTAVELPTRLGVADVHATLPPLEALHGLLGLDEAALLRATRGAFSLGQNFADVSGATPAFFHAHGAYGAPIDNRDFFPFWLKARRLGLDVELDAFSLTAAAARQGRVLLPDEETEAFGRADYGYHLPAIAYAASLKTLAGRLGVEMHQALAVTPTLDADGEIAALDLGEGRCVGGDLFIDATGAEGVLMTALGVARESWRDRFPADRVLRAQGPRLAALPPYADIRAWARGWVGLYPSQAATHVVQVYAGDLCADDQALEMAGRISGQALTDAVVSISDPGRRAQAWAGNCVAVGEAACAFDPVHGVELQAVQLGLVHLLSLFPVAAAFGAERAEYNATIRQVHERLRDFQSAHHLANRYAKAPFWDRARAATASDVLAHKIVVFQARGEIPPSEHETFAADSWRALFSGHGLTPETHAPMIDRTTPETMKGEFRRILGFIKEQVLKQPTHDLYLESFC

SEQ ID NO: 87543 - protein, 503 aa, Unknown
  misc_feature (1)..(503): tr|J9A264|J9A264_9PROT Uncharacterized protein OS=alpha proteobacterium IMCC14465 OX=1220535 GN=IMCC14465_1845 0 PE=4 SV=1
MSRDMSADDKSKLRKIVIAGGGTAGWMAAAALSKTLGELVDIKLVESEQIGTVGVGEATIPPIITFHRMLDIAENEFMRETQATFKLGISFENWRVEGEKYIHSFGTTGKDHWTSGFQHFWLNGLKRGHDMAYDDYCLELKAALDNKFSHLPNEGMSYAFHLDSSRYAKFLRGFSEKNGVVRVEGKINKVNLNGETGFISSLDLDNGITLEGDIFIDCTGFRGLLIGEALGIDFEDWTDHLPCNGAIAVQTESVRPAVPYTRSIAHHAGWQWRIPLQHRAGNGIVYCNEFMDENQALDKLLQTVDGKTITDPNFIKFRAGTRKKQWHKNCIAVGLSSGFMEPLESTSIHLIQRNILRFIRMMPFQEISQRDIDEFNNQADLDMETIRDFLVLHYVANERDDPFWKMCASIKMTDSLKQKIELFRETGRVFRHNEELFAENSWIQVMLGQGIMPEAYHPIADKMTDNELNVFLKTIREGVEKTVQNLPMHHDYVKQYCGVKEPA

SEQ ID NO: 87544 - protein, 537 aa, Burkholderia contaminans
  misc_feature (1)..(537): tr|A0A1E3FVP9|A0A1E3FVP9_9BURK Tryptophan halogenase OS =Burkholderia contaminans OX=488447 GN=BGI28_10300 PE=4 SV=1
MSHPIKNIVIVGGGTAGWMSASYLVRALQQQANITLIESEAIPRIGVGEATIPNLQKVFFDFLGIPEREWMPQVNGAFKSAIKFVNWRKSPDRSRDDHFYHLFGSVPNCDGVPLTHYWLRKREQGFQQPMEYACYPQPEALDARLAPCLLDGTRQMPHAWHFDAHLVADFLKRWAVARGVKRVVDEVVEVHLNERGDIASLSTKEGRTLEADLFIDCSGMRGLLINQALKEPFIDMSDYLLCDSAVASAVPNDDARVGIEPYTSAIAMNSGWTWKIPMLGRFGSGYVFSSKFTSRDQATADFLNLWGLSDKQPLNQIKFRVGRNGRAWVNNCVAIGLSSCFLEPLESTGIYFIYAALYQLVKHFPDTGFDPRLRDAFNAEIVYMFDDCRDFVQAHYFTASRDDTPFWLANRHDLRLSDAIKDKVERYKAGLPLTTTSFDDATYYETFDYEFKNFWLNGNYYCIFAGLGLLPDRSLPLLQHRPASVDKAEAMFARIRREAERLRASLPTNYDYLRSLRDGEAGRVRSQPGPVAAPETL

SEQ ID NO: 87545 - protein, 513 aa, Massilia sp.
  misc_feature (1)..(513): tr|A0A0Q6SJC6|A0A0Q6SJC6_9BURK Tryptophan halogenase OS =Massilia sp. Root335 OX=1736517 GN=ASC93_17050 PE=4 SV =1
MDGNRVRDVVIVGGGTAGWMTAAALSRLLPDGYRLRLVESDEISTIGVGEATIPNIRNYNHALGIDEDDFIRNTQGTFKLGIEFVDWKNIGESYFHGFGKIGRDLGPLKFYQYWLKLHQAGEAPDLDEFSINTLAPRHAKFMRDIQSAPDSPVADIGYAFHFDAGLYARYLRRYSEARGVVRIEGRIVDTRLRAGDGFIEAVVMENGDRIAGDLFVDCSGMAGLLIEKALHTGFEDWSHWLPCNHAIAVPCASVDPLLPYTRSTARAAGWQWRIPLQHRIGNGHVFSSDFMAPKEAEEILMSNLDGEPLAAPRHIRFTTGKRKKGWSKNCVAIGLAGGFLEPLESTSIHLIQTAIARLVEFFPDKTFNSADIDAFNAQVDFEYERIRDFLILHYKLNERTDSAFWAYCRDMEIPATLQEKIDLFQGHGRILRAGEELFTDVSWLQVMHGQGLRPRGYHPLVDQRSQDDIRKFVTDVRAVIRKCVDVMPTHAEFIRKHCAASTANPVQRSGSVN

SEQ ID NO: 87546 - protein, 492 aa, Massilia sp.
  misc_feature (1)..(492): tr|A0A0Q6SL00|A0A0Q6SL00_9BURK Uncharacterized protein OS=Massilia sp. Root335 OX=1736517 GN=ASC93_21750 PE=4 SV=1
MTLSFKRIVVVGGGTAGWMAAAALATALKGSSVELVESDEIGIVGVGEATFPSIRNFHRLLGIDEAEFLRATKGSYKLGIEFRDWRAVGESYFHTFGDFGELSGPNAVWGQYHRLGEASLGALGEQCLSSVMASKGRFMVPRVEHRFDYAYHFDAVLYAAFLRKLAEQRGVRRTEGRIVDVARRADGAIDRLLLADGRVVAGDLYIDCSGFASLLLGRALEEPFVDFSHWLPVDRAWAVPSERIGTELTPCTRATALEAGWAWRIPLQDRIGNGHVFASRYLDEESARAQLLQQLDGPALAEPRLLRFQTGHRARAWVHNVVALGLSGGFLEPLESTSIFLIQRGLGKLIDLLLSGAPLSEPVVADYNGLNARQFARVRDFIILHYCLSARRDSALWRAMTTMELPDTLAFKIHAWRKAGALQQYDLEGFDATSWLAIHAGMGHWPEHTDPSLGDMTRAEALAGLQWRRERIIEAVAAMPTHGAFLRGMLGR

SEQ ID NO: 87547 - protein, 515 aa, Sphingomonas aquatilis
  misc_feature (1)..(515): tr|A0A511Q4R1|A0A511Q4R1_9SPHN Tryptophan halogenase OS =Sphingomonas aquatilis NBRC 16722 OX=1219039 GN=SAQ01S _20140 PE=4 SV=1
MTLPVPDHAIRNIVIVGGGTAGWMAAAAFSRLLNTGYTRVTLIESEEIGTVGVGEATIPPLLNFNRMLGIDENEFLAATAGTFKLGIEFRDWGAIGDRYIHPFGTFGQDLQGISFHQLWLRERSRRTIPDITAWSMSAQAAARGRFGRAREDARSPVRELFYAYHLDASLYARYLRGYAERGGVTRIEGRIVDVRLRGEDGYVEALTLADGRQVAGDLFIDCSGFRGLLIEEALHTGYESYAQWLPCDRAVAVPCALPNAREPDPYTRATARAAGWQWRIPLQHRMGNGYVYCSDVLSDEAAEFDLLASLEGGPLGDPRRLRFTAGRRRQSWNRNVIALGLSSGFIEPLESTSIHLVQAGIQRIVAMFPDTRFDPAERDEFNRQLHDLYEDIRDFIILHYAQTRRTDTAFWDRVRTMPLPDSLTRKLDLWRGKGRLFREGYDLFSVPSWVAVCLGQGLVPSTWEPAADALDETLVAEAIETMRRGYADTAERLPTHGDFLRMVAPSPLANWGQTR

SEQ ID NO: 87548 - protein, 513 aa, Caulobacter sp.
  misc_feature (1)..(513): tr|A0A0Q7UAD9|A0A0Q7UAD9_9CAUL Tryptophan halogenase OS =Caulobacter sp. Root1455 OX=1736465 GN=ASD21_19510 PE= 4 SV=1
MRPIKNIVIVGGGTAGWLTAGLIAAKHRARMAAGFTVTLVESPNTPIIGVGEGTWPTLRTSLAKIGVSEADFFRECDAAFKQGAKFARWTTGAADDAYYHPLMLPQGFSQVNLAAHWLASGGAQSFCDAVSPQGRLCDDGLAPKTITAGPYQGAANYAYHLDASKFAPFLQRHCCDKLGVRHVLADVQSVAMAEDGDIRGVVTQQRGEIQGDLFVDCTGFRALLLGDALGVPFRDCGDVLFCDTALAIQVPYESETSPIASHTISTAQSAGWIWDIGLPTRRGVGHVYSSRHISDEDAERELRAYIGPAGRDLSARKIPIRSGHRETFWERNCVAVGLAAGFLEPLEASAIVLIELSAKMISEQMPACREVMDVVAARFNATTHYRWGRIIDFLKLHYVLSKRSDSAFWRDNRASETVPERLADLLRLWRHQPPWLHEEFDRVEEVFPTASYQYVLYGMGFRTEIEPEALADERAMAERALRENAVQTDRLLASLPRHRDLIRKIVEHGLQPV

SEQ ID NO: 87549 - protein, 514 aa, Marisediminitalea aggregata
  misc_feature (1)..(514): tr|A0A1M5EM33|A0A1M5EM33_9ALTE Tryptophan halogenase OS =Marisediminitalea aggregata OX=634436 GN=SAMN05216361_ 0449 PE=4 SV=1
MKDSTPNILKQITIVGGGSAGWMTAAALSRMLPTGDVKITLVESEQIGTIGVGEATIPDMINFNKLLGISESEFIKATNGTFKLGIEFNDWGKLGDSYFHPFGGHGVDMNGVDFHQYWLHTLAAGNTCDLEDYSICAVAAKQNKFVLPEQNPNSVLSHLRYAYHFDATAYAAYLRKYAEQRGVKRIEGKIASVQQHTDTGNIAGLTLEDGTTVGGELFFDCSGFRSLLLGDTLGVKFRDWSHWLPCNTAQTVATEQTDKVLPFTRSTAKTAGWQWRIPTQQRVGNGHIYCDRFMGHDLARQILLDGLDSKPISEVRTIQFKTGCQEAFWEKNCIGIGLSAGFLEPLESTSLFLIQQGISRFISLYPDAGLHPVIRNEYNRLMTREFEQVRDFIILHYKATTRDDSPFWRYVRDMEIPDSLTHKMTLFQQGGRVFRDDHELFTRSSWVAVMVGQGIFPKTFDPILANIPVADIQRSLNSMKQAMEQSVARLPDHAMFIEKYTAMQPNPTFSMGRQ

SEQ ID NO: 87550 - protein, 498 aa, Sphingobium sp.
  misc_feature (1)..(498): tr|A0A560X5G0|A0A560X5G0_9SPHN Tryptophan halogenase OS =Sphingobium sp. AEW013 OX=2572915 GN=FB596_106175 PE=4 SV=1
MNSGHLRDIVILGGGAAGWIAAALLAKKIDCEQTRITLVESEQIGTIGVGEATVPILAQYNAMVGIDEFDFVRSTQGTFKLGIEFCDWGTAGNRHFHAFSDFGHPVEGISTHHYWLRLRQSGEDYPIEDYSFAYAVGKNNNFAPHNERYHYAYHFDAGLYARYLRDVATELGVQRIEGKMTHFDLDPESGNISAIHLADGQTIPGDFFLDCTGFASELLGKALDTPFVDWSHWLLCNSAIAVPSTRIDTPMPFTRSTAHAGGWRWTIPLQHRNGNGMVYSSDYWSDDAARDELLGSISSEPLAEPRLFRFTSGHRKQFWNRNCVGIGFASSFLEPLESTGIQLIVMGVLKLLRYFPQRVIDPVLRNEYNRLSTIEIERIRDFIIAHYYLSRRPEPLWAACRNIEIPDSLRHKIEIWKASGQIPLGDLESYMEPSWVAILLGNNLVPSRYSVSADKHPLDQIRNGMKLRREEIVRSARAVTSHRDFIDGHCKAVQLEFD

SEQ ID NO: 87551 - protein, 521 aa, Litorilituus sediminis
  misc_feature (1)..(521): tr|A0A4V0ZFU5|A0A4V0ZFU5_9GAMM Tryptophan 7-halogenase OS=Litorilituus sediminis OX=718192 GN=EMK97_04355 PE=4 SV=1
MEKELSRISRVVIVGGGTAGWLAASHLANKLKPLAENGVKVTLIESPNIPTIGVGEGTVPMMRNTLKDLGISETEFFKTCDATFKQGIKFVDWLDNPTPGQASYYHHLFDYPEISHFDVTPYWLKGLAGEKRSFADSVSQQGIVCDAELAPKLITTPEYEGITSYGYHLDANKFSALLTRNAVERHGVEHIQAHVEQVCLNDDGEIASVITKEAGEISGDFFVDCTGFDCLLLGKAMQVPFVDKSDVLFVDHALTIQIPYEKLDEVIPSYTISTAMEAGWVWDIGLLERRGVGHVYSSKYTSHEAAEQALRDYVGPAFDDYPTRLIKMNIGHREKFWHKNCVALGLAQGFVEPLEATGLLVFDATAKMLASQFPTHKENMAIVAKQFNQRIKLSWESVIDFVKLHYYLSRRDDNQFWLDNRKPETTPDTLLERLALWKTQLPNPLDFYSGYEIFKLENYLYVLYGMEFDTDIEALSHRYPDIDKAKQFFTAMENSAHALTKTLPSNRELVNKILKFGLQKI

SEQ ID NO: 87552 - protein, 511 aa, Novosphingobium sp.
  misc_feature (1)..(511): tr|A0A2V5BC21|A0A2V5BC21_9SPHN Tryptophan halogenase OS =Novosphingobium sp. GV010 OX=2135477 GN=C7493_101507 P E=4 SV=1
MRQLVIMGGGTAGWMTAATLARALPRDWSITLVESADIGIIGVGEGSFPTLRSTLARIGEGLPGGDERSFMRAARATFKQGVRFVGWAGKPGADDYFHPFDLPRDGADDALLPFWLDSGVDPRRPSWASALTVQEAVIRAGRAPKRAADPDFTGPLNYAYHFDAVALAAWLRQMAEARGVRRIESTIGSARLHADGRIAAIVPQDGAPEIAGDVFIDCSGLAAKLIGETLGSPFVPLGDVLFNDRAIAMQIPAADQPIAPYTLATAHDAGWIWDIALPDRRGTGCVYSSAHMSDDEAEATIRRYAGPAGKTLSTRRLQFQTGYRARQWIGNCVAVGLSAGFFEPLESTGIMLIEVAAHMLGEMLAVPLTPAVMEASARSYNRHMVARFAAIADFLKLHYCISDRRDTAYWRDNTDPASWTATLRDRIEQWRHRTPSRFDFVVDHETFLPPSWGYILHGMGFATQAGLGAIERDPAGAGNALSAVGALRAAAPQAIAALPDHRALIDQIHRS

SEQ ID NO: 87553 - protein, 521 aa, Xanthomonas arboricola
  misc_feature (1)..(521): tr|A0A2S7AEU0|A0A2S7AEU0_9XANT Tryptophan halogenase OS =Xanthomonas arboricola OX=56448 GN=XarjCFBP7645_12165 PE=4 SV=1
MTDTAPSDPQQRPVRRVVIAGGGTAGWMAAAALSKVLGRHLQIVLVESDEIGTVGVGEATIPSLVTFHRLLEIDEAAFMAATQATIKLGIGFEHWRDVDRHYIHSFGHTGTDHWSAGFHHFWLKGRQRGVARDFGDYCLELRAAQEGRFAHLPNGGMNYAYHLDAGLYARFLRRFSEGFGVQRIEGRIGNVETDPHSGYLTALMLDNGTRVEGDLFLDCTGFAGLLIGKTLGVGTDDWSQWLFADSALAVQTESVGAPVPYTRSRADRAGWMWRIPLQHRVGNGIVYSSRYMDQDSAAQALQRNLSGRALTQPRALRFTPNQRHRVWEKNCVALGLASGFLEPLESTNIHLIQRGIIRLMQTFPQVINDVDIAEYNRQAAAEITHIRDFVILHYHATDRRDTPFWRDCAAMDIPDTLRHRVELFRQSGRVFHQANELFAENSWVQVMLGQGITPKQHHPVADLMGDAELRHFLESIRTRVDAALARLPAHADFLRRYCPAPPLPEPATGLPADAALATGAE

SEQ ID NO: 87554 - protein, 498 aa, Sphingopyxis sp.
  misc_feature (1)..(498): tr|A0A0Q7Z229|A0A0Q7Z229_9SPHN Tryptophan halogenase OS =Sphingopyxis sp. Root1497 OX=1736474 GN=ASD67_13795 PE =4 SV=1
MSARTRPVRRIVIVGGGSAGWMTAAALGRALAGQDRTITLVESETIGTVGVGEATVPPIHEFNRYLRMDPADFLRATHGTIKLGIAFDGWGGADNSYFHPFGYLGVEMAGVHFHHYWLRHLAAGGDPDHGPYNLETMAARAGRFAPATRHGPVHHAVHFDAAAYARFLRAYAEDKGVARIEGKVADVSLDPEDGYIEALTLDDGRRIVEGDLFIDCSGFRGLLIEGALQTGYTDWNHWLPCDSAVAMPTERSGDPPPFTRSTARAAGWQWRIPLQHRDGNGYVYSSAHLGHDDAEAALRANLSGAPLADANRLRFTAGHRKHIWNRNCVAIGLAGGFLEPLESTSIHLIQTTIIRLLALLPRDGFDPHVVARFNRDALHEYAVIRDFVIAHYATANRDDTPFWRDVVAAGVPDSLAERIEAYRATGNILFEPGDLFGPTNWYAVLTGQGVKPRSWHPIADGLSSEDLSARLATLRGRVAEQLSELPPHSEFLRRLSAV

SEQ ID NO: 87555 - protein, 513 aa, Novosphingobium sp.
  misc_feature (1)..(513): tr|A0A2V5BY78|A0A2V5BY78_9SPHN Tryptophan halogenase OS =Novosphingobium sp. GV010 OX=2135477 GN=C7493_10639 PE =4 SV=1
MQATRDRQDERAIRSIVIVGGGSAGWMTAAALANSLQQGCAITLVESEEIGIVGVGEATIPTIRLFNDMLGIDEAEFIRATHGSFKLGIQFVDWSAPGARYFHPFGSYGKAFDTVAFHQFWLAARHTQGIDNLDHYCMAWTLAEAGKFAPPSRDPRTVLSTYDYAYHFDAARYAAFLRRYAEAKGVTRLEGKVASVTQHGDTGFVESVTLTDERVVTGDLFIDCSGFAGLLIEKTLRTGYEEWSHWLPCDRAVAVPSAPTADILPYTRSTARNAGWQWRIPVQGRIGNGYVYASRFIDDDTATRDLLRSLDGKALADPRPLRFTTGRRRQAWNRNVIAIGLSSGFLEPLESTGLHLIQANISKLLAFFPDKDFDPLVIAEFNHVAATETERIRDFLVLHYHLTTRDEPLWRHTATMPIPDTLATRIDHFRRYGRLISRDMDLFGPASWTAVHIGQGNLPRACDPLKTYRTADGVQWLTRFRNAMQAEAAQVSSHRAYIETHCAARESTAVVGV

SEQ ID NO: 87556 - protein, 497 aa, Marisediminitalea aggregata
  misc_feature (1)..(497): tr|A0A1M5N9D3|A0A1M5N9D3_9ALTE Tryptophan halogenase OS =Marisediminitalea aggregata OX=634436 GN=SAMN05216361_ 3130 PE=4 SV=1
MHTSAIHHYVIAGGGTAGWMTAALLGKLLNGTGARITLVESPDQPGVGVGEATVPSFVDFIKLLGIDEQTFVKATQATFKLGIQFSHWQTTGHSYWHPFGHVGARIDGKPFFQQWLHAHRSGLTQTYTDFSASARMAQENKFYIPNPQQPNNLSQMGYAYHFDAQQVAVFLRDFAVSKGVVHKQAHIEHVQMCPDNSAIQRLITRTGEHIDGDFFIDCTGTQARLMGQALNTGFTDWQRYLPVDRAWVVQTENTEEPVPYTKAIAEPMGWRWQIPLQHRTGNGLVFCSQYTSPDEAKRYLQTQLTTPLLNEPRLLTFKTGHLEQFWRSNCVAIGLSAGFLEPLESTGIYLIMRGILNLAKLLPSSPPCKATIHEYNQLMLAEYQHIRDFIVLHYCVSLRNDTCFWQSWQQREIPTTLAHKLALYRTRGVVSHGQSDLFADHSWHAVATGMNVLPRDVDPIVATTDIKPLHDLLARIDHALAHSVGQLMPHGEYLKAW

SEQ ID NO: 87557 - protein, 506 aa, Rhodanobacter lindaniclasticus
  misc_feature (1)..(506): tr|A0A4S3K9Y6|A0A4S3K9Y6_9GAMM Tryptophan halogenase OS =Rhodanobacter lindaniclasticus OX=75310 GN=B1991_16715 PE=4 SV=1
MAESCIRNVVIVGGGTAGWMTAAALARTFGAQLAVRLVESSEIGTVGVGEATVPHLKLFNNLLQIDEIEFIRRTSATFKLGIQLNDWHHLGDSYIHGFGTTIGRGLGLLPFHQYWLKAARAGRAGPLGDYTVHTLAAPRGKFMSSASDVPRDSPLADIPYAYHMDTARYALFLREYAAARGVRRTEGKVAEVKLRPDDGFVESVVLEGGEVVAGDLFIDCSGFRGLLIEQALHTGYIEFKDWLPCDRAVVVRTESVGPPPPFTRANAQAAGWQWRIPLQHRTGNGHVYSSAYISDDEATATLLRNIQGRPLGEPFQLRFTAGMRRKLWNRNVVAIGLSGGFMEPLESTGIHLIQMGITRLLGLFPRDGFDPVLSERYNAQLKFDTERIRDFLILHYHATEREDTPFWQQCQHMSVPPSLQDNIDLFADSGRFFRNADELFAEISWVQVMIGQGIVPRSWHPLVDQVPETDLYRFVDDVARLMADCVEVMPSHQAFIDRHCAIARAG

SEQ ID NO: 87558 - protein, 499 aa, Sphingopyxis sp.
  misc_feature (1)..(499): tr|A0A0Q7YW23|A0A0Q7YW23_9SPHN Tryptophan halogenase OS =Sphingopyxis sp. Root1497 OX=1736474 GN=ASD67_01295 PE =4 SV=1
MTDPIRTIVIVGGGTAGWMAAAAAARFLNDGQRRILLVESDAIGTVGVGEATIPPIRDFNNMLGIDEAEFLRETGATFKLGIEFVDWGALGERYLHPFGDPGHNFEGIAFHQYWLKHRHDPRIGPFTDYFITAAAVRHRGCAPQSGDPRSPLHQMAAAYHFDAALYASYLRRRAEAQGVERIEGRITGVARDGGSGHVAALRLADGRDVAGDFFIDCSGFVSLLLGKEMGVAYRDWSRWLPCDRAFAVPSARTDPLIPATRATAHGFGWQWRIPLQHRTGNGIVWSSAHAGDDEARDTLLANLDSEELAEPRQLRFTAGVRERLWEGNVVALGLAGGFIEPLESTSIHLIQTGINKLFWLFPDRRFSAVERDEYNRLMIDQYEYVRDFIILHYKATARTDTSFWRDMAAMEIPDSLAQKIELFRTKGRIRRFDHDLFGVANWAAVMLGQNIVPDGYDPLVDATDDDRIIAAMQRIASVFDQQARAMPPHADYIARLVAR

SEQ ID NO: 87559 - protein, 484 aa, Sphingopyxis sp.
  misc_feature (1)..(484): tr|A0A0Q7Z6C1|A0A0Q7Z6C1_9SPHN Tryptophan halogenase OS =Sphingopyxis sp. Root1497 OX=1736474 GN=ASD67_01315 PE =4 SV=1
MTAAALAKLLPGQADIQLIESEEIGIVGVGEATLPHLREFIRRLGLDEMEFMRTTRATFKLGIDFVDFGAIGERYIHPFGAYGTDIAGVGFHHYWLRMQAAGQVPPICDFSLPIVAARGKRFAPVPEGGDLLDSSYSYAYQFDATRMAPMLRRFAEAHGTRRTEGKVVAVERDGASGDVARLRTDRGDVIGGDLFIDCSGFRALLIGETLKSPWEDWSEWLPCDRAAALPCAAPDGPIEPYTRATAMPAGWRWRIPLQHRVGNGYVFSSNHVSEDEACAAILGAVEGEPLADPRVLRFRAGRRTKSWDRNVVAIGLASGFLEPLESTSIHLVQQAVTRLVELFPERRIDPADRDSFNALVDREYDRIRDFLILHYHATRRDDSDFWSHVRTMALPDELARKMALWKESGRVELYTEGLFLEASWIAVYLGQGVVPQGYDQRADIPPQDRIAASLAELGGAIRQRVAAWPDHAEYLRQAGAWEAA

SEQ ID NO: 87560 - protein, 514 aa, Sphingomonadales bacterium
  misc_feature (1)..(514): tr|A0A1G3JLH6|A0A1G3JLH6_9SPHN Tryptophan halogenase OS =Sphingomonadales bacterium GWF1_63_6 OX=1802168 GN=A20 95_07010 PE=4 SV=1
MVHPVRNIVIVGGGTAGWLTAGIIAARHRTRIGQGFSVTLVESPNTPIIGVGEGTWPTLRTTLSRMGVSESDFFRECDAAFKQGARFDRWTTGAVDDGYYHPLMLPQNFGQVNLAPHWLASNQGESFCDSVSAQGRICDDGLAPKTIATAEYDALANYAYHLDAGKFAPFIQRHCCEKLGVRHVLADVEQVLMHENGDIRAIQTAQAGEIEGDLFVDCTGFKALLIEGAMNVPFKDCNDVLFCDTALAMQVPYERPDSPMASHTISTAQTSGWIWDIGIQTRRGVGHVFSSSHSSDEEAERELRAYIGPAADGLNARKIKIRSGHRETFWKGNCVAVGLAAGFLEPLEASAIVLIELSAKIIAEQMPACREVMDIISSRFNATTHYRWGRIIDFLKLHYVLTKRTDSDFWRDNVRDETIPDRLKELLLLWRYQSPWFHDEFDRAEEVFPAASYQYVLYGMGYHTEVDAASLSRDHRLADRARRENAALTDKLCAGLPRHRDLINKIVAHGLPPV

SEQ ID NO: 87561 - protein, 514 aa, Massilia sp.
  misc_feature (1)..(514): tr|A0A0Q6S3L2|A0A0Q6S3L2_9BURK Uncharacterized protein OS=Massilia sp. Root335 OX=1736517 GN=ASC93_27135 PE=4 SV=1
MSYQSIAIVGGGTAGWLAACYLQRALNGNPAHPVRITLIESPDVAAIGVGEATVPTLRMMLRTIGIPEAALFASAEATLKNGIRFVGWHDGTDSFDHPFDMPIVADGYSTMTHWLNLKQRGLTRQPFGEAGVVQPALMDALRSPKLMSSAPYEAPVPYAYHLDAVLLARLLRDTAKERGVVHVEGTVEQVDVDETGIRAVCLADGTRHAADLFVDCTGFASLLLGKTLDVPFHSYADTLLCDRALACPVAHEASDAPLRSHTVATAQDAGWTWDIELQTRKGTGYVYSSRHCSDDEALATLRRYNAGRTELAEPRLLRMRVGRHTRMWEKNCLALGLAGGFIEPLESTGIYLIEYALQMWLDYLPTPAGAAPMRDRYNMLMAEHYDELHDFVLAHYVLSARRDTAFWRACTEEVKVSDRLAALLALWKHKLPGTADIDARRQVLFGPHNWFFILAGQRCLPEHGIGQMPYIAPERSQAALARIAEIRKAAVSQSPSMREYAQKIRAAAANAPRR

SEQ ID NO: 87562 - protein, 520 aa, Xanthomonas arboricola
  misc_feature (1)..(520): tr|A0A381LV49|A0A381LV49_9XANT Tryptophan 7-halogenase OS=Xanthomonas arboricola OX=56448 GN=CPBF424_38460 PE= 4 SV=1
MTDTTPADPQQRPVRRVVIAGGGTAGWMAAAALSKVLGRHLQITLVESDEIGTVGVGEATIPSLVTFHRLLEIDEAAFMAATQATIKLGIGFEHWRDVDRHYIHSFGHTGTDHWSAGFQHFWLKGRQRGVARDFGDYCLELRAAQEGRFAHLPNGGMNYAYHLDAGLYARFLRRFSEGFGVQRIEGRIGSVETDAHSGYLTALTLDNGMRVEGDLFLDCTGFAGLLIGKTLGVGTDDWSHWLFADSALAVQTESVGAPVPYTRSRADQAGWMWRIPLQHRVGNGIVYSSRYMDQDSAAQVLQRNLSGRALSQPRALRFTPNQRHRVWEKNCVALGLASGFLEPLESTNIHLIQRGIIRLMQTFPQVINDVDIAEYNRQAAAEITHIRDFVILHYHATDRRDTPFWRDCAAMDIPDTLRHRVELFRQSGRVFHQANELFAENSWVQVMLGQGITPKQHHPVADLMGDAELRHFLETIRTRVDAALLRLPAHADFLRRYCPAPLPEPATRLPTDTALVTGAE

SEQ ID NO: 87563 - protein, 524 aa, Caulobacter sp.
  misc_feature (1)..(524): tr|A0A0Q7TFT2|A0A0Q7TFT2_9CAUL Tryptophan halogenase OS =Caulobacter sp. Root1455 OX=1736465 GN=ASD21_05225 PE= 4 SV=1
MTKPINEVLIVGGGTAGWITAAYLARKLGANRPDGVKITLIESSEIGIIGVGEGTIPTIQTTMREIGIDEARFMRGAGATFKQGIKFVDWTTAPVGGAHSHYYHSFSRPHTLGGLDLAPYWMLGCAGDAPFSEAVTLQDTVCEAGKGPKLIDDPQYSSPLGYAYHFDAGKLATLMRDVGKELGVRHLIGNVEGARLDETGAIAAIVTREHGELTAGLYVDCSGFSAKLIGEAMGVAFVDDSDTLFVNRAVAIQVPYDRADAPVATTTISTAREAGWTWDIGLPERRGVGYVYSNNHTSDDRAEEVLRAYVGPAAEGLNARQLKLPIGHRQKLWVKNCVAIGLSGGFLEPLEATGIMLIEAAAWMLGRLFPRSGELEPTAAQFNEAMGLRYKGVLDFIKLHYCLTQRTDNDFWIDNARPESIPDSLRALLEMWKTRAPDPFDFGTVHDSFEVFNYQYVLYGMGFKTDLSANLSAYPHLEAARREFARLKNAAGRAAAAMPDHRTLLDEIYRSGFRRPTPLGAAAR

SEQ ID NO: 87564 - protein, 530 aa, Saccharopolyspora shandongensis
  misc_feature (1)..(530): tr|A0A1H3BEN2|A0A1H3BEN2_9PSEU Tryptophan halogenase OS =Saccharopolyspora shandongensis OX=418495 GN=SAMN05216 215_1010152 PE=4 SV=1
MEDHRIKDVVVLGGGTAGWMTAAYLGKALGQHARITVLEAPSIPKIGVGEATVPNLHKTFFDFLGLSEEEWMRECNASFKMGIKFINWRTDGTGQADARPHGGGTDHYYHLFGILPNHENLPLSHYWAAKKLSGQTDEAFDYACYREPAIIDQKLSPRHSDGTKWTNYAWHFDAHLVADFLRRFATQKQGVVHVEDEMVDALIDQRGHITALKTKAGRTIEGDLFIDCSGFRSLLINKVMREPFLDMSDHLLNDSAVATAVPHDDETNGVEPYTSSIAMSSGWTWKIPMLGRFGTGYVYSSRFADADTATAEFCRMWGLDPETQPLNHVKFRVGRNRRAWVKNCVSIGLSSCFLEPLESTGIYFITAALYQLGKHFPDKRFDPVLADSFNREIEIMFDDSRDFLQAHFTLAPRTDTPFWRACKELELADDIKHKIAAYRAGLAINMPITDEVNYYANFEAEFRNFWTNSSYYCVFAGLDVLPSHPLPAMTYRPDAFEGAEAVFAEIKRSRAELVAKLPSTYEYLRNLHGR

SEQ ID NO: 87565 - protein, 517 aa, Rhodanobacter lindaniclasticus
  misc_feature (1)..(517): tr|A0A4S3KH05|A0A4S3KH05_9GAMM Tryptophan halogenase OS =Rhodanobacter lindaniclasticus OX=75310 GN=B1991_07190 PE=4 SV=1
MRHDQRGEFDVGTHRIRKVVVAGGGTAGWIAASALAYQLKDQLEVTLVESSAIATVGVGEATVPPIRNFHRFMNIDEQEFLRAVAGTFKLSISFENFVRPGHRYIHPFGITGKGTLVAGFEHFWLDSLRRGMKSELHNYSLEAMASLGNQFALTDEPEINYAYHMDAALYVKFLREKFQPCGIRQIDGKIKEVRQHPESGYVEALVLEGGQVIEGDLFIDCTGFRGLLIEQTLETGYEDWHNWLPCDRAIALQTKSVDPSPVPYTRAIAHEAGWRWHIPVQHRVGCGLVYDSRHMSDDEAQAKLLRDVGAEPVRDPWPVRFRTGRRLKAWNKNVVALGLASGFIEPLESTSIHLAMSAVMQLVELFPSEGIPDSLVRIYNDNCRRELEHVRDFIILHYHANQRDEPMWKGCREMSLPDSLQIRIDAWRDRAHVWRDQSELFATTSWIHVLLGQGVMPKQHHPLPRELSDADLRRLLDSIRGPIDRAVPRMPLQQVFIDRYCKAAPEVWNMKRPTATA

SEQ ID NO: 87566 - protein, 530 aa, Rhodanobacter lindaniclasticus
  misc_feature (1)..(530): tr|A0A4S3KHW9|A0A4S3KHW9_9GAMM Tryptophan halogenase OS =Rhodanobacter lindaniclasticus OX=75310 GN=B1991_06425 PE=4 SV=1
MPRIKKVLVVGGGTAGWLAACYLAKAMNSAAPDSVQVELVESPNIRLLGVGEATFPSIRGTLAAIGLDERRFLVGATATFKQGIQYVNWVRPPGTPGADRFFHPFNTPSRRPGSPELLPYWLLGAAPAGTPFAEAVTMQSRLVEHGRAPKHASDADYQAPMNHAYHFDAAAFAATLAEHGQGLGVKRHLATVERTELDERGNIARVVTAELGALTADLYVDCTGLRGSLIGGAMRSAFRSRRDVLFVDRAVALQVPYPAPDTPILPYTRATAQSAGWIWDIGLQQRRGIGHVYSSRHMDATQAEEIARRYVGAAADKLEAQHLKFETGYRPEHWRGNCVAVGLAGGFVEPLESTGIALVELAVCMLTHLFPADHDDMERTARRFNEMMVARYERIIDFIKMHYCLSQRRDSAFWIDNSNPASIPQSLRDRLQLWRRRPPHRLDFVTDLEMFMPASWQYVLYGMEFKTDLEHARSAWPQMDEARREFAMIQQMAGRALQDLPDHRALVEQLCRQHAQRNPVRAGEPVAIGG

SEQ ID NO: 87567 - protein, 506 aa, Xanthomonas arboricola
  misc_feature (1)..(506): tr|A0A381LVN6|A0A381LVN6_9XANT Tryptophan 7-halogenase OS=Xanthomonas arboricola OX=56448 GN=CPBF424_40290 PE= 4 SV=1
MLPAPLRNIVIVGGGTAGWMAAAAFARVLGPGFKVQLIESEQLGTVGVGEATVPHIKAFNNLLGIDEAEFVRQTQGSFKLGIEFVDWQRPGTSYIHGFGTQIGHPLGLLPFHQYWIKQRARGKAQPLGAYTLNTVAAVRGKFMTSAGDVPANSPLANIAYAYHFDATQYARFLRTYSEQRGVTRIEGLVEQVQLHADTGHVQSLQLASGQVVSGDLFIDCSGFRGLLIEEALHTGYHDFTHWLPCDRALAVPSENVGPPTPYTRSTARAAGWQWRIPLQHRTGNGYVYSSAHISDDEAAATLLANLEGTPLADPRPLRFTTGRRKQFWNRNVVALGLASGFLEPLESTSIHLIQAGISRLLELFPREGISPVLVQRYNDRLAFEFDRIRDFLVLHYHATERDDSAFWRHCRTMPITPELQTTLDLFRDSGRFYRNAEEMFAEISWVQVMIGQGILPQGYHPLVDQVPDHDAERFLASVAQTIGHCVDVMPTHQQFIDRYCKAAAPR

SEQ ID NO: 87568 - protein, 521 aa, Xanthomonas arboricola
  misc_feature (1)..(521): tr|A0A2S6YV53|A0A2S6YV53_9XANT Tryptophan halogenase OS =Xanthomonas arboricola OX=56448 GN=XarjCFBP7652_07440 PE=4 SV=1
MTDTAPSDPQQRPVRRVVIAGGGTAGWMAAAALSKVLGRHLQIVLVESDEIGTVGVGEATIPSLVTFHRLLEIDEAAFMAATQATIKLGIGFEHWRDVDRHYIHSFGHTGTDHWSAGFQHFWLKGRQRGLARDFGDYCLELRAAQEGRFAHLPNGGMNYAYHLDAGLYARFLRRFSEGFGVQRIEGRIGNVETDAHSGYLTALTLDDGTRVEGDLFLDCTGFAGLLIGKTLGVGTDDWSQWLFADSALAVQTESVGAPVPYTRSRADQAGWMWRIPLQHRVGNGIVYSSRYMDQDSAAQVLQRNLSGRALTQPRALRFTPNQRHRVWEKNCVALGLASGFLEPLESTNIHLIQRGIIRLMQTFPQVINNVDIAEYNRQAAAEIAHIRDFVILHYHATDRRDTPFWRDCAAMDIPDTLRHRVELFRQSGRVFHQANELFAENSWVQVMLGQGITPKQHHPVADLMGDAELRHFLETIRTRVDAALARLPTHADFLRRYCPAPPLPEPATRLPADAALVTGAR

SEQ ID NO: 87569 - protein, 505 aa, Xanthomonas arboricola
  misc_feature (1)..(505): tr|A0A2S7AGJ9|A0A2S7AGJ9_9XANT Tryptophan halogenase OS =Xanthomonas arboricola OX=56448 GN=XarjCFBP7645_01445 PE=4 SV=1
MSQAPIRRVVIAGGGTAGWIAACALSHQFRELLEITLVESEQIGTVGVGESTVPPIRTFHRFLQIDEQEFLRAVAGTFKLSISFEHWRRQGERYLHPFGITGQSTLVCAFHHLWLESQRRGMPGSFGDYCLETVASRVDRFALLREPAVNYAYHLDAALYARFLRARSEACGVKRIEGRIQQVTLQPDSGDVASLLLEDGQLLEGDLFIDCSGFRGLLIEQALHTGYEDWSHWLPCDRAVAVQTEALGPPVPYTRAIAHEAGWRWHIPLQHRVGNGLVFSSRHLSDDEAHARLLRDVAAPALKDPWLVPFRTGRRRKAWNRNVVSLGLASGFIEPLESTSIHLTIAAVVRLITLFPAEGIAPSQVELFNDISRAEMEHVRDFIILHYHATQRDEPLWRQCRAMELPDSLTLRLRAWRERAHAWQAADELFRVDSWTHVLMGQGIVPEQHHPLARAVSDRDLRRLLDGIAQPIRHAVDQMPAQQAFIDAYCKAGASVWGLRSPVGT

SEQ ID NO: 87570 - protein, 485 aa, Alphaproteobacteria bacterium
  misc_feature (1)..(485): tr|A0A1F3AIP4|A0A1F3AIP4_9PROT Tryptophan halogenase OS =Alphaproteobacteria bacterium RIFCSPHIGHO2_12_FULL_63_ 12 OX=1797224 GN=A3E78_15075 PE=4 SV=1
MTASALAKSFGPRLRIELLESDEIGTIGVGEATIPTIHWFNQLVGLDEAEFLRATMASYKLGIEFVDWTRPGGRYIHPFGYYGITLPGVSFFPRWLKARREGRAAELARYSMAGELARAGRVAFPVDDQKSILSTLGYAYHFDAGLYGRHLRTIAEANGAVRHEGKLAQVERDPESGFVTALTTERGERFDGDLFIDCSGFRALLIEGALGAGFEDWSHWLPCDRAVAVPCEKVDGITPFTRSTARAAGWQWRIPLQHRTGNGYVYSSNYISDVDAARVLLENLDGVALADPRIIRFKAGRRRKCWDRNVVAIGLSTGFLEPLESTSLHLIQSGIAKLLSLFPDRDCDPGLAAQFNRLFAADMDNIKDFIILHYHAAPEKKDPLWEYCRHMPIPENLSQRIEDFRRSGRLMLGTDDLFKETSWVAVLHGQGIEAGSYHPLTDTLDSDLNAAQLAQIEQVIARSVPTLPLHEDALKAMLAGGAARR

SEQ ID NO: 87571 - protein, 500 aa, Sphingopyxis sp.
  misc_feature (1)..(500): tr|A0A0Q7Z5N3|A0A0Q7Z5N3_9SPHN Tryptophan halogenase OS =Sphingopyxis sp. Root1497 OX=1736474 GN=ASD67_01385 PE =4 SV=1
MEATRIQSIVIVGGGTAGWMTAAALARILGPDYASITLVESDEIGTVGVGEATIPQINIFNRMLGIDEDDFVRRTKGSFKLGIEFVDWGGIGQRYFHPFGNIGVDMGGVSFHAFWQRLRGEAEFADVEDYSVMAKAARHGKFMRPTTAPGSLLSSIAYAFHFDAGLYALYLRELAEGSGVTRIEGKITGVTRNGETGHIENVTMHDGRTVGGQLFIDCSGFAGLLIGRELGVPYIDWSAYLPCNRAVAVPCELGEDFSPYTRSTARSAGWQWRIPLQHRVGNGHVYCSDYIGDDEAAAVLLANLGGKPLADPRFLKFTTGHRARFWEKNCVSIGLSAGFMEPLESTSIWMIQTGIARLLSNFPDTGFEAASIDRYNRLMVEESELVRDFLVLHYHVTTRDDSDFWNYCRTMPIPDRLAEKIRVFQSSGRAFREHEELFNDTSWFAVMEGQRLGARRYDPVAELMPIEQTRDRLRQIKAAVTASVDHMPRHRDYIRDHCAA

SEQ ID NO: 87572 - protein, 520 aa, Xanthomonas arboricola
  misc_feature (1)..(520): tr|A0A2S6Y7M0|A0A2S6Y7M0_9XANT Tryptophan halogenase OS =Xanthomonas arboricola OX=56448 GN=XarjCFBP7653_15850 PE=4 SV=1
MTDTTPADPQQRPVRRVVIAGGGTAGWMAAAALSKVLGRHLQITLVESDEIGTVGVGEATIPSLVTFHRLLEIDEAAFMAATQATIKLGIGFEHWRDVDRHYIHSFGHTGTDHWSAGFQHFWLKGRQRGVARDFGDYCLELRAAQEGRFAHLPNGGMNYAYHLDAGLYARFLRRFSEGFGVQRIEGRIGSVETDAHSGYLTALTLDNGMRVEGDLFLDCTGFAGLLIGRTLGVGTDDWSHWLFADSALAVQTESVGAPVAYTRSRADQAGWMWRIPLQHRVGNGIVYSSRYMDQDSAAQVLQRNLSGRALSQPRALRFTPNQRHRVWEKNCVALGLASGFLEPLESTNIHLIQRGIIRLMQTFPQVINAIDIAEYNRQAAAEITHIRDFVILHYHATDRRDTPFWRDCAAMDIPDTLRHRVELFRQSGRVFHQANELFAENSWVQVMLGQGITPKQHHPVADLMGDAELRHFLETIRTRVDAALVRLPAHADFLRRYCPAPLPEPATRLPTDAALVTGTR

SEQ ID NO: 87573 - protein, 510 aa, Alphaproteobacteria bacterium
  misc_feature (1)..(510): tr|A0A2N3DID6|A0A2N3DID6_9PROT Tryptophan halogenase OS =Alphaproteobacteria bacterium HGW-Alphaproteobacteria- 14 OX=2013660 GN=CVT75_00425 PE=4 SV=1
MAERGVEKLVIVGGGTAGWITAAAFARLLGQRLTIELVESEAIGTIGVGEATIPQIIRLNTILGLDEHEFLRRASGTYKLGIEFVDWGRIGSRYLHTFGDTGMNLGNVAFHHYWRRSVMGEAAPDARGLWHYSLHQLAADQARFGKLDRVGSTAMAGLAYAYHFDASRYALHLREYAEARGVTRTEGMVESVERDGTSGDITAITLAGGKRVTGDFFVDCSGFRALLLGDALGVGYQDWSHWLPCDRALAVPSERLPTLVPFTRATAKDAGWQWRIPLQHRTGNGHVYSSGFTTDDAAADTLLAGLDTKPLGDPRPIRFTTGRREALWAHNCVGVGLSSGFLEPLESTSIHLIQSHVSRLIQLFPRAKNAAAERAEYNRRCMAEFDQIRDFLILHYHRTDRDDTEFWRYCRNMAVPDSVTHKLELFSASGRVGRDADDLFREASWVQVMLGQGIMPADYDPMADQIAPSQLAEFLANLRTLIERSVAGLPNHAEYVQRHCPADTGSITAR

SEQ ID NO: 87574 - protein, 505 aa, Xanthomonas arboricola
  misc_feature (1)..(505): tr|A0A0E3UE61|A0A0E3UE61_9XANT Tryptophan halogenase OS =Xanthomonas arboricola OX=56448 GN=XB05_09710 PE=4 SV= 1
MSQAPIRKIVIAGGGTAGWIAACALSHQFRELLEITLVESEQIGTVGVGESTVPPIRSFHRFLQIDEQEFLRAVAGTFKLSISFEHWRRQGERYIHPFGITGQSTLVCAFHHLWLESQRRGMPGSFGDYCLETVASRVDRFALLREPVVNYAYHLDAALYARFLRTRSEACGVRRIEGRIQQVTLQPDSGDVASLLLEDGQVIEGDLFIDCSGFRGLLIEQALHTGYEDWSHWLPCDRAVAVQTEGLGPPVPYTRAIAHEAGWRWHIPLQHRVGNGLVFSSKHLSDDEAHAKLLRDVAAPALKDPWLVPFRTGRRLKAWNKNVVSLGLASGFIEPLESTSIHLTIAAVVRLISLFPADGIAPSQVELFNDISRAEMEHVRDFIILHYHATQREEPLWRQCRAMELPESLALRLRAWRERAHAWQAADELFRVDSWTHVLMGQGILPEQHHPLARALSDRDLRRLLDGIAQPIRHAVEQMPSQQAFIDAYCKAGAGVWGLRSPVVT

SEQ ID NO: 87575 - protein, 501 aa, Alphaproteobacteria bacterium
  misc_feature (1)..(501): tr|A0A2N3D337|A0A2N3D337_9PROT Tryptophan halogenase OS =Alphaproteobacteria bacterium HGW-Alphaproteobacteria- 14 OX=2013660 GN=CVT75_11625 PE=4 SV=1
MQIQRIIIVGGGTAGWMAAAALSRIKAGRPVEITLIESEAIGTVGVGEATIPPFVGFNDLLGVNEAEMLAAVGGTFKLGIQFENWNRIGDSYIHPFGAYGYTMGGISFHHVWHRMANAGDKRPIQVFNLETMAAYFGKFARTQDFARDDLPPVNYAYHLDATRYAAFLRRFAEARGVVRQEGRIADVALDGETGFVTTVTLDNGQQFAGDLFIDCSGFRGLLIEQALQTGYDDWSHYLPCNRAVALPCLREDGSPPPPFTRATAHRAGWQWQVPLQHRNGNGHVYCSSFMEDSEALDILVGNIAGKPQAEPNFLRFVTGRRKKFWNKNVVALGLAAGFMEPLESTSIHLVNTGIDKLISLLSLDGITQAQEDAFNRLTGREYARIRDFLILHYNATSRDDSDFWNYVRTMQVPETLTEKIEIFKANGQIFREEDELFTETSWAAVMMGQGIAMGGHNAMADALDPAKTREEADEMEKSIRYLVQHMPGHGDYVARYCPAAT

SEQ ID NO: 87576 - protein, 498 aa, Sphingopyxis sp.
  misc_feature (1)..(498): tr|A0A0Q7Z0Q4|A0A0Q7Z0Q4_9SPHN Tryptophan halogenase OS =Sphingopyxis sp. Root1497 OX=1736474 GN=ASD67_13905 PE =4 SV=1
MTDTKQRIVIAGGGTAGWMAAAAIARTMGNAVDLTLVESEAIGTIGVGESTIPPLVNYNRLLGINEADFMRATQATFKLGILFDHWKEPGHRYFHSFGLTGKDHWSAGFQHFWLHGRTRGHEQSYDEYCMELVAALEGKFAHLPNEGINYAYQLDSGLYARFLRQMAEADGTKRIEGKIARVELDGTSGDIAALLLDGDRRIEGDLFLDCTGFRALLIEGALHAGFDDWTHWLPCDSAIALQTPNVRPPVPYTRAMAHDAGWQWRIPLQHRTGNGLVYCSRYLDRDAALDRLLGNIEGEALTEPNFLRFTTGVRRRQWYRNCIAVGLSSGFTEPLESTSIHLIQRAVLRFIRMLPLGKVSERDIAEYNDQQMQDNLQIRDFLILHYKATERRDSAFWRQCADMPIPDSLAQKIELFRETGRVFRKNEELFAENSWVQVMMGQGIAPQSHHPIATKLSDEELARFLGGIRDNVRDTVAKLPEHHAYVARYCGAAVPQAA

SEQ ID NO: 87577 - protein, 563 aa, Fimbriimonas ginsengisoli
  misc_feature (1)..(563): tr|A0A068NQG5|A0A068NQG5_9BACT Tryptophan halogenase OS =Fimbriimonas ginsengisoli Gsoil 348 OX=661478 GN=OP10G _2440 PE=4 SV=1
MLETDVAIIGGGPAGTTVATFLKKYNPSLDVTIVEREQFPRDHVGESHLPAISAILDEMGVWDKVEAAGFPIKIGATFKWGAKKDYWETDFLHHEKFREEARPAKFVDQRRKTAFQVDRSIYDKVLLDHAQSLGCRVFEQTKVAQVLHEGDRITGLSVVSQDPDVTEQVGSDGLIKARYYVDASGDIGILRRALGIEIEAPTALRNIAVWKYWQDATWAVTIGNGGTRIQIMSLDWGWMWFIPITPTRTSVGLVLPASYYKTSGKTTEQLYEEAIATEPLISRLLETATPEDGLFATKDWNFLAKRLAGENWFLAGDSCGFADPILSAGMTLAHTGARKVAFTILELDRNEQDPEWLKQEYEDGHRQQIRHHMQFADFWYTSNSQFTDLKEYCQEIAETAGLTLTPESAFQWLATGGFTVDEPGVAAALTYRVSGLKLLAVEMGAAAPEWELTKTNFWRLNLDGATEGKFVRYLEGRVVPIPCLKRGPKVLPIVDVFKHLLKAMKRNMDSILILEDCVNAMIREDGIPPQDAALLTIEGIESLILEGWIKGKAVPSRPFIKVT

SEQ ID NO: 87578 - protein, 521 aa, Xanthomonas arboricola
  misc_feature (1)..(521): tr|A0A0E3UF98|A0A0E3UF98_9XANT Tryptophan halogenase OS =Xanthomonas arboricola OX=56448 GN=XB05_15350 PE=4 SV= 1
MTDTAPSDPQQRPVRRVVIAGGGTAGWMAAAALSKVLGRHLQIVLVESDEIGTVGVGEATIPSLVTFHRLLEIDEAAFMAATQATIKLGIGFEHWRDVDRHYIHSFGHTGTDHWSAGFQHFWLKGRQRGLARDFGDYCLELRAAQEGRFAHLPNGGMNYAYHLDAGLYARFLRRFSEGFGVRRIEGRIGRVETDAHSGYLTALTLDNGTRVEGDLFLDCTGFAGLLIGKTLGVGTDDWSQWLFADSALAVQTESVGAPVAYTRSRADQAGWMWRIPLQHRVGNGIVYSSRYMDQDSAAQVLQRNLSGRALTQPRALRFTPNQRHRVWEKNCVALGLASGFLEPLESTNIHLIQRGIIRLMQTFPQVINDVDIAEYNRQAAAEITHIRDFVILHYHATDRRDTPFWRDCAAMDIPDTLRHRVELFRQSGRVFHQANELFAENSWVQVMLGQGITPKHHHPVADLMGDAELRHFLETIRTRVDAALARLPAHADFLRRYCPAPPLPEPATRLPADAALATGTR

SEQ ID NO: 87579 - protein, 544 aa, Moorea bouillonii
  misc_feature (1)..(544): tr|A0A1U7N9N6|A0A1U7N9N6_9CYAN Uncharacterized protein OS=Moorea bouillonii PNG OX=568701 GN=BJP37_30220 PE=4 SV=1
MNTVSNPNIIKTIIIVGGGTSGWLSAAYLSKFLQDSCQITLIESSDIGTVGVGEATLPTLQITFKLLGLSEFDWMTRCNASFKLGIKFVNWSGSSKPDIFWHPFGQLKSSPNLGIPISQYWLKNYLQGNTAAFDESCFEHINLCAAQKSPKSYDSPEYSGNIEYAYHLDAGKLATYLKERAKSAGVRHIVDNVLDVALDHRGFISHVITENHSNQTADFFIDCSGFRGLLINQALQEPFISYGDSLFCDRAIAISIPYEKGDRYNYNNGGINPYSTATALSSGWAWNVPLVERSGNGYVYSSSFMSQDDAETEFRKHLGDKANDQPAKYIKTRVGRTRNTWAKNCVSIGLSGGFIEPLESTGIYLVELGLEALIRHFPEKSFSPLLINNYNRFMREIYEEIRDFIVMHYCLTQREYTPFWRTNKYHNFIPDSLQEKLNLWKVMWPIYHGNIGHLFPDYSYVCILAGMGYFPVQSLPLLGYGEHSQEDKIILKTKSRSEQLRELLPDHHEYLQQMFLRNFKASWQSLLAHSSKPMPSSSLSTIVR

SEQ ID NO: 87580 - protein, 505 aa, Xanthomonas arboricola
  misc_feature (1)..(505): tr|A0A2S6YKV7|A0A2S6YKV7_9XANT Tryptophan halogenase OS =Xanthomonas arboricola OX=56448 GN=XarjCFBP7653_02285 PE=4 SV=1
MSQAPIRKVVIAGGGTAGWIAACALSHQFRDLLEITLVESEQIGTVGVGESTVPPIRSFHRFLQIDEQEFLRAVAGTFKLSISFEHWRRQGERYIHPFGITGQSTLVCAFHHLWLESQRRGMPGSFGDYCLETVASRLDRFALLREPAVNYAYHLDAALYARFLRTRSEACGVRRIEGRIQQVTLQPDSGDVASLVLEDGQVLEGDLFIDCSGFRGLLIEQALHTGYEDWSHWLPCDRAVAVQTQALGPPVPYTRAIAHEAGWRWQIPLQHRVGNGLVFSSKHLSDDEAHARLLRDVAAPALKDPWLVPFRTGRRRKAWNRNVVSLGLASGFIEPLESTSIHLTIAAVVRLITLFPADGIAPSQVELFNDISRAEMEHVRDFIILHYHATQRDEPLWRQCRAMELPASLALRLRAWRERAHAWQAADELFRVDSWTHVLMGQGIVPAQHHPLARAMSDHDLRRLLDGIAQPIRHAVDQMPPQQAFIDAYCKAGERVWGLRSPVVA

SEQ ID NO: 87581 - protein, 503 aa, Alphaproteobacteria bacterium
  misc_feature (1)..(503): tr|A0A2N3DFI6|A0A2N3DFI6_9PROT Tryptophan halogenase OS =Alphaproteobacteria bacterium HGW-Alphaproteobacteria- 14 OX=2013660 GN=CVT75_03990 PE=4 SV=1
MPARLKTILIVGGGSAGWMTAALLSNLFQGLYRIRLVESEDIGTIGVGEATIPAIKKFNELLGLDEVQFMRLTQGTFKLGIQFNNWDKIGSSYVHGFGVIGQDLGWLRCHQYWLKMKLQGEASDFANFSINTAAALENKFMPARTDAGDSPIGHIAHAYQFDAGLYARFLRTYAEERGVVRQEGKIVDVNLRPDDGYVDSVVLESGETLAADLFIDCSGFRGLIIEQAMKTGFEDWSHWLPCDRAIAVPCERSDNFTPYTKATAHGAGWQWRIPLQHRTGNGHVYASSYMDEAEAERILLENLDGKPLAEPNRFRFTTGKRKQIWNRNCLAVGLAAGFLEPLESTSLFLVQSSLIRLIRLFPDGEFDQANIDEFNRQTDFEYERVRDFIILHYKATARDDTPFWRYCRDMDVPATLARKIDLFRANGRIFREDEELFSEESWIQVMLGQGVIPQGYDPLVDIKSEAQVAQFLGNVENVIRKCVAVMPTHEDFVAKYCDAKAPA

SEQ ID NO: 87582 - protein, 514 aa, Xanthomonas cucurbitae
  misc_feature (1)..(514): tr|A0A2S7DX86|A0A2S7DX86_9XANT Tryptophan halogenase OS =Xanthomonas cucurbitae OX=56453 GN=XcuCFBP2542_01715 P E=4 SV=1
MDPAPASDPRQRPVRRVVIAGGGTAGWMAAAALSKLLGRQLQITLVESDEIGTVGVGEATIPSLVTFHRLLEIDEAAFMAATQATFKLGIAFEHWRDVDRHYIHSFGHTGTDHWSAGFHHFWLKGQQRGVARDFGDYCLELRAAQDGRFAHLPNGGMNYAYHLDAGLYARFLRRFSEGFGVQRIEGRIGQVETDPESGFLTALTLQDGTRVEGDLFIDCTGFAGLLIGKTLGVGSEDWSQWLFADSALAVQTESVGPPVTYTRARADQAGWMWRIPLQHRVGNGIVYSSRYTDQDSARAVLERNLQGRALTEPRALRFTPNQRHRVWEKNCVALGLASGFLEPIESTNIHLIQRGIVRLLQTFPQVIHPVDISEYNRQAADEIAHIRDFVILHYHATDRRDTPFWRDCAAMDIPDTLRHRIALFRESGRVFHRANELFAENSWVQVLLGQGIIPRQHHPVADLMGDAELGQFLQGIRSRVDSALVRLPAHADFLQRYCPAPPPLGAATPASPAR

SEQ ID NO: 87583 - protein, 505 aa, Sphingomonas sp.
  misc_feature (1)..(505): tr|A0A430BEB8|A0A430BEB8_9SPHN Tryptophan halogenase OS =Sphingomonas sp. S-NIH.Pt15_0812 OX=1920129 GN=BRX43_1 4205 PE=4 SV=1
MSEAAIRDIVIVGGGTAGWMAAAGIARLAGALPGATITLIESDAIGTVGVGEATIPQITLFNTLLGIDEAEFVRATRATYKLGIEFVDWTRIGHRYVHPFGLYGIDMAGVEFHHHWLRGAALGDAAPLDAYSLAVVGGLDGRFAHPRPDQPNSPLAKLAYAFQFDAGLYARFLRARAEGWGVVRREGRITQVHRHAESGHVASVELADGATIAGDLFIDCSGFRGLLIEETMGAGFEDWTDWLPCDRAWAVPCEPGGDRQPLTRSTARPAGWQWRIPLQHRIGNGYVYSSAHISDDEAAALLLANLDGRPIADPKPLRFTAGHRRRAWVGNVVALGLAGGFLEPLESTSIHLVQSGIARLMALFPDRGFDPLLAERFNAETEREYRDIRDFLVLHYKATERDDSPFWDYCRTLPPPPGLAEKLAMFATNGRIHRENNELFTETSWLSVMIGQGVMPRRHHPIADTLPPAELLHRLGHIRSVVTDTARAMPRQDDYLRQIGCDLGT

SEQ ID NO: 87584 - protein, 498 aa, Alteromonadaceae bacterium
  misc_feature (1)..(498): tr|A0A495DIC6|A0A495DIC6_9ALTE Tryptophan halogenase OS =Alteromonadaceae bacterium 2052S.S.stab0a.01 OX=130490 0 GN=K256_4356 PE=4 SV=1
MHKPVKRVLIVGGGSAGWITAALLVRLLGKTLEITLVESEAIGIIGVGEATIPPILTLNNALNIDEREFIARTNATIKLGIEFDGWHTPGQRYMHAFGHIGKDFPFCGFHHFWLRHQAEGGGSSYWDYSLNYQAAKANRFAHLPAIEQAKLQGLVYAYHFDAALYAGFLREYAEARGVTRVEGTIEATHLNSDNGFINGVHLSDGRRLEADLFIDASGFHGVLIENALNTGYDDWRHWLPCDTALAVPSESVRPLTPYTRSTAREAGWQWRIPVQGRIGNGLVYCSEFIDDDSARESLLDNLDGAPLADARKIPFTTGRRKMQWHKNCVAVGLASGFIEPLESTSIHLVQSSILRLVKYFPHHGIKPAEVKEFNQLAREEMEHLRDFIVLHYVQNQRPEEFWRYCRDIPLPDSLQQKIDLFQSTGKVYTPTEDLFSAIAWQQVMLGQGIQPGDYHPLASALSEQQLAEFLDNLKTIYGQVLEQLPDHEDFLNRYTNKQ

SEQ ID NO: 87585 - protein, 524 aa, Erythrobacter flavus
  misc_feature (1)..(524): tr|A0A222EXW6|A0A222EXW6_9SPHN Tryptophan halogenase OS =Erythrobacter flavus OX=192812 GN=CHH26_02865 PE=4 SV= 1
MTQVQGEGSGADPLRSICIVGGGTAGWSAAALLARVLRGSGCRITLVESSAIPTVGVGEATIPPIFDFLRNIGADEVEFIRRCQATFKLGIQFRDWLHCDHAYWHPFGNLGVTINQRPFHHYYCRNLAQGHGESLADLCPSVALAEDGKFAFPSPDGNWPGGAVAYALHFDAGLVAAFLREHAEAAGVERLDRRIVGATRGEGERIAAVQFDDGESLAADFYIDCSGFRGLLVEETLNAGFEDWKRWLPCDSAIAAPTAAQQQRAPYTVATARSAGWQWRIPLQHRTGNGLVYASDFISDADAHEELLSGLDSEPLADARVLRFTAGLRKRAWVGNCLAIGLSAGFLEPLESTSIHLIHTGLNRLLDLFPDRGFDPALADAYNRDVWREYAHIRDFLLLHYVPNRREGEAFWDHMRSLDLPDTLAEKIELFTRAGRIMSKQRELFSDISWFYVMHGMGLEPAATDPLVDVAPSAEVRKVIDQLSGAMKAFRSAAPTHDAILERLLDPSETRRPHFGTGGGWATR

SEQ ID NO: 87586 - protein, 495 aa, Trabulsiella guamensis
  misc_feature (1)..(495): tr|A0A085A7N8|A0A085A7N8_9ENTR Tryptophan halogenase OS =Trabulsiella guamensis ATCC 49490 OX=1005994 GN=GTGU_0 2754 PE=4 SV=1
MLSLKGIKRVVVLGGGTAGWYTALSLRKLFSANVEIRVVESTEIGIVGVGEGGLLNFQAALHSVDIDFNEFVRETNATFKWGFCYEGWRTGERDDKYYHPFASASGSASKWEEMGHYPLFSAMINKGIPLTSYLKGFDLIVNNASQEEARNALNNQAVDIINSFHFDSYKIAKYLKKVALSRNIIHQDVIVDHVETNEKGHVTALITQEQEKIELDFLVDATGLARKVIGKAVPSEWFSFKEHLLLDRALPFYMPHPLKNPYLVSRAIAMKSGWMWQIPLIDRVGAGYVYSSKHISDDDALQEIKDYLGYEVTPQQNVIKFEPGCYRQVWVGNVLTVGLASGFVEPLEATSIGQMIEVVRNFTRVLVTSQGVVSDNAIREFNESNFASWMEILDFLRMHYDCPRRDTAFWQDVAKTPLTENYRAFKECMQVRAPRLLDIESYMLYGRRGMFHVVNWMFVAAGLGLIPPGAVVNDLMAIAPEKKQAVVDFLNSLNQ

SEQ ID NO: 87587 - protein, 492 aa, Streptomyces badius
  misc_feature (1)..(492): tr|A0A328JB49|A0A328JB49_STRBA Tryptophan halogenase OS =Streptomyces badius OX=1941 GN=A3838_33345 PE=4 SV=1
MSAQYDVIVVGGGPAGSTVSTLVRKRGHRVLQLEKETFPRYQIGESLLPSTVHGIAHLLGVSDELKKAAFTIKHGGTFKWGANPEPWTFDFAVSRRMPGATGYAYQVERMKFDQILLDNARRHGVEVRENSDVLDVLKAEDGRVRGVRYRDSEGREHEVGSRFVVDASGNTGGLYKKSGAKREYSPFFRNLALFGYFNGGKRLPKPNSGNIFTCTFEHGWFWYIPLSPELTSVGAVVNRDSASLVQGDPEKAMESFIAACPLIAEKLSEATRVTEGPYGELRVRKDWSYSNTKFWAPGMALVGDAACFVDPVFSSGVHLATYSGLLAARSLNSCLDGTVDETSAFEEFEARYRLEYSRFYEFLVGFYDMHHSEDSYFWQARKISNTADSDLQSFVELIGGVSSDEFADAARARQRFSEASDEMAGMTHTAAGDADGPHGAVPGKVVGRLMEQSAALQARALLGDEAGAERPVRQGGLAASTDGLGWVPGARS

SEQ ID NO: 87588 - protein, 514 aa, Sphingomonas sp.
  misc_feature (1)..(514): tr|A0A430BA80|A0A430BA80_9SPHN Tryptophan halogenase OS =Sphingomonas sp. S-NIH.Pt15_0812 OX=1920129 GN=BRX43_1 9075 PE=4 SV=1
MIRNIDAASAPIGSILIVGGGTAGWMTAAALARSLGPRRSSIILIESEELGTVGVGEATIPPILEMNRLLGIDEDAFMRATGATFKLGIAFENWRAAGHAYFHPFGRIGAAIGPLPFHLYWQALASADPAAAAGLTDYSLPAVAARAGTFCRPSDDSRNTLSTISYAFHFDAARYAHLLRTQAEADGVVRHEGRIVAIAREASDHPAGPMLQSVTLADGRVLEADLFIDCSGFAGLLIGDARENPYQDWRNWLPCDSALAMPIARATDPLPYTRSIAGAAGWQWRIPLQHRTGAGHVFASDFINREAAERALRASVEGAPLAEPKLLRFMPGRRTQAWRGNVVAIGLAAGFLEPLESTSIHLVQSAITRLLALFPDRAFAPADIAYFNRATAAEFDRIRDFLILHYHATERQDSPFWNHVRTMAIPDTLAERIDLFRSRGRFFPEAFDLFLEPSWVAVLNGQGIRPTCPDPLALDAMDTLADVLPRMRAAIARAAGTMPRHGHFIAHHCAAPVA

SEQ ID NO: 87589 - protein, 506 aa, Xanthomonas codiaei
  misc_feature (1)..(506): tr|A0A2S7CKY3|A0A2S7CKY3_9XANT Tryptophan halogenase OS =Xanthomonas codiaei OX=56463 GN=XcodCFBP4690_14390 PE= 4 SV=1
MTQAQIRKVVIAGGGTAGWIAAAALSHQFRDLLDITLVESEQIGTVGVGESTVPPIRTFHRFLQIDEQEFLREVAGTFKLSISFEHWLRQGDRYIHPFGITGQSTLVCAFHHLWLESRRRGMGGSFGDYCLETVASRVDRFALPREPAVNYAYHLDAALYARFLRARSEACGVTRIEGRIQQVTVHPDSGDVASLVLEDGQVIAGDLFIDCSGFRGLLIEQTLHTGYEDWSHWLPCDRAVAVQTEALGPPVPYTRAIAHEAGWRWHIPLQHRVGNGLVFSSRHLSDDEAHAKLLRDVAAPAVKDPWMVPFRTGRRLKAWNKNVVSLGLASGFIEPLESTSIHLTISAVVRLLTLFPAQGIAPSQVQLFNDVSRAEMEHVRDFVTLHYHATQREEPLWRQCREMELPESLAVRLRAWRERAHAWQAADELFRVDSWTHVLMGQGLMPEQHHPLTRAFSDQDLQRLLDGIAQPIQQAVEQFPSQQAFIERYCKARPEVWGARTPVMAR

SEQ ID NO: 87590 - protein, 488 aa, Erythrobacter flavus
  misc_feature (1)..(488): tr|A0A3T1CI87|A0A3T1CI87_9SPHN Tryptophan halogenase OS =Erythrobacter flavus OX=192812 GN=prnA PE=4 SV=1
MTAAALSRFCGRDWGITLVESDAIGTVGVGEATIPMIRNFNAALGIDEAEFIAATNGTYKLGIEFVGWGAPDSRYLHAFGLVGRGLGLLPFQHYWLRARAEGFGGPIGDYVLNAIACREERFAHVERQPGSALPPLPFAYHFDAGLYAAFLRRYAEARGVLREEGRVDNVETRAEGGDITSVRIDGGRVIEGDLFIDCSGFRGLLIEDTIQTGWADWSHWLPCDRAIAVPCEPSEPWLPYTRSTAREAGWQWRIPLQNRIGNGHVFSSAHMSEDAAQEALLANLDGKPTAEPRLLRFTTGMRKQAWNRNVVAIGLSSGFLEPLESTSIHLIQTGINRLLDYLPVSGFGPRDRDNFNRRTAYEMERIRDFVILHYHANGREGQPFWDMLRTMAVPDTLAEKIEMFRAGGKIVRDQDELFDVPGWVQVMLGQGIEPRGWHPLADELPRDQLEQFLATVKSAYERDVARMPSHQDYVRRLADQARRKLETA

SEQ ID NO: 87591 - protein, 561 aa, Ruegeria sp.
  misc_feature (1)..(561): tr|A0A0C1GVY5|A0A0C1GVY5_9RHOB Tryptophan halogenase OS =Ruegeria sp. ANG-S4 OX=1577904 GN=RA28_03300 PE=4 SV=1
MNNRLRKITIVGGGTAGWMTALILDMVFSRTSATKDRPQICLIESPNISTVGVGEATVPRMPVTLRQAGISERNFFRETNASFKLGVKFCNWNKDAKGNRIDYVNPFAHGQMLEGLEAAEYFLRFGNGDRDFTQSISPHDDLARLCKGARQLGQPEFEQRFGYAYHLDAVKFAGMLTKVCTKRGVEHIQDEVQSVELDEQGNVSHLMLERKGRHDIEMVIDCTGFRGLIINQALGEPFMDYSDYLPNDRAMALQIEHPNPDKIESVTRSTALGAGWTWRVPLYNRVGTGYVFSSAHRTDDQAADEYLEWLGDSGKGLTPRVIPMRIGRVRNAWVKNCVAIGLSGGFIEPLESTAIHMIDHAIRWFAEHLPTRDIEPSLRARYNRQMNKLYDEVLDFICLHYRLGNRTDDQYWIDARTEMKIPDRLAENLELWQNRLPMEHDIEFATLFNFRVYQTVLLGKQVYDTGYGAGIRDRLRPLKKPIWFQWWKGAKMDLAQILKTMPDHKTLLRDIRGELEKPAFGMAAAMQPTVAMPGAAAAPVAIQNMPNFAEIQSGTKDLQLF

SEQ ID NO: 87592 - protein, 506 aa, Sphingomonas sp.
  misc_feature (1)..(506): tr|A0A430BKC4|A0A430BKC4_9SPHN Tryptophan halogenase OS =Sphingomonas sp. S-NIH.Pt15_0812 OX=1920129 GN=BRX43_0 5605 PE=4 SV=1
MTAAAIRSVVIVGGGSAGWMAAAALSRFLPPGTAIRLIESDAIGTVGVGEATIPQLRLFNQSLGIDEDAFVRATGGSFKLGIRFDGWSGPDSRYIHAFGTIGRGAGLLPFHHYWLAHRQAGGTTDLWDCSASARAAAADRFAPDPGRPDLPSGLAWAYHFDAGLYAAYLHHYAEARGVERIEGRIVGVERDGHTGHVAAVRLEGERRVAGDLFIDCSGFRGLLIEETLASGFDDWSAHLPCDRALAVPTGRTRPLHPFTCATARAAGWQWRIPLQHRTGNGLVYASSHLSDDAAAELLVGHLDGPPLADPRPLRFTTGRRRRPWIGNCVSLGLAAGFMEPLESTSIHLVQSGIARLLEFWPDRRLAPAGIAAFNRRSEAEWLAIRDALILHYHANARDEPFWCERRAAPIPDSLAERIDLFRESGRILRQGDELFAEVGWLQILIGQGIVPLDHAPLVAALPPAEREALVAIAARHAEAVAARLPDHAEFVARHCAAPPPTESRTA

SEQ ID NO: 87593 - protein, 505 aa, Xanthomonas sp.
  misc_feature (1)..(505): tr|A0A0J6IQD9|A0A0J6IQD9_9XANT Tryptophan halogenase OS =Xanthomonas sp. NCPPB 1128 OX=1775876 GN=ACP93_18185 P E=4 SV=1
MIAAPLRNLVIVGGGTAGWMAAAALARVLGPDYRITLIESEQIGIVGVGEATVPHIKAFNNLLGINEAEFVRHTQGSFKLGIEFADWQRPGTSYVHGFGSEIGHPLGLLPFQQYWFKQALAGKARPLGAYTLNTVAAKRDRFMTSATDVPPNSPLANIAYAYHFDAALYAGFLRGYAEQRGVSRREGIVEEVLLHPESGDVLSVRLASGEAIAGDLFIDCSGFRGLLIEQALHTGYHDFSHWLPCDRALAVPCAKVGLPTPYTRATARAAGWQWRIPLQHRTGNGYVYCSAHISDDEAAATLLANLDGPALADPRPLRFVTGRRKQVWNRNVVALGLASGFMEPLESTSIHLVQSGISKLLELFPREGISPVLVRRYNERIAFEFDRIRDFLLLHYHATERDDSAFWRHCRSMPITPELQETLDLFRDSGRFYRNGDEMFAEISWVQVMVGQGILPRAYHPLVDQVPQADLERFMASVEQTIGHCADAMPPHQAFIDRYCAARPA

SEQ ID NO: 87594 - protein, 509 aa, Sphingomonas sp.
  misc_feature (1)..(509): tr|A0A432VNN9|A0A432VNN9_9SPHN Tryptophan 7-halogenase OS=Sphingomonas sp. TF3 OX=2495580 GN=EJC47_01025 PE=4 SV=1
MANPAEPNGSRPIRIVIAGGGTAGWMTAATFARFLEVGFEIDLIESEEIGTVGVGEATIPQIRLFNDALGLDEDAFLRATQGTYKLGIEFVDWGAPGQRYMHAFGDIGRDVGLLPFHHYWLRARKLGLAGDLAAYSLNNQAALAERMQRGPARTARVLPDMPYAFHFDAGLYARHLRRYSETRGINRIEGKIVRVTQNDIGDVSGLVLEDGSVVSADLYIDCTGFRGLLIEQTLHTGYDDWTHWLPADRALAVPSARSAAFTPYTRSTAKTAGWQWRIPLQHRTGNGIVYASAHLSDDEATATLLAGLDGEALADPRPIQFRTGKRRKLWNRNVVAIGLAGGFLEPLESTSIHLIQSAIARLMKLLPGHTIAEADRGEFNRQSDFEYERIRDFIILHYAANARSEPFWRMCRDMELPETLSAKIDLWRGNGHITREHEELFTEVGWFQVFVGQGVIPTGHHPLADAIPATDLAEFMDTIAKLNAREVAQMPSHADFIARHCAAPQPVTA

SEQ ID NO: 87595 - protein, 513 aa, Devosia sp.
  misc_feature (1)..(513): tr|A0A0Q7E5B0|A0A0Q7E5B0_9RHIZ Uncharacterized protein OS=Devosia sp. Root413D1 OX=1736531 GN=ASC89_10925 PE=4 SV=1
MAGQPHFVIVGGGTAGWIAAFIIQDSIKRLKLDAKLSVVESSKIPTVGVGEATTAAFHVFLTHFGIDIFEFFRKTEATYKLGIRHEDWRRKGFTYYGPIDDPHAVVRPPPGAPSDYLNVYAVSVNEPVQDMRLFGPLLKQKKAPWTKKADGSLIPLGPFLPAYHFDQSLVGKFLKEKSQGVEIVDNVLTGVERNGETGDVTALVFEDGQKLEGDFFIDATGFRKRLIVGEMQAPWISYQRELPVNRALPFWLPVEPGEEIANYTRAWAQEAGWMWQIPTQYRYGCGYVYSDEFRTPDEAHAEVERVLGRKIEVRGDIQFKIGRLEKAWINNVVAVGLSSSFLEPLESTSIHGTIVQMMMFAGQYLRDPAQMGQPLRDDYNRRVGRQVDDFRTFVNTHYMTERDDTPFWREVREHRIHPETKQRLERWKTEMPRREHFADYLFGLPHVETQLHYPVLDGLGLLDPAVAKAEMARDPKLRKFARETHAGLVKEYKQAASKALGHTEFLELVRGMG

SEQ ID NO: 87596 - protein, 510 aa, Massilia plicata
  misc_feature (1)..(510): tr|A0A4P7BHH5|A0A4P7BHH5_9BURK Tryptophan 7-halogenase OS=Massilia plicata OX=321984 GN=E1742_16270 PE=4 SV=1
MVQAIRRIVIVGGGSAGWLTAGMIAADHQAASPHGLQVTLIESPDVAPIGVGEGTWPSMRDTLRRIGVPETAFFRECDAAFKQGSLFRGWREPAGDDYYFHPFVLPQGYGEADLVGPWQAAYAQVPFADLVSFQPHLCAKGRAPKQPGTPEYAAVANYGYHLDAGKFGVFLRKHCLERLGVRYVPDHVTGIASHDNGDIAALHTREHGALAGDLFIDCTGMQSLLLGRHFDIPVISQRHVLFNDSALAVQVPYQSDDSPIASQTTSTAQRTGWIWDIGLPTRRGIGHVYSSAHTSDAQAEADLRAYVGSEGMPTPRKLTFEPGYRREFWHRNCVAIGLSAGFIEPLEASALALVEMSAALVSDDLPATRADMDVVARRFNDAFTYRWERVVEFLKLHYVLSRRDGAYWEDNRSENTIPERLRELLALWRHRPPSRLDFHRIEEVFPSASWQYVLYGMGFVPAPGGTRRADPEAAAHYYREAADLTRRMLGALPSNRELLEHIRRHGLQKI

SEQ ID NO: 87597 - protein, 503 aa, Cellvibrionales bacterium
  misc_feature (1)..(503): tr|A0A3D5SDC2|A0A3D5SDC2_9GAMM Tryptophan halogenase OS =Cellvibrionales bacterium OX=2026722 GN=DHT34_05150 PE =4 SV=1
MHNRKINRVIIVGGGTAGWMTAAGLAAVLPVDDYDITLVESEQIGTVGVGEATIPPIRLFNHNIGVSEEEFMRKTGATFKLGIEFHNWQTKNQHYFHPFGQYGRAIDGVPFHHYWMKANAENKCGELGDFSLCEVMAKSKKFVPDNTDPKSVLSTIGHAYHLDAGLYAKFLREFAEGKGVTRIEGKIVDVNLKPDNGYIASVQLDSSEVMEGDLFIDCSGFRGLLIEEALETGYEDWSHYLPCDRAIAVPSKNVSATKPYTMSIAHAAGWQWRIPLQHRTGNGHIFCSQYMSEDEATKILLENLEGEALAEPRTLPFKTGRRKKFWNKNCVAIGLSAGFMEPLESTSIHLIQEAIGGLIRMFPGEEFNEAEIDQFNAATARDYDLIRDFLIMHYHINERSEDFWKMCQKMDIPASLHHKISIFKNRGRLFIEEENLFKLDSWLAVLYGQGVRPAAYDPVADRRGLDEITGSLHNIRNSFVKATNAMPTHDAFINKHCKAKFSS

SEQ ID NO: 87598 - protein, 495 aa, Streptomyces sp.
  misc_feature (1)..(495): tr|A0A1V9KHX6|A0A1V9KHX6_9ACTN Tryptophan halogenase OS =Streptomyces sp. M41(2017) OX=1955065 GN=B0675_19765 P E=4 SV=1
MQVEDHEFDVVVVGGGPGGSTVSTLVAMQGHRVLLLEKEEFPRYQIGESLLPSTVHGICRLLGVSEELEKAAFMPKRGGTFRWGSSPEPWTFSFSVSATFSGPTSLAYQVERMKFDQILLDNARAKGVEVREKSSVVDVIEEDGRVCGVVYSDADGIRHEIRSRFVVDASGNKSRIQSRIGGKRHYSDFFQNIALFGYFEGGKRLPAPNSGNILCAAFNSGWFWYIPLTDELTSVGAVLRRDALERVQGDREKALMGLIDECPLIAEYLSEARRVESGPYGEIRVRKDYSYCQDTFWRPGMVLVGDAACFIDPVFSSGVHLATYSGLLAARSINSSLSGDFEETKCFEEYELRYRNEYSLFHDFLVAFYDMHQDEDSYFWTAKKVMNSSAPGLESFVELVGGGASHESGLVNATSYTEQRESTFREFSELADRPAGESGTDRDLFDSTLVQSVLEEGAKIQVHAALGDVDDDEGPLRDGGLVPSADGMRWAEFGY

SEQ ID NO: 87599 - protein, 521 aa, Xanthomonas sp.
  misc_feature (1)..(521): tr|A0A0Q5GSW6|A0A0Q5GSW6_9XANT Tryptophan halogenase OS =Xanthomonas sp. Leaf131 OX=1736270 GN=ASF73_17690 PE=4 SV=1
MSDTLASDPRQRPVRRVVIAGGGTAGWMAAAALSKVLGRHLQITLVESDEIGTVGVGEATIPSLVTFHRLLEIDEAAFMAATQATIKLGIGFEHWRDVDQHYIHSFGHTGTDHWSAGFQHFWLKGRQRGVARDFGDYCLELRAAQEGRFAHLPNGGMNYAYHLDAGLYARFLRRFSEGFGVQRIEGRIGNVETDAHSGYLTALTLENGTRVEGDLFLDCTGFAGLLIGKTLGVGADDWSHWLFADSALAVQTESVGAPVPYTRSRADQAGWMWRIPLQHRVGNGIVYSSRYMDQDNAALVLQRNLTGRALTQPRALRFTPNQRHRVWEKNCVALGLASGFLEPLESTNIHLIQRGIIRLMQTFPQVINDVDIAEYNRQAAEEITHIRDFVILHYHATDRRDKPFWRDCAAMQIPDTLRHRVELFRQSGRVFHQANELFAENSWVQVLLGQGITPKQHHPVADLMGDAELSHFLENIRTRVDAALGRLPAHADFLRRYCPAPPLPEPAAHLPADAALATGAG

SEQ ID NO: 87600 - protein, 489 aa, Sphingomonas sp.
  misc_feature (1)..(489): tr|A0A0S9CI40|A0A0S9CI40_9SPHN Tryptophan halogenase OS =Sphingomonas sp. Leaf231 OX=1736301 GN=ASE95_10420 PE= 4 SV=1
MAAAAISRVLGEMPGLAIELVESEAIGTVGVGEATIPQIVLFNKMLGIDEAEFMRETRATYKLGIEFVDWLHPGHRYVHPFGSYGLDMKGIEFHHFWLKGRALGDATPLDAYSLAIVAGVQGRFAHPRPDQPGSPLSKLGYAFQFDAGLYARFLRRLAEANGVRRTEGRIVTAERDAENGHVAAVVLDSGTRIAGDLFIDCSGFRGLLIEGEMQAGFEDWSQWLPCDRAVAVPCANGGDRQPLTRSTARAAGWQWRIPLQHRIGNGYVYASAHLSDDEAAATLLAHLDGAPLGDPRFLRFAAGHRRRAWVGNVVALGLAGGFLEPLESTSIHLVQSAIARLLTYWPTQRFDQREIDRFNAAHVADYLDIRDFLVLHYKATQRRDSAFWDYCRTLAPPPGLAEKLAIFGANGRVFREGEELFTETSWLSVMVGQGAVASGYHPAADLLSDAETLARLAHIRHVVAETAALLPAQDDVLRRIGCDLLEAAA

SEQ ID NO: 87601 - protein, 517 aa, Streptomyces sp.
  misc_feature (1)..(517): tr|A0A2M9LRZ6|A0A2M9LRZ6_9ACTN Tryptophan halogenase OS =Streptomyces sp. CB02613 OX=2020328 GN=CG717_06380 PE= 4 SV=1
MLNRVVIVGGGTAGWMTASYLKAAFKDQIDITLVESGKVGTIGVGEATFSDIRHFFEFLGLKESDWMPACNATYKLAVRFENWRKPGHHFYHPFEQMGSIDGFPLADWWLHNGRTDRFDTDCFVMANICDAERSPRHLDGAMLNQPFDEHADEPRGLTMSEHQGKTQFPYAYHFEAALLAKYLTKYTVDRGATHIVDDVVDVKLDERGWIKSVTTAENGELEGDLFIDCTGFRGMLLNKALEEPFISFQEFLPNDSAVALQVPQDMEARGIRPCTTATAQEAGWIWTIPLYGRIGTGYVYAGDYISPEEAERTLREFVGPAAAEVEANHIKMRIGRSNRSWVNNCVGIGLTSGFVEPLESTGIFFIHHAAEQLVKNFPGADWSPVHRDSYNSSIANVMDGVRDFLALHYAAAARNDTQYWKDTKTRKLPDGLAERIEHWKHQLPDTESVFPHYHGLPPYSYMCILLGMGGIDLKPSPALALADGAAAQREFQSVHDRAAALIEKLPTQYEYFTHMRR

SEQ ID NO: 87602 - protein, 517 aa, Erythrobacter flavus
  misc_feature (1)..(517): tr|A0A222EV29|A0A222EV29_9SPHN Tryptophan halogenase OS =Erythrobacter flavus OX=192812 GN=CHH26_09355 PE=4 SV= 1
MADHTQPNRGRRPRPGRRIVIVGGGTAGWMTAAALSRFCGRDWGITLVESDAIGTVGVGEATIPMIRNFNAALGIDKAEFIAATNGTYKLGIEFVGWGAPDSRYLHAFGLVGRGLGLLPFQHYWLRARAEGLAGPIGDYVLNAIACREERFAHVERQPGSALPPMPFAYHFDAGLYAAFLRRYAEARGVLREEGRIDNVETRAESGDISSVRIDGGRIVEGDLFIDCSGFRALLIEDTLQTGWTDWSHWLPCDRAIAVPCEPSEPWLPYTRSTAREAGWQWRIPLQNRIGNGHVFSSAHMSEEAAQEVLLANLDGKPTAEPRLLRFTTGMRKQAWNRNVVAIGLSSGFLEPLESTSIHLIQTGINRLLDYLPVSGFGPRDRDNFNRRTAYEMERIRDFIILHYHANRREGQPFWDMLRTMAVPDTLAEKIEMFRAGGKVVRDQDELFDVPGWVQVMLGQGVEPQGWHPLADELPRDQLKQFLATVKSAYERDVARMPSHQDYVRRLAAQARRKLETA

SEQ ID NO: 87603 - protein, 162 aa, Nonomuraea fuscirosea
  misc_feature (1)..(162): tr|A0A2T0MQL1|A0A2T0MQL1_9ACTN Tryptophan halogenase OS =Nonomuraea fuscirosea OX=1291556 GN=B0I32_117172 PE=4 SV=1
MRSDVQRDARHIHCGQRHARVESGMTGLLASRPMLEGQVRRRITALPGVQVLPDSVATGLLVERDRVTVVRLAGGEPMPADLVVDASGRGSRTPFWLDELGIVPPAEERVMLDVRYGTREFRRRPGDLDGDLIVVVAPTPDSPRGGVALAMEDDRWIVTLVG

SEQ ID NO: 87604 - protein, 500 aa, Sphingomonas sp.
  misc_feature (1)..(500): tr|A0A3S0SYS2|A0A3S0SYS2_9SPHN Tryptophan 7-halogenase OS=Sphingomonas sp. TF3 OX=2495580 GN=EJC47_02570 PE=4 SV=1
MTAAPPRADTQTIKRVVIAGGGTAGWVAAAALSKHLGPLLDIVLIESDEIGTVGVGEATIPTIRTFHRFLEIDERDFMRATQATFKLGIAFENWARRGDRYIHSFGRVGQSIWMGDFQHMWLRARAEGTGGALGDYCFELTAAEAGKFATGPDAKINYAYHLDASRYAVFLRQFSEARGVTRVEGKIGQVHQHPETGFIEALDLADGRRIEGDLFIDCTGFRGLLIEQTLKAGYEDWSHWLPTNRALAVQTKAVQPALPYTRAIAHEAGWQWQIPLQHRVGNGLVYCSDYLSDDAAHAKLLANIDGETITDPRLIRYVTGRRKRVWDKNCVALGLASGFVEPLESTSIHLIMIGITRLIQSFPFNGIKPALVQHYNALAETELERVRDFIILHYHLTERSDDPFWDRCRTMDIPATLAQRIALFREAALTPQTADDLFQADSWLQVMLGQRLEPASYHHMGHMLSIEHMQRALGDLKGNIASAVARMPTHQAFLDHYCTP

SEQ ID NO: 87605 - protein, 537 aa, Pseudomonas protegens
  misc_feature (1)..(537): tr|A0A423DYX8|A0A423DYX8_9PSED Tryptophan halogenase OS =Pseudomonas protegens OX=380021 GN=BLX41_12625 PE=4 SV =1
MNKPIKNIVIVGGGTAGWMAASYLVRALQQQVNITLIESAAIPRIGVGEATIPSLQKVFFDFLGIPEREWMPQVNGAFKAAIKFVNWRKSPDPSREDYFYHLFGSVPNCDGVPLTHYWLRKREQGFQQPMEYACYPQPGALDGKLAPCLADGTRQMSHAWHFDAHLVADFLKRWAVERGVNRVVDEVVEVQLNDRGYISTLLTKEGRTLEADLFIDCSGMRGLLINQALKEPFIDMSDYLLCDSAVASAVPNDDAREGVEPYTCAIAMNSGWTWKIPMLGRFGSGYVFSSKFTSRDQATADFLNLWGLSDNQQLNQIKFRVGRNKRAWVNNCVSIGLSSCFLEPLESTGIYFIYAALYQLVKHFPDTSFDPRLRDAFNAEIVYMFDDCRDFVQAHYFTTTREDTPFWLANRHELRLSDAIQEKVERYKAGLPLTTTSFDDSTYYETFDYEFKNFWLNGNYYCIFAGLGMLPDRSLPLLQHRPESIEKAEAMFASIRREAERLRTSLPTNYDYLRSLRDGAQLSRNQRGPTLAAQERQ

SEQ ID NO: 87606 - protein, 532 aa, Serratia sp.
  misc_feature (1)..(532): tr|A0A2R3H2A8|A0A2R3H2A8_9GAMM Tryptophan halogenase OS =Serratia sp. MYb239 OX=2033438 GN=CLM71_13470 PE=4 SV= 1
MSKPIKNIVIVGGGTAGWMSASYLVRALQQQANITLIESAAIPRIGVGEATIPSLQKVFFDFLGIPEREWMPQVNGAFKAGIKFVNWRESPDRSHNDYFYHLFGNVPNCDGVPLTHYWLRKREQGFQQSMAYACYPQPGALDGNLAPCLHDGSRQMSHAWHFDAHLVADFLKRWAVDRGVNRVVDEVVEVNLNDHGFISSLSTKEGRKLEADLFIDCSGMRGLLINQALKEPFIDMSDYLLCDSAVATAVPNDDAQAGVEPYTSSIAMNAGWTWKIPMLGRFGSGYVFSSKFTSRDRATADFLKLWGLSDNQPLNQISFRVGRNKRAWVNNCVAIGLASCFLEPLESTGIYFIYAALYQLVKHFPDTAFDPRLADAFNAEIVYMFDDCRDFVQAHYFTSSREDTAFWLANRHELRLSDAIQEKIERYKAGLPLTTTSFDDDTYYDTFDFEFKNFWLNGNYYCIFAGLDMLPDRSLPLLQLRPESIDKAEAMFASIQHEAERLRTSLPTNYDYLRSLQKGYAEQSRPASPEIL

SEQ ID NO: 87607 - protein, 506 aa, Xanthomonas sp.
  misc_feature (1)..(506): tr|A0A0Q5GWV5|A0A0Q5GWV5_9XANT Tryptophan halogenase OS =Xanthomonas sp. Leaf131 OX=1736270 GN=ASF73_16645 PE=4 SV=1
MIPAPLRNIVIVGGGTAGWMAAAAFARVLGPGFNVQLIESEQLGTVGVGEATVPHIKAFNNLLGIDEAEFVRQTQGSFKLGIEFVDWQRPGTSYIHGFGTQIGHPLGLLPFHQYWIKQHLRGKAQPLGAYTLNTVAAVRGKFMTSAGDVPANSPLANIAYAYHFDATQYARFLRGYAEQRGVTRIEGLVEQVQLHADTGHVQLLQLASGQVVSGDLFIDCSGFRGLLIEEALHTGYHDFTHWLPCDRALAVPSENVGPPTPYTRSTARAAGWQWRIPLQHRTGNGYVYSSAHISDDEAAATLLANLDGKPLADPRPLRFTTGRRKQFWNRNVVALGLASGFLEPLESTSIHLIQAGISRLLELFPREGISPVLVQRYNDRLAFEFDRIRDFLVLHYHATERDDSAFWRHCRTMPITPELQTTLDLFRDSGRFYRNAEEMFAEISWVQVMVGQGVLPQGYHPLVDQVPDRDAEGFLASIAQTIGHCVDVMPTHQQFIDRYCKAAAPR

SEQ ID NO: 87608 - protein, 487 aa, Sphingomonas sp.
  misc_feature (1)..(487): tr|A0A430BE79|A0A430BE79_9SPHN Tryptophan 7-halogenase OS=Sphingomonas sp. S-NIH.Pt15_0812 OX=1920129 GN=BRX43 _14195 PE=4 SV=1
MSDRHGPIRRVLVAGGGLVGWSAAAALQRRLPWLEVVILPIAPPADAIADRMRATLPSILGFHEDLGLSDADAVVRTGSNIRLGTLFEGWTTGRAGHLTDYVHAYGRHGRPFEGGSFHLHWARAARHQVPAPFDRFSAAAVMARAGRFAVPADDPEALVGGFEHGLHIDPVRYAAMLRAFALHCGVRERAGDLTGVEIGEDGFVAAALLAEGDRVEANLFVDATGPAARLRSALDDARISWASWLPCDRLILEDAAAMPADPLDRVTAHGCGWRWTGGGSQGLVYASASAGAAEWGGQGVAIDPGTRPRPWLRNCVAIGDAATAVEPLEWTNLHLAHSAIDRIVAMLPGRDCAPVELAEYNRQCAAEAERVRDFLALHYAVSDRPEPFWRAVADVAPPPSLAHSLAQFRARGRLPFYEEETFAKDSWLAVLIGQNVLPERDDPLIALVPPDRATAAMTHHAQALAAAIAALPPAGAAHPILQRSRSR

SEQ ID NO: 87609 - protein, 539 aa, Cellvibrionales bacterium; identical to SEQ ID NO: 83679
  misc_feature (1)..(539): tr|A0A3S5JWX1|A0A3S5JWX1_9GAMM Tryptophan 7-halogenase OS=Cellvibrionales bacterium TMED148 OX=1986840 GN=CBD0 8_003305 PE=4 SV=1

SEQ ID NO: 87610 - protein, 410 aa, Methyloglobulus morosus
  misc_feature (1)..(410): tr|V5C4P7|V5C4P7_9GAMM Tryptophan 2-halogenase CmdE OS= Methyloglobulus morosus KoM1 OX=1116472 GN=cmdE PE=4 SV =1
MSGQKTVIIIGAGPSGSIAGALLQNKGYQAVILEREKFPRFSIGESLLPQCMEFIEQAGMLQAVHDAGFQLKTGADFIVGDRRSEFYFSDKFSPGFDTTYQVQRASFDALLASEAQRQGCVIHWQHQVTAADFSGARPMLTVTDEQGARYPIDADFVLDASGFGRVLPRLLDLDRPSSFPVRQALFTHLEDRIDDEGYDRNQIRIIVHPDMADVWYWLIPFGNGRCSLGVVGESDIFNAIVGDQAHVFHTLVAQEPSLRALLHNAQFDTAINGIKGYSANVSQLFGQGYALLGNAGEFLDPVFSSGVTIAMKSASLAADVLDRQFQGQPVDWRCEFAEPLQKGVDTFRTYVTAWYEGGLQDVIFYNHQQPNIKAMICSILAGYVWDESNPYVKNSQARLKTLVELCRTGV

SEQ ID NO: 87611 - protein, 503 aa, Sphingomonas sp.
  misc_feature (1)..(503): tr|A0A430BG07|A0A430BG07_9SPHN Tryptophan 7-halogenase OS=Sphingomonas sp. S-NIH.Pt15_0812 OX=1920129 GN=BRX43 _11885 PE=4 SV=1
MTDGRSILIVGGGTAGWLTAAYLARHLAMVRPGVAITLLDAPEIGPIGVGEGAFPTIRSTLRYLGIDEGGFLRGTSASFKQGIRFDDWLHAPDAGRRHRYLHPFEPPYRSDEVDLVAHWLAQDAATRAPFAEAVTIQHRVAAAGRGPKQAGEAGYEGPLSYAYHFDAIRLGRLLADRAEALGVRRLDGRLVRAVRGTDGSITHLETEPHGTLSADLYIDCTGQHAALIGEALGEPFVSVRDRLFTNRALVCRLPYERDDTPLPTMTIATAHHAGWTWDIGTAEARGIGTVYSDDHLTADQAMQGLADYTGVAADRLEVRALGFEPGYRRRPWVGNCIAVGLSGGFLEPLESTGILLIEAAVAMIAELFPRRGPVAAPAARFNALMTARYEAIADFLKLHYALSRRTEPFWQDNRAAGSRSERLAGLLDQWRYRPPNRFDFTLDVESFAFFNYQYILYGMDWAGDAEPVPQEGGAQLFRKLRQFGDHAAADLPSHRDLVAAMRG

SEQ ID NO: 87612 - protein, 508 aa, Sphingomonas sp.
  misc_feature (1)..(508): tr|A0A430BA94|A0A430BA94_9SPHN Tryptophan 7-halogenase OS=Sphingomonas sp. S-NIH.Pt15_0812 OX=1920129 GN=BRX43 _18700 PE=4 SV=1
MSEAEETDSGPPWQLRSIVIAGGGTAGWMAASYLAKRLEGRNVRITVIESSAIGTVGVGEATVPGIRDFLRVLDVTEHEVMAATQGTAKLGIEFVDWKHPGTRFFHPFGLYGMRSRGVAFHHYVRKLRQAGHEIDIGDYCLATAMARRNLFMQPTDRPVHDLLYFDWALHFDAALFARFLRAKAMEWGVSHLDATITCVRTDETSGHIRALDTDRGETVAGDFFIDCTGFRALLIGEALGIPYEEWTNLLPCDRAVAVPCVRREALTPYTRSTALSAGWQWRIPLRHRVGNGYVYASRHLSDDEATATLLARLEGEALAEPNAIRFRTGRRSAFWHRNCVALGLAAGFMEPLESTSITLIQTGLEKLLGLLPDRRFDPALEDEYNRTTALEYERIRDFLILHYVANTRRGEPMWDRCRSTALPPMLANKLRLYKARGHLVRYDWESFQDPSWISMYEGFDIQPVTYDLAADHFSEADLAAALDRMRSSIADAVDLAEPHETYLNVLYR

SEQ ID NO: 87613 - protein, 541 aa, Sphingomonas sp.
  misc_feature (1)..(541): tr|A0A430BE46|A0A430BE46_9SPHN Tryptophan halogenase OS =Sphingomonas sp. S-NIH.Pt15_0812 OX=1920129 GN=BRX43_1 4200 PE=4 SV=1
MNEHAIRDVVIVGGGTAGWMAAAAFSRFLNNGHTRITLIESEEIGTIGVGEATIPPLVSFNQMLGINENDFLRETAGTFKLGIEFVDWGRLGDRYFHPFGSHGHDLQGVHFHQLYLRERQRQALPPIATWSMSAVAAAAGKFGRPSPEAQSPIRELLYAFHFDAGLYARFLRRYAEANGVTRIEGKVADVTLRPEDGHVAAVTLADGRQVAGDLFIDCSGFRGLLIEEALETGYEPWGQWLPCDRAVAVPSALTGEPDPFTRATAHKAGWQWRIPLQHRMGNGLVYASQFLDDDAAERELLSRLEGAPLAEPRRLSFTTGRRRECWSRNVVALGLSSGFIEPLESTSIHFIQSGIARLIALFPDKRFDPVERTEFNRQMRELYEDVRDFVILHYKATERTDSPFWDRCRTMEVPDSLRRKMDLFRAKGRVFRDSMELFATTSWVAVAFGQHLWPEHHEPAVDALDEDRVAAALAQMHQGYAQVAQQLPSHGAFLRQTALSPLASGAAPTPVPASAPAPADALPRFSFESDSPFTGTMGSPV

SEQ ID NO: 87614 - protein, 506 aa, Erythrobacter flavus
  misc_feature (1)..(506): tr|A0A222EUZ0|A0A222EUZ0_9SPHN Tryptophan halogenase OS =Erythrobacter flavus OX=192812 GN=CHH26_09195 PE=4 SV= 1
MTERAQAIRNVVIVGGGTAGWMTAAALARLLGGTGLAITLVESAAIGTVGVGEATLPQIRRFNSLLGIDEREMMARTAATIKLGIEFRDWGRVGDSYIHPFGRFGQEIGPASFVDYWARAHARGMVAPIGQYCLPIMAAMQGRFEPPHGNGTRQPYDYAFQFDAGLYAAWLSELAQSAGVVRREGRIVDVARNSESGAISAVRLEDGAAIRGDLFIDCSGFRALLIGETLETSFEDWSNWLPCNRAFAVPCANGGDYGPYTRATARAAGWQWRIPLQHRVGNGLVYCDAFWDDADAAEALMANLEGEPGAEPRQLRFTTGRRSALWRSNCVAIGLAGGFLEPLESTSIDLIQSGILNLVELFPHTAIEETDRREYNRLMDLEFERIRDFLVLHYVANQREEEFWGAMRAMPMPDSLADRIEDFRERAILPDYADGLFQPVSWISVFLGQNVVPRRWDPRANAMDADELSKRLAAIHSKIADDAAAMPLHLDFLERSGARYIDEAGQ

SEQ ID NO: 87615 - protein, 506 aa, Altererythrobacter sp.
  misc_feature (1)..(506): tr|A0A316JX33|A0A316JX33_9SPHN Tryptophan halogenase OS =Altererythrobacter sp. XM-24bin4 OX=2133952 GN=DCO98_0 1985 PE=4 SV=1
MNYGNPIKHIVIVGGGTAGWMAAAVLSRLKKGRTLDITLIESEEIGTVGVGEATIPPFVEFNQLLEIDERELLSEVQGSFKLGIQFQNWGQLGDSYIHPFGAYGYHMGGISFHQIWRRMQQAGDKRPIQAFNLETMAAYFGKFARTEDYAQEDLPPVNYAYHLDAGRYAAFLRKYAEARGVIRQEGRISHTTLADETGFVASLKLESGKAISGDLFVDCSGFRGLLIEQALGTGYEDWTHWLPCNRAVALPCDRDDGSPPPPFTKATAHSAGWQWQVPLQHRNGNGHVYCDAYMSADEAHEILVDNIAGKPTAEPNHLRFVTGRRKKFWNKNVVALGLSAGFMEPLESTSIHLVNTGVNKLVALLTLEGINPAQVEAFNRLTAKEYARIRDFLILHYNATERTDSDFWNYCRTMSVPDTLTEKVELFKTNGQIFREEDELFTETSWAAVMMGQRIVMGGHNPVADTFDLPATKSEMDEMEKSIRFVVQHMPGHEDYLKRYCPAPAI

SEQ ID NO: 87616 - protein, 515 aa, Asticcacaulis taihuensis
  misc_feature (1)..(515): tr|A0A1G4RG52|A0A1G4RG52_9CAUL Tryptophan halogenase OS =Asticcacaulis taihuensis OX=260084 GN=SAMN02927928_188 7 PE=4 SV=1
MQKDPIRIVILGGGTAGWMTAAGFIKGFKPEFASVRLIESDEIGTVGVGEATLPQLKSFNDFLGLNEPEFMRDTNATFKLGIDFRNWGREGDSYIHPFGIHGQAINGVPLFQYWLKARANGHDSDLESYSFPIMACRNLKFDFPSEDDRSVRSTFAYAYQFDAVLYARYLRRWAESKGLQRTEGKVVEVNLRPEDGFIRSLTLASGEVVEGDLFIDCSGFRSLLLGQTLKVPWEDWTPWLPCDRALAVPCDRAGDFTPYTRATAREAGWTWRIPLQHRTGNGYVFSSRFTTEDRAAEVLLAGLDGKAQAEPRLIKFAAGRRKQSWYKNCIAIGLASGFLEPLESTSIYLAQMASDFVMRLFPGKDIDPKLVAEFNRTIDIEYDRVRDFLILHYHANQKPAEEDPTGLWRYVREMTVPDTLIEKMETFKHRGHIHRYRDGLFAPPSWIAVYTGQNILPRNYDRQVDNMSTEAMLEKMREMQERVAVNVEVLPTHADFLRDYCFDPSAKMMQEAGNV

SEQ ID NO: 87617 - protein, 497 aa, Massilia lurida
  misc_feature (1)..(497): tr|A0A562QYN3|A0A562QYN3_9BURK Tryptophan halogenase OS =Massilia lurida OX=1036180 GN=IP91_04486 PE=4 SV=1
MENKNKPVRRVVIAGGGTAGWMVAAGLSKSLGRLLDITLVESDEIGTVGVGEATIPSLQNFHHLLEINEQEFMAETMATFKLGISFENWRDVNEDYIHSFGTSGTDHWTAGFQHFWHKGRERGLATDYGDYCLELKASLQNRFAHLPKGGMNYAYHMDASRYAKYLRKFSERFGARRVEGKIAEVRMDPDGDIRALRLDSGAEIEGDLFIDCTGFRALLIGGALGVEYEDWSHWLFNDSALAVQTTSVREAVPYTRAIARDAGWQWQIPLQHRVGNGLVYSSRYTDDETSQRTLLAAVAGEPLMTPRVIRFQPGQRKETWKRNCVAVGLASGFLEPIESTSIHLIQRSIVRLLQLFPQDGISQADIDEFNTQANTEIAHIRDFIILHYKVTNRRDTPYWRDAAEMTVPASLQHRIDLFRATGRVFRIPNELFAENSWIQVMLGQGIHPASHHQSADLMGDAELAHFLDGIRGSIERTVAQLPSHQRYVEQYCAGTGW

SEQ ID NO: 87618 - protein, 507 aa, Shewanella oneidensis
  misc_feature (1)..(507): tr|Q8EBK1|Q8EBK1_SHEON Flavin-dependent tryptophan halo genase OS=Shewanella oneidensis (strain MR-1) OX=211586 GN=SO_3513 PE=4 SV=1
MTIRKIAIIGGGTSGWLAANHLGRALKGRSGLSISVIESPDIPIIGVGEGTVPSIRKSLQSFGISESEFIRTCDVTFKQSIKFVNWLDKTRHGKHNFYHHLFDIINLHQGDAVSAWLAEQSGHFADFVSTQHLACEVAKAPKLITTPEYAGVLGYAYHLNAAKFAKLLAKNAIEKFNVEHILTTVHDVCLGVDGAIESLQTEQGNLSFDFYIDCSGFESILLAKALKVPFISKAQQLFIDTALVAQIPTQPADVIPPYTKATAHQAGWIWDIALTQRRGTGFVYSSAHMNQAEAERKFDHYLGGKLADIPHRKIPMTVGYRQQFWVKNCVALGLAQGFLEPIEATSILLTDFSARFLAERFPANIDDVDYLAKRFNDTVGYAWERVVEFAKLHYCLSDRTDSAFWLDNQREETISEPLKERLNMWKSFSPIAEDFPSKFEVFNLDNYLYVLYGMKYPTQPHDRGLVAKANLNAYMSNMSNVKRQMLEGLPEHRELIDKICTYGLQPI

SEQ ID NO: 87619 - protein, 502 aa, Novosphingobium sp.
  misc_feature (1)..(502): tr|A0A4R1UIQ4|A0A4R1UIQ4_9SPHN Tryptophan halogenase OS =Novosphingobium sp. PhB165 OX=2485105 GN=EDF56_10743 P E=4 SV=1
MQQDPSSDRVVKRVVVAGGGTAGWVTATALARHLGRLIDVTLIESEEISTVGVGESTVPTFKSFHDLMGIKEDQFMAAAQATFKLGIEFRNWGRVGDRYIHPFGTIGTRVSWMAEFHHFWLHAKSRGFGGELGEYCLEWVAGEANRMSVNAAPNMGYAYHVDATRYARFLRAIAEPAGVKRIEGKIRNVDLHPESGFIDALTLESGERVEGDLFVDCTGFRSLLLGQALGVEFEDWGRWITTNSAVAVQSRSSNPPQPYTGAYAHEAGWRWKIPLQHREGNGIVFCNEFMSDDEARAKLLAEIDGEPTIEPWLLRFKTGMRVKSWFRNCVGLGLAGGFIEPLESTSIHLMMAAVTRLIQDFPFNGCNEALIDHFNEKSRLEFESIRDFIILHYHVTERDDSAFWRRCRTMDIPDSLKERLDLWREDARAFKLEDELFRVDSWTSVLLGQRLAPLGYHRLAEMMPDAELRGHLDRMRSEISKIAAKMPTHPDFIRSYCPAEAF

SEQ ID NO: 87620 - protein, 509 aa, Asticcacaulis taihuensis
  misc_feature (1)..(509): tr|A0A1G4TQJ2|A0A1G4TQJ2_9CAUL Tryptophan halogenase OS =Asticcacaulis taihuensis OX=260084 GN=SAMN02927928_007 3 PE=4 SV=1
MTAHPGTIEKICIVGGGTAGWMTAAALSHKLRGLPVAITLIESDEIGTVGVGEATLPAIRSFNSALQIDEAAFMRATEATFKLGIEFRNWGRIGDRYIHPFGDYGQKIDGLPFYHYWHRLGQGERLDEYCYGIMLAEQGKFRHPSTNEGDIESTFGYAYQFDATRYAAFLRQFSEAEGVRRVQGKVVETSLDSVTGHVSHLKMDDGRDIEADLFVDCSGFRGILIEQALHTGYDNWSQWLPCNRAIAVPCESRGPLTPFTRATALEAGWQWRIPLQHRTGNGHVYCSDFITDDEAATRLLNNLDAPALAAPRQLYFTTGRRRQFWNKNVVAIGLAAGFLEPLESTSIHLIQEGITELLQIFPDKQFLASDIEEYNRRMSLNIERVRDFLLLHYVATQRDDSEMWRYFRNMTLPDSLQEKIDAWLTRGHLVRYEFGVFLPPSWVAVLLGQNLIPRRHDLRADKAMRDKIAEGADALRGRIRSSVERASGQAEYIKQVRAASDTGPLMAKG

SEQ ID NO: 87621 - protein, 503 aa, Asticcacaulis taihuensis
  misc_feature (1)..(503): tr|A0A1G4RTM2|A0A1G4RTM2_9CAUL Tryptophan halogenase OS =Asticcacaulis taihuensis OX=260084 GN=SAMN02927928_213 4 PE=4 SV=1
MADSIRKIVVVGGGTAGWMAASALSKVFGTQKYSLTLIESDEIGTVGVGEATIPTIQEFNKLLELDENEFMKATNASFKLGIRFVDWKRQGSDYFHPFGVYGVDMNVNFTHYWMRYHLAGGNGDFGLFNPQTIAARMNRFGRMSEINPKAPNVNYAFHFDASLYAKFLRRYSEARGVVRQEGKIIGVSQHPESGDIASVTLESGQTIAGDLFIDCSGFRGLLIEQTLKTGYEDWSQWLPCNRAVAVPCDKISGITPYTMSTAREAGWQWRIPLQHRTGNGYVFCESHLSEDKAMDLILQRLDGKPQGQPRVIRFTTGHRKKQWNRNVIAMGLASGFLEPLESTSIYLVQEAIMKLIRFFPRDRITDSLRNSFNAEMFFAYDDVKDFLIAHYKVTEREDTPFWAYCKHMDIPDSLKARLESFAQHNLSLVKPNELFKEASWFAVLAGQGLMPKSYHPVADLMPEDEFRWRMDRVREGTAGLANSMPGHEAYITKACYSPALVKA

SEQ ID NO: 87622 - protein, 511 aa, Novosphingobium sp.
  misc_feature (1)..(511): tr|A0A4R1UK62|A0A4R1UK62_9SPHN Tryptophan halogenase OS =Novosphingobium sp. PhB165 OX=2485105 GN=EDF56_106198 PE=4 SV=1
MANEPIRSILIVGGGTAGWMAANLLATRLRRLPIEITLVESPDIRTVGVGEATVPAIRDYFRAIGVTEAEVMRASQGTVKLGIEFRDWRAPGTSFFHPFGRYGVDAFSVPFHQYWLKRRMAGDETPLSAYCLPTQAAMRNLMLLPPEQPANDLGVFDWAIHFDAGLFARFLSQRAQDDLGVRHVEGTISGAKRDTENGRIASVSLSDGRTLDADLFIDCSGFRSLLLGQTLEVPYEDWTHLLPCDRAVAMPCTHGDELTPYTRSTALPAGWQWRIPLQHRVGNGYVYSSRHISDDEATATLITNLEGEALAEPNMLRFRTGHRTRVWEKNCVALGLAAGFLEPLESTSIVLIQSGIERLLAHFPDRDFDPTLADEFNRITALEYARIRDFLLLHYWGGQRNEPMWRECRALDLPETLAQRIRTFKGSGKLPRFEWDSFQPPSWLSMFAGFDIWPPRHDPLADQFSTEELAGTFGQIREAIGRAVALASPHADFIADTCAAPSSPQPAAVPV

SEQ ID NO: 87623 - protein, 485 aa, Sphingorhabdus sp.
  misc_feature (1)..(485): tr|A0A220W3M6|A0A220W3M6_9SPHN Flavin-dependent tryptop han halogenase RebH OS=Sphingorhabdus sp. SMR4y OX=2584 094 GN=rebH PE=4 SV=1
MSGGEQPLRRIAIFGKSHELWPVAALLELELPPDITLVLVEDTRPVEPAAVTVRLDDPLLLRLGINGEDLQKTSSAVFALGCELRDWKDGSSSFFLTGSGSLPAVDDVAIHQIMLRAAELNDQRDRLAYLYQPFRLPARAAAAGKFAFQSPDPRSPLSMLRPTVQIDRAEYAELFRQRTKSRRTEIVKASPKFAFPSSDGGAIDRIALDNGAAIKADFHIDMSGEASGLVTDFPRPDWHSIAGKLPFDRLLSGTQTGVPSAAERHVVARAIRGGLMISTPLRERSTVQLLCLSGHLSADEWRALVGSEAQEIRLDPGYVDQAWTGNMVRLGSASASLGPFLSADTTILHRQAVILANHLPARLDMTVEAREYNRRHLAAVEHVRDFTLLPFALNRRTDLPWSGIEKQRMPENLRRRIDQFRSRGRLVAFEDEIFDEQSWIDLMMGFGIVPDRFDPMAQTLDMAAMPRRLKNLTRAFDRALAEMPL

SEQ ID NO: 87624 - protein, 511 aa, Sphingorhabdus sp.
  misc_feature (1)..(511): tr|A0A220W3Q6|A0A220W3Q6_9SPHN Flavin-dependent tryptop han halogenase RebH OS=Sphingorhabdus sp. SMR4y OX=2584 094 GN=rebH PE=4 SV=1
MKDRGDRAIREIVIVGGGTAGWMTAAALSHRLGNSGPDIRLIESAEIGTVGVGEATLPQIRDFNRMLGIDEAELMARTSATIKLGIEFCDWGREGDSYIHPFGVHGEPIGPVDFHHYWVRQKGEGKAEEFGRYSLAIEAARLHNFSLPPDVPASLFEAYSYAFQFDASLYAAFLAEYSAARGTERIEGKVVAVGRDGETGFIRSVTLASGEQIAGDLFVDCSGFRGLLIEQELATGFADWSAYLPCNRAFAVPCEIGDPVGPFTRSTARSAGWQWRIPLQHRLGNGHVYCDRYISDQDALDDLMENLEGEPIAEPKQLFFKTGKREKLWNRNCVAIGLSGGFLEPLESTSIDLIQSGILNLIALFPEKQCAASDVEEYNRVMDLEYDRVRDFLMLHYVLNQRDEPFWRDMREMVWPDSLSEKVEAFKRRGLVPQYDHGLFQPASWLSVFIGQNLLPETCDPRVDSMAAGDRASELERIRTAIDASAGRMGKHLAFIETYRARFSGSRSDAR

SEQ ID NO: 87625 - protein, 490 aa, Streptomyces sp.
  misc_feature (1)..(490): tr|A0A429HK44|A0A429HK44_9ACTN Tryptophan halogenase OS =Streptomyces sp. WAC 05379 OX=2203207 GN=DMH26_20445 P E=4 SV=1
MTSDYDLIVVGGGPAGSTAATAVALRGHRVLLLERETFPRYQIGESLLPATVHGLCRILGVADEVAEAGFTLKRGGTLRWGRTPEPWQFSFAMTPRLPEPTATAFQVERSRFDEILLRNAERVGVEVREGSPVRRVLTEGERVHGVEYTDRDGTPRTAHARYVIDASGNTSRLHGKVGGARVYSDFFRNLAVFGYYAGGQRLPEPNSGNIFCAAFDAGWLWYIPLRDDLTSVGAVISPEHYPAVQQDPRAAWQDMIKACPEVARLLTDVPVATEQPYDRVRVRKDYSYWKTSLWTPGMALVGDAACFVDPVLSSGVHLATYGALLAARAVNSALDGSVPEERGFAEFEARYRREYGVFYDFLIAFYDMERNEDSYFWAAKKVTEVDIDEVAAFAELAGGVASGDEAVGATGRLGTYWSAAAAELDAAVDHLTAPDEPRTNPLLTTQVVTDTFRTGNALQEQALYGGPLDAPAAPTPGALTVTEDGLSWVV

SEQ ID NO: 87626 - protein, 488 aa, Streptomyces sp.
  misc_feature (1)..(488): tr|A0A429HP27|A0A429HP27_9ACTN Tryptophan halogenase OS =Streptomyces sp. WAC 05379 OX=2203207 GN=DMH26_13625 P E=4 SV=1
MAVVGGGPAGSTLAALVAKQGHRVVVLEKENFPRYQIGESLLPSTIHGVCRLSGAADDLAKAGFPLKRGGTFRWGARPEPWTFAFSVSPRMAGPTSVAYQVERSKFDDILLKNARKQGADVREGCSVRGVIEEGERVRGLTYADADGNEREIRARYVVDASGNKSRLHNKVGGTREYSDFFRSLALFGYFENGKRMPEPNRFNILCVAFESGWFWYIPLSDTLTSVGAVVRRELAEKIQGDPEKALRALIDECPMIADYLSDATRVTEGQYGEIRVRKDYSYHHTTFTRPGMMLVGDAACFVDPVFSSGVHLATYSSLLAARSLNSVLEGKVDEDAAMKEFESRYRREYGVFYEFLVSFYEMHRDENSYFWQAKKVTANSEPELQSFVELIGGVSSGEQGLMNTDALSERLADNSEEFATAVEKFAANEDGSSVPLFSSSVVRNAMQEAGQVQMRALLGEDAEPETPMFPGGLVSSPDGLYWLPATTA

SEQ ID NO: 87627 - protein, 513 aa, Porphyrobacter mercurialis
  misc_feature (1)..(513): tr|A0A0B2C0Q3|A0A0B2C0Q3_9SPHN Tryptophan halogenase OS =Porphyrobacter mercurialis OX=1572751 GN=PK98_03595 PE =4 SV=1
MNDIKHIVIVGGGTAGWLTAGIIAARHQGRRPHGFTVTLVESPNVPIIGVGEGTWPTLRATLRKIGVSETDFFRHCGAAFKQGARFNRWTTGAADDGYYHPLMLPQGFAQTNLVPHWLAAEAEESFCDAVTPQGRLCDAGLAPKTITTAEYDGPANYAYHLDAGKFASFLQRHCCDTLGVRHVLADVTDVHLDDSGDIDRLDTKQGVTIAGDLFVDCTGFAALLIGKTLGVGFRDCSDVLFCDTALAMQVPYDRPDAPIASHTISTAQDAGWIWDIGLPARRGVGHVFSSSHTSVEAAEQALRDYVGPAARDLTVRHLPIRSGHRELFWKNNCVAVGLAAGFLEPLEASAIVLIELSAKIIAEQLPASRAVMDTVARRYNDTTLYRWGRIIDFLKLHYALTKRTDTQFWRDNQRAETIPDRLRELMSLWAYHPPWLHDEFDRAEEIFPAASYQYVLYGMGHRTALQPGSFEADAEQASRLRRENRSYTDRLLGALPAHRALIDKIIHHGLQPV

SEQ ID NO: 87628 - protein, 497 aa, Sphingopyxis sp.
  misc_feature (1)..(497): tr|A0A1G3JYQ5|A0A1G3JYQ5_9SPHN Tryptophan halogenase OS =Sphingopyxis sp. RIFCSPHIGHO2_01_FULL_65_24 OX=1802171 GN=A2885_16330 PE=4 SV=1
MSARTRPVRRIVIVGGGSAGWMTAAALGRALAGQDRTITLVESETIGTVGVGEATVPPIHEFNRYLRIDPTDFLRATHGTIKLGIAFDGWGGADNSYFHPFGYLGVEMSGIHFHHYWLRHIAAGGDPDHGPYNLETMAARAGRFVPATRHGPVHHAVHFDAAAYARFLRTYAEDKGVVRVEGKVADVTLDPEDGYIEALTLDDGRRIEGDLFIDCSGFRGLLIEGALATGYTDWNHWLPCDSAVAMPTERSGDPPPFTRSTARAAGWQWRIPLQHRDGNGYVYSSAHLGHDAAETALRANLPGAPLADANRLRFTAGHRKAIWNRNCVAIGLSGGFLEPLESTSIHLIQTTIIRLLALLPRDGFDPHVVARFNRDALHEYATIRDFVIAHYATANRADTPFWRDVAAAGVPDSLAERIEAYRATGNILFEPGDLFGPTNWYAVLTGQGVKPQSWHPIADGLSSEELAARLATLRGRVAEQLSELPPHSEFLRRLSAV

SEQ ID NO: 87629 - protein, 496 aa, Asticcacaulis taihuensis
  misc_feature (1)..(496): tr|A0A1G4QU62|A0A1G4QU62_9CAUL Tryptophan halogenase OS =Asticcacaulis taihuensis OX=260084 GN=SAMN02927928_151 8 PE=4 SV=1
MNAQMIKKVVIAGGGTAGWCAAAALSRLLGSVLDITLIESADIGIVGVGESTIPTVRAFHHLIGVDEQAFMRETNATFKLGIDFENWARQGDRYFHSFGTLGKSPWMAHFYNIWLEARSKGLGGSLDDYSLETKAAMAGKFQLHKNLSINYAYHLDAVLYGQYLRKLSEEAGVKRQEGQIVSVQQDAGTGFIASVTLASGEVIEGDLFIDCTGFRGLLIEETLKTGYEDWSHWIRTDRALAVQTESAGAPLPYTKVVAHTAGWRWRIPLQTRVGNGLVYSGAHMSDDEAHALLTKSLDAPMVNTPRVIKYKTGRRRKIWNKNCVAMGLSSGFIEPLESTSIHLFQKSILNLIQNFPFFGITDALVARYNELSDREAEYARDFVILHYKLTERTDSPFWPENAEMTVPDSLQSRIDLFRESGMAYQEPGELFRTDSWAQVMLGQRLEPQGWHRLGALMNPAEMNQVFDGLKATVDNTVANMMPQDAFLKQYCPTAIA

SEQ ID NO: 87630 - protein, 467 aa, Alteromonadaceae bacterium
  misc_feature (1)..(467): tr|A0A495DGY0|A0A495DGY0_9ALTE Tryptophan halogenase OS =Alteromonadaceae bacterium 2052S.S.stab0a.01 OX=130490 0 GN=K256_3898 PE=4 SV=1
MQNLKLVILGNNLDAWITTAYLLREQYRLTAPIELTLCCGYSNHPQVGRIVTAPIDRELFRYLGISEKEILSAGDGHFSLGYAIGKLSEIRTFTWGDTGFDFDGLGFQHLWTWYKQQDSATHPWHAYSFTHHMSEAQKFVHPQEDRQSILSLIDYGLSVDEAALLELVRSRVEADKLRIVDEQPQFNGSDLQNQTANSLQLHSGELLSADLIIDCRCETRRPLFSAGPRMEPGTADVITQLHACNGLWQAQENSDSHQYRWVSPLESPQAASAVLACSKWLEQESLASADISVTEIIQKPWNSHLLVLGTVATGSPLPALSPLYLLHRQLSALVKLLPGDTSSLDVCAREYNRTFSVLRERLTEWRELWSYAAGSIEASGLETSMAHTIALFRSRGKLALNDEPLLSDKDMIKLLIALGIEPEGYDPLLDHKSLQDMARRLSSGSDMLVNSVQQLPDEAVYRAHFLK

SEQ ID NO: 87631 - protein, 503 aa, Asticcacaulis taihuensis
  misc_feature (1)..(503): tr|A0A1G4TG86|A0A1G4TG86_9CAUL Tryptophan halogenase OS =Asticcacaulis taihuensis OX=260084 GN=SAMN02927928_351 3 PE=4 SV=1
MPEPIRKIVVAGGGTAGWMTAAWFARLLHGTPVEIVLVESDEIGIVGVGEATTPYLHVFNQVMGIDEDDFLRFTRGTFKFGIEFVNWGGAGRAYHHPFGAPGRDYGPLPFHSVWLRHALANPSDTLEAYNLQSLAARHGKFMRPSGANSPLADLTYAFHFDASLYARYLRQISEAAGVQRIEGRIEQVRLTADGSIEGLSLNEGRSVDGDIFIDCTGFRSLLLGEALGVGFEDWSHWLPCDRAWAVPTARDGAPLPFTRSTARASGWQWRIPLQHRDGNGLVFASAFMNEAQAVDQLVANLEGPPLADPRLIRFRTGRRKKVWEKNCVAIGLAAGFLEPLESTAIMLIQKAIAYLQYLFPDKGFSDADRDLYNADMGREYEVVRDFLILHYRAGERRDSDFWRYCASMSIPDSLQNRIDLFQSRGRIQEIPGEQFRIQSWLAVMWGQGLRPAAPDPLAMTLDEAALNKWLAEMRDVIARCCDYMPSHSDFIAQHCAANLTVPE

SEQ ID NO: 87632 - protein, 501 aa, Alteromonadaceae bacterium
  misc_feature (1)..(501): tr|A0A495DD07|A0A495DD07_9ALTE Tryptophan halogenase OS =Alteromonadaceae bacterium 2052S.S.stab0a.01 OX=130490 0 GN=K256_2221 PE=4 SV=1
MDNPKVKRVVIAGGGTSGWLAAAALSKKLGEIIEITLIESEAIGTIGVGEATIPPMRTFHKLLGIDEQEFMRATAATFKLGIKFENWGALDDSYIHSFGQTGKETWLAGFHNFWLHGQARDLALPFSEYCLELQAAKAGKFATSPQSSINYAYHLDAGNYATYLRSFCRDLGLNHIEGKIVNVAQNPDNGFITALTLDSGEVIEGDLFIDCTGFRGVLIEQTLHTGYEDWSHWLPCDSAVAVQTQSVAPAAPYTRSIAHESGWQWRIPLQHRVGNGLVYCSKYMTDEDARALLLDNIQGETINEPRVIKYRTGRRRMGWNKNCIALGLSSGFVEPLESTSIHLLMMGVTRLMQLFPFSGIHESVAEEYNEQARVELEKIRDFIVLHYYATARDDSPFWRHCKSMSIPDSLRHRIDLFRETGRVFQSEGELFRVDSWTQVMMGQGIMPKEYHPMATMMSDQELKGLLDNISSGIQDAVARMPTHEQFIEQYCKLERSEALGI

SEQ ID NO: 87633 - protein, 497 aa, Sphingomonas pokkalii
  misc_feature (1)..(497): tr|A0A2U0SC33|A0A2U0SC33_9SPHN Tryptophan halogenase OS =Sphingomonas pokkalii OX=2175090 GN=DD559_05985 PE=4 S V=1
MSDDRRIRSICIAGGGSAGWMTAAALANALGVGTAITLIESSDIGTVGVGEATIPPIRLFNRTLGIDEAEFVRRTRGSFKLGIEFVDWGRIGARYFHPFGPFGRDFDLVPLHQYWLDARDKGDAPALDDLSMAWAAAKRGKFAPPLADPRSVGSTFDYAYHFDAGLYAALLRDYAEARGVVRIDARIAGADRDGENGNLAAVLLADGRSIPADLFVDCSGFRGLLIEEVLGTGFVDWRHWLPCDRAVAVPCEPGAFTPYTRSTARAAGWQWRIPLQHRTGNGHVHCSAFMGEDEARAILLANLDGAPLAEPRTLRFTTGHRRRFWSHNVVAIGLSSGFLEPLESTSLHLIQAGISKLLALFPSRDMDPLLVDEFNRISIAEFERIRDFLILHYKLTERADSPLWRYCATMAVPDTLQWKIDHFRRYGRLVAREFDLFAAPSWLAVHIGQGNWPVGRDALLAARGIDGRAHLAKLADAMARAAETMPSHADYVAQLTR

SEQ ID NO: 87634 - protein, 484 aa, Sphingopyxis sp.
  misc_feature (1)..(484): tr|A0A1G3KHC0|A0A1G3KHC0_9SPHN Tryptophan halogenase OS =Sphingopyxis sp. RIFCSPHIGHO2_01_FULL_65_24 OX=1802171 GN=A2885_15630 PE=4 SV=1
MTAAALAKLLPGQADIQLIESEEIGIVGVGEATLPHLREFIRRLGLDEMEFMRTTRATFKLGIDFVDFGAIGERYIHPFGAYGTDIAGVGFHHYWLRMQAAGQVPPICDFSLPIVAARGKRFAPVPEGGDLLDSSYSYAYQFDATRMAPMLRRFAEAHGTRRTEGKVVAVERDAASGDVARLRTDRGDVIEGDLFIDCSGFRALLIGETLQSPWEDWSEWLPCDRAAALPCAAPDGPIEPYTRATAMPAGWRWRIPLQHRVGNGYVFSSNHVSEDEACAAILGAVEGEPLADPRVLRFRAGRRTKSWDRNVVAIGLASGFLEPLESTSIHLVQQAVTRLVELFPQRRIDACDRDSFNALVDREYDRIRDFLILHYHATRRDDSDFWNHVRTMALPPELERKMALWKDSGRVELYTEGLFLEASWVAVYLGQGVMPRGYDQRADIPPQNRIAQSLADLDGAIRSRVAAWPDHAEYLRQAGAWEAA

SEQ ID NO: 87635 - protein, 467 aa, Flavobacteriaceae bacterium
  misc_feature (1)..(467): tr|A0A349NR28|A0A349NR28_9FLAO Uncharacterized protein OS=Flavobacteriaceae bacterium OX=1871037 GN=DCS66_1167 5 PE=4 SV=1
  misc_feature (450)..(450): Xaa can be any naturally occurring amino acid
MRGERHGKDLNPLNKIENIIIVGGGSAGWMTAATLLSQFPDKKITLVESPNIPTIGVGESTVGGGQSGFSGIISWLNMLEINDDFMPHCDAIYKLSIAFKDFYYKDSGTFHYPFGKPYIHNNKTQNMNDWYLKKIRSPEIPVTDYADSLYPAMALVNQNKSLFTDNFSRDHGRTELEKRYSENEVQLYSQYSYQFDATKFGIWLKDHFCKKKYSKKFKHILAEVKDTPLNADGIEHLLLDTGQKLKADLFIDCTGFKSVLMSKFKIPFIPLYSNKIIPNNHAWATKIPYTNKEKQIVNYTNCTAIGNGWVWEIPLWSRMGAGYVFSDKFISHEDALKEFKKELTKKGYTHLEELEYRLIPMRCGIQSQLWIKNTCAIGLSGGFIEPLHSNGLHSTHEFLFNLVRTLAPGRINQWDRQCFTANCHHDFKKFAALVGLTYTLSHRDDTEYWXRRRSVISLIQSIQKLRS

SEQ ID NO: 87636 - protein, 275 aa, Streptomyces sp.
  misc_feature (1)..(275): tr|A0A286G5U0|A0A286G5U0_9ACTN Tryptophan halogenase OS =Streptomyces sp. Ag109_G2-15 OX=1938850 GN=SAMN0627276 5_6629 PE=4 SV=1
MRATLDIDPYVKVNPTLPTNGPWHGFQVDRQRLDALLLDRARQAGAEVRLGCRALEPVVAGGAVTGVRFSGGAWPPLRTRTVIDATGRARWLSRALDLTAPPCSPRLLIWYGYASGACAQRDAAPAIVADDTGWTWTARVGPARYQWMRLDFVPRRGRKYGPPREFAGLESEAPARAADVSWRLCPEPAGPGWFVTGDAGVLLDPASSHGVLRALLSGWTAGSLTAAAAARALDPGRAAGIYRQWLHEGAERDMIHLSARYATLGARGFGRAEGA

SEQ ID NO: 87637 - protein, 508 aa, Sphingopyxis sp.
  misc_feature (1)..(508): tr|A0A1G3K385|A0A1G3K385_9SPHN Tryptophan halogenase OS =Sphingopyxis sp. RIFCSPHIGHO2_01_FULL_65_24 OX=1802171 GN=A2885_21000 PE=4 SV=1
MNPVTQQSPHIVILGGGSAGWMTAALFAHHWRENGMRISVVESPDIGIIGVGEGSTPQLKAFFDGLGIAEAEWMPACDATYKLGIAFEGWSEGRPDAGYFHPFPGPLDVHTEAAFFRNAALRRAGVDVPANPDRFYLAARVAARGGGPHGGESFPFDLAYGYHFDAYKLGAFLRDHAVSQGVTHLARKVVSVDVGADGNVRSLGLEGGEALAADFFVDCSGFGGLIAGQALGARFLPFAENLFNDRAVVMPTAHDERGPVVTATKSIAMTAGWRWAIPLTTRIGNGYVYSSRYLDRDQAERELRIALGLTDADGPARHLEMKVGRLERSWTANCLAMGLAQGFIEPLEATALHIVIATAQEFITAFERGGFTPRHRDVFNARIAERYEGIRDYIVAHYRMNRRDADSGYWRDAAGLEALSDNLKAMITAWFTGADMGEAIADRGIGAFYPNISWHCLFAGYGVFPSNAVMRSPVATDRPADLAAIDLFLSRAELNFVRPAFPVAALQP

SEQ ID NO: 87638 - protein, 509 aa, Sphingomonas sp.
  misc_feature (1)..(509): tr|A0A4Y8ZSQ0|A0A4Y8ZSQ0_9SPHN Tryptophan 7-halogenase OS=Sphingomonas sp. 17J27-24 OX=2555898 GN=E2493_09700 PE=4 SV=1
MTRRGEVKTIVIVGGGTAGWMAAAALARYAGRGRAIRLIESDEIGTVGVGEATIPQIRLFNEGLGIPEEAFVRETLGSFKLGIEFVDWWKPGQRYFHGFGAVGQRLGLLPFHQYWLRYRAGGGRHGLWHFAPNFRAAAGNRFGRPIERPGAPSGVHHAYHFDASLYARMLRSYAEGRGVRRTEGKVAAVDLGGEDGFVEAVRLESGERVAGELFIDCTGFRGLLIEQTLRSGYEDWSHWLPCDRALAVPSERVAPLTPYTRSTAREAGWQWRIPLQHRTGNGMVYCSAFLDDEKAAETLLASLDGAALASPRPLRFTAGKRRAAWKKNCVAIGLAGGFLEPLESTSIHLIQSAIARLLAYFPDAAFDAADIAEYNAQTDIEWEAVRDFIILHYHLNARPGSEFWRHCREMVLPERLAQKIALFGASARITRHNLELFDDPSWLQVMWGQGLRPRAYHPLADGISDRELEEFIALAGQHAQRVVSEMPDHADYIAATCAAPIDERRAAAG

SEQ ID NO: 87639 - protein, 516 aa, Caulobacter sp.
  misc_feature (1)..(516): tr|A0A2R7L6S2|A0A2R7L6S2_9CAUL Tryptophan halogenase OS =Caulobacter sp. HMWF025 OX=2056860 GN=DBR10_15985 PE=4 SV=1
MTGPIHQVVIVGGGTAGWLSACLVAARRPDLSVTLVEAPNIPTIGVGEGTWPTMRETLATIGISETEFLSACDASFKQGSRFDGWVDGSAGDSYLHPFSPPPASDMRDLLAAWRASGSGTPFAAAMSPQHAACAHHLAPRQRSMPDYAAALNYGYHLDAGKFAALLARHATTRLGVTHIAGEVVGIVTAQDGDIAALELKDQSSVSGDLFIDCSGQAALLIDKHCKVDWVDRSDVSFNNRALAVQVPVDSDAPIAAQTIGTAHRAGWLWDIALPTRRGIGCVYASEFLSDREAEEVLRDYVRTKVSSLAADRLNIRQLSFKTGHRAKFWERNCVAIGLSAGFIEPLEASAIVLIELSLKALVDNFPTRRDVMDIHAARFNELFRYRWDRIVDFLKLHYVLSRRDEPYWRAQRVPETIPEQLKQQLAVWEDQPPSLWDLPRVEEMFSPASQQYVLYGMRPAKTPDAGPPSAAALSRLVEVREKARLITTALPTNRAYFTAAQSQTPAKVAPGDAIPK

SEQ ID NO: 87640 - protein, 505 aa, Robiginitomaculum sp.
  misc_feature (1)..(505): tr|A0A2G2LGS6|A0A2G2LGS6_9RHOB Tryptophan halogenase OS =Robiginitomaculum sp. OX=2030823 GN=COA85_12155 PE=4 S V=1
MTHSPIKKVVIVGGGTAGWMSAAVLTRAFGKGVQICLVESEAIGRIGVGEATIPQIHNINKFLGFDEDDFIRHTQASFKLGIQFDGWNQKGECYLHAFGDLGMPLGLTPFHHYWLRARANDQDTSLWDYSLNAQTALQNRFARLDHVGQSRLSGIKYAYHFDANLYAIYLRDWATANGVTRIEGKVVDVKLRSADGFIQSVSMEDGTQIAGDLFVDCSGFRALLIEGALGVGYVDWSHWLPCDRAQAVPSQRTSPMRPYTQSMARKAGWQWRIPLQHRTGNGHVYCSDHMSDDEAASILMQGLEGEALDEPRLVKFTTGRREKFWHKNCVAIGLSSGFMEPLESTSIHLFQSSVSRLLAMFPDQHFDPALSEEYNRQTVFEFERIRDFIILHYVANGRKGEAFWDACRHMDIPDTLTRKIELFRQSGRIFREHEELFTETGWLQVLVGQGVLPQSYHHLADGLSEEELSEFLGNLNTLITRAVGDLPDHESFIARQCAAPDNFAQ

SEQ ID NO: 87641 - protein, 415 aa, Caballeronia udeis
  misc_feature (1)..(415): tr|A0A158ILR0|A0A158ILR0_9BURK Tryptophan halogenase OS =Caballeronia udeis OX=1232866 GN=AWB69_06173 PE=4 SV=1
MNTDSSKLDTTVDVAIIGAGPSGAVAAALLRKAGRSVLVLERQHFPRFSVGESLLPQSMAYLEEAGMLQAVVEAGFQYKNGAHFIYRDQSSSFDFRDKHSPGWGTTYQVERAVFDDLLIQCAAKQGAEVRFGHTVQAMQTGTAPVLDVIDEAGVAYHVHARFVLDASGFGRVLPRLLNLEAPTRMPARAAIFTHVRDGIPAGATDRNKICVATHPEHRNVWFWMIPLAGGRSSVGCVAEASFLEVPENERDAKLRGLIQQEPTLNRLIGDAPFLMPVRHIGGYSANVERLHGPGYALLGNAGEFLDPVFSSGVTIALRSAHLAVQTLERHFNGEVPDWQAAYDVPLRKGIDTFRAFVERWYTGELQDIIFYPHKTPHIQRFISAVLAGYAWDESNPYVADPVRRLNALHEICKGS

SEQ ID NO: 87642 - protein, 512 aa, Sphingomonas sp.
  misc_feature (1)..(512): tr|A0A4Y8ZU29|A0A4Y8ZU29_9SPHN Tryptophan 7-halogenase OS=Sphingomonas sp. 17J27-24 OX=2555898 GN=E2493_06905 PE=4 SV=1
MKPVKQPLNLVIVGGGTAGWMAAAAFSRVLGPGVCRIRLIESEEIGTVGVGEATLPHMKSFNDLIGLDEVEMMRETSATFKLGIDFVDWGGKGRRYVHPFGDHGRPALGLPFYQHWLRAVQGGADLDIGDFSYAVVASRLNRFDFPNADPQRIDSTYSYAYHFDASTYARLLRRLAESAGVVRTEGKVREVKLDPLNGEIAALALESGEDVAGDFFVDCSGFRSLLLGQTLGAEWESWSQWLPCDRAFAVPSARATDFSPYTRSTCREAGWQWRIPLQHRTGNGHVFASQFISEDEAAATLMQNLPEEALGEPRMLRFEAGRRLKSWSRNCVALGLASGFLEPLESTSIYLIQVAIMHLLPLLPTTPVDPALADEFNRRIEIEYERIRDFLILHYHATGRDDSELWRYCRAMPIPESLQRKLALFQHSGYIEQYRDGLFTLPSWVAVYAGQGVIPTGHHPLAEGLPYDRLIADLERLRDEVRQRAEAMPAHEDFVGRYAPALALVQASGAHP

SEQ ID NO: 87643 - protein, 510 aa, Sphingomonas pokkalii
  misc_feature (1)..(510): tr|A0A2U0SF71|A0A2U0SF71_9SPHN Tryptophan halogenase OS =Sphingomonas pokkalii OX=2175090 GN=DD559_12280 PE=4 S V=1
MREDLIRRIVIVGGGTAGWMAAAALSRLIGRMPGLELELVESDAIGTVGVGEATIPHITLFNTMLGIDEAAFVRETNATYKLGIEFVDWHRIGHRYIHPFGVYGLDMLGVEFHHFWLKARTLGDPTPLDAYSIGIAGGLRGRFAHPRPDQPNSPLAKLGYAFQFDAGLYAAFLRRLAEGMGACRTEGRIVDVRRDGGSGHVAAVLLESGKEVAGDLFLDCTGFRGLLIEQTMGAGFRDWTHWLPCDRAVAVPCALGGDHLPLTRATARAAGWQWRIPLQHRIGNGYVYAGDYLSDDEAVATLLANLDGPALADPRPLRFRAGHRDRAWIGNVVVLGLAGGFLEPLESTSIHLIQSGIGRLMALFPSRGFDALEIERFNRETAQEYEDIRDFLILHYKATERDDSAFWRRCRDLEPPEGLAEKLALFRGNGRIHPAQRELFQQASWLAVMNGQGITPAGYHPVADLLSDAETRERLKHIAQVIDETANAMPLQDDYLRQIGCALPAARQAS

SEQ ID NO: 87644 - protein, 485 aa, Caulobacter sp.
  misc_feature (1)..(485): tr|A0A2R7L942|A0A2R7L942_9CAUL Tryptophan halogenase OS =Caulobacter sp. HMWF025 OX=2056860 GN=DBR10_13470 PE=4 SV=1
MTAAGLAAVLGDSGVSIALVESAEIGTVGVGEATVPHIRHFNARLGLDEADFMRRTQATFKLGIEFRDWGRKGDSYIHPFGGFGQPIGGVAFHHHWLRARQRGEAADLEAYSLPIIAARTGRFAPPSPDPRALASTFAYAYQFDAGLYAAYLRTYAEARGVVRTEGRIRDVTLRGEDGFIEAVVLESGERIEGDLFIDCSGFRGLLIEQALKTGYEDWTRWLPCDRAAAVPCEAVEPPGPYTRATSDEAGWRWRIPLQHRVGNGYVYCSGYISDDEAAKVLLEKLDGRPQADPRFLRFTTGRRRRQWNRNCVAIGLASGFLEPLESTSIHLIQVAITTLLEMFPDQSCAQADQDEYNRVMDLEFERIRDFLVLHYHATQRDDSPFWRDKAAAPIPDSLSYKMALFRERGMVVKYRDGFFLEPSWLAVYLGQNIMPQGYDPMTDAIDPKDSARLLGELQAAVARTAQAMPSHEAYIARFCDARGAA

SEQ ID NO: 87645 - protein, 500 aa, Caulobacter sp.
  misc_feature (1)..(500): tr|A0A2R7L6Q9|A0A2R7L6Q9_9CAUL Tryptophan halogenase OS =Caulobacter sp. HMWF025 OX=2056860 GN=DBR10_15970 PE=4 SV=1
MTHAYQKQRIVVAGGGTAGWMTAAALARTLGDAIDLTLVESDAIGTIGVGESTIPPIVLFNRLLGIGEADFMRATQATFKLGIKFENWKDVGESYFHSFGTTGKDHWSAGFQHFWMHGLTKGHVHSYDDYCLELKAALEGKFAHLPDERMNYAYQLDSTLYAAFLRKMAEGEGATRIEGKIARVELDGTTGNIAALCLDGDRRVEGDLFIDCTGFRALLIEGALHAGYDDWSHYLPCDSAIAVQTASVRPPVPYTRAIAHDAGWQWRIPLQHRQGNGIVYCSRYLDKDAALDRLLGSVEGEVLTKPNVIGFTTGARRKQWHRNCIAVGLSGGFMEPLESTSIHLIQRAILRIIRMLPNGKVSERDIAEFNEQQFADMYQIRDFLVLHYKVTERRDSPFWRHCAALPIPESLEQKIELFRETGRVFRRNEELFAENSWVQVMMGQGIMPETYHPVATKLPPEELEGFLAAQREAVANTVARLPDQQSYLAYYCSAKDERAA

SEQ ID NO: 87646 - protein, 505 aa, Xanthomonas oryzae
  misc_feature (1)..(505): tr|A0A411Y2L3|A0A411Y2L3_XANOO Tryptophan 7-halogenase OS=Xanthomonas oryzae pv. oryzae OX=64187 GN=EBA04_0652 0 PE=4 SV=1
MTQAQIRKVVIAGGGTAGWIAACALSHQFRGLLAITLVESEQIGTVGVGESTVPPIRTFHRFLQIDEQEFLRAVAGTFKLSISFEHWRAQGERYIHPFGITGQSTLVCAFHHLWLESQRRGMPGSFGDYCLETVASRVDRFALHGEPAVNYAYHLDAALYAKFLRARSEACGVKRIEGKIQQVTVQPHSGDVASVVLEDGHVIEGDLFIDCSGFRGLLIEQTLHTGYEDWSHWLPCDRAVAVQTEAVGPPVPYTRAIAHEAGWRWHIPLQHRVGNGLVFSSKHLSDDQAHAKLLHDVAAPAVKDPWMVPFRTGRRLKAWNKNVVSLGLASGFIEPLESTSIHLTISAVVRLLALFPGEGIAPSQVQLFNDVSRAEMEHVRDFVILHYHATQRNEPLWQQCRAMELPESLALRLRAWRERAHAWQGADELFRVDSWTHVLMGQGIEPEQHHPLTRAFSDHDLRRLLDGIAQPIQHAVQQMPSQHAFIERYCKAGAQVWGMRSPVPA

SEQ ID NO: 87647 - protein, 506 aa, Sphingomonas sp.
  misc_feature (1)..(506): tr|A0A4Y8ZV15|A0A4Y8ZV15_9SPHN Tryptophan 7-halogenase OS=Sphingomonas sp. 17J27-24 OX=2555898 GN=E2493_06895 PE=4 SV=1
MNDPRIRSIVIVGGGTAGWMTAAALAKVVGTENVSITLVESEEIGTVGVGEATIPPILLFNKMLGIDEDTFVRETNATFKLGIDFVDWRRPGHRYFHPFGLLGADLPDRVGFVHFWLRWVQEGGNPDFSRFSAETEAARVGRFARTPPTGGALPNINYAYQFDASLYAAFLRRFAEARGVERIEGRIVAVRRDAETGFIAAVTLQDGRSVAGEFFVDCSGFRSLLLGDSLEVPFEDWSRWLPCDRAVAVPCARTNDPTPFTTVTGREAGWQWRIPLQHRTGNGYVFASAFIGEEEATEKLLSRLDGAAQAEPRVLRFKAGRRRVCFEKNCLAVGLAAGFLEPLESTSIHLIQIAVNKLLDMFPNRDFHPAILSRFNDETNQVYDSIRDFLIAHYKLTERDQPFWRHCQDIEPPDSLATKLDLFRGRAQVFPSGFDTFHETNWFAILYGQGFEPESYHPLADNMSSDELRVTLAQIRAAIQKRVDGLPPHQAFLEAVASRPGGGALI

SEQ ID NO: 87648 - protein, 472 aa, Flavobacteriaceae bacterium
  misc_feature (1)..(472): tr|A0A349NY03|A0A349NY03_9FLAO Uncharacterized protein OS=Flavobacteriaceae bacterium OX=1871037 GN=DCS66_2422 5 PE=4 SV=1
MIKKVIVLGGGTAGLIAALILKTRFPVIEIEIIKSDKIGIIGVGEGTTEHFKAFMNVCEISEKEIIQHTDATFKYGVMFKDWAPHDYLQFPDINHRHRIGLYEAYYAYHIGHNISCEKMMEKNLWNKRLTSDHYCNQYHFNTFKLNDFLLMKAHARGIKITNDEIKSVSLKKGIDVLHGEKRKYKADFYVDATGFKKLLISKLGAKWESFNLPMNEAIAFQTPDTENYNTWTLAKAMSAGWLWRIPTYGRWGNGYVYDNHYMDKDRAKKEVEKYLGYSITIGKHIKFEAGALDRPWIKNCAAMGLSATFAEPLEASSIGTTIQQAFLLCHYLINPNQQDKNNYNQSCKAIFKNTRDFIAVHYLIKRKEKFWKELKITFSDDFKNKLEGWKTKLPFDQEFVERYILFRPLNFILVLWGINYFNREAIYNELFHYGKKAESEIQEHIKRNAKLSLTPSLSHKSYLENIRNQHDN

SEQ ID NO: 87649 - protein, 475 aa, Sphingomonas pokkalii
  misc_feature (1)..(475): tr|A0A2U0SJI0|A0A2U0SJI0_9SPHN Tryptophan halogenase OS =Sphingomonas pokkalii OX=2175090 GN=DD559_12270 PE=4 S V=1
MSLTRLLVVGGGITGWSTAAAIKRRVPKLAVTILPLAPPPDALADRIATTLPSVLGFHADLGIGLDDAVVRTGSLYRLGTRFEGWVEGALDYVHAYARHGEGIGGAAFQHLWARAALSGDAPPFDSLSPAAAMARAGRFVLPGGDGPLADYGFGLTLDIPRYTAMLMAFARHVGVEGHLGQLAGVEHDAQGGIAGLVLDDGTRLAADLYCDCTGPNARLHGTLGVGREDWKRWLPGDRLVLEAAPIADPLPMERVVATENGWRWIGPTQQGALYSAAHGTVPGEPIPIAAGASLEPWRHNVVAIGDAAVAIEPLEWSNLHLAHSAIDRLITMLPAGAPHPLEAAEYNRQALAEARRVRDFVLLHYATARRDTPFWHDVAGADLPDSLAHTLRLFRERGRLPFYEEETFDRDSWLAVLFGQAVLPRRIDPLADSVPPAEAMRAIAQRHAAIAQAVQPLPTLAAFRAAQSRHLHERA

SEQ ID NO: 87650 - protein, 513 aa, Sphingomonas pokkalii
  misc_feature (1)..(513): tr|A0A2U0SIU7|A0A2U0SIU7_9SPHN Tryptophan halogenase OS =Sphingomonas pokkalii OX=2175090 GN=DD559_02135 PE=4 S V=1
MKRVRNIVIVGGGTAGWLTAGVIAARHQGRMPGGFTVTLVESPNTPIIGVGEGTWPTLRTTLAKIGVSETDFFRECDAAFKQGALFARWTTGADDDAYYHPLMLPQGFHQLSLVPHWITDSKGRSFCDTVTPQGRICDAGLAPKTIATPEYEGQANYAYHLDAGKFAPFLTRHCTTKLGVRHVLADVRSVERAENGDIVAIDTEQAGRIEGDLFVDCTGFRALLLGETMGVPFKDCGDVLFCDAALAAQIPYPEDNAPIATHTLSTAQDAGWIWDIGLPTRRGTGYVYSTAHTSDDQAEATLRAYLGPAGADVGVRRIPIRSGHREIFWKNNVVAVGLAAGFLEPLEASAIVLIELSAKLIAEQMPAVRDVMDVVAKRFNATTLYRWGRIIDFLKLHYVLTKRTDTAFWRDNLLPETIPERLQELLTLWRYQPPWFHDEFDRVEEVFPPASYQYVLYGMGFRSEVEPEALSGDQRLAERAMRENQAQTERLCAGLPRHRDLIRKIHEHGLQPV

SEQ ID NO: 87651 - protein, 527 aa, Bacillus sp.
  misc_feature (1)..(527): tr|A0A328LLX6|A0A328LLX6_9BACI Tryptophan halogenase OS =Bacillus sp. SRB_336 OX=1969380 GN=B5P43_28450 PE=4 SV =1
MSRIQKILVVGGGTAGWLTACYLAKALNTAAPGSIRVELVESPTIGLLGVGEATFPSIRGTLAAIGLDERRFLVGATATYKQGIQYVNWVRPPGEPGPDRFFHPFSLPSQRAGSPELLPYWLLGGAPEGMAFAEAVTMQKRLIDHGRAPKRSTDPDYQGPMNHAFHFDAACFAAVLAEHGQSLGVRRHLAMVERAELDVSGAIARIVTREIGELTADLYVDCTGLRGALISGAMQSPFHSRRDVLFADRAVALQVPYPRPDASILPFTRATAQEAGWIWDIGLQKRRGIGYVYSSRHSGATRAEEVVREYVGDAAVGLEALHIKFETGYRPEHWRRNCVAVGLAGGFVEPLESTGIALVELAAYLITHLLPGDVDDMERTARRFNEMMVARYERIIDFIKMHYCLTQRGDTAFWVDNTDAASIPQTLQDRLALWRHRPPHRLDFVTDLEMFMPASWQYVLYGMEFKTDLEPMRSAYPQMEAAQREFAMIRQMAGHALDDLPDHRALVEQLCREHAQRAGRTEAVGAG

SEQ ID NO: 87652 - protein, 503 aa, Massilia sp.
  misc_feature (1)..(503): tr|A0A0Q7XS10|A0A0Q7XS10_9BURK Tryptophan halogenase OS =Massilia sp. Root1485 OX=1736472 GN=ASD92_16930 PE=4 S V=1
MQVPHLNTIVIVGGGTAGWMTATALATALRGRYRIRLVESDEIGIVGVGEATIPMIQRFNTVAGIDEAEFLKATNGTFKLGVEFVNWGRLGDRYTHGFGRLGQDLWMVGFEQYWHKMRALGQARDLADYSITRAAARANKFMLPRTDLGNSPLGEITYAYHFDAGLYARHLRKLSEARGVERTEGKIVRVTRRGHDGHVDAVVMENGERIEGDLFIDCSGFRGLLIEQTLEAGYEDWSHWLPCDRALAVPCESVPALTPYTRATAHKSGWQWRIPLQNRIGNGHVYCSRYISDDEAAHVLLSNLDGKPLADPRPIRFTTGMRKKAWDKNVVAIGLSSGFLEPIESTSIHMIQDSIQRLLDYFPDQGFSATDVEAYNRLSRFHYERIRDFIILHYHANQRDDAAFWQACARMEIPATLRDKIDLFRTHGRLRRVDGELFTEVGWLQVLVGQNIHPQAYHPLVDVQSEEGIREYMEGVADVIRQCVDFMPDHAAFIDGYCKAPKM

SEQ ID NO: 87653 - protein, 506 aa, Massilia sp.
  misc_feature (1)..(506): tr|A0A0Q7XHB8|A0A0Q7XHB8_9BURK Tryptophan halogenase OS =Massilia sp. Root1485 OX=1736472 GN=ASD92_22355 PE=4 S V=1
MDKDRWIGKVVILGGGTAGWMTAAALSHTFGHAVEIVLVESDAIGTVGVGEATIPPIRAFHQLIGIDEAEFIRATGATFKLGIEFRGWRSESSTYFHPFGAYGVERDIGYFFQYWLRLKEKGQVSDFSEFSLCTLAARHNVFAPASERPGDPLQHLQSAYHFDAGRYATYLKGVCLARGVAHKIGDMLTAERNPENGYITGLKLKSGELVPGDLFIDCSGVRAMLLGQALGVEYEDWSRWLPMNRACAVPCEQKLALTPYTISTARPFGWQWRIPLQHRVGNGVVYSSEFATDEAAERCLLDGLEGEPLAPINRIKFTAGRRRTPWTRNVVAIGLASGFLEPLESTSIHFIQSSIQRLIRYFPDAGLSPVCAQAFNKEASREVENVRDFLILHYHATERDDSALWRYVKAMQIPDSLQERIALFRERGQLNLAAEELFQSTSWHAVLLGQGIRPRTYMPTMVLQDDAMLANAYGNLERNFKKIVSRLPDHAAYIKEHKLTSTMENR

SEQ ID NO: 87654 - protein, 506 aa, Microbulbifer agarilyticus
  misc_feature (1)..(506): tr|A0A1Q2M8G8|A0A1Q2M8G8_9GAMM Tryptophan halogenase OS =Microbulbifer agarilyticus OX=260552 GN=Mag101_15200 P E=4 SV=1
MNTQNSKKTDAAVKRIVIAGGGTAGWIAAAALSKKLGDLLEITLVESDAIGTVGVGEATIPPLRTFHHLLGIDEQEFMRATGATAKLGIAFENWGREGERYIHSFGKTGTSAWMCDFHHFWLRGREMGFDSDIGEFCLEHQAAEAGRFATSSKSNINFAYHLDATRYAAFLREISEEHGVTRVEGLIQDVRQDAESGDILALILDDGREIEGDLFIDCSGFRSLLAGKALGSEFEDWSHWLPCDRAVPLQTSATEPAMPYTRSIAEKAGWRWRIPLQTRVGNGLVYCSDYLSDDDASALLLDRVDGKPMTEPRVIRFATGRRKQTWKNNCVALGLASGFIEPLESTSIHLIVTGVVRLMQLFPFNGAEPALRDEYNKQTQRELEDIRDFIVLHYHVNQRHGDPFWDHCRQMAIPDSLAQRIALFRERAHAYQNNDELFRVDSWVQVMLGQGLKPQRHHPVTQMMTEQQMQQLQTGLRSQVARAVQTLPPHHEFIQQYCAEAVATEA

SEQ ID NO: 87655 - protein, 510 aa, Caulobacter vibrioides
  misc_feature (1)..(510): tr|R0D600|R0D600_CAUVI Uncharacterized protein OS=Caulo bacter vibrioides OR37 OX=1292034 GN=OR37_00489 PE=4 SV =1
MQPLKTILIAGGGSAGWMTAALCSRLFQGLYDIVLVESDQIGTIGVGEATIPAIKKFNELLGLEEDDFLRKTQGSFKLGIQFRDWWRKGESYLHGFGVIGQDLGWLRAHQYWLRMRELGRAPPFDNLAINNAMALSDKFMRARADMSESPIGHIAHAFHFDAGLYAKHLSTYAQARGVKRREGKIVEVTLRPADGFVQSVTLDDGETVAADLFIDCSGFRGLIIEQALKTGYEDWTHWLPCDRAIAVPSERSEHFTPYTRSTAHDAGWQWRIPLQHRTGNGHVYCSRFIDDDEAERVLLSNLDGAQRADPLRIRFTTGKRKKIWNKNCVAVGLAAGFMEPLESTSLHLIQSSVIRLVRLLPDAGFDQATIDEFNRQTDFEYERVRDFIILHYKATERDDTAFWRHCRDMEIPATLQRKMDLFRANGRVFREDDELFTEESWIQVFLGQGVIPRGYDPLVRVHSDEEIARHLGNIETVIGRCLAVMPSHAEFVSRACAAPAPVASTLVPTP

SEQ ID NO: 87656 - protein, 521 aa, Microbulbifer agarilyticus
  misc_feature (1)..(521): tr|A0A1Q2M8L3|A0A1Q2M8L3_9GAMM Tryptophan halogenase OS =Microbulbifer agarilyticus OX=260552 GN=Mag101_15480 P E=4 SV=1
MQQAPLSICVLGGGAAGWLTAAVLAAEHGRVAGGDCKITLVESPTIPTIGVGEGTWPSMRETLRRIGLSERRLFTECDAAFKQGSLFSAWKTTDPNDQYYHPFSLPHGYFEQDLAPFAEREYAYAVSPQATVCDDHLAPKQLATPEYAGVLNYGYHFDAVKFGLCLSDHCTRNLGVQHVRASVASVQSDVEGNIIALVTETGESHSADLFVDCSGRAAVLIGEHLQVPWVDRSSVLFNDRALAVQIPHTSDESPIASVTRSTARSNGWIWDIGLPTRRGMGYVYSSQFTDSDIVESDFREFLSTEVTQKALEELSFRELTFQPGHREVMWRGNCVAVGMSAGFIEPLEASALALIEQSAGLIRDFLPVSKAQMKLAATRFNSQMLAHWDHIIEFLKLHYVLSQRTDSEYWLAHRRAESIPELLQENLMLWRHRAPARQDFPQAQSLFPPASYRYVLNGMAYACDRTRAPRKERDEARAKVLLGEVQKQLASYKQGLPGNRKLLNQLVARSQTSGSPEEVGR

SEQ ID NO: 87657 - protein, 514 aa, Caulobacter sp.; identical to SEQ ID NO: 83001
  misc_feature (1)..(514): tr|A0A0Q6TXC5|A0A0Q6TXC5_9CAUL Tryptophan halogenase OS =Caulobacter sp. Root342 OX=1736519 GN=ASC62_06670 PE=4 SV=1

SEQ ID NO: 87658 - protein, 513 aa, Actinopolyspora mzabensis
  misc_feature (1)..(513): tr|A0A1G9EGL7|A0A1G9EGL7_9ACTN Tryptophan halogenase OS =Actinopolyspora mzabensis OX=995066 GN=SAMN04487820_11 241 PE=4 SV=1
MVDNVVIVGGGTAGWMTATYLNATFGDQVTVSLVESPNLPTVGVGEATFSTVRHFFHYIGLREHEWMPHCSAAYKLAIRFQNWGGENEHFYHPFERPRHVDGCTLADWWLKVGSEAFDRESFVLAALCEARRSPNRAGGALFDRNLHDGGDLPRREVMNGADTQFPYAYHFDATLLAHFLADLGMRRGVHRVLDDVERVVQDETGAIDHLVTKQHGDIYGDLFIDCTGFRGLLINQTLGARFESFQDVLPNDRAVALRVPVDGESQGIAPYTTATAMDAGWAWTIPLYDRIGTGYVYSSEFTTPEQAESDLRAHVGPAADEVEANHIRMRVGRNERFWMRNCVAIGLSGGFVEPLESTGIFFIQYGIEQLVRHFPGPDRSPALRDNYNRLMAGCFDGVREFLVLHYRAARREDTPYWKAINELPLPPGMADRMELWKSRLPDSGSVIADYHGFEPYSYAVMLLGLGQRPRYPHPALRGLDSAAARAEFERVRAEAEQLVNTLPSQYEYLAGMR

SEQ ID NO: 87659 - protein, 522 aa, Caulobacter sp.
  misc_feature (1)..(522): tr|A0A0Q6U0V0|A0A0Q6U0V0_9CAUL Tryptophan halogenase OS =Caulobacter sp. Root342 OX=1736519 GN=ASC62_11085 PE=4 SV=1
MQRRRSILIVGGGTAGWLTAAYLAKALRVAEQAHLEITLLESPDIGIIGVGEATFPTIRNTLRFLGIDEAHFIRETSATFKQGIRFVDWARAPDNDKKGGGKHHSFFHPFEAPFSTEGASLAPYWLLQNEATRAPFAEAVTIQARVADAQRAPKRPHESDFAGPLNYAYHFDAAKLAQVLAERGRELGVRHLTGNLTETVLDDTGAIAHIVCAEHGDLSADLYVDCTGFRAELIGKALGSPFKSARPVLFADRALACRAPYERPDAPIQSYTVATAHEAGWTWDIGLAGTRGVGCVYSSDHIDDDRAEAILRDYLGGGEIQPRLISFDAGYREKQWIKNCVSVGLSAGFLEPLESTGVVLIEAAVAMIAELFPHSGPVGAPARRFNELMTARYDNIIVFLKLHYALSRRTEPFWRENTDPATMPERLVDLLDQWRHRPPARFDFILDLETFAFFNYQYILYGMGFETDLADGAGEFPDVATAQKLFAKIRGFADRATQDLPSHRDLIAQINRFGFDKALEQA

SEQ ID NO: 87660 - protein, 508 aa, Pseudoxanthomonas suwonensis
  misc_feature (1)..(508): tr|A0A0E3UN60|A0A0E3UN60_9GAMM Tryptophan halogenase OS =Pseudoxanthomonas suwonensis OX=314722 GN=WQ53_09240 P E=4 SV=1
MNNPDQAISPRPVKRVVIAGGGTAGWMAAAALSKTLGKVLDIVLVESEEIGTVGVGEATIPTLVTFHRLLDIKEQEYMAAVQGTVKLGISFENWKDVGHRYIHSFGISGKDHWSAGFQNFWLRGRKEGLASEYSDYCIELQASLQDRFSHLPRYHVNYAYHMDAALYARYLRGFSERYGCKRVEGKIVDVVTDGEGCISALKLERGEVVEGDLFIDCTGFRALLIGKTLGVGYTDWSQWLFNDSALATQTTAVRDAVPYTRAIAGKAGWQWRIPLQHRVGNGIVYSSRHMGDDEARAEFLGSIEGEVIKQPWPVRFQPGQRQQCWVKNCVALGLAGSFIEPLESTTIHLIQRGIVRLLQAFPHAITQPAIDEYNARLNEELQHVRDFVVMHYHISDRRDSPYWQEIAEMRIPDTLRHRIELFRETGEVFNVPGELFGVNSWVQVMLGQGIEPKRYHPTADVMSQADLARFLGDIRHNVLHTVRQMPLHMDYMRSYAPAPVPEAVRQAV

SEQ ID NO: 87661 - protein, 498 aa, Sphingomonas carotinifaciens
  misc_feature (1)..(498): tr|A0A1G7GEL9|A0A1G7GEL9_9SPHN Tryptophan halogenase OS =Sphingomonas carotinifaciens OX=1166323 GN=SAMN0521655 7_101846 PE=4 SV=1
MAGQERNRVRVVVVGGGTAGWMTAAGLATLIPAAADVHLVESAEIGIVGVGEATLPHLRAFIQRLGIDEIAFMTATHATFKLGIDFRDFGRIGDRYVHPFGTYGQPLGGVGFHHYWLRRHHGGNPTPLGAYSAGVVAGERARFARPDPTSDALQDSFGYAYQFDATRFAPFLRTHAEARGCRRTEGRVVSVGRDERDGRVTAIHLADGTRIEGDLFVDCSGFRALLIGGELDEAWEDWSHWLPCDRAVAVPCTHAPGPIEPLTRATAMPAGWRWRIPLTTRVGNGYVYASRYCDEDTAREALLAGLEGEALAEPRLLRFRAGRRRHSWSHNVVAVGLASGFLEPLESTSIYLVQMAITALIEHFPDARVTDADRDGFNTAVDAEYDRIRDFLILHYHATTRDDSPFWDHVRTMAIPDTLADRIALWRQTAQVAHYSYGLFLEPSWLAVYLGQNIVPDGWDPRADGADPAKLDQALAALAAGIGTAIDALPPHEASLPR

SEQ ID NO: 87662 - protein, 506 aa, Xanthomonas dyei
  misc_feature (1)..(506): tr|A0A2S7BYK1|A0A2S7BYK1_9XANT Tryptophan halogenase OS =Xanthomonas dyei OX=743699 GN=XdyCFBP7245_18795 PE=4 S V=1
MIPAPLRNIVIVGGGTAGWMAAAAFARVLGPTFNVQLIESEQLGTVGVGEATVPHIKAFNNLLGIDEAEFVRQTQGSFKLGIEFVDWQRPGSAYIHGFGTQIGHPLGLLPFHQYWIRQQLRGKAQPLGAYSLNTVAAARGKFMTSAGDVPATSPLANIAYAYHFDASLYARFLRGFAEARGVRRIEGMVEQVQLHPESGHVVSLQLASGQVIAGDLFIDCSGFRGLLIEDALHTGYHDFTHWLPCDRALAVPCEKIGPPTPYTRCTARAAGWQWRIPLQHRTGNGYVYSSAHISDDEAAASLLANLDGAPLGDPRPLRFTTGRRKQCWNRNVVALGLASGFLEPLESTSIHLIQSGISKLLELFPRQGISPVLVQRYNDRLAFEFDRIRDFLLLHYHATERDDSAFWRHCRTMPITPELQATLDLFRDSGRFYRNAEEMFAEISWVQVMVGQGILPTGYHPLVDQVPDTDAEGFMASVAQTISHCVDVMPTHQQFIDRYCKAALLR

SEQ ID NO: 87663 - protein, 501 aa, Massilia sp.
  misc_feature (1)..(501): tr|A0A0Q7XIU4|A0A0Q7XIU4_9BURK Tryptophan halogenase OS =Massilia sp. Root1485 OX=1736472 GN=ASD92_26285 PE=4 S V=1
MQQNPIRKIVIVGGGTAGWMAAAPLAQRMGQRCEIVLVESPDIGTIGVGEATLPTIRFYNAALQLDHADFIKKTQASFKLGIEFKDWGHVGNRFFHGFGDFGPPLNGIQPHHYWLRLARTFDHMPALENWSMASIMARENKFTMPNDAQPGVTDAYSFGYHFDAGLYAAFLRDYAMARGARRVEGTITSVDQHPETGFVTAVRLADGRTLDGDLFIDCSGFRGLLIEGALKAGYDDWSEHLPCNSALAVPCARVEPLTPYTRSTAKGAGWLWRIPLQHRTGNGHVYSNAFTTDEKARQDLLDGLDGAALDEPRQLRFVTGKRKKSWVKNVVAIGLSAGFVEPLESTSISLIETAIGTLIEQFPDRDFRPELADEFNRIIGSRYESIRDFIVMHYKLTKRDDTEFWRYCANMTIPASLAHQIELFRETGRVAILDRDSFLLPSFVAMLVGLGVEPKRYDPFVDDVDMRQLHGHFAGLRDLIVQAVAKMPGHGAYLEKNAKAG

SEQ ID NO: 87664 - protein, 517 aa, Caulobacter sp.
  misc_feature (1)..(517): tr|A0A0Q6U9U9|A0A0Q6U9U9_9CAUL Tryptophan halogenase OS =Caulobacter sp. Root342 OX=1736519 GN=ASC62_07855 PE=4 SV=1
MTEASTPSIAPSDRDGAISRIVIVGGGAAGWMAAAALSRVLGPRGPSITLVESEEIGIVGVGEATIPPIRTFNALIGLDEAAFVRETQGTFKLGIEFVDWTRLGDRYFHPFGVYGHDFGVAPFEAVWRRLRRGGEAQGLDAYSVCARAAAGGRFAPLPQASGGPPPMGYAFHFDATLYARMLRTHAEAAGVVRREGKVVDIALRGADGFVEAVTLADGERIAGDLFIDCSGFRSLLLGQTLGTPFEDWSRWLPNDRALAVPSANVGPSTPFTRSTAREAGWQWRIPLQHRTGNGYVFSSQHVSVDEATATLLSGLDGEPLAEPRLLTFQAGRREACWAKNVVALGLASGFLEPLESTSIHLIQAGIARLLEMLPTRAFEPADARRYNRLMAADFDDVRDFLVLHFHLTQRDDTPYWRELRAMTPPDSLVERLAIYRATGRIFRETDALFTKTSWLAVLEGQGAQALGDDPLALAVPQDAAAARLAKIAELAGQAVDRMPTHGDFIAAHCLARTPAPV

SEQ ID NO: 87665 - protein, 517 aa, Sphingomonas carotinifaciens
  misc_feature (1)..(517): tr|A0A1G7F616|A0A1G7F616_9SPHN Tryptophan halogenase OS =Sphingomonas carotinifaciens OX=1166323 GN=SAMN0521655 7_101252 PE=4 SV=1
MTGENGDMQADGQADGQAGDGAIRSILIVGGGTAGWMTAAALAHALPRGCTITLVESDAIGTVGVGEATIPPIRLFNDTLGIDEGEFLKATKGSYKLGIEFVGWGQEGHRYFHPFGTFGKPFDLLAVHQHWLRARRAGSTIPLDALSMAWGAAARNRFAPPLADPRSVGSTFDYAYHFDAGLYAAFLRRFAEARRVVRVEGEVGDVALDGESGQVAHVTLTDGRRLAADLFVDCSGFRGLLIAGALGVGFEDWTHWLPCDRAVAVPSANTGPLTPYTRSTARAAGWQWRIPLQHRTGNGYVYASRHLSDDEAAATLLANLDGEALGDPRPLRFTTGRRTAFWRRNVVAIGLASGFMEPLESTSIHLIQAGIAKLLAYFPTRAFEPAGIAEYNRVAVTESERIRDFLILHYVLTERGDTDFWRACAAMDIPDTLKLKIDHFRAHGRLVAREMDLFGPASWLAVHIGQGNWPAALDPLIAYAGEPAESVRFVERLAEAIARGAETMPEHAAFIARRIAG

SEQ ID NO: 87666 - protein, 324 aa, Bradyrhizobium sp.
  misc_feature (1)..(324): tr|A0A4Y9V554|A0A4Y9V554_9BRAD Tryptophan halogenase OS =Bradyrhizobium sp. MOS001 OX=2133948 GN=CT676_01510 PE =4 SV=1
MSPLVQPVLRQLGLWPTFLAQGFAPSHRTLTSWDQAGLTSSELLLEARGPSWRVDRRAFDGWLTAEGCRAAERVDAKVCHLAREADGWSVVCDDGTSRSARLIIDATGRARALADRQGSRAKAQDRLIAAYAEATTSGPAAPELLVEAFEDGWWYTMALDQGRRAFACMTDADLARGLRLNTPDGWRRALARTQFVSALASKIIRLEPPRLIPAGSRYAATTAGFHFLCAGDAASAFDPISGHGVVKAMRSGVFAAYAASDCLARGDAAALDRYGAWIAREAAAYATTLSEHYGSVSRWPERPFWRRRRADAPSRNPSSSLLEQ

SEQ ID NO: 87667 - protein, 513 aa, Sphingomonas paucimobilis; identical to SEQ ID NO: 85813
  misc_feature (1)..(513): tr|A0A0C9N6E9|A0A0C9N6E9_SPHPI Protein/1, contig: SP650 OS=Sphingomonas paucimobilis NBRC 13935 OX=1219050 GN= SP6_50_00800 PE=4 SV=1

SEQ ID NO: 87668 - protein, 509 aa, Microbulbifer agarilyticus
  misc_feature (1)..(509): tr|A0A1Q2M3F9|A0A1Q2M3F9_9GAMM Tryptophan halogenase OS =Microbulbifer agarilyticus OX=260552 GN=Mag101_06150 P E=4 SV=1
MVDSRFSVLIVGGGTAGWMAANLLAHHWRDFPVKISLVESTEIATVGVGEGSTPFLKNFFRTLGIDESEWMPACDATYKSGIRFPNWSKVPGYESYYHPFFSPLDRETGQEFFAQANLRRQGEAVEAVPDYFFHAPYLSAAGKAPIPKRPLPFELDYAYHFDAGLLGKFLRDKAIKAGVEHKQATIERVLVESGKIAGLQTTASENLAADFYIDCTGFRSALLAALPGYQFNEYSDTLFNNAAVTLQVPSDGTGPIKSETVSEAMSAGWMWDIPLQSRTGYGYVYSDQFLSAEQAEQELRGRLGKTDELECRHLKMRVGRVAEHWSGNCLGVGLSQGFIEPLEATALMLVQFTVEQFARSLLVEGMPNPGASITGADLGAPREHFNRTINEMFAGVRDYVAGHYLLNTRDDSPYWQAVRDQSKPPERLLKLMDCWDSGGDFPELLSALGADKIYSMASWYCLFAGMGRFPETTGVQSVESQKLIRELKSFCGGNTGRFNEHRAYLQALK

SEQ ID NO: 87669 - protein, 491 aa, Massilia sp.
  misc_feature (1)..(491): tr|A0A0Q7XJ04|A0A0Q7XJ04_9BURK Uncharacterized protein OS=Massilia sp. Root1485 OX=1736472 GN=ASD92_29250 PE=4 SV=1
MTYERIVVLGGGTAGWMAATALATGLQGTTVELVESEDIGTVGVGEATFPSIRNYHQILGIPEADFLRATNGTYKLGIRFRDWRVKGEDYYHTFGDFGMLNGPESLWGQYRRHPRANLPTFGEQCLPTVMAMNDRFCAPGKDAANFNYAYHFDANLYARFLRDIALKRGVRRTEGKVVDVARRPDGGIASLKLDDDRVVKGDLFIDCSGFASLLLGRTLGEPFVDFSHWLPVDRAWAVPSAPVGDNLTPYTRATALDAGWAWRIPLQDRTGNGHVFSTRFIDEEKARDQLLQQLDGEALAEPRLLRFTTGHRAKFWSHNVVGIGLATGFLEPLESTSIYLVQVGVGRLMTLLQRGGPVAPELVDSYNTGLTRQFERIRDFILMHYCLTARRDTPFWQAMAAAELPETLAYKLHAWRETGVLHQYDEEGFDGHSWLAIHAGMQNWPARSDPTLKLIPEEQSLDWVRERATQLATAVATVPTHREYLAKILGR

SEQ ID NO: 87670 - protein, 530 aa, Caulobacter sp.
  misc_feature (1)..(530): tr|A0A0Q6UMW3|A0A0Q6UMW3_9CAUL Tryptophan halogenase OS =Caulobacter sp. Root342 OX=1736519 GN=ASC62_03595 PE=4 SV=1
MDKPIDDILIVGGGTAGWITAAYLARRLGTTRPDGVRITLIESSEIGIIGVGEGTFPTIQNTMRTIGIDEAQFMRGAGAAFKQGIKFVDWKTAPKDGIHSHYYHPFAQPRLLNGGLDLAPYWLMGGAGDIPFSDAVTLQDKVCDAGRAPKRIDDPQYGGPMAYAYHFDAGKLATLLRDVGKATGVKHLLGNVTTVNKGEDGSIASISTAEHGELTADLYIDCTGFAGALIGKAMGSEWIDKGDTLFVDRALALQIPYDRPDAPVATTTISTAHEAGWTWDIGLPERRGTGYVFSSRHTSEERAEEILRGYVGKAGDGLTPRLLTLKVGHRQAHWIKNCVAVGLSGGFLEPLESTGIVLIEAAAYMLARNLPRRGGLEAAARQFNQAMTDRYLRAIDFIKLHYCISQRTDNAFWTDNCDPASIPESLQDHLAMWKHRPPNVFDFPSLHESFKYFNYQYILYGMGHPTAIDPAAHVHGDLARADFARVREAGKRAASSLPDHRALLNAVYAHGFSSKAPDQAMAEAAETVRR

SEQ ID NO: 87671 - protein, 501 aa, Erythrobacteraceae bacterium
  misc_feature (1)..(501): tr|A0A2E0Q417|A0A2E0Q417_9SPHN Tryptophan halogenase OS =Erythrobacteraceae bacterium OX=2026738 GN=CL953_03515 PE=4 SV=1
MTAPITDRSAPPLRVVILGGGTAGWMTAIAIASLTGGATDVHLVESEDIGIVGVGEATLPHLRAFITRMGIDEQEFMAATQATYKLGIEFSGFGRQGERYIHPFGTYGRPLADVGFHHFWLRAKAARVASRLDEYSFAVMAAEAGRFAHPRDDADPVDSFGYAYQFDATLFGPYLRERAIARGVRRTEDKVVSVERDERGRVAALMLEGGERVEGELFVDCSGFRALLIGDAEWEDWSHWLPCDRAVAVPCEPADRGIEPFTRAIAMPAGWRWRIPLRHRIGNGYVYSSAHCTDDDARAALLSAIEGSPLTEPRVLRFRAGRRRNGWTGNVVSIGLASGFLEPLESTSIYLIQAAITALLENLPHGPADPGDSDAFNDQMDYEYARIRDFLILHYHATERADSSFWNHVRTMDIPDSLTEKLELWRRCAVVPQYRRGLFLEPSWISVMIGQGVIPEGWDPRAELPSQDGLEKALAGLAQHIASGVRAMPSHGAALGLGANV

SEQ ID NO: 87672 - protein, 497 aa, Kordiimonas lacus
  misc_feature (1)..(497): tr|A0A1G6SVJ4|A0A1G6SVJ4_9PROT Tryptophan halogenase OS =Kordiimonas lacus OX=637679 GN=SAMN04488071_0010 PE=4 SV=1
MTDMRARPRVVIAGGGTAGWVTAAALSSQLKGLLDITLVESDQIGTVGVGEATIPTHRSFHVLIGANEVDFMRATRATFKLGIQFENWGAQGDSYIHSFGQIGKSPWMADFHHLWMQAKADGFGGDLGDYCLELRAAEAGKFALSDKLNLNYAYHLDASLYAAFLRAHSEARGVTRVEGKFVDVRQDGESGFIKSIVMENGDEVEGDFFIDCTGFRAALIEKVLGVGYDDWSHWLPMNRAVAVQTQSAGDILPYTRSIAHEAGWQWRIPLQHRVGNGHVYCSDYISDDEARATLERNLDGEMLFEPRVIKFLTGRRKKLWEKNCVALGLSSGFLEPLESTSIHLFQIAATRLIQYFPFNGCNPALADHFNRLASEEFESIRDFIIAHYHVTQRDDTAFWRDRQAMDIPDTLKQRLALYRDNGLVYKGEEDLFRIDSWIQVLLGQRFETSAYHPAGRLMTTDKLRSSLANYADGVRRTVAQMPSHADFIARYCAMAGE

SEQ ID NO: 87673 - protein, 501 aa, Pseudoalteromonas sp.
  misc_feature (1)..(501): tr|A0A2A2UT58|A0A2A2UT58_9GAMM Tryptophan halogenase OS =Pseudoalteromonas sp. HM-SA03 OX=2029678 GN=CKO50_1905 0 PE=4 SV=1
MKTHLPTKTIHSLTILGGGTAGWMCAAYLAKHQPNLSITVIESSSIGRIGVGEGSTPHLQLFMQSLGVKERDWMPACQASYKTGIYFDNWNGDNGSYFHPFFSEMDAKTAEVYFVNANARRRGSEYIDKPEHYFLAAVLADKQQAPLPQRPLPKALEYGYHFDAQKLADWLRAFSLARGVKHIHSTVSSVQHHAQEIIALTLESGAQVKSDFYVDASGFNALLIEKTLKVPFISFADQLLNDSAVAIASDKINPLPSSTSAIAMPCGWRWQIPLQGRTGHGYVYSSAHTSPDKAEAQLRQAAQLDKGQAKHLTMKVGMMARSVEGNVFAIGLAQSFIEPLEATALMVTGYSIELLNRLLSQQLEAQAINQQLSDLVLGIKEYVLAHYATSKRADSQYWQDAKIAALSLNELDELLTHWRSGGDFDAWLNQHRMHSPYIRPSWYCLLGGMDHRDSTCQMPFDQAPQHIEQAAKAYLTKLSDEHFTAHTTALEQLQRAQAFRA

SEQ ID NO: 87674 - protein, 505 aa, Burkholderiales bacterium
  misc_feature (1)..(505): tr|A0A257CCX6|A0A257CCX6_9BURK Tryptophan halogenase OS =Burkholderiales bacterium PBB6 OX=2015568 GN=CFE46_136 30 PE=4 SV=1
MKDRAIRQIVVVGGGTSGWMTAAALAKLLGGKSRIRVVESDEIGTVGVGEATIPMIQRFNTALEIDQDEFLRETQGTFKLGIEFNDWGRLGESYMHGFGRLGQDLGTLPFDQYWQKMSQAGLAGPLGEYSITQRAAYAGKFMRTASDLPGTPLADIAYAFHFDAGLYARYLRKYSEARGVVRTEGKVLDVTLRSSDGHVDSLLLDNGDRITGDLFIDCSGFRGLLIEQALKTGYEDWSHWLPCDRAMAVPCAKVGDPIPYTKSSAREAGWQWRIPLQHRTGNGHVYCSRFISDDEATAVLLRNLDGEPLAEPRPLKFVTGMRRKAWNKNVIAVGLASGFMEPLESTSIHLIQTMVARIVSFFPDRDFAQADVDEFNDQVRFEYERIRDFLILHYKQTLRDDTPFWRHCRDMDIPEGLQRRMNLYRSHGRITRENNELFSEVSWLQVMDGQGLKATRYHPLVDVVPQAEITEFLGNIRDVVGKCLDVMPSHAAFIAEHCRAPSIKF

SEQ ID NO: 87675 - protein, 509 aa, Saprospirales bacterium
  misc_feature (1)..(509): tr|A0A2E4IAL0|A0A2E4IAL0_9BACT Uncharacterized protein OS=Saprospirales bacterium OX=2026790 GN=CMN33_02735 PE =4 SV=1
MEIVIVGGGTAGWVTAIIASARHKDHNITVIESSKIGVVGVGESTTGHFTDILTNWASNFGCDQNEFIKETGATLKYAIKHKGWTNDVDDYYIGPIDGTTTAGAVPDCMFNYGLDKLQRKELLNLSTCGHWIHDGKSNFNKHTNQFVNNHHAYHIDAHLAGQYFKKVVLRRHNTTYIDSEVLDVFLNEQGFVKNLKLSNGEIVDGDLFIDCSGFNKVIMKHLPSKWISYQENLPLNTGMPFHLKYKQNETPEPYTTAWAQKFGWMWQIPLMDRKGCGYVYCDAYTTPDKAQQEIETILGQQIDPIKTIKFDAGRQESAWIKNCVTIGLSSAFLEPLEATSIHSTIVQANNLFLEYVQPTIEDTLNPGSISIYNKRTRKLYDDVKDFLVLHYMGGRKDSEFWKYINSGVTQTEFVKELLAMIKYRTPTVNDFPHYQGSAGWPLYSYVMEGINLLDKTKAGKEIDFDMKEGNLYELTQDSFYHQNNIWRDEDQYTYSYKEFIDYFRGLRIK

SEQ ID NO: 87676 - protein, 513 aa, Erythrobacteraceae bacterium
  misc_feature (1)..(513): tr|A0A2E0Q455|A0A2E0Q455_9SPHN Tryptophan halogenase OS =Erythrobacteraceae bacterium OX=2026738 GN=CL953_03505 PE=4 SV=1
MTQPENNAIRDLVIVGGGTAGWMMAAAAARVLAGGVRRITLIESDAIGTVGVGEATIPPIHGFNELLGIEEQEFLDATKGTFKLAIQFENWGQVGERYFHPFGKTGRDFDGIAFHQLWSWLRDREGVGPLEDYSMSAVAARNGRFARPDANPRSPLSNLVYAYHFDATLYAAFLRDYAIERGVVRVEGRIVDVELDGESGHVSSVGLEDGASIPGDLFIDCSGFRSLLLGDALGVGFNDWSHWLPCDRALAVPSASDEQIAPFTNSHAHGAGWQWRIPLQHRTGNGHVYASAFMDHDEAERLLMANLKTPPLGECRPLRFQTGVRERLWDRNVVALGLAGGFLEPLESTSIHLIQTGIAKLLALFPDRNFADVERDEYNRLMTSGYAAIRDFIVAHYHVTRRADTPFWNHVRTMDIPDSLKTRLELYRQKGRIFRYDDELFSIASWSAVLNGQGLVPMANDPLCAALDGESLAEAMRRMRQVHHNMAGRLPLHRAALGPAAGDAGAAKARAST

SEQ ID NO: 87677 - protein, 500 aa, Erythrobacteraceae bacterium
  misc_feature (1)..(500): tr|A0A2A4P2E7|A0A2A4P2E7_9SPHN Tryptophan halogenase OS =Erythrobacteraceae bacterium OX=2026738 GN=COC07_03020 PE=4 SV=1
  misc_feature (119)..(119): Xaa can be any naturally occurring amino acid
  misc_feature (140)..(140): Xaa can be any naturally occurring amino acid
  misc_feature (183)..(183): Xaa can be any naturally occurring amino acid
  misc_feature (415)..(415): Xaa can be any naturally occurring amino acid
MRSDFKPRRIVVAGGGTAGWMAAAAIAHTMGDAIDLTLVESDAIGTVGVGEATIPPLVLFNRLIGISEADFMRETQATFKLGIEFENWKRDGEKYFHSFGNTGRDHWSAGFQHFWAEGXERGHTVSYDEYCLELVAAYAXKFAHLPENGLNYAYHLNATAYAAYLRRIAEQAGAKRVEGKIGXVDIDGETGNIAAIGLEDGTRLEGDLFVDCTGFRALLIEGALHVGYDDWSHYLPCDSAIAVQTELAGPPVPYTRAIAHDAGWQWRIPLQHRGGNGIVYCSRYLSQDAAHDRLMSTLDGKPISEPRAIPFTTGARRKQWHRNCIAIGLSSGFLEPLESTSIHLIQRAVIRLLRMMPAGDVSERDIAEFNDQQLTDMIQVRDFLILHYKATERRDSPFWRQCATMDIPDSLTQKXELFRETGRVFRKNEELFVENSWIQVMLGQGIMPRAFHPVAKKMTDEELAHFLQTLREKVARTVANLPDHHAYVAQYCGAKTAQAA

SEQ ID NO: 87678 - protein, 497 aa, Microbulbifer marinus
  misc_feature (1)..(497): tr|A0A1H3YC72|A0A1H3YC72_9GAMM Tryptophan halogenase OS =Microbulbifer marinus OX=658218 GN=SAMN05216562_1671 P E=4 SV=1
MSQAIKKIVIAGGGTAGWMTAAALSKLMGTQLDITLVESESIGTIGVGEATIPTLVFFHRLLGIDEAEFLAATQGTYKLGISFENWRDVGKDYIHAFGVTGKDCWACGFQHFWLRARQLGLAGDFGEYCLERRAAEAHKFSHLPNNGLNYAFHMDATRYAAYLRQFSEGFGVKRVEGKIDQVQLHPDTGFIRALKLDSGQEVDGDFFIDCTGMRAILIEKALHTGFESWSHWLPCDSAVAVQTQAVEPPIPFTRSIARESGWQWRIPLQHRVGNGQVYSSSYQSDDSARSQLLENIEGERLTDPLLIKFQTGRRRKQWHKNCLAVGLSSGFLEPLESTSIHLIQQNIVRFLRFFPQSEIRQVEVDEFNRQSEFDMERIRDFIILHYKVTDRDDTEFWRYCRQMSIPDTLAAKIDMFRETGHVFREANELFVDSWQQVMFGQGLMPERYHPLVDTMPEQELADFIRQVKAGVDDALARLKDHNDYLAGFLPGDQQRAG

SEQ ID NO: 87679 - protein, 491 aa, Catenulispora acidiphila
  misc_feature (1)..(491): tr|C7PXC2|C7PXC2_CATAD Tryptophan halogenase OS=Catenul ispora acidiphila (strain DSM 44928 / NRRL B-24433 / NB RC 102108 / JCM 14897) OX=479433 GN=Caci_0530 PE=4 SV=1
MTEQNTVKTANDVDNPDNAEKTRVLVIGGGPGGSTAATLLARQGIEVTLLESAIFPRYHIGESILPSVLPVLDLLGVREEVDNHGFVRKDGAYFEWGPENWDLNFDHLSGASRHSYQVIRSEFDHMLLKNAQAKGVDVREGVKVTEILFHGDRPVAARWSASDNSGAAGTIAFDFLVDASGRAGVMATKYLKNRRYHEAFKNVAVWSYWRDVKPLEVGPKGAIAVCSVPYGWFWAIPLHDGTTSIGLVAKRTTFSDERERLGSIEAVYADAMTQAPRILEMTQGANKIEGYKVEQDYSYVSERKSGPGYVLVGDAAAFLDPLLSTGVHLSTFSALLAAASVSAVLDGELAEQEAVDFYERAYHQAYERLLVVVSFFYNSYNRQTQFFEADKLTRRERHMLNLYESFLHIVTGIEDLDDSIDGGEALEEVAQQIATQKKIDAGHNEAMNSLPDSPRQAVGGLYLELEPRLRIRRTSEAPAGPEPVREARAGL

SEQ ID NO: 87680 - protein, 523 aa, Burkholderia catarinensis
  misc_feature (1)..(523): tr|A0A1J9NIK2|A0A1J9NIK2_9BURK Tryptophan halogenase OS =Burkholderia catarinensis OX=1108140 GN=BFF94_14090 PE =4 SV=1
MQNLVKSILIVGGGSAGWMTASYLSKAYGHKVKISLIEAPSIPKIGVGEATIPNLQKVFFDFLGLKEQDWMPHCNASFKSAIKFVGWNTKSDPDDYFYHMFGQLKEVNGIPLSHYWAHLKNTGQTSEQFAYACYNKAKLLNAKLSPKDRDGKSRMSHAWHFDANLVANYLRDLAVSWGVVHIEGEVVETRLNEDGGIKSVRLQSGAEIAADFFVDCSGFKGLLINQALNEPFIDMSRYLLCDSAVAASITHDDEANGVEPYTSAIAMSNGWTWKIPLLGRFGSGYVYSSSFCSKEAATEDFMKLWGVKEDQVKLNHIKFRTGRNRRAWVKNCVSIGLSSCFLEPLESTGLYFIYAAIYQFAQHFPDATRDPRLADSFNKKIEVMFDDCRDFIQTHYFTTKRNDSDFWRANKHDLKISDSLHEKLSAYNAGLVVCPPVTVNESDYYGNFDLEFSNFWTNSNYYCMFAGLNWVPEKSHPKLVYHDEWMKKALTEFQNLKREEEDLSSTLPTTYDYLKNIRGTYSA

SEQ ID NO: 87681 - protein, 514 aa, Sphingomonas paucimobilis; identical to SEQ ID NO: 86335
  misc_feature (1)..(514): tr|A0A0C9M136|A0A0C9M136_SPHPI Protein/1, contig: SP614 OS=Sphingomonas paucimobilis NBRC 13935 OX=1219050 GN= SP6_14_02620 PE=4 SV=1

SEQ ID NO: 87682 - protein, 505 aa, Caulobacter sp.
  misc_feature (1)..(505): tr|A0A0Q6TQU7|A0A0Q6TQU7_9CAUL Tryptophan halogenase OS =Caulobacter sp. Root342 OX=1736519 GN=ASC62_19640 PE=4 SV=1
MTPNPIRKVLIVGGGTAGWMTAAALAKVLDTKGVAVTLVESDAIATVGVGEATIPPITTFNQILGIDEAEFMRATKGSFKLAIEFRDWLKPGHRYLHPFGAFGLDIEALKFHQFWLRAHHEGWAAPIDDFNLPATAANLGKFALPSKDPGQVMSSIKYAFHFDAGLYAKYLRSYAEKRGVVRVEGKVASVQQHGETGFVTGVTLEGGQVLEADLFVDCTGFRALLIEQTLKTGFEDWGHWLANDRAVALQCEMGGDGLTPVTRATAHEAGWVWRIPLQHRIGTGYVYSSQHISDEDALKTLRSTLDGAPTQEPNFIKFRPGRRKQIWNKNVVAIGLSSGFLEPLESTSIHMIQAGITKLLALFPDKGFNPVEIAEYNRLTILQVELIRDFIILHFHANQRDEPYWKALREMEIPADLKRKMDLFRASGRLFQSDYDLFAEPSWIAVLLGQGVTPERHDPLVDQYDQAFVKAQMARMGALIRQTGEAMPTHEDFVARYCAAPEFAK

SEQ ID NO: 87683 - protein, 522 aa, Sphingomonas paucimobilis; identical to SEQ ID NO: 87071
  misc_feature (1)..(522): tr|A0A0C9M0I9|A0A0C9M0I9_SPHPI Protein/1, contig: SP613 OS=Sphingomonas paucimobilis NBRC 13935 OX=1219050 GN= SP6_13_00120 PE=4 SV=1

SEQ ID NO: 87684 - protein, 503 aa, Erythrobacteraceae bacterium
  misc_feature (1)..(503): tr|A0A2E0Q308|A0A2E0Q308_9SPHN Tryptophan halogenase OS =Erythrobacteraceae bacterium OX=2026738 GN=CL953_01575 PE=4 SV=1
MAIERIVIVGGGTAGWMTAAALSRLAEKRTVAITLIESEAIGTVGVGEATIPPIVEFNQLLGIDEREMMAATQATFKLGIQFANWGQVGESYFHPFGTYGYHMGGIAFHQVWHRARSEGERRPLQIFNLETVAAHFGRFSRTQDFQRDDLPTMNYAYHIDATRYAAFLRAYSEKRGVVRTEGKVVDTTLDPESGFVSSVTMDDGTEVEGDLFIDCSGFRGLLIEQALETGYDDWRHYLPCDRAVALPCEREDGSGPAPFTKATAHSAGWQWCVPLQSRNGNGHVYCSEYMSDDEAHDILVKNLAGKPGAEPNFLRFVTGRRKKAWNRNVIAIGLSSGFMEPLESTSIHLINSGINRLVAILSLDGVTQNQQDTYNRLTDKEYRRIRDFLILHYNATARDDSPFWDYVRTMEVPETLTEKIELFKANGQIFREEDELFNETSWAAVMMGQGIHMDGHGPIAASMVIPELKGELDEMEKSVRFAVQQMPSHAEYVARYCPARVPA

SEQ ID NO: 87685 - protein, 514 aa, Sphingomonas sp.
  misc_feature (1)..(514): tr|A0A516IU92|A0A516IU92_9SPHN Tryptophan 7-halogenase OS=Sphingomonas sp. AE3 OX=2594473 GN=FMM02_10970 PE=4 SV=1
MSIDAFPQHLVILGGGSAGWMAASYLDRVFNRPDRRRLRITLIESPNIGRIGVGEATIPTLLRFAQFLGIDEATLMKRTHATFKHGVRFIDWNGPDSDYFHPFEALDTTRNFNPAPSWLARSAAGVAGPFDMESGIQRQVAIANRAPKRMMDPDYQGSLPYAYHLDAEEFGDLLADIARSRGVSHVSGRVSEVEHSDCGNVKSLVLDDGRQIEGDLFIDCSGFASVLLGKAMEVPFESFSEHLLCDRAVAIPKPYADGEVARPYTTAKAMDFGWAWRIGLQHREGTGYVYSSKFIEPADAERALREWVGVAEDVPARHLAMRVGMPAETWRGNVIGIGLAGGFIEPLESTGLQLVELALEQLVRYFPLSGINPAARSRFNHVMRTRYLELRDFIVAHYCLTKRSDTPFWQAVTDPAHIPPSVASKLALWNDRHPSDDDNEYTKMLFGHFNWAAVYYGMGGATTDAMRNAAAWCPNPGAHLAELAATANHLIAVLPDHALWLEGLKTIPAKEWAA

SEQ ID NO: 87686 - protein, 229 aa, Sphingobacteriales bacterium
  misc_feature (1)..(229): tr|A0A4Q3GFA8|A0A4Q3GFA8_9SPHI Tryptophan halogenase (F ragment) OS=Sphingobacteriales bacterium OX=2044944 GN= EOP48_22390 PE=4 SV=1
MINEDVKHIVVVGGGTAGWITAGLLAAKCVKEQGRNLKITLIESSKIGTIGVGEGTWPSLRTTLRDMGISETEFIRQCDATFKQGACFRKWVDNSEEDFYYHPLMLPSNLGPLNTIVRKLNNSSVIDDFSYSNILCSQEAACERGLAPKNITTPEYQGVLNYAYHLDTNKFSVFIKEHCINKLNINHVVNDVVGTTMGDNGEVDSLLLADNTELVGDFYIDCSGFAGLL

SEQ ID NO: 87687 - protein, 504 aa, Microbulbifer agarilyticus
  misc_feature (1)..(504): tr|A0A1Q2M2N5|A0A1Q2M2N5_9GAMM Tryptophan halogenase OS =Microbulbifer agarilyticus OX=260552 GN=Mag101_04510 P E=4 SV=1
MKSRAIKTLNIVGGGSAGWMTAIYLNRYFNRDVKNYQINVIESPDIGIIGVGEATVHSIRFFFAAMGLDERELMAETNATIKSGIMFRNWMKPVDGNTHEYFHPFDQQQPGGSVDISTAWFVGGRSDRQRYDEGVSLNSHLIKSGQCPKSGSSPQFQAIAPYGYHLDATLLARFLRRKAVEQGVCHIEATVLDAEVEQGEILSVATDQGSFSGDFFVDCTGFRGLLIDKLQKDNWESFSGVLPCDKAVAIQREMPEGATPRPYTVATALSSGWAWQIDLVNRQGSGYVYDSSRLSPEQAESELRSFLGTDASVIKCTHLDMKVGCRKDTWVGNCVAVGLSGGFIEPLESTGLHMIHLGVSLLATHLAGDDGSAVLRASYNEKMRGFYQDLKQFIVLHYCLSNRDDSEFWRNAPATVEGCHWLNSRLPLWKHKICEYQDFAGSYASIFTDTNYRYVLYGMQHYPSPRFSMSDTEVGTIFGRFEQLVGRAKTASMEHDKFLKLVHG

SEQ ID NO: 87688 - protein, 505 aa, Pseudomonas sp.
  misc_feature (1)..(505): tr|A0A1B8V2P9|A0A1B8V2P9_9PSED Uncharacterized protein OS=Pseudomonas sp. AU11447 OX=1843184 GN=A6723_011725 P E=4 SV=1
MLNLSNCRRVAVVGGGSAGWFAALELRKLFLDKVEVVLVEAESLGIIGAGEGSLPNFNRALEHYGLDRTEFMRETHSTHKLGLALEGWRSGAPDDIFLHQFSYSHDGVDLTSWVEPNGSYPLASILINQGYQLQHYPATWKMWQEGASQATAEAFLQSLPAKTPMAYHFDARKLASYLRDIAIKRGVQHINATVESVRLDEQRHVTALVLPDREIEVDFVIDASGLHRLIIGKTLNASWQSYADHLLLNRALPFFIPSQTEHPPLVTRAIAMKHGWMWCIPTLERLGVGYVYCDRYTDKEAAIKEVQDYWGMDIEPANDFAFEPGHYDQVWLGNVMAVGLSSGFVEPLEATSIGQTLDQLARFGELIVACDGIIPQQLIDQFNHEIGRYWDGIRDFLFLHYDTPRNDTEFWRAASNAAAPSTYKELKRTLAHRPPRLMDMEQYQGGPFRMFGVPNWMSVAAPLGILSREATALDLRSLSQEKRQRLGSFLAKVESRMKAESGASN

SEQ ID NO: 87689 - protein, 499 aa, Saprospirales bacterium
  misc_feature (1)..(499): tr|A0A2E4IAK2|A0A2E4IAK2_9BACT Uncharacterized protein OS=Saprospirales bacterium OX=2026790 GN=CMN33_02740 PE =4 SV=1
  misc_feature (137)..(137): Xaa can be any naturally occurring amino acid
  misc_feature (223)..(223): Xaa can be any naturally occurring amino acid
MKITIVGGGTSGWTNALILANDHPHHTFHVIESSKIGIIGVGESTTGYFTKLFNGRYPVSLKDFMFETNATPKYAIRHVNWAPSVNPSYIAPIDGSQSSSFHHDIFFNYGVNYLNRDKFHKISRLGNMLEWNRSLMXAETEDFISTDFAMHIDGQKTSQYFKKHVLKLPNVQLIDTEVENVNLDDNGYIKTLSLANGMTHSADFFIDCSGFNKILIKELEKDXWTSYKKYLPVDTAIPFFTKYEQNETPEPYTSSIAQSSGWLWRGPLAHRRGNGYVFDSNFISSDDAISEVESTLGQKIDPIKTVKFEAGRLNNSWIKNCFANGLCSQFLEPLEATAIHNTIVQAELFSLNFLRNTIEDTCNIDSQKIYNEQFRKTIDDIMHFLVMHYRGGREDTDFWKYVKNECSTELVDTLIGTATSRVPGMVDFPTYYGSGGWPLYSHVMYQLGLINKDVAGSHFGKFYMLDDVANSFHDQVDAWNFDTRNCISLTQLQKLRFKN

SEQ ID NO: 87690 - protein, 490 aa, Erythrobacteraceae bacterium
  misc_feature (1)..(490): tr|A0A2E0Q3R2|A0A2E0Q3R2_9SPHN Tryptophan halogenase OS =Erythrobacteraceae bacterium OX=2026738 GN=CL953_02900 PE=4 SV=1
MVVLGGGSAGWITACLLQREWAARGGSVTVVESSAIGIIGVGEGSTPQLKGFFDHLGIAEAEWMAACDATYKLGIRFTGWSERAGYESYFHPFPGPVDLHSEPGFVHNCMLARRGFDVPAHPDDWFLATDLAQHARGPHPAESFPFAPSYGYHFDAHKLGGFLRAWATQRGVTHLDRKVAEVEVADNGDVTALVCEDGERVEGDLFVDCSGFRSLIAQQALGVKFVPFASNLFNDRAVVMPTPHGDAPKPQTDAIAMRAGWRWRIPLTTRVGNGYVYSSAHITDAVAEAELREALGQPEAEARFLTMKVGRVEETWRGNCLAAGLAQGFIEPLEATALHIVIATALEFAQAYEAGGFTPQHRDAFNASIATRYEGIRDYIVAHYRLNQRTDTDYWRANARNDALSDGLKAMMSAWFRHEDMSRANDAAYAGKRYYANASWHCLFAGYGTFPPTEKMQPVPPGVGVADIEGTRGMIEACRANFASYDPLCA

SEQ ID NO: 87691 - protein, 536 aa, Sphingomonas paucimobilis; identical to SEQ ID NO: 85805
  misc_feature (1)..(536): tr|A0A0C9MU21|A0A0C9MU21_SPHPI Protein/1, contig: SP631 OS=Sphingomonas paucimobilis NBRC 13935 OX=1219050 GN= SP6_31_00130 PE=4 SV=1

SEQ ID NO: 87692 - protein, 93 aa, Sphingobacteriales bacterium
  misc_feature (1)..(93): tr|A0A4Q3GYN2|A0A4Q3GYN2_9SPHI Tryptophan 7-halogenase (Fragment) OS=Sphingobacteriales bacterium OX=2044944 G N=EOP48_15280 PE=4 SV=1
MEHKVKHVVVVGGGSAGWLTAGIIAAEHKSKHDMGVRVTLIESPEVRTIGVGEGTWPSMRSTLERIGISETEFVIECNASFKQGSKFVGWRTG

SEQ ID NO: 87693 - protein, 504 aa, Kordiimonas lacus
  misc_feature (1)..(504): tr|A0A1G7A5U7|A0A1G7A5U7_9PROT Tryptophan halogenase OS =Kordiimonas lacus OX=637679 GN=SAMN04488071_2105 PE=4 SV=1
MTATDRNIKKIAIVGGGSAGWMTAAALSNALQGACEITLVESEEIGTVGVGEATIPPIKIFNQSLGINEAEFVQRTEGSFKLGIEFVNWFKEGHRYFHPFGEYGAPFDAVQLYHYYLKARAEGPVDPIDDYSMAWVMAKNGKFSVPAQDRRMVQSTFDYAYHFDATMYARFLRDYAEARGVKRMEGKVVDVALRGTDGFIESLTLESGTKVDAEFFIDCTGFFGLLIEKTLKTGYEDWTHWLPCDRAVAVPCEHGGEFTPYTRSTAHKAGWQWRIPLQHRIGNGYVYASQHISDDEAQATLLDNLDGTPLADPRLLRFKTGRRKKFWNRNCVAIGLSAGFMEPLESTSLHLIQSGITRLLALFPTLDFDQYGIQEYNRITTGEYERTRDFIILHYKATERRDAPLWQYVADMEIPAELAYKIEQFRRGGRIVAHELELFRNPSWLAVFTGQGIWPERHDPLADARDVDYQGRLQGLRRVMEETAAAMPSHADFITKHCPAKRTT

SEQ ID NO: 87694 - protein, 508 aa, Burkholderiales bacterium
  misc_feature (1)..(508): tr|A0A257CD97|A0A257CD97_9BURK Tryptophan halogenase OS =Burkholderiales bacterium PBB6 OX=2015568 GN=CFE46_136 35 PE=4 SV=1
MQQDIHAAPDSVRNIVIVGGGTAGWMTAAALSKLLPPWRKVRLIESDDIGTVGVGEATIPMIRFFNSSLGIDEDEFIRQTRGTFKLGIEFVNWGQVGERYIHGFGKIGQDEGMVSFYHYWLKQHQRGLARPLEDYSINTAACHDNKFMRARHDLANSPLADIAYAFHFDAALYARFLRDFAVARGVHRTEGIVAQTIQRSADGFIEALVLDSGERVEGDLFIDCSGFRGLLIEQALQTGYDDWTHWLPCDRAVAVPCEHGSTPLLPYTRSTAHAAGWQWRIPLQHRIGNGHVFSSKFMSEDEATSILLANLDGPKLAEPRTLKFVTGKRKKFWNKNVIAVGLASGFMEPLESTSIHLIQSQIARIATFFPDRGFAQADIDEFNRQADFEFERIRDFLILHYQQTRRTDSAFWNYVRTMPIPDTLQAKLDLYRSSGRIFRESTEMFTHVSWLQVMHGQGVHAGSYHPLVDNLDDDALKQYLDNVSGTIAKCVEVMPTHAEVVSHICSER

SEQ ID NO: 87695 - protein, 501 aa, Sphingomonas paucimobilis
  misc_feature (1)..(501): tr|A0A0C9N6J4|A0A0C9N6J4_SPHPI Protein/1, contig: SP650 OS=Sphingomonas paucimobilis NBRC 13935 OX=1219050 GN= SP6_50_01210 PE=4 SV=1
MPDAIRSVLIVGGGTAGWMTAAALAHACPRGLTITLVESDEIGTVGVGEATIPPIRLFNQTLGIDEAEFLRETKGSFKLGIEFVGWGREGHRYFHPFGTHGKSFDLVAVHQHWLAAGGAEGVVPPLDDLSMAWGAAKRGRFAAPMADPHSVASTFDYAYHFDAGLYARFLRRYAEARGVVRVEGRIAGHALEGERGHVASVMLDDGRTLAADLFVDCSGFRGLLIEGALHTGYEDWTHWLPCDRAVAVPCATGGDGLTPYTRSSARAAGWQWRIPLQHRTGNGYVYCSRHISDDEAAATLLAHLDGPALGDPRFLRFTTGRRRLFWNRNVVAIGLSSGFMEPLESTSIHLIQAGVAKLLAYFPTKAFEPPAIEEYNRVAITEYERIRDFLILHYKLTERTDAPLWRECAAMPIPDTLAMKIAHFRDHGRLIARDMDLFGPASWAAVHVGQFNLPRATDPLLAYADPAQSRAFVGKLAGAIGQMAESMPTHADWLRRIGAMA

SEQ ID NO: 87696 - protein, 793 aa, Methylobacterium currus
  misc_feature (1)..(793): tr|A0A2R4WJM2|A0A2R4WJM2_9RHIZ Tryptophan halogenase OS =Methylobacterium currus OX=2051553 GN=DA075_13115 PE=4 SV=1
MRAPGERDGPRRVVIVGAGLAGLLAAAVLKPALRRAQWRIELVGPRPRSAGPAAVATGPDLTRLLRGAGVDEAVLMRRCAGTYRLASRFEDWFEAGTGHWLPLGPTGPRPNGLDLFHYWVRFALAGEGAGAYGDYALNARLAAQARGPSGPDGASPVAEAGDYGFHLDRDALLGFLRDLARAEGVRWTEGRVGGVERDAFGRVTALDLDDGRRVAGDLFLDCSGAAGRLIGTELGEPWLGEAAGERESLWLSLPPDPAWIPATAYRGLGAGWTARLPLADRTACRLVAGTGEAAALARSLGGEASGAAPLRTGHRAAPWRENVVAIGAAAGAVEPLAGLGLSLVLAAVGALIDYLPRGPVEAPLRRAYNARMGRLQAAARDAVALHYGLVRRPEPFWARGRAASLPDSLADRLDLYEAAGCIEEPPGAFDETAYLHTLAGAGHLPQRAFAPADLASRHESERFLAAVRDRIARLTEAMAPHARHLARIHGPLPEPGAAAALRAEPAAPDLLAPLRGSEHGARLLDRVLALGQPFGCERSIKAAGGRLQADRFLLSLHRTALGLDPGRAVGRIAAELGLAAPARAEAAAAIAGADILHLGFEDGPGGPLYKLYVEWSAEADRRWRAGPEPGERPVLVHRAYKWSPLRAADPVVTLYHWPCLRGPDEIALRLEQVADATGGAFALGLAREILAIVRARGSGLPHYLEASEEPGPRLSYDLNLYATGLTVAAVEEVMGRAFAALGVPAAEAGAALAARRGETLGHVAAGLGRDGAPFVTLYSGVRGQDSGARGQER

SEQ ID NO: 87697 - protein, 588 aa, Moorea producens
  misc_feature (1)..(588): tr|A0A1D9FZM7|A0A1D9FZM7_9CYAN Tryptophan halogenase OS =Moorea producens JHB OX=1454205 GN=BJP36_13220 PE=4 SV =1
MNNIQSQEYDVVIMGAGFAGVCQARHLLLNIPNIKIALIDPRPEERTEKDLKIGESMVEIATLFVCKELGLYEYMIDNHPPKFGLSFHWPKDPTKTESTDDYYHIWANRQPPLGSFQMNRAKFERDLLKMNKAMGAIFYQGRVVDVDLTPKDAIKTVKVKKVDGEYIELKAKHVIDGAGRKFIIGRKTDNVLFGPDNLFGLNTGSAWVRVKGVDRTIFHDGYDPNSTTCSHYYATNHWFGHGHWLWMIPTEKESQEISIGIAQHRRVIPDKKINTKEKFYAFLKANHNMLYRLVTSGEAVDFHYLPRPSHTSKTMFSEDNWYVLGDAACIFDPFYSLGTTMIAFAIEGVTEIIRAKLAGEYNAEEKRSAYNQFNLTYTRFNNHLIKEHDKQLGHASVMSWRIYQDYIWWFGVVVPMYLGKWHLDLDFIPRYVKGLQANMNGYSEHLYQQFNELVERGANIGFMDCYRGDQLVWGYNTLEHFDDFLENTKLEPKRCNIFASMKYTSLYNTIWYAKFLWKGFGLSGFIAPKNLYYLFNNLNNTIQIAIGEIIYKHFTKDLPANSKIAKMRQEFTSYQYRAELQPWIKEVA

SEQ ID NO: 87698 - protein, 502 aa, Kordiimonas lacus
  misc_feature (1)..(502): tr|A0A1G7A7S5|A0A1G7A7S5_9PROT Tryptophan halogenase OS =Kordiimonas lacus OX=637679 GN=SAMN04488071_2099 PE=4 SV=1
MQENSIKKLVIVGGGTAGWMAASLLVKLMRGQLEIVLIESDDIGTVGVGEATIPPIQIFNNVLGLNEDEFVKATQGTFKLGIQFENWGAVGDKYMHAFGSIGRQIGMVPFQHYWLRAKEAGFAGDLWDFSFNYQAAKEDRFDRMRQIPNSPLEGITHAFHFDAGLYARYLRKGCELSGVNRIEGMITDVSLDSASGNIASVTLKDGQVVEGDFFIDCSGFRSLLLGQALGVGYTDWTGWLPCDRAVAVPAENGPRMRPYTQSIAHKAGWQWRIPLQHRAGNGHVFCSDHISEDEATQTLLDNLEGKPLADPRVIPFKTGRREKFWHKNCIAVGLSSGFLEPLESTSIHLIQTSIVRFVQMFPSLGLDATNIDEYNEQVGFEFESIRDFIILHYHATQRDDSAFWKRCRTMEIPESLKHKMDLFRETGRIFRFNNELFSEAGWLQVMLGQRVMPKAYHPMADGLSDKQLREYFTNLKTIISGTVPKLPKQVDFIAKHCAAAPM

SEQ ID NO: 87699 - protein, 501 aa, Sphingobacteriales bacterium
  misc_feature (1)..(501): tr|A0A4Q3B7M3|A0A4Q3B7M3_9SPHI Tryptophan 7-halogenase (Fragment) OS=Sphingobacteriales bacterium OX=2044944 G N=EOP53_20170 PE=4 SV=1
GGGNAGWLSANHLGLELSRDPEIKITLIESKDIPVIGVGEGTVPLIRNSLQIFGISEVDLLLQCDATFKTAIKFSNWMSSEKYGNDNFYYHTFDAPFPGGYDVTHYWLGNKADAHYSKLSAAYYVAEKKRSPKRPDSPPYKGLVNYAYHFDAAKFTVLLANNAKKRFGIRHIYETVKNVMLHDDGSVKGFQYESGEHEEFDFYIDCSGFSALLFGKTLKVPFIDKSDVILTDTALALQVSTESDEELFPYTKAAAHNAGWIWDIPLTTRRGTGIVYSSQHMTDDEALKEFSNYHGKDLENSNARKIPMKAGYREKIWEKNCVTLGLANGFVEPLEATSLFITDFCAGMIAKKIPLHKEEMPLFAKSCNEIATLIWERVFDFIQLHYCISDRRDTQFWRDVTEKVALSALLKERLEMWKYSIPQRTDFASTFDFFHTESYLSVLYGMDYPTRAPSVNDAVGHFSKQKISEHLINARNLAGSLMAQRKWLTELKEYAAKNRPA

SEQ ID NO: 87700 - protein, 519 aa, Paraglaciecola psychrophila
  misc_feature (1)..(519): tr|K7AAX8|K7AAX8_9ALTE Uncharacterized protein OS=Parag laciecola psychrophila 170 OX=1129794 GN=C427_0191 PE=4 SV=1
MKTRVVIVGGGTAGWLTAGIIAAKHCLEKSTGKSTENTLTQETEVILVESPDVKNLGVGEGTWPTMRDSLRQIGISERTFLSCCDASFKQASKFVGWSDGENEHYYHPFTAPVGYGAVSIAEHWSATPKDIDFESWVCAQGTICKQNLAPKTPQMPEYAFALNYGYHLNAGKFVKMLHQHCVEKLGVQYIQGHVEHVLPAENGDIASIALVGGEHVEGDLFIDCSGFAAILIGKHYEIPFTSKQNILFNDTALALQVDHASDEVPIASCTVATAQKNGWIWDISLQNRRGIGHVFSSDFTDVEQAEQALLKYVHNDPFLAAQKLSPRKIKFTPGHRETFWHKNCVAIGVSAGFVEPLEATALVLIEKSAEWISQQLPRERSAMTVLAKRFNLLTLQRWQEIIDFLKLHYVLTNRTDSEYWRAHQQPDSIPESLQDTMTLWRTQAPGLYETNQRFELFSSASKQYVLYGMGYHTAREQGDLGRQEASMVKRLRNETLHTTEKLLSVLPSNRQFLSGLKKG

SEQ ID NO: 87701 - protein, 501 aa, Streptomyces caeruleatus
  misc_feature (1)..(501): tr|A0A117RKG6|A0A117RKG6_9ACTN Tryptophan halogenase OS =Streptomyces caeruleatus OX=661399 GN=AQJ67_34735 PE=4 SV=1
MTASYLKAAFGDRIDITLVESGKVGTIGVGEATFSDIRHFFEFLGLKEKDWMPACNATYKLAVRFENWREKGHYFYHPFEQMRSVNGHPLTDWWLQDGPTGRFDKDCFVMASVIDAGLSPRRLDGTLLDSPFDENAEEMQGLTMSEHQGKTQFPYAYHFEAALLAKYLTRYAVERGVRHVIDDVEDVDLDERGWISSVRTAGHGELTGDLFVDCTGFRGLLLNKALQEPFISYQDTLPNDSAVALQVPMDMERRGIRPCTTATAQDAGWIWTIPLTGRVGTGYVYAKDYVSPEEAERTLREFVGPAAADVEANHIRMRIGRSRNSWVNNCVAVGLASGFVEPLESTGIFFIHHAIEQLTKNFPGADFHPTHRDRYNDAVAHVMDGVREFLALHYAAAKRSDTQYWRDTKTRPLPDGLAERIEKWRTQLPDSETVYPYYHGLPPYSYMCILLGMGGIDVKPSPALALADPTAAQLEFEAIREKTEQLTRTLPAAYDYFTQLG

SEQ ID NO: 87702 - protein, 516 aa, Erythrobacteraceae bacterium
  misc_feature (1)..(516): tr|A0A2A4P3J6|A0A2A4P3J6_9SPHN Tryptophan halogenase OS =Erythrobacteraceae bacterium OX=2026738 GN=COC07_03005 PE=4 SV=1
  misc_feature (2)..(2): Xaa can be any naturally occurring amino acid
  misc_feature (46)..(46): Xaa can be any naturally occurring amino acid
  misc_feature (60)..(60): Xaa can be any naturally occurring amino acid
  misc_feature (104)..(104): Xaa can be any naturally occurring amino acid
  misc_feature (108)..(108): Xaa can be any naturally occurring amino acid
  misc_feature (117)..(118): Xaa can be any naturally occurring amino acid
  misc_feature (120)..(120): Xaa can be any naturally occurring amino acid
  misc_feature (187)..(187): Xaa can be any naturally occurring amino acid
  misc_feature (227)..(227): Xaa can be any naturally occurring amino acid
  misc_feature (359)..(359): Xaa can be any naturally occurring amino acid
  misc_feature (424)..(424): Xaa can be any naturally occurring amino acid
  misc_feature (464)..(464): Xaa can be any naturally occurring amino acid
  misc_feature (473)..(473): Xaa can be any naturally occurring amino acid
  misc_feature (502)..(502): Xaa can be any naturally occurring amino acid
  misc_feature (507)..(507): Xaa can be any naturally occurring amino acid
MXSEFNRLVIVGGGTAGWLSACLLAARRPELDVTLVEAPDIPTIGXGEGSWPTLRETLAXIGIDEARFLSACDASFKQGSRFDGWVDGSADDSYYHPFTPPASXPMAXILSAWSAQXXKXASFAGAVTPQIAVCDRDLAPRQRAMPAFTGALNYGYHLDAGKLGALLAEHGTARLGVTHVRAHVTGXERGEDGLLAKLMLRGGDTVEGDFFIDCTGMAARLIGDELXVGWRDRSDVSFNDRALAMQVPVAPGSAIASQTVGTAHKAGWLWDIGLPTRRGIGCVYSSRFLSDEDAEAILADYITAKVPGADPGALAPRKLQFATGHREQFWRGNCLAVGLSAGFIEPLEASAIVLIELSXKALADAYPHSRSALPRLADRFNALFRYRWDRIVDFLKLHYVLSKRGEPYWQAQRDPATIPETLAXQLELWRDHPPSAADFPQVDEIFSAFSQQYVLYGMGFPLPXAARPAPEPXALRRLAEVSERSRALAAALPSNRTYLDTXRAAEXDRGAQGAIA

SEQ ID NO: 87703 - protein, 494 aa, Sphingomonas paucimobilis
  misc_feature (1)..(494): tr|A0A0C9MTJ3|A0A0C9MTJ3_SPHPI Protein/1, contig: SP630 OS=Sphingomonas paucimobilis NBRC 13935 OX=1219050 GN= SP6_30_01870 PE=4 SV=1
MTDNRIRRIVILGGGTAGWMTAAALSRAVAGQGVTITLIESDAIGTIGVGEATIPTIHWFNQIIGLDERQFMAETKATVKLGIEFVGWNGAGSRYFHPFGTFGPPGDGAMFLHRLIRGRADGDAAPTEAYSLTAQAAKAGRFARPVADRRSLLSTLGYAYHFDAGLYARYLRGLAERSGVTRIEGIVASVGQEGESGFIASLTLEDGRTVAGDLFIDCSGLRALLIGETLGVGYDDWSHWLPCDRAWAAPSAAETSLTPFTRATAAEAGWRWRIPLQHRVGNGYVFASRFQDEDAARASLLAGMDGPPLADPRLIRFTPGMRREAWRANVVAIGLSSGFLEPLESTSIHLIQSGIAKLLSLFPAADCSPLLARQFNRVFGQEMHDVRDFLILHYHATAGRDEPMWRERQAMTIPDSLAERIAHFRHSGRIVLSSDELFRDASWFAVLDGQGERAEDHNPLIEAVGRDDNLRHLATLRAEIAKVAASLPPLPARG

SEQ ID NO: 87704 - protein, 496 aa, Paraglaciecola psychrophila
  misc_feature (1)..(496): tr|K6YYT1|K6YYT1_9ALTE Tryptophan halogenase OS=Paragla ciecola psychrophila 170 OX=1129794 GN=C427_2235 PE=4 S V=1
MKNVIKKVVIVGGGTAGWISAALLKRVIGNSLEIELIESEAIGTVGVGEATIPPIRLLNNVLGINEAEFLRETKATIKLGIQFENWRVKDESYFHSFGAPGKSMAFCQFHHFWKRSQLLGDTSSLWDYDLNYLCAMQGKFAQINSKDSILELPYAYHFDASLYANFLRKFSEKMGVKRTEGIVQQVALNNESGFVESLTLKDGQVIAGDLFIDCSGFKGLLIQQQLGTGYDDWSHWLPCDRAVAIPSERFETTLPYTRSIAHSAGWQWRIPLQHRNGNGLVYSSAHYTDAEATDLLLSNLESKPLGDPNLIQFKTGRRRKQWNRNVLAVGLSSGFLEPLESTSIHLIQSAIVRLIHLFPHQGIDNSVVNEYNQQSKVEFEQIRDFLILHYHLNERNDSQFWRDLRNMEVPQSLLHKIQLFADSGKIFREQNDLFLESSWIQVMLGQGIIPKDYHPIANNISDEKLFEMLKSIKNIKHEPLSKLPSHDDFLKKYCEL

SEQ ID NO: 87705 - protein, 323 aa, Paraglaciecola psychrophila
  misc_feature (1)..(323): tr|K7ARM9|K7ARM9_9ALTE Tryptophan halogenase OS=Paragla ciecola psychrophila 170 OX=1129794 GN=C427_2236 PE=4 S V=1
MAERAVSKVVVHRQEKITDVSINDNGNIAALVTESGEHISADFFVDCSGFSAFLMQKTLGVKFNSYKENLFNDSAVVLPTAITDNIPVETQATALSNGWCWKIPLTNRYGNGYVYSADFISSDAAEIELRSHLDCLHGSQSARHLKMKVGQLDKHWERNCLALGLSQGFIEPLEATALHLVQISIELFITEFENGGFGNTHQAAYNSKMSQRFERVRDYIVAHYKLNTRNDSEYWRANRNNPKISDSLGQLLDVWFNRGDMEVEIERQNLSSHFNSTSWHCLLAGYGAFPPLAAKQPNQGDLYKDQKIQTFLHSCSLNFDPNK

SEQ ID NO: 87706 - protein, 516 aa, Kordiimonas lacus
  misc_feature (1)..(516): tr|A0A1G6SVW8|A0A1G6SVW8_9PROT Tryptophan halogenase OS =Kordiimonas lacus OX=637679 GN=SAMN04488071_0009 PE=4 SV=1
MTAQAKNIVIVGGGSAGWITAGLIAARTRASAARPVNVTVIEAPDIPIIGVGEGTWPSMRMTLRTMGINEQDFIAACHASFKQGSKFRQWRKNTPEDFYYHPFDLPEGFEDGDIAAYWLKAGTQSFSRTVCPQEHLCERHFAPKSLTSPGYAGFTNYGYHLDAGTFSVFLRSHATSQLGVTHIADKVLGVVAAENGDIAAVETEASGRIDGDLFIDCTGSRSLLLGGHYGIGLTPKSDILFADTALAVQVPYGEADPVQSTTVATAQPAGWVWDVSLSSRRGVGHVYSSNHMDEEAATECLRGYLGLDDAQFGALSVRKLAIGSGYRQAFWHHNCVAIGLSAGFLEPLEASALMLIETSANMVADALVAESGDLATSRDAFNRDLHQIWDDIIHFLKLHYCLSERTEAFWQDNRQPDSMPASLVADMEAWRQPHQGQAPRYGGGTVFPPASYLYVLYGMGFRPDGTAGTLTPDAQSFGKKCADKVERTVAQLQALLPQNRALLDTLNGAMGTGQGG

SEQ ID NO: 87707 - protein, 504 aa, Pseudoalteromonas sp.
  misc_feature (1)..(504): tr|A0A2A2UYI5|A0A2A2UYI5_9GAMM Tryptophan halogenase OS =Pseudoalteromonas sp. HM-SA03 OX=2029678 GN=CKO50_0914 5 PE=4 SV=1
MKNQKIVILGGGTAGWMAANMMAKSWADKAIEITVVESSSIGTIGVGEGSTPQFKGFMDYLGISEAEWMPACNATYKNGIRFIDWSTKPGFSSYFHPFPAQPDDYSAPAFFHNSFVRRKAIDVEGHPDHFFLATHLADLNKSPIAAESFPFEINYGYHFDSALLGQLLARKAVEFNVKHIDATIIDVRTHVDGDIAALITSDGTEIAGDIFIDCSGFKSLLLQHTLGVGFESFESNLFNDAAVVIPTMQLDTIRSETQSVARQFGWSWHIPLTNRIGNGYVYSQRYCDADQAETELRAALGLLDSEVEARHIKMKVGQVKAHWSKNCIAIGLSQGFIEPLEATALHIVQETVQSFIECYQDADFTDGNRDKHNRALSERYQAIRDYIVAHYRVNSRTDTNYWLDNANNNNLSRSLYQILQTWVSGNNLSDELVRQNVEQYYPSVSWHCLLAGYGIYPEQAQLKSGNALANQHNIEKVNDFIRRCGLNFKDHRMELESFAANVHK

SEQ ID NO: 87708 - protein, 509 aa, Paraglaciecola psychrophila
  misc_feature (1)..(509): tr|K7A9R2|K7A9R2_9ALTE Tryptophan halogenase OS=Paragla ciecola psychrophila 170 OX=1129794 GN=C427_0898 PE=4 S V=1
MSSEIKQIIVLGGGTAGWITAGLLAKKHAAGVKVTLIESPDISTIGVGEGTWPTMRQTLAKLGVPEAKFLKKCHATFKQASKFVNWINTENDTYYHPFTEPQGFNKVDLSPYWREATQGKCSFSQAATFQHYLCENGLAPKSIANKQYEAVANYGYHLDAGQFIELLREHCTAELKVELISDTVSRVLMAENGDIKSLVTNENGELSAELYVDCSGMRSKLLGESLNVPFLPCDDIFFSDTALATQIPYTDIHSPISSCTISTAQDAGWIWDIGLQHRRGVGYVYSSQFCTEEQAYDTLAQYLGDKYKIDKVKKINFTPGHREIFWKNNCVAVGLSAGFLEPLEASALMLVETSANLIAEQLPANTQQMPMVAKRFNASMLMKWRGVIDFLKLHYVLSKRDTPFWVKNRDPSSVPDTLKELLELWRFRSPSEYDFTDNMEAFSAASYQYILYGAGFQTDFSNNAYLYEKSALASKQIMLNRQRLEQLKYSLPRHRDLLEKVNQVGFSAI

SEQ ID NO: 87709 - protein, 151 aa, Sphingobacteriales bacterium
  misc_feature (1)..(151): tr|A0A4Q3F4Y3|A0A4Q3F4Y3_9SPHI Tryptophan 7-halogenase (Fragment) OS=Sphingobacteriales bacterium OX=2044944 G N=EOP48_34035 PE=4 SV=1
MSANTISKVVIVGGGTAGWMTAASLSHAFAHLPISFTLIESSEIGSVGVGEATIPTIREFYQALGISDIEIMRATNATCKLGIEFKDWHTKGKSFFHPFALYGQAVRGIAFHHYWMKLRQAGYAADISEFSLGVMLAKNEKFTFPSENPPS

SEQ ID NO: 87710 - protein, 499 aa, Microbulbifer marinus
  misc_feature (1)..(499): tr|A0A1H3YDF3|A0A1H3YDF3_9GAMM Tryptophan halogenase OS =Microbulbifer marinus OX=658218 GN=SAMN05216562_1664 P E=4 SV=1
MDERIIKNLVILGGGTAGWMTAALMAKVLGKSIGITLVESDKIGTVGVGEATIPPIINFNQALGLNEQEFLQATKGTIKLGIQFEDWYRRGESYMHAFGTVGKNFPFCDFHHFWRRSKLGGNDSSYWDYSLNYQAAIHNKFAPLAQIKGTNLPGLSYAYHFDAGLYAKFLRQYSEGKGVKRIEGTVQDITLRSGDGFVESLLLENGATVAGDLFVDCTGMAALLIDKTLGVEFEEWSKWLPCDRAMAVPSAGSRPLVPYTRSIAHAAGWQWRIPLQHRTGNGIVYSSRHWSDDDAREVLMSNLDGAPLAEPKLIPFRTGRRARQWEKNVVSIGLSSGFLEPLESTSIHLIQSAATRLIKSFPHRGVKPEEVAEFNRQSRVEIERIRDFIILHYKVNQRRDSDFWRDCEEMEIPAALADKIELFRRTGKVFRNYDDLFTEAAWQQVMIGQGIFPEDHHSIADSLSEPQLEDLMHSLKTLVDGSVKSLPDHEQFLFGQKSR

SEQ ID NO: 87711 - protein, 506 aa, Catenulispora acidiphila
  misc_feature (1)..(506): tr|C7PZI2|C7PZI2_CATAD Tryptophan halogenase OS=Catenul ispora acidiphila (strain DSM 44928 / NRRL B-24433 / NB RC 102108 / JCM 14897) OX=479433 GN=Caci_2724 PE=4 SV=1
MSRSDRRILTKRMVFSEMTEVIVVGGGPAGSTAAALLAKNGVSVTLLEREAFPRYHVGESITYSCRGVLDYIGALEKIEARGYTRKTGVLLRWGQELDWAIDWTAQFGPDVRSWQVDREDFDQVLLQHAAECGAQVLEQAQVKRVVFEDGRAVGVEWTPQGHSEPQITRADLVLDASGRAGLISAQHFRDRRATEIFRNVAIWGYWDGGELLPDSPSGSINVISSPEGWYWVIPLSGNRFSVGYVTHKSVFVERRKDYDTLDDMLAAVVAESPTVSEAMAKGTVRPGARVEQDFSYAADSFCGPGHFLVGDAACFLDPLLSTGVHLAIYSGLLAAASVLSIENGDVTETEAYAFYESRYRNSYERLFTLVAGFYQKHAGKDRYFELAKALTREHKGLEGSADLAFGEITSGITDLREAKDDSGLGDRPIRESVAEAASRRSKVQDLLSATEQAQQRAEAGLPNTGGDRGRSRVQIDADDLYDAATGLHLVMEPRLGIQRAAVPAAG

SEQ ID NO: 87712 - protein, 503 aa, Sphingomonas paucimobilis
  misc_feature (1)..(503): tr|A0A0C9N3K5|A0A0C9N3K5_SPHPI Protein/1, contig: SP631 OS=Sphingomonas paucimobilis NBRC 13935 OX=1219050 GN= SP6_31_00110 PE=4 SV=1
MVSDKVRAVVVGGGTAGWMTAAALARLLPGQCNVHLIESEAIGVVGVGEATLPHIRAFNERLGISEADFMARTRATFKLGIEFRDWGRIGDSYIHPFGTFGRGGGAIDFHHYWARLMQGGQDLPPLDQLSYACTLARQGRFDHPGRERDQLSSTFGYAYQFDALLFAPYLRSLAEEMGALRTEGIVIDVERDGESGLIRAVTLGDGQRIEGDLFIDCSGFRSLLLGQTLGEPFEDWSKWLPTDRAVAMPCRTRTAVTPYTSAIAMPAGWRWRIPLQHRTGNGYVYASDFISDDDARDALIEAVEGEPIAEPRLLRFKAGRRQRSWVGNCIAIGLASGFLEPLESTSIYLVQQAITALIEIFPERHPSDADRDEFNRIIDLEYDRIRDFLILHYHATTRDDSPFWNYVRTMPIPDSLAEKMELWRRRARVVKYREGVFLDASWIAVYLGQGIVPQGWDPRADIAATPELTQAVAALRAEIAHDVAARPDHRDFLDRYCPMGAAA

SEQ ID NO: 87713 - protein, 499 aa, Paraglaciecola psychrophila
  misc_feature (1)..(499): tr|K7ABT9|K7ABT9_9ALTE Tryptophan halogenase OS=Paragla ciecola psychrophila 170 OX=1129794 GN=C427_3390 PE=4 S V=1
MKTQYKKINKVVIAGGGTAGWMAAAAFAKLIGKNLEIVLVESDDIPTVGVGEATIPTLHIFHQLLGISEQEFMAATNATFKLGISFENWRDVKKDYLHSFGFLGQGCWAAGFQHFWLKGRERGIASDIGDYVPEHLGAREGKFAVLAGQDLNHAYHLDAGLYAKFLRKIAEKNHAKRVEGKIDKVNLNDKSGFIDSLTLASGQVVEGDLFIDCTGFKGLLIEEALHTGYDDWSHVLPCDSAIAVQTKTVGRPVPYTRAIAHDAGWQWRIPLQNRTGNGFVFCSKYMSDDEAKKTLLANIEGERLNEPRVIKFKTGQRRKHWVKNCVAMGLSSGFIEPLESTGIHLFQRAIVRLLLMFPSQGIKQSDIDEYNVQTKEEAEHIRDFIILHYNLTERKDTPFWRHCSSMEVPESLKHRMTLFKDSGQVFKKADELFGETSWIQVMMGQGLMPEQYHPIVDMMGDDELRDFLNNIKSGVKRKVQNWPDSNDFIKHYCPSSVNT

SEQ ID NO: 87714 - protein, 174 aa, Paraglaciecola psychrophila
  misc_feature (1)..(174): tr|M4RPC2|M4RPC2_9ALTE Tryptophan halogenase OS=Paragla ciecola psychrophila 170 OX=1129794 GN=C427_3386 PE=4 S V=1
MHKPLKKIVIVGGGSAGWLTAGIIAAEHSTDAVSGIEVTLVESADVPTIGVGEGTWPTMRSTLKKMGISETDFLLECDASFKQGTKFINWQTNTNEYYYHPFTLPRGFNETNLAPFWQPFRDKISFADAVCMQSHLGEHDYAPKQISTAEYDFSANYGYHLDAGKFAFFYKNMV

SEQ ID NO: 87715 - protein, 494 aa, Paraglaciecola psychrophila
  misc_feature (1)..(494): tr|K7A672|K7A672_9ALTE Tryptophan halogenase OS=Paragla ciecola psychrophila 170 OX=1129794 GN=C427_0190 PE=4 S V=1
MNAKTKVIVAGGGTAGWLTAYSLVTRLGKLLDITLVESDQIGTVGVGEATIPTIRTFHGLIGIDEKEFMAATQATFKLGIQFDNWGQQGDSFFHSFGEIGKRAWMAEFHEFWMEAKAQGFGGSLDDYCLELKAAKANKFSTMAGKKPVNFAYHMNATAYAAYLRGKSEKAGVKRIEGRIKQVQNDQAGNISSLVLEGGEPVSGDVFIDCTGFRASLIGDNLDVGYEDWSHWLAADSAIAVQTQAVEAPRPYTRSIAHSAGWQWRIPLQNRVGNGIVYASQFLSDDEATGTLLANLSGETITEPRQLRFKTGRRKKAWHKNCIAIGLSSGFLEPLESTSIHLVTTAILRLMKLFPFGGNTTMLAEQFNRETQLELETVRDFVILHYHQTQRNDSAFWDHYRSMEVPDSLVHRMAMFHENGYAWPDDVGLFRVDSWVQVMMGQGLMPKQHHGAGRVLPADGLKQQMMTLRNMIDNTVSQMPAHSDFIQSYCPAQDL

SEQ ID NO: 87716 - protein, 511 aa, Streptomyces viridochromogenes
  misc_feature (1)..(511): tr|L8PAW3|L8PAW3_STRVR Putative Halogenase OS=Streptomy ces viridochromogenes Tue57 OX=1160705 GN=STVIR_5720 PE =4 SV=1
MIVGGGTSGWMTAAYLRAALGDSIDVTLVESRRIKTIGVGEATFSTVRHFFDYLGLPETEWMPKCNATYKLGIRFENWRHQGHYFYHPFERLRVVDGFPLTDWWLQKKPSDRFDQDVFLMSAICDAERSPRYLDGRLFEQDFVEQREGGELERTTLAEQNTQFPYAYQFDASLLADFLTEYATERGARHIEDDVLEVVRDERGWISHLRTREHGDIAGDLFIDCTGFRGMLLNQALEEPFISYQDTLPNDSAVALRVPVDMEVKGLRPCTTATAQEAGWIWTIPLFGRIGTGYVYAGDYITPDEAERTLREFVGPEADELEANHIRMRVGRSRNSWVNNCVAIGLSSGFVEPLESTGIFFIQHGIEELVKHFPDATWDPRLRDAYNQAVANVMDGVREFLVLHYRCAARSDNAYWRDAKTRAIPDGLAARLEAWQAKLPTQETVFPHYHGFESYSYLSMLLGLGGLDLKPAGALALMDDTRVTKEFQLIKDQARELVQRLPSQYEYLAQMH

SEQ ID NO: 87717 - protein, 517 aa, Kordiimonas lacus
  misc_feature (1)..(517): tr|A0A1G6ZJ11|A0A1G6ZJ11_9PROT Tryptophan halogenase OS =Kordiimonas lacus OX=637679 GN=SAMN04488071_1831 PE=4 SV=1
MESDTRKSILVAGGGSAGWMTALYLNRLFNHAEKTVDITVVESPDIGIIGVGEATVHSVRFFFAAMGLDEAELMRETNATLKLGIMFRGWMKPVDGEMHQYFHPFEHQRLGRVLDISSMWFLSGRAATERYDEGVCLSAEMIKRGHGPKGPNTPAYQGVVPYGYHLDATLLARFLRKKAVEAGVVHVEATIDDIDVAGETITAIHTNTGQSFSADWYIDCTGFRGLLIDKVAPDNWDSFEDALPCNRAVALQRELAPGEAPNPYTVATALKNGWAWQIDLTNRQGTGYVYDGNRMTADEAEAELRDFLGPQSRVLKSTHLKMRIGCRKRFWVGNVIATGLAGGFIEPLESTGLHLINLAAGLMGTHLAGTAPTDDSRESFNRLMRGFYQDLKQFIVLHYCLTNRDDTAFWRAAPQTVEHTPWLKAQLEVWKHKVCEYHDLAGAFSTTFTDENYRYILYGMQHTPTLGLVADGAESDRMFSQLRQMQENACALTMTHADYLAKLNGTAEQNLEAKASA

SEQ ID NO: 87718 - protein, 488 aa, Erythrobacteraceae bacterium
  misc_feature (1)..(488): tr|A0A2D9PBM3|A0A2D9PBM3_9SPHN Tryptophan halogenase (F ragment) OS=Erythrobacteraceae bacterium OX=2026738 GN= CL952_06305 PE=4 SV=1
  misc_feature (373)..(373): Xaa can be any naturally occurring amino acid
  misc_feature (385)..(386): Xaa can be any naturally occurring amino acid
  misc_feature (389)..(389): Xaa can be any naturally occurring amino acid
  misc_feature (392)..(392): Xaa can be any naturally occurring amino acid
  misc_feature (398)..(398): Xaa can be any naturally occurring amino acid
  misc_feature (427)..(427): Xaa can be any naturally occurring amino acid
  misc_feature (432)..(432): Xaa can be any naturally occurring amino acid
MSSDYKPRRIVVAGGGTAGWMTAAALAKTMGEAIDLTLVESDAIGTVGVGEATIPPLINFNRLLGINEAEFMRETQATFKLGIEFENWKRDGEKYFHSFGSTGRDHWSAGFQHFWGEGLLRGHDYSYDDYCLELCAAYAGKFAHLPDNRLNYAYHLNATAYAAFLRRIAEGAGASRVEGKIAHVELDGESGNIAAIGLENGQRLEGDIFVDCTGFRSLLIEGALHVGYDDWSHHLPCDSAIAVQTELSASPVPYTRAIAHDAGWQWRIPLQHRGGNGIVYCSRYLSKDAAHDRLMSTLEGKAISEPRAIPFTTGARRKQWHRNCIAIGLSSGFLEPLESTSIHLIQRAVIRLLRMMPAGEVSERDIAEFNDQXLTDMIQVRDFLXXHYXATXRRDSAXWRQCATMDIPDSLTQKMELFRETGRVFRXNDELXVENSWVQVMLGQGILPQAFHPVAKKMSDEELSKFLEMLRTNVARTVQGLPAHHAYV

SEQ ID NO: 87719 - protein, 507 aa, Colwellia psychrerythraea
  misc_feature (1)..(507): tr|A0A099K8J3|A0A099K8J3_COLPS Tryptophan halogenase OS =Colwellia psychrerythraea OX=28229 GN=ND2E_0466 PE=4 S V=1
MIISSSNNSSKNPSIKLVIVGGGTAGWMAANLFAKKWPKQKVEVTLIQSPDVGIIGVGEGSTPTLKRFFEMLDIKEHQWMPRCNATYKVSIRFNGWSPQSGVDSYSHPFPTQVDTFTSRAFQVNCATRRLGLEVNTQAEDFLLNGELAKQNKGPLTPDNFPFKMEYGYHFNSHLLGEFLAEQAVNMGVTLRQEHIINVERHPNGDIAAVQTKSGERIAGDFFIDCSGFSSVMMQKTLGVTFNSFKENLFNDSAVVMTTEMTDVVPVETVSTALSAGWCWKIPLANRFGNGYVYSADFISQNDAELEFRQHLGTEEDKQECRHLKMKVGQLSQHWSHNCLGLGLSQGFIEPLEATALHLVQIGIEYFISQFEKGNFSALHRDHYNQFMTRRFDCVRDYIVAHYKLNTRDDSEYWRANRENSNLSESLIQLLNVWYKREDLATEIERQKLSEHFDSVSWHCLLAGYGAFPALALNQPGTGDLYKDKGISAFLKGCSLNFNNHSDYLTKG

SEQ ID NO: 87720 - protein, 524 aa, Erythrobacteraceae bacterium
  misc_feature (1)..(524): tr|A0A2A4NWP9|A0A2A4NWP9_9SPHN Tryptophan halogenase OS =Erythrobacteraceae bacterium OX=2026738 GN=COC07_07580 PE=4 SV=1
  misc_feature (301)..(301): Xaa can be any naturally occurring amino acid
  misc_feature (407)..(407): Xaa can be any naturally occurring amino acid
  misc_feature (428)..(428): Xaa can be any naturally occurring amino acid
  misc_feature (496)..(496): Xaa can be any naturally occurring amino acid
MNHTHTGEASPQALRSICIVGGGTAGWSAAALLSRVLQGSGCRITLVESSDIPTVGVGEATIPPIFDFLRNIGADEVAFIRRCQATFKLGIQFRDWLQRGHSYWHPFGNLGVTINQRPFHHYYWKNLAEGHDEGLADLCPSVALAEDNKFAFPSPDRNWPGGAVAYALHFDAGLVAAFLREHAEAAGVERLDRRILRAERGEGEHIAAVHFDNGESLSADFYIDCSGFRGLLIEEALEAGFDDWRRWLPCDRAVAAPTAAQSVRAPYTVATARSAGWQWRIPLQHRTGNGLVYCSDFIRDXDAAEELREGLGGPPIANPRVLRFTPGLRKRVWIGNCLALGLSAGFLEPLESTSIHLIHTGLNRLLDLFPDRSFDPVLIDSYNRDVEREYAHIRDFLLLHYYPNQRXGEPFWDHVRNIELPDTLVEKXALFERTGRIMSKHRELFSDISWFYVAAGMGLRPAAIDPLVDVAPFEEVRKVIVQLRDAMGAFRAAAPXHDAILDRLLDPKETRRPNFGAGAGWANR

SEQ ID NO: 87721 - protein, 529 aa, Actinoplanes utahensis
  misc_feature (1)..(529): tr|A0A0A6UP48|A0A0A6UP48_ACTUT Tryptophan halogenase OS =Actinoplanes utahensis OX=1869 GN=MB27_14840 PE=4 SV=1
MSDRIRNVVILGGGTAGWMTAAYLGKALESGVDITVLEAPSIPRIGVGEATVPNLQRAFFDFLGLSEEEWMPECNAAFKTAVKFINWRTPGAGSTQTRQLGDRPDHFYHPFGLLPESGGVPLSHYWFNDLKAGRTTEQFDDACFRETAIMDAGRAPRYLDGRRATRYAWHFDAHLVADFLRRFATEKQGVIHVQDEMTHAVQDSRGHITALHTKSGKVLEADLFVDCSGFRSLLIHQVMREPFLDMSDHLLNDRAVATALPNDDEANGVEPYTSSIAMSSGWAWKIPMLGRHGSGYVYSSRFASQDEATQEFANMWGLDPEKHTFNHVKFRTGRNRRTWVKNVVSIGLSSCFVEPLESTGIYFITAAIHQLAKHFPNRNFDQILIDRFNTEINEMFDDTRDFLQAHFYYAPRTDTPFWRANKELHLADQIKEKVAMYKAGLPVCPPSTSEDGYYGSFEAEFKNFWTNGSYYCIFAGLGLLPDQTMPALAHRPTAVEGARPHFEEIKRLQAELAATLPSNYEYLKQLHRR

SEQ ID NO: 87722 - protein, 503 aa, Brevundimonas sp.
  misc_feature (1)..(503): tr|A0A514BZH8|A0A514BZH8_9CAUL Tryptophan 7-halogenase OS=Brevundimonas sp. M20 OX=2591463 GN=FKQ52_04815 PE=4 SV=1
MSTPPEPIRKVLIVGGGTAGWMTAAALSHVLRGAVQVELVESEAIGTVGVGEATIPPILLFNALLGIDENEFLRETQATYKLGIQFQDWFRKGHAYFHPFGQYGSRVGAASFHQYWLRLQAAGLDDDLDAYSAPAMAARLGRFARPQGDPRSINAAMAYAFHFDASLYARFLRGRAERAGVVRHEGRIADVRMAPNGDIGAVALEDGRVLDADFFIDCSGFRGLLIEGALKTGYEDWTHWLPCDRAVALPCARVEPPTPYTRSTALEAGWRWRIPLQHRTGNGYVYCSEHISDDEALARLRGSIDGECLADPNLLRFHTGRRKKAWNRNCLAIGLSSGFLEPLESTSIHLIQTGITRLLLSFPDTAFSQPDIDNYNHLSQLEYERVRDFVVLHYKATERTDTPLWRQVGAMEIPDSLRRKMELFRSRGRVFRFEDELFQDTSWIAVLLGQGVRPERHDPITEVMPLEATRDHLHRMRALIRDGVERMPTHDDFIRGAVQAAPR

SEQ ID NO: 87723 - protein, 267 aa, Sphingobacteriales bacterium
  misc_feature (1)..(267): tr|A0A4Q3H0S9|A0A4Q3H0S9_9SPHI Tryptophan 7-halogenase (Fragment) OS=Sphingobacteriales bacterium OX=2044944 G N=EOP48_15435 PE=4 SV=1
YEDWSHWLPCDRAVAVQTESVRPSVPYTRSIAHDVGWQWQIPLQHRVGNGLVYSSHYLSDEEAKEKLLNNIQGALLTEPRTIKFQTGRRREVWKKNCVALGLASGFIEPLESTSIHLIMMGVNRLMHLFPFSGVNDALISEYNRLSRIEMEQLRDFIVLHYHTTERNDSAFWNYCRTMSIPETLKLRIDLFKQNAHAYQADGELFRVDSWTQVMIGQRLHPSHYHHLVKMMPETELQKFLNNISASVLQAVEKLPLHADFVRAYCGK

SEQ ID NO: 87724 - protein, 158 aa, Sphingobacteriales bacterium
  misc_feature (1)..(158): tr|A0A4Q3GZ65|A0A4Q3GZ65_9SPHI Tryptophan halogenase (F ragment) OS=Sphingobacteriales bacterium OX=2044944 GN= EOP48_15290 PE=4 SV=1
TSIHLIMMSAMRLVKFFPSNGIKESNVNEYNQQTVTEIERIRDFVILHYHATQRDDTDFWRYCKNMDIPEALAHRVQLFKDTAAIALEEKELFLNDSWVQVMMGQGIMPTSYHPIADVMDEMELKNFLGYLKKSVGEKVAAMPSHQELINRYCKAPAM

SEQ ID NO: 87725 - protein, 535 aa, Alloactinosynnema album
  misc_feature (1)..(535): tr|A0A1H0FWX2|A0A1H0FWX2_9PSEU Tryptophan halogenase OS =Alloactinosynnema album OX=504798 GN=SAMN05192558_1015 54 PE=4 SV=1
MTKSGAAANLTDPGKTKSVVIVGGGTAGWMTAAYLKAAFGDRIDVTVVESAHIGSIGVGEATFSDIRHFFEFLRLEESDWMPACNATYKLGVRFEDWREPGHHFYHPFEQLGSVDGFPLSDWWLRMPQSSRFDRDCFVMAALCDAERSPRYADGTPLAQGVFENVGGGQSARSNIAEYQGAQFPYAYHFEAHLLAKFLTKYGTDRGVKHITDNVVDVALDEQGFVSHVDTAENGRLSGDLYIDCTGFRALLLKQALGEPFVSFQDTLPNNSAVALQVPMDMERKAIRPCTTATAQDAGWIWTIPLISRIGTGYVYADEYLSAEDAEKTLREFVGPEAADIPANHIKMRIGRSERSWVKNVVGIGLAAGFVEPLESTGIFFIHHAIEQIVRYFPGGRDDDVRRDAFNRSIEHVMEGVREFLCLHYVGAKRADNQYWKDTKTRKIPDALAERIEIWKHKVPDSESVYPYYHGLPPYSYNCILLGAGGIEVKHSPALDLADPTAAQVEFDRIRLKADKLVQELPSQNEFFAAMRANAK

SEQ ID NO: 87726 - protein, 293 aa, Sphingobacteriales bacterium
  misc_feature (1)..(293): tr|A0A4V1T899|A0A4V1T899_9SPHI Tryptophan 7-halogenase (Fragment) OS=Sphingobacteriales bacterium OX=2044944 G N=EOP48_20985 PE=4 SV=1
MTEHTTMNSIRKIVIAGGGTSGWLAAAAISKILGKNLDITLIESPEIGRIGVGEATIPTLRVFHKLLGINEQELMASVQGTFKLGIEFSNWGNKGDKYFHSFGLTGKDCWACQFQHFWMAGKKYGINVPFGDYCPESKAARLEKCNGESEGINYAYHFDANLYADYLKAFSVKLGVKHVEGFIDRVNLSPENGFITSLLLKDGQIIEGDLFLDCTGFKAMLIEGALNTPWIPYGHYLPCDSAVAMQTELVRAPRPYTQSIAHDFGWQWRIPLQHRAGNGLVYSSRHVSDDEAI

SEQ ID NO: 87727 - protein, 502 aa, Kordiimonas lacus
  misc_feature (1)..(502): tr|A0A1G7D874|A0A1G7D874_9PROT Tryptophan halogenase OS =Kordiimonas lacus OX=637679 GN=SAMN04488071_2998 PE=4 SV=1
MTAQTIKRVVIVGGGTAGWMAATALSKIMGGVLDITLIESDQIGTVGVGEATIPTLVNYNRLIGIDEQAFMAATKATFKLGIEFVNWKQKGESYIHSFGITGKDHWTAGFWHFWLRGLKEGIDYKFGDYCLELIAAEQSKFAHLPKLGLNYAYHLDATAYAGFLRKMAEEHGAKRVEGKITSVQQNGESGYVESVTLEGGKVIEGDLFVDCSGFRALLIEGALHTGYHDWTHWLPCDSAIAVQTEAVSDPIPYTKSIAHDSGWQWRIPLQHRVGNGLVFCSNYQSDQSAIDTLMSNIEGKPLVDPRVIKFRTGTRRKHWNKNVVAVGLSSGFIEPLESTSIHLIQRSIFRLMQMFPHTGIVQADIDEFNAQTSYEMEHIRDFIILHYHVTERRDTPFWRQCANMDIPDGLKHRIALFRDAGRVFRPNDQLFAENSWVQVMLGQGIMPGQYHPIADRMTDEELHNFLAHIRSNVEKTAMQLPSHNDYVQQYCKATEVMAKGAA

SEQ ID NO: 87728 - protein, 502 aa, Streptomyces sp.
  misc_feature (1)..(502): tr|A0A429A335|A0A429A335_9ACTN Tryptophan halogenase OS =Streptomyces sp. WAC 01420 OX=2203203 GN=DMA10_17835 P E=4 SV=1
MDQAQTEEADVVVVGGGPAGSTLAALVALQGHRVVLLEKERFPRYQIGESLLPATVHGVCRLTGVADELAAAGFTRKLGGTFRWGANPDPWTFSFSVSPRMAGPSSYAYQVERSTFDQILLDHARRLGVDVREGTAVSEVLDDGERVRGVAYTGEDGTRHEILSRYVADASGNRSQIHGSAGGTRKYSDFFRNLALFGYFTGGKRLPQPYSGNILSAAFSSGWFWYIPLSPELTSVGAVVRRDMAQKVQGDPEKALLALIDECPLVKEYLADAERVTTGQYGQLRVRKDYSYQATAYWRPGMVLIGDAACFVDPVFSSGVHLATYSALLAARSVNSVLAGTVDEETAFKEFEARYRREYSVFYEFLVSFYDMNADENSYFWKAKKVTGGSGEEFESFIELVGGVASGETALAGERTTATGLRARSAEFSEAVDRISTGQDATMVPLFRSEVVRNAMREGGQVQNQAMLGEDSEAEAPLFPGGLVSSPDGMFWQHPGSEATAR

SEQ ID NO: 87729 - protein, 500 aa, Erythrobacteraceae bacterium
  misc_feature (1)..(500): tr|A0A2D6NM87|A0A2D6NM87_9SPHN Tryptophan halogenase OS =Erythrobacteraceae bacterium OX=2026738 GN=CL951_07890 PE=4 SV=1
  misc_feature (54)..(54): Xaa can be any naturally occurring amino acid
  misc_feature (105)..(105): Xaa can be any naturally occurring amino acid
  misc_feature (120)..(120): Xaa can be any naturally occurring amino acid
  misc_feature (123)..(124): Xaa can be any naturally occurring amino acid
  misc_feature (333)..(333): Xaa can be any naturally occurring amino acid
  misc_feature (345)..(345): Xaa can be any naturally occurring amino acid
  misc_feature (386)..(386): Xaa can be any naturally occurring amino acid
MSSDYKPRRIVVAGGGTAGWMTAAALAKTMGDAIDLTLVESDAIGTVGVGEATXPPLINFNRLLGINEAEFMRETQATFKLGIEFENWKRDGEKYFHSFGSTGRXHWSAGFQHFWGEGLXRGXXYSYDDYCLELCAAYAGKFAHLPDNRLNYAYHLNATAYAAFLRRIAEGAGASRVEGKIAHVELDGESGNIAAIGLENGQRLEGDIFVDCTGFRSLLIEGALHVGYDDWSHHLPCDSAIAVQTELSASPVPYTRAIAHDAGWQWRIPLQHRGGNGIVYCSRYLSKDAAHDRLMSTLEGKAISEPRAIPFTTGARRKQWHRNCIAIGLSSGXLEPLESTSIHLXQRAVIRLLRMMPAGEVSERDIAEFNDQQLTDMIQVRDFLIXHYKATDRRDSAFWRQCATMDIPDSLTQKMELFRETGRVFRKNDELFVENSWVQVMLGQGILPQAFHPVAKKMSDEELSKFLEMLRTNVARTVQGLPAHHAYVAQFCGAKEVAAA

SEQ ID NO: 87730 - protein, 518 aa, Colwellia psychrerythraea
  misc_feature (1)..(518): tr|A0A1Y5EPF7|A0A1Y5EPF7_COLPS Tryptophan halogenase OS =Colwellia psychrerythraea OX=28229 GN=A9Q75_02975 PE=4 SV=1
MNEQVKQVVVVGGGTAGWLTAANLAKKFNSIESGAIQVTLVESPDIPTIGVGEGTWPTMRKTLAKLGISEADFLSKCNASFKQATKFVNWQKAPKNGINSHYYHLFTSINDPLDFNLAPYWKLGMIGDNNSYADTVSMQAAICESGLAPKLITNREFEGIQNYAYHLDAGLFTDLLREHATSKLGVKHISANVTDVNVDDDGYIKNIHCDSVGAVSGDFFVDCTGFKSLLIGKALGIPFKSIKDTLLCDHALAIQVPYDNEESPIASCTISTAQEAGWTWDIGLSNRRGTGYVYSSAHTSHERAEQVLREYIGPQAEQLESRLIKMNVGYREKFWHKNCFAIGLSAAFVEPLEASAIFLIEASANMLSELFPRDRHAMLAVEKKVNKSFKFRWDKTIAFIKMHYFLSKRTEPFWQDNKAVSTVPETLLASLDSWKHQLMTGYDFDNVYEPFPLDSYQYVLYGMGFEQALTFNESSYSLQDFAKQQYDTVQELTQKMQQQLPENRALLSKIAQYGFQKI

SEQ ID NO: 87731 - protein, 507 aa, Colwellia psychrerythraea
  misc_feature (1)..(507): tr|A0A099K8N2|A0A099K8N2_COLPS Tryptophan halogenase OS =Colwellia psychrerythraea OX=28229 GN=ND2E_0496 PE=4 S V=1
MKKIVVVGGGTAGWLAANHLGKKFKGNGEVTVTLIESPDIAPIGVGEGTVPNIRKTLSSFGISETEFIRECDVTFKQSIKFVNWMDKQKHGNDNFFHHLFDAPDKFSEDLTPYWLKHGQANRYADMLSPQHSACEHNKAPKSITTPEYEGMLGYAYHLNAAKFAHLLCKNAVEKFAIEHIKANVTNVELSNTGSIAALNTKELGKLEFDFYLDCTGFESLLSGKALNVPFVDKSKELLVNSALVVQVPTEETDEIPPYTVATAHQAGWIWDIALTNRRGVGFVYSDNHMSDDEAKAKLDHYLKGNSSGLTYRKLPMKVGHREKFWHKNCVSLGLAQGFLEPLEATSILLTDFAASFLADRFPESNEQMILLEQRFNHVMGYAWDRVVDFIKLHYCISDRTDSKFWMDNQKEETIPGSLKARLDLWQQFSPQKEDFFSKFEVFDYDNYLYVLYGMRYKTQLAYLPSSDHDKAKEQAERIKAIAAQLNLQLPNHRELINKIKKYGLQDV

SEQ ID NO: 87732 - protein, 496 aa, Colwellia psychrerythraea
  misc_feature (1)..(496): tr|A0A1Y5EMA7|A0A1Y5EMA7_COLPS Tryptophan halogenase OS =Colwellia psychrerythraea OX=28229 GN=A9Q75_06925 PE=4 SV=1
MNSPIKKVVVLGGGTSGWISAALLKKILGTAIQLELVESDAIGTIGVGEATIPPIKHLNNVLGINEAEFLRETKATIKLGINFENWKSQGHSYLHSFGAAGKSLAFCHFHHLLKRANQLEDDSHLWQYDLNYLCAKAGKFAHIKSKDPIIELPYAYHFDAGLYANFLRKFSEKIGVIRTEGLVEHVEQCPISGHITSLKLKNGQTVTGDLFIDCSGFKGLLIQEKLRTGYEDWSHLLQCDRAIAVPSERLEKTLPYTRSIAHAAGWQWRIPLQHRNGNGLVYSSSHCSEQQAMDTIMGNLDTKPIADPKIIKFQTGRRYQQWNKNVIAIGLSSGFLEPLESTSIHLVQSAVVRLAHLFPHQGINSSLVDEFNKQSATEFEQIRDFLVLHYHATERTDSDFWQDMRHMKIPDSLAHKIEIFKQSGRLFREQNDLFTDSSWLQVMLGQGIVPQDYHPIANTMSDEKLAEMLRKVKEIKQAPIDKLPSHDEFLRIFCHQ

SEQ ID NO: 87733 - protein, 500 aa, Gammaproteobacteria bacterium; identical to SEQ ID NO: 83121
  misc_feature (1)..(500): tr|A0A2E1UEX3|A0A2E1UEX3_9GAMM Tryptophan halogenase OS =Gammaproteobacteria bacterium OX=1913989 GN=CMP97_0544 5 PE=4 SV=1

SEQ ID NO: 87734 - protein, 517 aa, Streptomyces sp.
  misc_feature (1)..(517): tr|A0A401MXT0|A0A401MXT0_9ACTN Tryptophan halogenase OS =Streptomyces sp. NL15-2K OX=376149 GN=SNL152K_10712 PE =4 SV=1
MESSIKKIVVVGGSVVGWTVAARLAQAFGGTVLVTVLQAPSDLADGVETGQVTAVPPELQRVLFDQLGVAESVWMRSCRASFRAAVRHVNWRTPGAAGATARTLPNGGADHFYRPYADMPECEKYPLSDYWQSRRSQGETVEPYDYACFREPPLMDARKSPRWLDGRAALPYGWHVDTRLFTEFVRDLAVRRLGVRVFRDRLRYAARDADGMISVLHTEQGRTIPGDFFLDCTGKEGLLLNRTLGEPFHPAHDRLLCDSTVTVTVPHDDDTHGIEPFATATAMPYGWTWKMPLPGRFVTGLVYARALTGPDEAARALCELWGLPPARTEVRRTSHRFGRSHRSWVGNCVAAGASACSVEPLGGDGLTEALDTIDRLVRDFPSRDARDAPAARFNRAVEARQTRALDVAQLHYAAAPRTDPGFWRAQRELPLSAALQECVQAFSAGLSAGPGEDVHYGLLAALHTGCPAPRVSIGHRPGARRAAGEHFTRVKRQQRILLETLPSAHAYLRRLHRDAVA

SEQ ID NO: 87735 - protein, 556 aa, Dinoroseobacter sp.
  misc_feature (1)..(556): tr|A0A2D8TNE4|A0A2D8TNE4_9RHOB Tryptophan halogenase OS =Dinoroseobacter sp. OX=2003366 GN=CL945_15305 PE=4 SV= 1
MGEPIKSITIVGGGTAGWMTALILQSYLSRAATGGKAARITLIESPNIPTVGVGEATVPGMPRTLRTAGLSEQEFFKTCNASFKLGVLFANWNTDKHGRQVDYVNPFSGPGVIDGIEQAYYYLQHGAGGQDFTQIFCPHTDLARAGKGPRPLGEKPYTMKIGHAYHLDAGKFANMVRDICVERGVQHIREDVLDVEQDERGYVSALQLDKTGRHEVELVVDCTGFKGVIINQVMKEPFIDYSRYLANDRAMAVQIPHPDPTRIPSMTRAYALGAGWSWRVPLFNRIGTGYVYSSAHRTDEEARDEFVAHLGDTWNGVEPRVIPMRIGRNQNAWVKNVVAVGLSGGFIEPLESTAIHMIDTAVRWLAIYFPDSDYAEPLRKHYNKLVGNLYDEVRDFICLHYALGNRTDSQYWIDAREGLEVPDSLAENLEVWRYALPGPYDLKFDSLFSAGTYQAVLLGKKVYETGFAAPSFAKNLSLSTELWQRHLAKARETSKILVQRMADHHTLLLELRGELQKPAPAPNFVTAQPTVAMPGTPVMTRKPTPPALDEDGASLL

SEQ ID NO: 87736 - protein, 494 aa, Colwellia psychrerythraea
  misc_feature (1)..(494): tr|A0A099L0A7|A0A099L0A7_COLPS Tryptophan halogenase OS =Colwellia psychrerythraea OX=28229 GN=GAB14E_0248 PE=4 SV=1
MNNQKITKIVVAGGGTAGWMSAASLSKLLGKSFDITLVESDGIATVGVGEAAIPTLTAFHRLLGINEQAFMKATHATFKLGINFENWKKGDDEYMHGFGRVGKECWAGEFQHFWLHGKQNNIEFAFDHYSPEIQAAKAEKFALSKKGLNYSYHLDATLYAKFLRTFAEDHGVKRIEGKIIDVAKDSKTGEIKSLQLANGNVIEGQLFIDCTGFVGLLIEKALHTGYEDWSHWLPCDSAVAVQTKSVSAPLPYTRSIARESGWQWRIPLQHRVGNGLVFCSKYLADDDAKTFLIDNIEGEPINQPRVIKFKTGRRRKGWNKNCVALGLSSGFLEPLESTSIHLIMSGVLRLIRLFPFEGISPSAVNEYNQQLTSELEHIRDFIILHYHATQRADTPFWQYCKGMEIPDSLKQRLDLFKETGRIFTSEGELFRVDSWAQVMLGQGVYPEQYHQIAAIMKPHELDKFLSDIRQTIDKAVADLPSHQIFLDQYCRSNH

SEQ ID NO: 87737 - protein, 518 aa, Gammaproteobacteria bacterium
  misc_feature (1)..(518): tr|A0A4Q5QAJ0|A0A4Q5QAJ0_9GAMM Tryptophan 7-halogenase OS=Gammaproteobacteria bacterium OX=1913989 GN=EOO53_05 550 PE=4 SV=1
MDNIIKRIVIVGGGTAGWLVAGVIAAEHPAATGVEVTLIESPDITAVGVGEGTWPTMRSTLQKMGISETELVRECDVAFKQASKFVKWTTGEDDDEYYHPFTLPERYTEINLANSWQTFRDKISFADAVSFQSHICHRHMGPKQITTPEFAGVANYAYHLDAAKFATFLGKHCREKLGVKYIRDNVTKVNPAENGDILSLATQNTGDIEGDLFIDCTGLASILLGKHYQIPFISTRNVLFNDAAFAAQVAYPDPECDIASNTISTAQTAGWIWDIGLPSRRGVGHVYSSSHISDELAEKELRDYFAKDIGRKKADAVDLKKIKFNPGHREVFWHKNCVGVGLSAGFVEPLEASAIILIEISSKIISEQLPETRKAMDVVARRFNAKLTTHWKNIVDFLKLHYVLSKRTDSQYWIDHRNPESVPQSLQDLLEIWSYQTPWFYDEHLRDEMFPSASFQYILYGMGFETKTRLARKSIAAEIQQSEYSFQENSRKTKEFLKGLPTHRDLINKIKEYGLQKI

SEQ ID NO: 87738 - protein, 513 aa, Sphingomonas ginsenosidimutans
  misc_feature (1)..(513): tr|A0A2A4HW89|A0A2A4HW89_9SPHN Tryptophan halogenase OS =Sphingomonas ginsenosidimutans OX=862134 GN=COA17_1456 0 PE=4 SV=1
MAGAMSETSRAVRKVTIVGGGTAGWMAAALLSRLFAGGGFDIRLIESDEIGTIGVGEATIPAIRTFMELAGLDQVEMIRATQATFKLGIEFVDWRAKGTSYIHGFGTIGQDLLWLHTHQFWLKYAARGQAKPFDAYALNCLAARRNRFCMPDARNPDSPLAGLDYAYHFDASLFARHLRAQSEARGVTRIEGRIVDTICRGEDGHVDHVVLADGRTVDGDLFVDCSGMRSLLLGQALGVGYEDWRHWLPCDRALAVPCASIAPLTPYTRSTARDAGWQWRIPLQHRIGNGHVYASDYISDDDAAATLLANLDAAPLADPRPVRFVPGRRLRAWDKNVVAIGLSSGFLEPLESTSIHLIQTALLRLVALFPGEGVKPADVAEYNRQTAFEMTDIRDFIIAHYKVTEREDTPFWAYVKHMAIPDSLAERLELFRTSARFFLHSRAELFREESWVQVLIGQGLAMRHDPMVDLIPDADALAYLRDIEAVIDDVSARMPDHAAFVARNCSAAATPAR

SEQ ID NO: 87739 - protein, 510 aa, Streptomyces sp.
  misc_feature (1)..(510): tr|A0A429JQJ9|A0A429JQJ9_9ACTN Tryptophan halogenase OS =Streptomyces sp. WAC 06725 OX=2203209 GN=DMH15_03005 P E=4 SV=1
MGERAVANSANAGNPANPETYDVVIVGGGPAGSTLGALVARQGHRVLILEKEFFPRYQIGESLLPSTVHGVCRLTGVADDLAAAGFTRKRGGTFRWGATPEPWTFSFSVSEHMAGPTSYAYQVERSKFDEILLRHAGRCGAEVREGCAAADVIADEERVRGVRYTDADGAEREAYGTFVIDASGNKSRLFQRVGGQRTYSEFFRSLALFGYFEGGKRLPEPNSGNILSVAFDSGWFWYIPLSPTLTSVGAVVRREMAEKIQGDQEEALRALIAECPLISEYLADARRVTTGQYGQLRVRKDYSYHQTTFSRPGMLLVGDAACFVDPVFSSGVHLATYSGLLAARSINSVLAGLVDEAVALREFEARYRREYSVFYEFLLSFYEMHHSEQSYFWQAKKVTHHKRSEMEAFVDLVGGVSSGETALTDADAMAERLRADSAEFAGAVDQLAHSEDGSMLPLFKSSVVSQVTREGSQVQMRALLGADAEPETPLLPGGLVSSPDGMFWLPASSG

SEQ ID NO: 87740 - protein, 521 aa, Gammaproteobacteria bacterium
  misc_feature (1)..(521): tr|A0A2E1PQN2|A0A2E1PQN2_9GAMM Tryptophan halogenase OS =Gammaproteobacteria bacterium OX=1913989 GN=CMQ80_0335 5 PE=4 SV=1
  misc_feature (231)..(231): Xaa can be any naturally occurring amino acid
MNDKAIKDIVIIGGGSAGWLAAGIIAAEHNNPKHDVHFINVTLIESPNISSIGVGEGTWPSMRTTLKKIGISETAFIKDCDVSLKQGTLFAGWKNGSDVYTHPFTVPHGYAEHNLVNEWQESSSHIPFAEAVCSQNTLMLRNQAPKNITTPEYSFNLNYGYHLDAGKFAKKLNTHCTEVLGVIHKRAEVVNINSHENGDLKSLQLDSGEIIQGDLFIDCSGSRSLLLGKHXGIPFSSKQKYLFNDSAIASQVPYSSDDDPIASSTLSTAQSSGWIWDIGLPSRRGIGHVYSSSYTDATSAEKELRHHIKNLVGEEIAEHVSTRKIEFSPGHLEKFWHKNCVAIGMAAGFIEPLEASALVLVELSANMIAEQLPQNRKIMDIVSKRFNEKFLYRWDTIIEFLKLHYILTDRDNSEYWRDNVSHESIPASLQEKMDLWKWQGPYHKDTLHIDEMFPSASYQYILYGMGFKTNPGNFRRSNQETSAVALDLFDENAMRTKQLVSSMPTNRDFIAKVHQYGLQKI

SEQ ID NO: 87741 - protein, 520 aa, Colwellia psychrerythraea
  misc_feature (1)..(520): tr|A0A099KKF9|A0A099KKF9_COLPS Tryptophan halogenase OS =Colwellia psychrerythraea OX=28229 GN=GAB14E_3680 PE=4 SV=1
MSVINSQPKKIIILGGGSAGWMTASLLDKAWADKGTEILLIESDLINKIGVGEGSTPSLRLFFNHLGISEQEWMPECNATYKCGISFPGWTNRDDPAYADFPAYIHPFYSKADWKTGNAFMHNARLRRDGIDVPAHPDDYWLQSYLAKHFKGPIASQKLRDEMDYGYHFDSALVGDFLKKRLLNKGLSHLVDTVNDVILNDKGEISSVVTKDNGAHTADIFIDCTGFAARLIRGALKVDFIDYSDCLFNDRAIAIQSPIDCTQDIPSQTTSTALSSGWAWRIPLINRYGNGYVYSSKYLSDGEAEKELRDHIGPSCKNQDARVIKMRLGRLSQHWYKNVLAVGLSQGFIEPLEATALMLIQHTVESFIGDYQDMFAKKRDLCVQQDIYNSQLNKVFESIKDYIVAHYRLNSRTDSQYWRDNRENKNNSARLNALLSAWHTQGADFEAELHNHNAELTYFAPSWYCLFAGKGHFPASLNKPSANTKVAPTAEIIKYCQHVSQQFYNHNEQLEKVYGNRWPK

SEQ ID NO: 87742 - protein, 519 aa, Colwellia psychrerythraea
  misc_feature (1)..(519): tr|A0A099L2C1|A0A099L2C1_COLPS Tryptophan halogenase OS =Colwellia psychrerythraea OX=28229 GN=GAB14E_0249 PE=4 SV=1
MSKVIKNIVIVGGGTAGWLTAGVIAAEHNSKSASGLQVTLIESPEVNTVGVGEGTWPTMRETLDKIGINETDLFRECEASFKQGAKFSKWVTGAEDDYYYHPLVLPQGYTKTDLVFPWQKHRGEISFADAVSYQGHICEQGRAPKLISTPEYAGIANYAYHLNAVKLGQFLRKHCIEKLGVKHVVDHVAEINSADNGDIDSVLTKEHGDITGDLFIDCSGFSSILLGKHFKVPFISKKHILFNDTALAVQVPYPDENSDIASHTISTAQSSGWIWDIGLPSRRGVGYVYSSDHTNEKDAEVELRAYIESSIGKAETDKLNIRKISFNPGHREKFWHKNCVAIGMASGFLEPLEASALVLVELAAAKISREMPATRETMDIVAKRYNRQFLYRWQRIIEFLKLHYILTKRSDSAYWRDNCNAETIPESLQELLTLWEHQPPGPQDFHHVEEVFPSSSWQYVLYGMGFETQESEVSRKFVNEEMAHQFFSENVQLTKKYLSALPSNRELINKIKQYGMHKI

SEQ ID NO: 87743 - protein, 795 aa, Methylorubrum zatmanii
  misc_feature (1)..(795): tr|A0A1W6RMQ3|A0A1W6RMQ3_9RHIZ Tryptophan halogenase OS =Methylorubrum zatmanii OX=29429 GN=B2G69_19640 PE=4 SV =1
MFRSERSAPPRLVVAGGGPAGWMAALYLKRVLRRAGWTITLVGSAPAAGASAALATRPAFTRFLKGFGIDEAIFMRRCAATYRLASRYDDWFAEGQGHWHPFGACGPRIAGRDLFHYWMKLRGEGAEDEAGSYADYAPQALMAAEGRGPRPLADRSSLTESGDYGYHLDRTALVRFLRELALSEGVRGVTGRVREIERNLYGDVGALVLDGGQTVEGDIFLDCTGAAAQLIGTALGEAWVAGSGPGDRVARLSLPRSPEVPPFTAYRGRAEGWTASLPLADRTEHLFVYDIRTTPPDAAAATLRRTFDGQAGIVDAELRHGRRAAPWQRNVVAMGAAAGAVEPLLGFDLDLVLAGLETFLAYLPRQGEGGDVLRRAYAARLNRFHDDAAEAVAAHYVLGRRSEPFWAAARAVMIPDRLADRLDLYELAGHVALNEEAPFSEGDHYLLFSGADFLPRRPFAPVDVADGREIARLLASIRAQSAQIAGAMAPHVRLMDALHGEAPVAAPAVRIAAASAPAGPAALRRTPEGARLADLVAGLGQPFGYERSVKASPAGLQTDRFLMSLHRASLGLTPEATLDRLAAGLGLPERERAEAAGVIGGADILHLGYEDGPSGALYKLYVEWSSRTDAAWTGADEAGAEPMLVHRAYKWKLGGTHPPVVTLYHWPRVRGPEEIAARLTRMAGEWGPAGAPARDTAHAILRLAQERGRGAVHYLEAREEPGLRLSYDLNLYACGLTVADAEPLLGQAFVDLGVPRDAAAMVLRERLQETLGHVAGGVGRDGQPLVTVYSGVAGG

SEQ ID NO: 87744 - protein, 500 aa, Gammaproteobacteria bacterium
  misc_feature (1)..(500): tr|A0A4Q5QAC6|A0A4Q5QAC6_9GAMM Tryptophan 7-halogenase OS=Gammaproteobacteria bacterium OX=1913989 GN=EOO53_01 705 PE=4 SV=1
MREPLEIIVVGGGTAGWMSAVALANATNDQICKITLVESEEIGSVGVGEATLPQIKEFNDRVGINESDMMKFTQATFKLGIEFVNWGRLGASYIHPFGKHGEAIQGNEFHQIWGRVRSQEGIADIGAYSYAIEAGRKHRFDFPVSDGNYINSTYSYAYHFDASLYALFLRQEALKQGVRRIEGKILNVKKHAVSGNIESLTLASGKEISGDFFVDCSGLRSLLLAQELGEEFEDWSPWLLCDRAWALPTSKLEDIPPYTRSTAKAAGWQWRIPLQHRTGNGYVFSSQFSTEQSALDSLEQSINEQAIADARLIKFKAGRYKNSWTKNCVAIGLSSGFLEPLESTSIYLIQVAIQNLLKLFPSKQSNSLAIQEYNRLMDNEYARIRDFLILHYKLNDGSLGDFWQHCKNMEIPKSLAEKLEIFKRRGFVDTYNYGLFSLPSWVSVFIGQGWFQEGFDPFALGLADEDITLQLNKLSTKINIKLADTPTHQAFINQYCAAKA

SEQ ID NO: 87745 - protein, 505 aa, Gammaproteobacteria bacterium
  misc_feature (1)..(505): tr|A0A4Q5QD80|A0A4Q5QD80_9GAMM Tryptophan 7-halogenase OS=Gammaproteobacteria bacterium OX=1913989 GN=EOO53_02 615 PE=4 SV=1
MIKDSGALIQKIVIVGGGTAGWMAAATFARTMGKQVSIQLIESDEIGTVGVGEATIPQIKLFNSLLGVDENDFLKATQGTIKLGIQFNNWGRQGDSYMHAFSGIGIDLGMIDFYQYWLRSIHDGVTSSLWDYSLNTQAAYKNLFAKMERVGETRLPGINYAYHFDASLWAKYLRTYCEHYSVVRIQGKIATTILDPDNGFIESVVLENGDTINGDLFIDCSGFRSLLIEGALKTGYEDWSHWLPCDSAIAVPCASSEILLPYTRATAHSAGWQWRIPLQHRIGNGHVFCSKFMSDDKATQILLDNLDGEALAEPRKLQFVTGKRKKIWNKNCIALGLASGFMEPLESTSIHLIQHALGKLVELFPRKDFAQADADEFNRQLSAEYEHIRDFIILHYHATERTDSEFWNYCRTMEVPASLKRKMNLFRESARLFRDDNELFSEVGWLQVMIGQRIIPKSYHPLADALTAEELKEYLANIKTIVEKAVAVLPTHEAYISKFCAAVKI

SEQ ID NO: 87746 - protein, 492 aa, Gammaproteobacteria bacterium
  misc_feature (1)..(492): tr|A0A2E7DJ18|A0A2E7DJ18_9GAMM Uncharacterized protein OS=Gammaproteobacteria bacterium OX=1913989 GN=CMQ41_01 105 PE=4 SV=1
MQGTNTNKRHVTIVGGGNAGLICALILRRVFSEYEITVVKSEKIGTIGVGEGSTEHWLGFMNFVDIPVAELLVATLGTHKKGIRFEGWTNHTPDYFHSISSLPDGVPHVSNFNGAYAKLLVEGQLFTDAISPLGIKDNKVHAIYPHRAVNQFHFDTQELNDFFISKAKSRQIDFVEGEVKTVNVSEDWIGSVELEDGTKLTSDFWIDASGFNRVLMSCLPDEKWNSFSDYLLTDSAIAFRTPSDESGQIRPYTRSRAMSSGWAWEIPTQTERGNGYVYSSQHCTEEEAISEMEELLDIRISDYKHFQFDPGYLEKAWVGNCVAIGLSGSFVEPLEATSIGTSINQSFALITPLSSFRKGHTWVAKEYNRVFEKMMLNILNMIRLHYISDRDDSSFWVAQQEMPIPDELEHLLGVWSERTPVESDVHGLWNLFGFAHFYYVGQGQGVISPQSAQESINALGLENITDKFLWELRESRNSHPLKDHAETLKELT

SEQ ID NO: 87747 - protein, 506 aa, Sphingomonas ginsenosidimutans
  misc_feature (1)..(506): tr|A0A2A4I467|A0A2A4I467_9SPHN Tryptophan halogenase OS =Sphingomonas ginsenosidimutans OX=862134 GN=COA17_0494 0 PE=4 SV=1
MTGEAAMDGPVRSIVIVGGGTAGWMAATYLARRLGHLRPDITVIESAAIGTVGVGEATVPAIRDFLAAIELGEPEVLRETGGTIKYGIRFDGWKREGHRFFHPFGLYGVAARGVAFHHYWLKMRAAGDATPLSDYCLATQLAERGLFLPPSDRPANDLGVFNFAVHFDASKFAALLRRLAVANNVRHIDARIDAVERDGDDGRVAAVTLDDGRRVAGDLWIDCSGFRSLLLGEALGVPYVDWRHWLPCDRAIAIPCAAADGPTTPFTVATARAAGWQWRIPLRHRVGNGYVYCSDHVDDDAAERALLASLEGEPLAAPNRLRFTTGHRARFWEKNVVALGLASGFLEPLESTSISLIQSGLERFVALFPDKDVDPRLAATYNRQSVLEFERLRDFLLLHYWSNRRVGEPFWDRMRALAPTEGLQIKLDAWRAGGEFVRNEWDTFQDPSWLSMYAGFDDLPARHSPLADQVSERDLADSLSRMRAAIAGTLGHAEPHDAFLARTVGA

SEQ ID NO: 87748 - protein, 541 aa, Bdellovibrionaceae bacterium
  misc_feature (1)..(541): tr|A0A2D6JGE8|A0A2D6JGE8_9PROT Tryptophan halogenase OS =Bdellovibrionaceae bacterium OX=2026715 GN=CL674_05690 PE=4 SV=1
MSEQRVNMDLNQLIDECFDLSFLGTENFARTDYKSILLLGGGTAGYLSALALKKTHPYLDIKIVESSKIPVIGVGESTTTEIIPFLHHFLGIDPVDFFQEVKPTFKLGIQFDWGKKNERPFHFNFFAGHLFENLHYKNHTGSFNWPAQLMYDKKFPVISTGDGGFYSLLNSIPFAYHLENRSLITYLKKKIIENDIAIIDEEITSIERDSEGNLLSLITNSMEKLEADFFIDCSGFRSKLLGDELQEDFISYEDSLFCDKAITFNLSNNMDPAPYTEAITMNCGWCWRIPLRNEDHLGYVFSSKYLSEEDAIEEIKNKFNPNSEQNFKVIPFKTGRHKRALVNNMMAIGNSYAFIEPLESTAIQTLVQSIMILCRLFPKNNNDQISKDAINKEISENWDSFKAFLAVHYKFNEKLDTQFWQEVRQSVSLDRAESIISLYHQKAPLSYTHFGNNHGYTALESLVFNSYSYDSLLMGQGLLPNSQPKPRFSKEELETRLESYKKMSEIAFSQKELFENQELFIEGIWQELFANPDSWINETNV

SEQ ID NO: 87749 - protein, 506 aa, Sphingomonas sp.
  misc_feature (1)..(506): tr|A0A0Q4CPQ5|A0A0Q4CPQ5_9SPHN Tryptophan halogenase OS =Sphingomonas sp. Leaf9 OX=1735674 GN=ASE58_09170 PE=4 SV=1
MAIDQEPVRRVAIIGGGSAGWMTAAALARFLPAGTAVTLVESDAIGTVGVGEATIPQLRLFNHNLGIDEDDFVARTGGSFKLGIEFAGWNGADSRYLHAFGTIGRAVGLVPFQHYWLAAGGGDRPQSLWSHSACAVAAAQNRFDRDPGSPQAPSGVSWAYHFDAARYAAYLRELAEAGGVVRVKGRVVDVAQDGESGLIAGVTLDDGRLVEADFFIDCSGFAALLIGRMAGDRWDDWSALLPCDRALAVPCASVAPITPYTRATARAAGWQWRIPLQERTGNGLVYSSAHLSDDEAAATLLGNLGGAALGDPRPLRFTTGRRQAPWIGNCVALGLAAGFMEPLESTSIHLVQSGIARLLALWPAATPRAADIAEFNRQSAREWLSIRDFLIAHYALNGRDEPFWRERRATPLPDSLAGRIALFEQSGRIVRDEHELFAEVAWLQLLIGQGVVARGYHPLAAALPAERRDQFLDISAQHVAATVARMPTHDQFLRAHCPAPDAKVAA

SEQ ID NO: 87750 - protein, 522 aa, Gammaproteobacteria bacterium
  misc_feature (1)..(522): tr|A0A2A4VSG2|A0A2A4VSG2_9GAMM Tryptophan halogenase OS =Gammaproteobacteria bacterium OX=1913989 GN=COB35_0705 0 PE=4 SV=1
MNTQAIKKIVIVGGGTAGWLAANHLAKNITSKQPDGVEVMLIESPNIPTIGVGEGTVPLMRQSLQALGISETEFITECDATFKQGIKFVNWQNNPIVDKPEYYHHAFDYPNLALTPYWLLHKSKHKNSHESATSFADAVTIQAKICDAGLAPKLITTPEYQGLTAYAYHLDAGKFATILTRNAVEKLGVQHLRAEVRSVNLADNGEIKSLNTDTLGEIEADFFVDCTGFKALLIGDALKVDFVDKSDVLFADHAVTIQIPYDNENAEIPSYTISTALECGWVWDIGLKQRRGIGHVYSSKYISHDQAEAQLRAYVGKAADGVNSRLIAMKIGYREKFWHKNCVALGLAQGFVEPLEATGLLVFDVTAKMLAEQFPSTKAEMPLVAQQFNKNVRKSWDNVIDFVKLHYCISQRNDSQFWLDNRDPNSIPETLKEQLERWKFQPPTQYDFASRFEIFNLENYLYVLYGMNYPTDISLIASRLTNIDNAQQEFTHIAEQAELATSRLPTNRALIEKIHQYGLQKN

SEQ ID NO: 87751 - protein, 519 aa, Sphingomonas sp.
  misc_feature (1)..(519): tr|A0A0Q4CBX6|A0A0Q4CBX6_9SPHN Tryptophan halogenase OS =Sphingomonas sp. Leaf9 OX=1735674 GN=ASE58_16135 PE=4 SV=1
MDSGTGHRQADCRTEGVRVVDEAPGGVRRIVIVGGGTAGWMAAAALSRALGPIGRTVTLVESDAIGTVGVGEATIPPIRAFNAMLDIDEDRFLRETMGSYKLGIEFVDWSRIGARYFHPFGAAGQDFHGVPFHQLWLRHRARGGTTRLTDYSMCTVAAREGRFGIAAPGDRTPLAHIAHAYHFDATLYAALLRRVSEAQGVVRHEGRIVRVDRDGERGDVTALLLEDGRRIAGDLFVDCSGFAGLLIEGALATGYHDWSHWLPMDRALAMPTGRIDPLPPYTRATAHPAGWQWRIPLQHRTGNGHVFASAFTTADAAEALLRAHAPGAPCGDVRSLSFTTGMRRRAWSHNVVALGLAAGFVEPLESTSIHLIQHGILRLLALFPGAAVHPAERDAYNADMARAFAAVRDFVVLHYKATRRDDSAFWRMVQAMTVPDSLAHRIELWRAQGRLIPQEGDVFQVPSWAAVLTGQEWWPAAYDLAVDRLNAASVEAAMADMRAAYRRTALALPAHAAALPAAY

SEQ ID NO: 87752 - protein, 288 aa, Gammaproteobacteria bacterium
  misc_feature (1)..(288): tr|A0A349E9K3|A0A349E9K3_9GAMM Tryptophan halogenase (F ragment) OS=Gammaproteobacteria bacterium OX=1913989 GN =DCS33_08020 PE=4 SV=1
MENNNIRHIVIVGGGTAGWMSAAALSRIIGTQNCKITLIESEQIGTVGVGEASIPPIVEFNNLLGIDADEMLRATQGTFKLGIEFINWGRIGDSYMHPFGVFGRTILNVSFWHYWKKARDLGLSPGLDAYSLNWLAAKQNRFLRAGNVPNSPLSKVPHAYHFDAGLYARFLRKFSTELGVNRIEGLLEQVFQDPESGFITGIKLQDSKLINGDFFLDCTGFRGLLIEQCLGTGYEDWTHYLPCNSAQAVPTEAISEKHPYTKSIAHSIGWQWRIPLQHRTGNGIVYST

SEQ ID NO: 87753 - protein, 515 aa, Gammaproteobacteria bacterium
  misc_feature (1)..(515): tr|A0A4Q5VCP4|A0A4Q5VCP4_9GAMM Tryptophan 7-halogenase OS=Gammaproteobacteria bacterium OX=1913989 GN=EOO52_08 650 PE=4 SV=1
MSTPVKSIVIVGGGTAGWITAGRIAAKYKANPANISVTLIESLTINIIGVGEGTWPTMRNTLIKMGISETDFMRACDATFKQGAKFAKWVDGTPNDFYYHPLMLPQGFSKVDLPPHWQAKFSHQSFSDAVCFQEQLCEKGLAPKLITTPEYASIANYAYHLDAVKFAEFLKNHCTKNLGVRHLLADVTGVISKENGDISALSTATLGNISGDLFVDCTGMSSLLLGKHLQVPFVDKSDVLFIDTALAVQLPYADDESPIASHTISTAQEAGWIWDIGLIRRRGIGYVYSSRHTTHEQAEIALRKYAGSAVDNLATRKIPISAGHRKLFWKNNCVAVGLSAGFLEPLEASAIVLVELSAEMIAEQLPACREVMDITAKRFNETFLYRWDRIIDFLKLHYILSKRSDNKFWVDNRNPQTIPESLQELMQVWRYRSPKNCDFTSNNEVFPAASYQYVLYGMGFKMDSAYLDHSRAPTDEALAMEQINLNSNAIKNALAKLPTNRELINKIHKYGFAKI

SEQ ID NO: 87754 - protein, 495 aa, Gammaproteobacteria bacterium
  misc_feature (1)..(495): tr|A0A4V1ZQ98|A0A4V1ZQ98_9GAMM Tryptophan 7-halogenase OS=Gammaproteobacteria bacterium OX=1913989 GN=EOO53_19 170 PE=4 SV=1
MNKQTINRVVIAGGGTAGWMAAATLTKSLGTQLEVTLIESDEIGTIGVGEATIPTMLSFHHLLGIDEQEFMKAVNGSIKLGISFENWLERGDKYIHSFGKTGKECWAGEFQHFWLKGLEQGIDAPFGDYCLELQAAKEGKFAISKDPWINYAYHMDATAYGKFLRKFSEKLGAKRIEGMIEKVNLNIDTGFIESLQLKSGQIIEGDLFIDCTGFRSVLSEQALHTGYEDWSNWLPCDSAVATQETAVAPPIPLTRAIALDHGWQWKIPLQNRVGTGLVYSSRYQSDDNAKQTLLDNLEGEAFFDPKVIKFRTGRRLKGWNKNCIAIGLAGGFIEPLESTTIFLISSNLIRLMRLFPINGIEQVLVDEFNKQAKAEIELVRDFVVLHFHATRRTDTAFWRHCRTMPIPDSLSSRLDLFLETGRIFIGAEELFRVDSWTQVMIGQGIVPKQYHPVANLMGDDELRRFLNGYRASIQNIITKLPMHGDFLKHYCPTEI

SEQ ID NO: 87755 - protein, 566 aa, Streptomyces globosus
  misc_feature (1)..(566): tr|A0A344TZK9|A0A344TZK9_9ACTN Tryptophan 7-halogenase OS=Streptomyces globosus OX=68209 GN=C0216_11990 PE=4 S V=1
MRPPPGRDGDAYHRLLGRMCRARRLPRPHPRHATQRRTSVARPVQKIVIVGGGTAGWLSAAYLNRAFGSKVEITLVESARIGRIGVGEATVPTLRTTLAFLGMKEEDWMPRTNASFKSAVRFNDWRTPRPGTDRHTFYHPFFTVPEPPVPSYERPFHKRFGRGVSLAHFWTKLRLAGDSRVRETFGDAGMALQHLCELNKAPKPLPGSGAPDPGFRYAYHFDAALMAEYLRDLATGRGVRHVVADVTQVTRDGRGHIDKVITETGAELTGDLFLDCSGFRGLLINQTLEEPFVSAQDWLLCDSAIALPADHHPDGIRPYTSANARPNGWIWEIPLYHREGTGYVYSSRTTTPDQAEQDLRDFLGPRAHDVPGNHIRMRVGHNRRSWVDNCVAIGLSSCFVEPLESTTIALIEYQLALLVLHFPDSELDERRQARYNELMVSAFEDLRDFIVMHYALTDRTDTEFWRAVRENPIPDSLAEKLTEYAESVIIPDGSQLRLFETRSLWAILSGMDFAFTKAPPSVELMSDEAAWQAFEQIDKEREIYAAALPDNRTYLEAVHAGRADSA

SEQ ID NO: 87756 - protein, 505 aa, Sphingomonas sp.
  misc_feature (1)..(505): tr|A0A0Q4CTQ9|A0A0Q4CTQ9_9SPHN Tryptophan halogenase OS =Sphingomonas sp. Leaf9 OX=1735674 GN=ASE58_02895 PE=4 SV=1
MTPLKRILIAGGGSAGWMTAAMFARLFKGRYAITLIESDAIGTVGVGEATIPAIKKFNDLLGLDEDDFLRRTQGSFKLGIRFDDWSRIGSSYVHGFGVIGRDLEWLRCHQYWTKLHRAGAGGPLDDYSINTVAATANRFLRPRADMPDSPIGQIAYAFHFDAGLYAAYLADYARARGVERREGEIVAVGQHPDTGFLSSVTLADGAVIQADLFIDCSGFRGLLIEQTLSTGYESWSHWLPCDRAVAVASERSADFPPYTCSTARPAGWQWRIPLQHRTGNGHVYASRHMDDATAEALLLDHLEEPAVGTPRRLSFVPGKRRKGWVRNCVAIGLSAGFLEPLESTGLHLIQSAILRLVRLMPDAGFDPATIAEYNRQTDFEMERIRDFIILHYKATTRDDTPFWRHVRTMDVPETLARKMALFAANGRIFREDDELFAEESWIQVLIGQGIVPAAPDPLVDVTPAAEIERYLADVRGVIAKCVARMPAHDAFVAHHCAAPSPTGTA

SEQ ID NO: 87757 - protein, 511 aa, Sphingomonas sp.
  misc_feature (1)..(511): tr|A0A0Q4CP61|A0A0Q4CP61_9SPHN Tryptophan halogenase OS =Sphingomonas sp. Leaf9 OX=1735674 GN=ASE58_07920 PE=4 SV=1
MTQRVRRIVVVGGGTAGWLAACRIAAAADRQADAPLSVTLVESPDVATIGVGEGTWPTMRGTLARIGIDEATFLRAADASFKQGSRFDGWRTGGPDDFYYHPFTAPADLPAADLLRGWREGRFAEAVCAQALVCADDLAPRQPAMPPYAGALNYGYHLDAGKFATLLRDTACNRLGVTHVRDHVTAVEAGEGGDIAAVVTRQSGRIAGDLFLDCTGHAALLIGGHYGVGTIDRTPILFNDRALAVQVPVAPDSPIASQTNATAHDAGWLWDIGLPSRRGIGCVYASDHLSDDAAAATLRGYLSRTAPGVDPDHLSFRQLRFRSAHRERFWQGNCVAIGLSAGFLEPLEASAIVLIELSIDALLDRFPVERGAMAHHAQRFNALFRYRWDRIVDFLKLHYVLSDRDTPYWRAHRDPASWTASLQDQLDLWRTQPPSPADFAHADEVFPAASHQYVLYGMGFAPPPAGPLRAAPGADAALHQVRQRSRTLAASLPTNRAYLRVLTPPAGIAHV

SEQ ID NO: 87758 - protein, 526 aa, Gammaproteobacteria bacterium
  misc_feature (1)..(526): tr|A0A2A4QFS8|A0A2A4QFS8_9GAMM Tryptophan halogenase OS =Gammaproteobacteria bacterium OX=1913989 GN=COB83_0873 0 PE=4 SV=1
MSKLTKTVVVVGGGIAGWLTAGRLAAKHQSHKKNGLKVTLIESANIPAVGVGEGTWPTMRSTLRALGISETDFIRECDASFKQGAKFAKWCNGKEDDFYYHPLVLPQGFGKTDMAAHWLARQARSKAGQEQVSSFSDEVCYQEALCERGLAPKTIRTAEFADIANYAYHLDSGKFAIFLQKHCQEKLGITHIIDDVIAVNSITTEQGEKGDISSVTTQNNGEIAGDLFVDCTGFSSLLLGKHYGVPFKSCSDVLFIDTALAVQVPYDSDDADIASHTISTGQDAGWIWDIGLQHRRGVGYVYSSKHSTEAEARAVLANYVGDKFSSLKVRKIPIVSGHREKLWHRNCVAIGLSAGFLEPLEASALVMVELAGQMLSEQLPQSREIMDVVAKRFNEIALYRWQKIIDFLKLHYILSERKEPFWTDNREDDTIPQSLQELMALWQYRAPADHDFTSNNEVFPAASYQYVLYGMGFKSDYRHTPYVLDDIDFAQKQFMQNKKFIDTALSSLPSNRELLNKINKFGFNRI

SEQ ID NO: 87759 - protein, 516 aa, Gammaproteobacteria bacterium
  misc_feature (1)..(516): tr|A0A2E1IC95|A0A2E1IC95_9GAMM Tryptophan halogenase OS =Gammaproteobacteria bacterium OX=1913989 GN=CMQ88_0381 5 PE=4 SV=1
MLLKIVRKSQTICKLNEDLRVSNRPVKKVVIVGGGTAGWMAAASIAKLIGKNLDVTLIESDAIGTVGVGEATIPTMITLHRLLKIDERKFMKAVQGTFKLGISFENWKNVNENYIHSFGFTGKDCWAAGFQHFWLKGKEQGISSEFGDYCNELQAAKQNKFAVIPQNGLNYAFHMDAGLYANYLRKIAEHNGCKRIEGMITEVAKDPQTGNISHVTLESGEAVEGDLFIDCSGFMGLLIDKALQTGYDDWSHYLPCDSAVAVQTKSVAEPIPYTRSIARDAGWQWRIPLQHRVGNGMVFCSKYLTDDQATETLLKNIEGEPLTKPRVIKFRTGQRHKHWNKNCIALGLAAGFLEPLESTSIHLIQRGIIRLLQLFPTQGISESDVTEFNTQMREEFLNVRDFIVLHYHVTEREDTPFWHHCKTMKIPETLKHRIELFKQSGRIFQKENDIFAENSWSQVMLGQGLMPEQYHPIVNMMGDKELENFLNGIKGAVDNLVDQLPSHQQFIDQYCKAPSM

SEQ ID NO: 87760 - protein, 521 aa, Colwellia psychrerythraea
  misc_feature (1)..(521): tr|A0A099K9Z7|A0A099K9Z7_COLPS Tryptophan halogenase OS =Colwellia psychrerythraea OX=28229 GN=ND2E_0497 PE=4 S V=1
MSVISSQPKKIIIIGGGSAGWMAASLIHKAWAKKGTKILLIESDVISKIGVGEGSTPSLRLFFNHLGISEQEWMPQCNATYKCGISFPGWTNTDDPAFADYPAYIHPFYSQADWKTGNAFMHNARLRREGVDVPAHPDNYWLQSYLAKSFKAPIARQQLSDEMDYGYHFDSALVGDFLKKRLLNMGLNHLTDTVDGVELDDSGQISSVITKRNAAQSADLFIDCTGFAARLIRQALNVDFVDYSDCLFNDRAIAIQSPIDCSRDIPSQTTSTALSAGWAWQIPLSNRYGNGYVYSSKYISDEEAEKELRKHIGPSCLGEKARMIKMRLGRLSQHWHKNVLAVGLSQGFIEPLEATALMLIQHTVESFISSYEDMQLSKRDILAQQDIYNSQLNEVFESIKDYIVAHYRLNSRTDSKYWCDNRENKNNSARLKALLSAWSTPGGDFEAELHRHNAELTYFAPSWYCLFSGKGHFPTSLNKPSANTKVAPTTEIIKYCHQVSKQFYNHNEQLEKVYGERLDIL

SEQ ID NO: 87761 - protein, 561 aa, Ruegeria faecimaris
  misc_feature (1)..(561): tr|A0A521EWW2|A0A521EWW2_9RHOB Tryptophan halogenase OS =Ruegeria faecimaris OX=686389 GN=SAMN06265380_11476 PE =4 SV=1
MNNRLRKITIVGGGTAGWMTALILEMVFSRTSAPKDRPRICLIESPNISTVGVGEATVPRMPVTLRQAGISERDFFRETNASFKLGVKFCNWNKDAKGNRIDYVNPFAHGQLLEGLEPAEYFLRFGNGDRDFTQSISPHDDLARLCKGGRPLGQPEFEQRFGYAYHLDAVKFAGMLTRVCTKRGVEHIQDEVKSVELDEQGNVSHLMLEKKGRHDIEMVVDCTGFRGLIINKALGEPFMDYSDYLPNDRAMALQIEHPDPEKIESVTRSTALGAGWTWRVPLFNRVGTGYVYSSAHRTDEQAADEYLEWLGDSGKGATPRVIPMRIGRVRNAWVKNCVAIGLAGGFIEPLESTAIHMIDHAVRWFAEHLPTRDIEPSLRARYNKQMDKLYDEVLDFICLHYRLGNRTDDQYWIDARTEMKIPDRLAENLELWQHRLPLERDIEFATLFDFRVYQTVLLGKQVYDTGYGAGIRDRLRPLKKPIWFQWWKGAKVDLAQILRSMPDHKTLLRDIRGELERPAFGKAAAAKPTVAMPGAAPVPLAVQNMPNFAEIQSGSKDLQLF

SEQ ID NO: 87762 - protein, 496 aa, Gammaproteobacteria bacterium
  misc_feature (1)..(496): tr|A0A4Q5QDB8|A0A4Q5QDB8_9GAMM Tryptophan 7-halogenase OS=Gammaproteobacteria bacterium OX=1913989 GN=EOO53_03 530 PE=4 SV=1
MVQQIQKIVIVGGGTAGWMAAAALSKFFESRKISIQLVESDDIGTVGVGEATVPGIHQFNRYLDISELDFIKATQATFKLGIEFKDWFKQEHTFFHPFADYGLPINGVNFYQCWLKMQKSGYVYDLEDFCLATQIAKQRRFAQVDHDLETPLALYNYAYHFDASLYAKFLRNYAEQRGVIRQQGKIVSVAQNSSTGFIESVTLTDGQVISGQLFIDCSGFAGLLIDKTLKTEYINWSKWLPCDRAIALQTENVEDATPYTSSFALTAGWQWKIPLQHRVGNGYVYSSNVISEDEAIESLLINTSGAKLTSPRVIKFTAGMRKNFFVKNCVALGLASGFLEPLESTSISLIQTGITKLINYFPDMSFDSKKIAEVNRLNEMEYSRVRDFIILHYKANQRNVNDFWKALAAMDVPETLQNKMTAFKKDGTLISYELESFQDASWLSMYNGFKITPEQCIPDANNLDVTKLKQVMEKIKLAIQQGVLHAPTQKEFLSSI

SEQ ID NO: 87763 - protein, 494 aa, Gammaproteobacteria bacterium
  misc_feature (1)..(494): tr|A0A3B8RCT3|A0A3B8RCT3_9GAMM Tryptophan halogenase OS =Gammaproteobacteria bacterium OX=1913989 GN=DCE20_0490 5 PE=4 SV=1
MTNPNSQSNVVIVGGGTAGWMAAAALSKLLGKTLNVRLVESEEIGTVGVGEATIPTLMTLHRLLKIDEAAFLKATQGTIKLGIQFENWQKEGHQYFHSFGYTGEGCWAAGFQHFWLKGQQLGFGDPDYGQYAPELVAAQAEKFGFLKPAALNYAYHMDASGYARFLREIAEANGASRIEGRIVDVLQKDNGDIASVVLANGDTISGDLFIDCSGFYGLLIDKTLGVGFDDYGDWLPCDRAIAVQTQSTRPPRPYTRSIAHSAGWQWQIPLQHRVGNGLVFSSQHYSEDEALHRLRQNITGDERTDPRLIKFQTGQRQAHWVKNCVAIGLSASFIEPLESTSIHLIMRAIIRLMQMYPHQQTSASDIQEFNNQMRAEVEFVRDFIILHYHRNDRTRDPFWRDMANLRIPDTLRHRLDLFQETGRVFQAQGDVFGENSWTQVMLGQGLRPKRYHHIVDMMPEAELKAFLNTQRSRVEAMVKVLPSHQDFLSAYLSP

SEQ ID NO: 87764 - protein, 497 aa, Sphingomonas sp.
  misc_feature (1)..(497): tr|A0A0Q4CJH8|A0A0Q4CJH8_9SPHN Tryptophan halogenase OS =Sphingomonas sp. Leaf9 OX=1735674 GN=ASE58_14030 PE=4 SV=1
MTEEGQGVRVVVVGGGTAGWMTAAGLVGLLPAACTVTLVESESIGIVGVGEATLPHLRLYLERLGIDEAAFMAATEATYKLGIEFCDFGALGDRYIHPFGTYGRPLGGVAFHHYWLRRAAAGAMPPIGAFSAGVTAAEQRRFERPGSDPNDPTTSFGYAYQFDATRFAPFMRDWSEARGATRIEGRIVAVEREGDTVRAVTLDDGQRIEGDLFIDCSGFRSLLLGDALGEPWEDWSHWLPCDRAVAVPCASPAGVIEPYTRATAMPGGWRWRIPLRHRVGNGYVYASGHVSDDEAAAALLAGLDGEALADPRFLRFRAGRRRRSWAGNVVAVGLASGFLEPLESTSIYLVQAAITALIEHFPDGRVAEVDRDGFNAAIDAEYDRIRDFLILHYHATTRDDSPFWNHVRTMTIPTTLADKLALWRGSAQVSKYSHGLFLEPSWVAVYLGQGVLPEGWDPRADRPDAAGLDRALGSLATAIADRVAAMPTHDAALERRA

SEQ ID NO: 87765 - protein, 484 aa, Gammaproteobacteria bacterium
  misc_feature (1)..(484): tr|A0A354VPH6|A0A354VPH6_9GAMM Tryptophan halogenase (F ragment) OS=Gammaproteobacteria bacterium OX=1913989 GN =DDZ32_13695 PE=4 SV=1
ADFSVTLLESPNVPIIGVGEGTWPSMRSTLQKLGLSEIEFLRECDASFKQGTEFVNWSNHDAPARYIHPFSLPSEFASLNLANYWLDQRQHSDFADFVSPQAQVALSGLAPKQCQTPEFAFNVNYGYHFDAGKFAQFLQRHVTQALGVEHVLGHFEQVISDEQGDIAALVLSDGRHIEGDLFIDCTGQRSLLIGEHFGTPLEPVDALLFNNRALAVQVPYADAQAPIASTTRATAQQVGWIWDIGLQSRRGIGYVYSDQYQDLQGAESTLRAYIAATSPGVETASLALRPIEFQPGFRQQFWVRNCVAVGLSAGFVEPLEASALALVEQSANIITDHLPRTRQVMDIVAKRFNEKMHYHWQSILEFLKLHYVLSKRSEPYWQDNARRESCPDALVEKLRLWQQQPPWHEDAPRIDELFPSASYQYVLYGMGFEPAQGGSARASHIREQAKAAQVVRMNRERTEKLRQGLPSNRELLTALVGQSG

SEQ ID NO: 87766 - protein, 522 aa, Gammaproteobacteria bacterium
  misc_feature (1)..(522): tr|A0A4Q5Q5Y7|A0A4Q5Q5Y7_9GAMM Tryptophan 7-halogenase OS=Gammaproteobacteria bacterium OX=1913989 GN=EOO53_11 460 PE=4 SV=1
MLQHNADPTIRSLIILGGGTSGWMTAAALAHFFVPRGVQVTLVESEAIGTVGVGEATLPHLRFFNQTLGIDEQEFMRATGATYKLGIEFSNWGKQGDAYIHPFGDYGQDIRGVAFHHYWLKQYLQGKAYPIDEYSLPIMAAQQNKFLFPSSDERSILSTFSYAYHIDAGLYARYLRNYSEARGVARQEGKVVSVSQTDSGDIKSITLDNGKELAADMFIDCSGFRGVLIEQTLKTGYEDWSHWLPCNRAVAVPTERSASFPPYTKAIARDAGWQWRIPLQHRTGNGVVYCSDFCSDEQALDALLKNLDAPTTADPNFLRFVTGKRKQAWNKNCIAIGLAGGFLEPLESTSIYLIQIAIMKLVEFFPDREFDAAPRAEFNRQLDLEYDRVRDFLILHYHATQRTDSAFWNHCRTMKIPDELAHKMELFRARGHVVQYKQGLFLEPSWVAVYLGQGVIPQAFDSRVNAVSERDCTALMAETHNLVARASGDMPLHEKFLQHHLQVPAAQYASPKARMSLYGVRT

SEQ ID NO: 87767 - protein, 520 aa, Gammaproteobacteria bacterium; identical to SEQ ID NO: 85066
  misc_feature (1)..(520): tr|A0A2D7FW23|A0A2D7FW23_9GAMM Tryptophan halogenase OS =Gammaproteobacteria bacterium OX=1913989 GN=CMP96_0224 5 PE=4 SV=1

SEQ ID NO: 87768 - protein, 507 aa, Gammaproteobacteria bacterium
  misc_feature (1)..(507): tr|A0A4Q5Q823|A0A4Q5Q823_9GAMM Tryptophan 7-halogenase OS=Gammaproteobacteria bacterium OX=1913989 GN=EOO53_06 990 PE=4 SV=1
MNIKRVAIIGGGTAGWLAANHLGVELKHENIEIMLIESEDIGIIGVGEGTVPYIKKSLQRFGISEAELIANCDVAFKQGIKFVDWLSAEKHGAGHFYYHPFSSPYPAGYDVTPYWLANRENLEFSAVTEVIGVAEAMRSPKKISSPPYLGEVNYAYHFNAVKFGKLLAKNAREKLSVKHLITTIVGATKNDDGSIAKLVTSDGGEVEFDFYVDCSGFASLLIDRELQVPFIDKSKQIFTDTAFALQIPSDGMEEIKPYTTATAHKAGWTWDIPLTQRRGTGFVYSSSHMSESQALEEFSKYLQLDVEKLSPRKISMKIGYREKFWCKNCVALGLAQGFVEPLEATSILLTDFSAEILARNFPRNSENIEVLSGYCNKVLSYAWERVIDFVQLHYCISDRDDSDFWQENINSTSLSEILHERLEMWKLNHPKKIDFFSQFDLFNVDNYLFVLYGMKYLTRVPPISTYEAGVSKAQFAQVKQRSEQLAKELPSHREWLSKFERAISNPK

SEQ ID NO: 87769 - protein, 525 aa, Rheinheimera sp.
  misc_feature (1)..(525): tr|A0A0U4V7V8|A0A0U4V7V8_9GAMM Tryptophan halogenase OS =Rheinheimera sp. F8 OX=1763998 GN=ATY27_01540 PE=4 SV= 1
MPSCPPAKTEVLIVGGGAAGWLTAAVLSATHNLDEGVLAAQPRIQVTVLESPDVPTIGVGEGTWPSMRQTLKLIGLSETEFFRCCDVSAKQGSLFVDWTEPGSSYLHPFTLPAGWPEFNLAACWLPFATDIAFADAVTTQYQLSHAGFAPRLPQAPDYQPVLNYGYHLNAGKFTALLQRHCQDKLGVSYIPAHLKEVLLRDDGAIDKLLAMPAGSNDLCAYQADLYVDCTGMQSLLLGQALQTPFTSVKHILFNDSALAVQVPYPDAQTPIASNTISTAQHSGWVWDIGLPTRRGVGFVYASDYCSDDEADACLRSYLTQTVSAELAAAAEPRKLQFQPGYRSGCWQHNCIAVGMAAGFIEPLEASALALVEWSAKTLAAALPLEPALYGLAAAKMNRTFLRHWQQIIEFLKLHYVLSERDTPYWRAHRETASIPQTLQDQLQLWRQQVPQPLDFAYQDLLFPAASYQYVLYGMGALTRTLAAKPSQQARARALFAQNYQDLTKLQQLLPDNRQLLQQLALKHSN

SEQ ID NO: 87770 - protein, 494 aa, Gammaproteobacteria bacterium
  misc_feature (1)..(494): tr|A0A4Q5VG26|A0A4Q5VG26_9GAMM Tryptophan 7-halogenase OS=Gammaproteobacteria bacterium OX=1913989 GN=EOO52_04 950 PE=4 SV=1
MIKSLVILGGGTAGWMTAAAFSQMFRHDTLNILLIESDEIGTIGVGESTIPAIRDFNRLLGIDEQEFIRETRATPKLAIKFSDWGHIGQDYFHPFGQAGHDINAVDFHHHWLSLRHEADIAEFSRFSISAEAAEQGRFSIPSQSNNFWSSTFSYAFHFDAGLYAKYLRKYAEARGVKRVEGKYLSADRNRVTGDIERLNLVSGQQIEADFFIDATGFRALLLNGVLQSPYESWSEWLKCDSAIAIPCATGKPFKAFTHATAHSAGWRWRIPLQHRVGNGSVYSSEYMSKENALDNLLANLEAEPLAEPRYLSFMPGMRQAQWENNCVGIGLSAGFLEPLESTSIYLIQYGIQKLIEYFPVSKDFSLAQKEFNLQLAKEFVRIRDFIIMHYAENQRDDSQFWIDCRNMHLPEGLAYRQAMFRGAGLVDPTQYGLYASVCLGQNVMPEFFDARVSAIPTQQRKKILQGIKHDQEAFILQFPLLVDWLRSSGAIINE

SEQ ID NO: 87771 - protein, 511 aa, Gammaproteobacteria bacterium
  misc_feature (1)..(511): tr|A0A2A5CSQ2|A0A2A5CSQ2_9GAMM Tryptophan halogenase OS =Gammaproteobacteria bacterium OX=1913989 GN=COA74_1304 5 PE=4 SV=1
MKQNSTINNVVIVGGGSAGWMTAAALSKHLPKSINIKLVESDLISTVGVGEATIPAIRIFNQGLGIDEAEFMKETNATFKLAIKFENWARQGDSYFHAFGFYGYPVNGVPFHNYWLKQNNTIKSDSIHDYNLAHQACVANKFAYRQFNPNDEDSRYFYAFQFDATLYAQYLRKISEGRGVERIEGKVVDVLQNTQSGTIESLVLESKKTVSGDLFIDCTGFRALLIDKTLKVGYKDWSHWLPVNNAWAVSTDYPKGATIPPYTRARALSAGWQWRIPQQNRTGDGNVFCDAYISKEEALDEFLSNLEGKPISDPRLIKFRTGMREKLWSKNCVSIGLSSGFLEPLESTSIYLIQASILQLIQNFPNGEENKSNQNEFNSLMKSRYEEARNFLILHYKATEREDTKFWKYCKNMSIPDELAYRIKLFEDRGFVAGKKLDLFSEHSWLAVYFGQRIMPKAYDPRTDNLSMEQINNNLSKIKMGINNSLDKMPTHNETLKAFCPADIATPLKNS

SEQ ID NO: 87772 - protein, 496 aa, Gammaproteobacteria bacterium
  misc_feature (1)..(496): tr|A0A4Q5VF92|A0A4Q5VF92_9GAMM Tryptophan 7-halogenase OS=Gammaproteobacteria bacterium OX=1913989 GN=EOO52_02 965 PE=4 SV=1
MSQQIKKVVIAGGGTSGWCMAMALSQQFGELLDITLIESNEIGTVGVGEATFPTICTFHRMHGIDEKEFLSATAGSIKLGISFENWTRKNDRYIHSFGFIGKSHWLGEFHNYWMAAKSLGYEGQLEDFCFELQAAKHHKFAVTEKPKINYAYHFDASLYARFLRKLSEAKGVKRIEGKISNVKQNLDNGFIESVMMESGENVEGDFFIDCTGFRGLLIEQTLKAGYEDWGHWLRNDSAVALQTDFSGDIPPYTRAIAHGSGWQWKIPLQHRQGTGYVYSSSYITDEDARNTLLDNLDGDIRVELRLLKFNTGRRKKTWVKNCAAIGLAGGFIEPLESTSIHLIQMGVTRLLQLFPFDGCTEAHINHYNEQSRIDYEKIRDFIILHYKATERDDTPYWRDCRDMEIPDSLAHRMELFREAGVVYQDPNEIFPVASWLQVMMGQRIEPKRYNHFPHTMMGKDVMFAELDKLKTNIAEFVETMPSHANFLKTYSPMSWS

SEQ ID NO: 87773 - protein, 505 aa, Gammaproteobacteria bacterium
  misc_feature (1)..(505): tr|A0A2A5D340|A0A2A5D340_9GAMM Tryptophan halogenase OS =Gammaproteobacteria bacterium OX=1913989 GN=COA74_0289 0 PE=4 SV=1
MINQSEVEALKQIIIVGGGSAGWMTAAALTKVLGCNNYSITVIESDTIGTVSVGEATIPHIRAFNSLLEIDEDDFLKHTHGTFKLGIEFVNWKEMGHSYMHPFGAYGTNMHGVPFHHYWLKSQKIQPKDDLLDYCLEGYAAKKNLFSRPLNYPNTPLTSVNYAFHFDATLYAAYLRTYSEKLGASRIEGIVTQINTNNETGFIESLLLENGALINGDLFIDCTGFKGLLIDGVMESPFEDWSQWLPCNSAIAHASESLPDKKPYTISTAQKSGWQWQIPLQNRIGNGHVYSSDFLNQDDALTTLFSNLPSKPMGEPNFLKWTNGKRKKLWVKNCVAIGLSGGFIEPLESTGLQLIQASIERLLSLFPNKSFQQKDIDIFNENADIELKQIRDFIVLHYKLTTREDSPFWKYCKEMSIPDTLQSKIELYKTNGRVFRENNELFAELSWLSVLSGQGIIPQSYHPLVDNTSTENLHIQLSKMKEVVRLCSKKMPTHAEFITKHCSAS

SEQ ID NO: 87774 - protein, 496 aa, Gammaproteobacteria bacterium
  misc_feature (1)..(496): tr|A0A2A4VKJ0|A0A2A4VKJ0_9GAMM Tryptophan halogenase OS =Gammaproteobacteria bacterium OX=1913989 GN=COB35_1350 0 PE=4 SV=1
MKQPIKKIVILGGGTAGWMSAALMKKVIGAAVDIELVESETIGTIGVGEATIPPIRTFNQVLGINEAEFIRETKATIKLGIQFEHWKNIGDSYLHSFGAPGRSSAFCQFHHYFKRAQQLGLKDSLWDYDLNALCAKAGKFAVINSKDPVLELPHAYHFDAGLYAKFLRKFSEKLGVKRTEGLVEQVQQNKQSGYVEALVLKDGSVINGDLFIDCSGMRALLIEDTLKTGYENWDHWLTCDRALAVPSQRFDKTLPYTRSIAHAAGWQWRIPLQHRNGNGLVYSSAHLSDQQAHDLLLSNLESKAIGDAKLFKFNVGRRKQQWHKNVIAIGLSSGFLEPLESTSIHLIQSAIVRLLHLFPHHGIADSSVAEYNKQSKVEYEQIRDFIILHYHVQQRTDSNFWQYLRNMDIPETLQHKIQLFKDNGKLFRDQNDLFLESSWLQVMVGQGIEPLDYHPIANNLSAAQLMDMLSRLKAIKNEPLPKLPSHDDFINNICKH

SEQ ID NO: 87775 - protein, 520 aa, Gammaproteobacteria bacterium
  misc_feature (1)..(520): tr|A0A2E9C6Z1|A0A2E9C6Z1_9GAMM Uncharacterized protein OS=Gammaproteobacteria bacterium OX=1913989 GN=CMD65_02 535 PE=4 SV=1
MKKINKILIIGGGSSGWMTAAALINRFPDKDITLIESENISTIGVGESTVQVFRQYTGMTGLIDEEWMPKCNATYKLSIDFTNWSGDGKTVKYPFGKGTWLNKYKPIDWFIYNQDKNIKNHYSYENFAIGHSELLRQNKMVYEDDHINGWDFNDITGFQLDATLFANYLKTDYSLPRGLNYIQDTIKDVTLDYDGNIKSLISSSDREFEADLFIDCTGFKSLLLGKTLKTPFVSFGKYLLNDKAVATHIPYTDIEQEMVTSTDSYAHKNGWIWNVPLWTNIGKGYVYSSQFLTEDEAEKELKEYLINNTKCSKEIINSLQYSHIQMTPGFHEKSWVKNVCAIGLANGFIEPLEATGLMFIGDAIEFLVDTLAARDGVVNSYDKSIFNKRVRQRAEYFVGFVIGHYAMATKNDTEYWKTITEDIDYLSIDEDWTKYLQVYMLEFFSELINKWQYLKPEDGTPYIMAGFGFNPVVDKIIQSGHHKESNLKLHKDIESYINYQKEYVSQFPNMYNYLKANIYK

SEQ ID NO: 87776 - protein, 491 aa, Gammaproteobacteria bacterium
  misc_feature (1)..(491): tr|A0A2E7DS49|A0A2E7DS49_9GAMM Uncharacterized protein OS=Gammaproteobacteria bacterium OX=1913989 GN=CMQ41_15 695 PE=4 SV=1
MRIVVVGRGNAGFISSLILRRAFPNFPITIIGSQEVPIIGVGEGSQEHLAIFLDYCKLERAEILPASLATLKKGIRFENWGSSFPDYFHAIVGGPQDFSLGSFGFNAEYAELLRTETPISEGLVTKERIFSDETSVNQPFRSVNQYHFDTYELNDYFTLKAKQRNIQVVDGHVEKVNTKDGIIGSVVLKDGSLINGDFWIDASGFNRILMSHLSENNWCSYSDYLLTDSAIAFRTPLDESGKIHPYTRARALSSGWAWEIPTQTQRGNGYVYSSQFCSEEEAVAEMEKLLNVEISEYRTFTFDPGHLKDIWVGNCVGMGLAGSFIEPLEATSIGTTIAQTNGLLQYLASYQPSNDNSRQQYKEGFEALMSNILDMIRLHYVSDREDTPFWKAQKEAPLTESLEKLLDLWKEKVPDVSDIRIKNREMHMFFGSNFYLVAQAQGLLDPQLAEKSLDAYGLSESIKDVMYKIREHHLSSPYEDHAEAIKRLSSN

SEQ ID NO: 87777 - protein, 519 aa, Gammaproteobacteria bacterium
  misc_feature (1)..(519): tr|A0A2E8WQC1|A0A2E8WQC1_9GAMM Tryptophan halogenase OS =Gammaproteobacteria bacterium OX=1913989 GN=CMQ23_0477 0 PE=4 SV=1
MTSPIEHVAIVGGGTAGWLTACILASEFQDSAGHPSVKVTLIESPDIPTLGVGEGTWPSMRTTLQAIGLSETEFLTTCAASFKQGTLFEDWLESGHQYIHPFTPPLKDGVTDLASAWQGPNSEFSFAWSACPSAGLAFGDKAPKQITTPEYAFAANYGYHLDAGAFAKLLTEHGVKRLGIQHHLLNIKETKSTLAGTIEALIAEGGDTIKADLYIDCSGSNALLLSRILEVPLLKKSNILFNNAALAVQVPHLAQDSPIASSTRSTAMDHGWIWDIALKHRRGIGYVHSSTFVDERDAELTLRRYIAKEFNAEIANEIAPRKLTFEPGYRNCFWKQNVIAIGMSSGFIEPLEASALVMVETSAWLLAKNLPTCLEDMTSSADRFNQGLSRHWERIIHFLKLHYVLSKRPGAYWDAHRDPLSWPDSLVEDLRGWANRPIDYADADRISDLFPAASYQYVFHGMGRPVGHDHRARKSLLKTTAAAPRMTAELSKKQKALFDAMPTNRGLLEKIHTFGLPTI

SEQ ID NO: 87778 - protein, 500 aa, Sphingomonas ginsenosidimutans
  misc_feature (1)..(500): tr|A0A2A4I183|A0A2A4I183_9SPHN Tryptophan halogenase OS =Sphingomonas ginsenosidimutans OX=862134 GN=COA17_0371 0 PE=4 SV=1
MAAEGAKAMRVVIVGGGTAGWMTAAALARLVPAAQAEIVLVESDEIGIVGVGEATLPHIRAFNTRIGIDEADFMRATGATFKLGIEFRDWARIGDSYIHPFGVFGRDTDGVGFHHYLARAGQIERLQDFSLPVVAARGARFAPPADDPESLLSTYGYAYQFDATRYAPYLRVRAEADGAQRIEGRVVAVDRDADGGRVTAVRLADGRAVAGDLFVDCSGFRALLIGDTLREPFEDWSRWLPCDRAVAVPCASQGPLLPYTSAVAMPAGWRWRIPLQHRVGNGYVYSSAHVDDDAARDALLAAIEGPALAEPQLLRFHAGRRPRGWVDNVVAIGLAGGFLEPLESTSIYLIQIAITALVELFPDGAIDPADRDEFNRVLGIEYDRIRDFLILHYHATERDDAPFWTRMRTMEVPDTLARKMALFRARGRVETYREGVFLEPSWIAVYLGQRIVPEGYDQRADAPDAAGLARAVERLHAVTAAAARAMPDHREYIATIGAAA

SEQ ID NO: 87779 - protein, 510 aa, Gammaproteobacteria bacterium
  misc_feature (1)..(510): tr|A0A4Q5Q5A0|A0A4Q5Q5A0_9GAMM Tryptophan 7-halogenase OS=Gammaproteobacteria bacterium OX=1913989 GN=EOO53_13 625 PE=4 SV=1
MKIKRIAIVGGGNAGWLAANHLGVELSRDPEIEITVIESKDIPVIGVGEATVPLIRTSVQSFGISEVDLLLHCDATFKTAIKFANWMSTEKYGKDNFYYHTFDAPFPNGYDVNNYWLGNREEAYYSKLSPAYYIAEWNRSPKRTDSPPFKGMVNYAYHFDAAKFTTLLAANAKKRFNVRHIYETVKEVILQDDGSVKGFEYDSGEYEEFDFYVDCSGFASLIFGKTLKVPFVSKNDIILTDTALALQVPTAPDEDIFPYTKATAHEAGWLWDIPLTTRRGTGFVYSSNHMSDDDALKGFSKYHGIDIEKMNPHKIPMRAGYREKIWVKNCVSLGLANGFVEPLESTSLFVTDFCAGMIAKKLPLNTEELHLFAKPCNEITTHIWERVFDFIQLHYCISDRRDTQFWRDVTENVEMSSLLKERLEMWKYSVPQRVDFPSTFDFFHTESYLSVIYGMDYPTRAPSVNDMVGNFSKQKIAEHLVNSKKLADSLMPQRKWLTELKEYVAKNRPS

SEQ ID NO: 87780 - protein, 494 aa, Gammaproteobacteria bacterium
  misc_feature (1)..(494): tr|A0A3C0KZ74|A0A3C0KZ74_9GAMM Tryptophan halogenase OS =Gammaproteobacteria bacterium OX=1913989 GN=DCL32_0501 0 PE=4 SV=1
MTNPNPQSNVVIVGGGTAGWMAAAALSKLLGKTLNVRLVESEEIGTVGVGEATIPTLMTLHRLLKIDEAAFLKATQGTIKLGIQFENWQKEGHQYFHSFGYTGEGCWAAGFQHFWLKGQQLGFGDPDYGQYAPELVAAQAEKFGFLKPAALNYAYHMDASGYARFLREIAEANGASRIEGRIVDVLQKDNGDIASVVLANGDTISGDLFIDCSGFYGLLIDKTLGVGFDDYGDWLPCDRAIAVQTQSTRPPRPYTRSIAHSAGWQWQIPLQHRVGNGLVFSSQHYSEDEALHRLRQNITGDERTDPRLIKFQTGQRQAHWVKNCVAIGLSASFIEPLESTSIHLIMRAIIRLMQMYPHQQTSASDIQEFNNQMRAEVEFVRDFIILHYHRNDRTRDPFWRDMANLRIPDTLRHRLDLFQETGRVFQAQGDVFGENSWTQVMLGQGLRPKRYHHIVDMMPEAELKAFLNTQRSRVEAMVKVLPSHQDFLSAYLSP

SEQ ID NO: 87781 - protein, 497 aa, Sphingomonas sp.
  misc_feature (1)..(497): tr|A0A0Q4C8H9|A0A0Q4C8H9_9SPHN Tryptophan halogenase OS =Sphingomonas sp. Leaf9 OX=1735674 GN=ASE58_14020 PE=4 SV=1
MTDRRIAHVVIIGGGTAGWMTAAAAGRFLDDGQRRITLVESDAIGTVGVGEATIPSILNFNNLLGIDEGEFLRETKGSFKLGIEFAGWHRPDSGYFHPFGSFGRDIEGINFHQLWLKLRGEAGIGPIADYSPSTVAARAAAFSPPVGDPRSPLSGMAYAYHIDATLYAAFLRRRAEAEGVKRVEGRIVAVERADNGHVAAVVLDDGRRVEGELFIDCSGFRSLLLGDAMGVGYEDWSHWLPCDRAIAVPTERTEPVLPYTRATAHQAGWQWRIPLQHRTGNGVVYCSRFLDDDAAEALLLSRLDSAPTAAPRRLSFTAGQRHRMWEGNVVAIGLSGGFLEPLESTSIHLIQQGISKLFALFPDRDFSGVERTEYNRQMADNYRSIRDFIILHYHATARDDSPFWHHVRTMDVPNSLTRKLDLFRRKGRIFRYDDELFATPSWVAVLLGQGVDPVGHDPVADALDGERLAGALRQMRSATQSAVAGLPSHGAVLARLG

SEQ ID NO: 87782 - protein, 458 aa, Streptomyces auratus
  misc_feature (1)..(458): tr|J2K685|J2K685_9ACTN Tryptophan halogenase OS=Strepto myces auratus AGR0001 OX=1160718 GN=SU9_04076 PE=4 SV=1
MRAGTQVLVIGGGPAGSTAAGLLARQGVQVTLLERETFPRYHIGESILPSCRPIFELLGVWDKVEAFGFQPKGGAYFSWGPDEWEVRFAELGADGANAWQVTRADFDKLLLDHSRELGVDVHEGVTVKKIEFDGDRPVAARWAGGGKTGRLTFDYLVDASGRRGVMATKYLGARKFHSVFRNVATWSYWKNAKSLDRGPAGSITVASVPDGWFWAIPLHDGTTSVGLVTGRDTFNRRRREQGGIEAVYDDALRQCPLVQELLAGAERVSDFKTEQDYSYTSETFHGPGYLLCGDAACFLDPLLSTGVHLATYSAMLAAAAIGSVLRGEVEESEAWAFFDGVYRSSYERLLVLVSVFYESYRGKEFHFYNAQRLSAEDRDALDLQASFDHIITGIADLKDAEDVYRRVRQHLGGAESGDPNPLANLNKEHELKVAPISPDRAVSGLYLSYRPQLSLRRA

SEQ ID NO: 87783 - protein, 533 aa, Sphingomonas sp.
  misc_feature (1)..(533): tr|A0A4R2P8S1|A0A4R2P8S1_9SPHN Tryptophan halogenase OS =Sphingomonas sp. BK235 OX=2512131 GN=EV292_11044 PE=4 SV=1
MNEHTIRHVVILGGGTAGWMAAAALSRFLNNGVTRITLVESEEIGTVGVGEATIPPLLTFNRMLGIDEQDFIRATGGTFKLGIEFVDWGGLGERYFHPFGAHGHDLGGVHFHQLYLRERQRRVMHDISAWSMSAVAAQAGKFAPPSPSAQSAVKELLYAYHFDAARYADFLRGYAERNGVRRVEGKVTAVAQRPEDGYVTALRLEDGQVIAGELFVDCSGFRGLLIEETLATGYEDWRRWLPCDRAVAVPSALAGDPDPYTRATARGAGWQWRIPLQERMGNGLVYCSDYQSRESAERELLHHLEGAPLAQPRHLAFTTGRRVLAWNRNVVALGLASGFVEPLESTSIHLVQSGIAKLIALFPDRRFAAVERDEYNAQMHELYEDVRDFVILHYKATRRDDTPFWERCRTMDVPASLQRKIDLFRAKGRVFREGRELFATTSWVAVCLGQHIVPDEHEPAADALDEERVAEAIEQMRRDYLAVADKLPRHGDFLRHIGAATAPAAAPPPAAPDPGPTFSFASETPFNFSADPL

SEQ ID NO: 87784 - protein, 501 aa, Gammaproteobacteria bacterium
  misc_feature (1)..(501): tr|A0A4V2AAC3|A0A4V2AAC3_9GAMM Tryptophan 7-halogenase OS=Gammaproteobacteria bacterium OX=1913989 GN=EOO52_17 435 PE=4 SV=1
MNQINPIKKIVIVGGGTSGWIAASMLSYHLKSELCEIELVESEDLGTIGIGESTIPPVVRLIQNLGIDETQFIQSTQACFKLGIKFIDWRQKNESYFHPFGVIGKRIGSHDFYQCWLKSTMQGENVPLQDFSPCSVMAQQEKFFWPTQLQNTPIGGASYAVHLDAKLVVSYLNKYAHERGVKRTEGMVEQVVKSDTGNIEKLVLKDGKEIHGDFFIDCTGFKALLIEKALGVGYEDWSNYLPCDRAVVVKTAAQEKRPPYTTATARKAGWSWKIPLRNGTGHGYVYSSKFCSDAEAKSTLLKNLDGPRINDPRVIPFSTGRRKNMWEKNCLSLGLASGFVEPLESTSIHLIARGMDFFLRFFPDRDCDPSLIKEYNRRMTTDFEEVRDFIMLHYCTTQREDTDFWRWCKTMELPESLQERITLFKGHGLIREGTDELFRSTSWQSIFEGMGIRPNKYCPRVDNMDYQEISDTLKLARQAIQSMVKTLPSHDEFLRQNLADE

SEQ ID NO: 87785 - protein, 503 aa, Sphingomonas sp.
  misc_feature (1)..(503): tr|A0A4R2PM17|A0A4R2PM17_9SPHN Tryptophan halogenase OS =Sphingomonas sp. BK235 OX=2512131 GN=EV292_103496 PE=4 SV=1
MRPVRRVVIAGGGTAGWLAAALLTRQLGGMIAVTLVESEEIGTVGVGESTIPTVRAFHGLIGVDEEDFVRATGASYKLGISFEGWSRADERYFHSFGTVGQSTWMAEFHHFWLEARAQGVAADLGAYCVEHEAARAERFAGRPDASLNYAFHFDAARYARYLRERCESDGLFRIEGRIDRAERDAEGDIAALVMADGRRVEGDLFIDCTGFRALLIGETLGVGYEDWTHWLPTDRAIAVQTAATGPAVPYTRAIAHDAGWQWRIPLQHRLGNGIVYSGAHLSDDAARARLLDTVTGEVLIEPRLIRFRTGRRARAWERNCVALSLASGFVEPLESTSIHLIMIALTRLLQLFPYDGATASLATRFNDMAQREIEGVRDFIILHYHLNQRDEPFWHHLREMPLPDSLAERIALFREGAQAFQANDELFTVTSWVQVMLGQRLTPRSYNRVAQMMPPGRLAEALDGMARGIAGQVAALPAHQAYLDRLVGASAAPAAARSSAVAR

SEQ ID NO: 87786 - protein, 504 aa, Caulobacter sp.
  misc_feature (1)..(504): tr|A0A318BCC9|A0A318BCC9_9CAUL Tryptophan halogenase OS =Caulobacter sp. D5 OX=357400 GN=DMC18_03720 PE=4 SV=1
MTNDRIRHVVIVGGGTAGWMTAAALGRFLKDGVTKVTVIESEAIGTVGVGESTIPQINMFNRMLGLDEDDFLRRTKATYKLAIEFRDWKEIGHTYHHPFGPYGVDMEGVSFHAYWLRYQAMGEAADLSEYSLQSLAASQAKFQRPTGQKNSPLGDIAYAFHFDAGLYARFLRDYAEARHVRRIEGRITNVALRGTDGFVESVTLENGTLIEGDLFIDCSGFRGLLIEGALKSGFEDWSHWLLNDRAVALPCASGGSTDPVTRATARPAGWQWRIPLQHRIGNGYAFSSQHISEDEATAYLLANLDGEPLADPNLLRFKAGRRKKSWNRNVVAIGLSAGFMEPLESQSIHLIQVGISRLLAMFPDRRFQQPDIDRYNRVMTFEYEKIRDFLILHYKATERSDTPYWDYLREMPIPDYLADKIAVFESHGRIFRENEELFNDTSWFAVMVGQGLKPRGWDPMADVMSEDLLRARMNEIRAVIARSADTMPDHMTFVADRVRQAEAA

SEQ ID NO: 87787 - protein, 518 aa, Caulobacter sp.
  misc_feature (1)..(518): tr|A0A318AWC9|A0A318AWC9_9CAUL Tryptophan halogenase OS =Caulobacter sp. D5 OX=357400 GN=DMC18_21390 PE=4 SV=1
MERGRSILIVGGGTAGWLTAAYLAKSLRIAEQDHLKITVLESPDIGIIGVGEATFPTIRTTLQFLGIDETRFIRETSATFKQGIRFVDWGHAPEDGRRHQYFHPFEAPFSADGASLAPYWLLQDEATRPPFAEAMTIQARVAGAQRAPKRPHEGNFAGPLNYAYHFDAAKLAQVLADRARELGVERLEGLLTNVALDADGAIDHVACAEHGRLEADLYVDCTGFRAELIGQALKAPFKSTRPVLFTDRALACRVPYERPDAPIQSFTVATAHEAGWIWDIGLAGARGVGCVYSSDHMDDARAEAILRAHIGPNVEITPKAISFEAGYRERQWVKNCVAVGLSAGFLEPLESTGVVLIEAAVAIIAELFPHNGPIDAPARRFNQLMTARYDNIIAFLKLHYCLSRRTEPFWRDNADPASIPERLAELLEQWRHRPPSRYDFILDLETFAFFNYQYILYGMGFKTDLSPGRGEFPDVQSAARQFARIRAFGERATHDLPSHRDLISQINRFGFDRPLEPA

SEQ ID NO: 87788 - protein, 501 aa, Alteromonadaceae bacterium
  misc_feature (1)..(501): tr|A0A1Y6BLB4|A0A1Y6BLB4_9ALTE Tryptophan halogenase OS =Alteromonadaceae bacterium Bs31 OX=1304903 GN=SAMN0274 5866_00668 PE=4 SV=1
MNDKQIKKIMIVGGGTAGWISAALLSSRFGSEYCEIQLIESDEISTVGVGEATIPPIVGFNNLLKLDENEFIRETKATFKLGIEFIDWNKKGESYIHPFAKYGTAFTHEPFHHHWLNLHPQGKAQALKNYSLACMASEQNKFMRPINRPGSPLSAIGYAFHLDAGLYAQYLRKYAEKRGVKRTEGKIVNTYLKDDGFIESVEMENGEIYSADLFLDCSGFRGLLIEKALNTGYQDWRHYLPCDRAIAMPSESGLTLRPYTQAQAHSAGWQWRIPLQHRVGNGHVYSSQHMEDQQALDILSENLEGKALGEPRFIKFTPGRRDVFWNKNCVAIGLSSGFLEPLESTSIHLIQLSLYKLLDLFPTKDFKPEVVDNYNRIMITKFEQVRDFIVLHYKATERDDSSFWNYCRTMAIPETLQQKMDLYKSSGVIFRENDELFAENSWLAVLHGQGLRVDSHHPLVNAMPDAQAENILKQIEEKVAEAVAEMPDHKAYLQSQCGVRF

SEQ ID NO: 87789 - protein, 495 aa, Sphingomonas sp.
  misc_feature (1)..(495): tr|A0A2T7VUX3|A0A2T7VUX3_9SPHN Tryptophan halogenase OS =Sphingomonas sp. TPD3009 OX=2171625 GN=DC425_07525 PE= 4 SV=1
MTTIVIAGGGTAGWMAAAAFGGLLESGYRIRLVESEEIGTVGVGEATIPQIRLFNQALGLDEDAFLRATGGTFKLGIAFDGWREPGHSYMHAFGDVGRDVGLIAFQHYWLRARTLGLAKPLDAYALNEVAARAGRMHRGSPITAQTLPTMPYAFHFDAGLYAAYLRRFAVNRGVERTEGKIDRVERNGDTGDIAALVLASGERIAGDLFLDCTGFRGLLIEGALETGYDDWTHWLPCDRAVAVPSANVGAPLPYTRAIAREAGWQWRIPLQHRTGNGYVYCSRHLSDDAATAALLANIEGEAQADPRHLRFVTGRRKRAWNRNVVALGLASGFLEPLESTSIHMIQSAIARLVKLLPSFPIADALRDEYNRQTDFEIERIRDFLILHYWANGRAEPFWQERREADLPDTLRAKIALWQQAGTITREHEELFTEDGWLQVLAGQGVKAAAYHPLADQIGTDDLGEYMETLELLYRREAQAMPTHADLIARHCAARP

SEQ ID NO: 87790 - protein, 503 aa, Verrucomicrobiae bacterium; identical to SEQ ID NO: 83614
  misc_feature (1)..(503): tr|A0A2A2Y7P6|A0A2A2Y7P6_9BACT Uncharacterized protein OS=Verrucomicrobiae bacterium AMD-G2 OX=1982328 GN=CAK8 8_10625 PE=4 SV=1

SEQ ID NO: 87791 - protein, 491 aa, Sphingomonas sp.
  misc_feature (1)..(491): tr|A0A2T7VRZ4|A0A2T7VRZ4_9SPHN Tryptophan halogenase OS =Sphingomonas sp. TPD3009 OX=2171625 GN=DC425_07500 PE= 4 SV=1
MTPPPPSIAILGGGTAGWMAACLMAKAWPQARITVIESPDIGIVGVGEGSTPQLKSLFDTLGIAESDWMPAADATYKAGIAFHGWADDTPAYFHPFAGQIDLHTQGAFFASTRARRHGADVPAHPDRFFLNARLAEAGRAPIAPGNFPFRIGYGYHFDAHKVGHVLRAAALARGVVHLPRRVRDVVVDATGQVATLTLDEGDAIHADLFVDASGFASVIAQQALGVPFRSFADTLFADRAVVMPTPRKDALPVQTKATALSAGWAWDIPLTSRTGNGYVYASRYLSPDAGETELRRHLGLLDTDVAARHLSMKVGRVETSWTANCLAIGLAQGFIEPLEATALHIVQATIEGFIGAYQAGSRDAFNASIARRYDGIRDYIVAHYRLNRRSGPFWRDVAANDDLSDDLKAIMTAWFTGGDVAAVVEGRGLAGYYAPMSWEVLLAGYGTFPDATRLRTAPPVADLAAIDSLLSGCLLNFPDHQAALDGHRRMP

SEQ ID NO: 87792 - protein, 551 aa, Rhodobacteraceae bacterium
  misc_feature (1)..(551): tr|A0A559Q862|A0A559Q862_9RHOB Tryptophan halogenase OS =Rhodobacteraceae bacterium PT6CLA OX=2135812 GN=C7961_ 3247 PE=4 SV=1
MGAPITDVTIVGGGTAGWLTATLLQSILTRPGRAGKDVKITLIESPNVPTVGVGEATVPGMPRTLRNAGIPEQEFFKTCNASFKLGVLFRKWNVDRDGQQIDYVNPFNPVPSIEGIDAGYFMLRHGAGALDFVQTYSAAVDLARAFKGPRALGAKEYDRRIGFAYHLDAGKFAHMLRDICVERGVTHILEDVVDVEQDERGYIAAVNLEESGRHPVQLVIDCTGFRGVIINQVLKEPFVSYSKYLANDKALAVQIPHSDPAKLPSVTQSTALGAGWVWRVPLYHRIGTGYVFSSAHRTDEQAMDEFLAHLGDEAKGAEPRVIPMRVGRTRNAWVKNCVAVGLSGGFIEPLESTAIHMIDTAVRWLATYFPDQDFPEPLRARYNKLSNALYDEVRDFICLHYALGNRTDDPYWIDARNMEVPDSLAENLELWKHTLPGPYDLEFASLFSPGVYQTVLLGKRVYETGYGSPTMTATLPLRQEVWGRHLQNARAAIKQSVEAAADHRMLLTELRGEATPAPFLPLAQATVGMPGAAAPKAVALAVPEKEDASLL

SEQ ID NO: 87793 - protein, 514 aa, Catenovulum sp.
  misc_feature (1)..(514): tr|A0A2S0VNI5|A0A2S0VNI5_9ALTE Tryptophan halogenase OS =Catenovulum sp. CCB-QB4 OX=2172099 GN=C2869_04745 PE=4 SV=1
MSMVKSLVIVGGGTAGWLTAGILAAQFQSRIQAGQLSITLCESANVPTVGVGEGTWPTMVTTLKAMGISETDFLRHCEVSFKQGSKFVNWGTESGDFYYHPFDIPNGAFEGLCPTYWLNTASGTAYAQQFSSQFDICEAGLAPKTITTPEYANYAHYGYHLNAGAFSTFLQKHCIAKLGVRHCVDDVTDVTLATNGNIESISLKEYGVLAADLFVDCTGFKSLLLGKALNVEFVDVNDVLFADTALAAQVAYPTDDAPIKSYTQSTAQDAGWIWDIGLPTRRGVGHVFSSQHMDEDKAIKTLEHYIKQSGGTFDPDTIRKISFRAGHRKHFWHKNCVAIGLSAGFLEPLEASALVLVELSANMLAEQLPNTQADMPIRAQRFNDKFAYRWSRAIEFLKLHYVLSERQSAFWQDNRAAESIPSRLQDLLTLWQHDVPKLTDFDATGELFQAASYQFVLYGSSYRSKLLQNVEASHMQYIEQQLQQNQLKTQQLLSTLPSNRELLNKVQKFGFAKI

SEQ ID NO: 87794 - protein, 518 aa, Rheinheimera sp.
  misc_feature (1)..(518): tr|A0A437QM79|A0A437QM79_9GAMM Tryptophan 7-halogenase OS=Rheinheimera sp. KYPC3 OX=1834037 GN=EOE67_12510 PE= 4 SV=1
MQNSITPQAPPLKLLIVGGGTAGWLSALMLAWHFRQQPWVHIELVEAPDIATIGVGEGSTPALTRLFRQLEIAEADWMPACQATYKNGIQFSDWSTIPGYQHYFHPFPSSEDNAVLPEFFRQVRAAQQGQPNDAHPDSFFLQHQLAITGKAPFCADHQIQLQYGYHFDAGLLGQCLKKIAIQRGVAYRPFKVTDVQCFADGAIAQLHTAEGATLAADFYVDCTGFASKLMRQTLGSKFHRYQQMLPNNAALTIATQAESHPLSQTTATALRHGWCWQIPLQHRTGNGYVFSQDFISADIAETELRQHLGLSEQEGSSRLLKFESGRLQQHWQHNCVAVGLSQGFIEPLEATALYLVQQTVSHFLLHWQQSQYQCRGELVARSDYNLLINNYFDRVADYIVLHYKTNSRSDSDYWQHNRKLEFISPELRQLLQCWQSGGDLPALLAAKQLEKYYHAVSWYCLLAGTGYLPERGRLPEYSRQQLPAAQQRLQRWQQLAAWCPEQLAHLRQLAASNRLVTP

SEQ ID NO: 87795 - protein, 521 aa, Xanthomonas arboricola; identical to SEQ ID NO: 86498
  misc_feature (1)..(521): tr|W4S3T9|W4S3T9_9XANT Tryptophan halogenase OS=Xanthom onas arboricola pv. pruni str. MAFF 311562 OX=1414836 G N=XPU_2350 PE=4 SV=1

SEQ ID NO: 87796 - protein, 499 aa, Altererythrobacter aquimixticola
  misc_feature (1)..(499): tr|A0A4T3F5R6|A0A4T3F5R6_9SPHN Tryptophan 7-halogenase OS=Altererythrobacter aquimixticola OX=2489173 GN=E5222 _00310 PE=4 SV=1
MQGRPVRKVVIAGGGTAGWTVAAALAKNLGELIEIVLVESDAIGTVGVGESTIPTARRFHELLGLDEAQFVRATGASFKLGISFENWTRDGERYFHSFGVTGRSTWMADFQHMWLEARAMGIAGDIGEYSLETQAAMANRFRTGGEVPLNYAYHLDATAYGLFLREFAEPLGVTRIEGRIRDVRKHGESGDIAALELDSGEVVGGDLFIDCTGFRGLLIEDALETGFDDWTHWLSTDRALAVQTKAVGPARPYTRAMAHEAGWQWQIPLQHRVGNGLVYCSEFMSDDEARARLEQRLDGEMLTEPRVIPFRTGTRRKAWNRNCIAIGLSSGFVEPLESTSIHLIMIAVTRLMQLFPFDGVSDALAQRFNDLSRTELEGIRDFIILHYHLNNREGEPFWDRCRALDIPDTLAQRIALFRESATAYQASDELFRIDSWVQVMLGQGLQPQSHHALGRMIGAEKLGASLDTLASNLRRAAQSLPEHQAFLDQYAGKAEAGAA

SEQ ID NO: 87797 - protein, 499 aa, Caulobacter sp.
  misc_feature (1)..(499): tr|A0A318BAH2|A0A318BAH2_9CAUL Tryptophan halogenase (F ragment) OS=Caulobacter sp. D5 OX=357400 GN=DMC18_03535 PE=4 SV=1
MEANTPLEIVIVGGGTAGWMVATALVSGLRPHQARVRLVESDDIATVGVGEATIPAMRDYNRFVGIDEVEMLRATNGTFKLGIEFLDWGFKGSNYHHPFGVHGQSIGGAGFHHQWNRARLAGHDFDIEDFSYAIAASRADRFEFPNPNPEAIDSTYSYAYHFDASLYAKFLRKVAESRGLKRTEGKVVDVTLDGASGDVASITLASGEVVKGDFFVDCTGFRGLLIGQTLNSPFEDWTHWLPCDRAWAVPCARAGRFTPFTRSTAREAGWQWRIPLQHRTGNGYVYSSAHISDDEAAAVLLANLDGEALDDPRQVKFKAGRRTASWTCNVMAAGLSSGFLEPLESTSIYLIQIAVMNLLKLFPGKRVEPALVEDFNRRVDMEYDRVRDFLILHYHANTRTDGTLWKQCREMPIPDSLREKLELFRHRGHAPNYRDGLFAMPSWISVLLGQGVTPRGYDPMADNAPLAQTLAELERQRAAITRRVPAMPSHAEFIDRHCA

SEQ ID NO: 87798 - protein, 492 aa, Sphingomonas sp.
  misc_feature (1)..(492): tr|A0A2T7VKC1|A0A2T7VKC1_9SPHN Tryptophan halogenase OS =Sphingomonas sp. TPD3009 OX=2171625 GN=DC425_08465 PE= 4 SV=1
MSDTRIRRIAILGGGTAGWMTAAALSRALVGQGVAITLVESDAIGTIGVGEATIPTIHWFNQIIGLDERQFMAETKATVKLGIEFVGWNGEGSRYFHPFGTFGPPGDGAMFLHRLIRARADGDTASTESYSLTAQAARAGRFTRPVPDRRSLLSTLGYAYHFDAGLYARYLRGLAERAGITRIEGMVASVERHDDSGYVRSLTLADGQVVAGDLFIDCSGLRGLLIGETLGVGYDDWSYWLPCDRAWAAPSAAEVGRTPFTRATAAEAGWRWRIPLQHRVGNGYVFASRFQDEEAARASLIAGMDGPPLADPRLIRFTPGMRREAWRANVVAIGLSSGFLEPLESTSIHLIQSGIAKLLSLFPAADCSPLLARQFNRVFGQEMLDVRDFLILHYHATAGRTEPMWQERQAMAIPDTLAEKIAHFRASGRIVLSSDELFRDASWFAVLDGQGERPGDHNPLIEALGRDDNLRQLAALRADIAKVTATLPPLPA

SEQ ID NO: 87799 - protein, 503 aa, Catenovulum sp.
  misc_feature (1)..(503): tr|A0A2S0VTQ5|A0A2S0VTQ5_9ALTE Tryptophan halogenase OS =Catenovulum sp. CCB-QB4 OX=2172099 GN=C2869_13935 PE=4 SV=1
MNPNTNTQRHILILGGGTAGWMAANLMAVKWRDYPNIKISLMESPQIGIIGVGEGSTPQLRAFFNSIDVEESQWMKRCNATYKVGITFANWSTKPGFTSYFHPFYSQVDSYVASTFKQNTYFRRKGANVEALPDHYFLGTYIAQQALSPKADHNFPFDVHYGYHFDSHLLGEFLKELAISRGVNYIEGKVNHVELANNGDIHSLLTEEGQQIQADFFVDSSGFRSVLLQQALKVPFKKFNENLFNDSAVVLPTEKHKQLQTQTVSTALKYGWTWDIPLTNRTGNGYVYDSNFCSAQQAEQELREKLNLVESDVEARHLKMKVGRVEKHWSRNCVAIGLAQGFIEPLEATALDIVQDTVLNFMAAYQSGNFTDKNRDMFNERVNKRFEGVRDYIVAHYAMNSRDDTEYWIANREHKNWSNALSTAVQCWNSCGDMQKALEDQAISDYFPEISWYCLMAGYGCFPDKVITRHDLPAQKYSFSQVKEFMNSCAINHKSHLDELANI

SEQ ID NO: 87800 - protein, 561 aa, Ruegeria arenilitoris
  misc_feature (1)..(561): tr|A0A238KXH6|A0A238KXH6_9RHOB Flavin-dependent tryptop han halogenase RebH OS=Ruegeria arenilitoris OX=1173585 GN=rebH PE=4 SV=1
MNNRLQKITIVGGGTAGWMTALLLEMVFSRTSATKDRPRICLIESPNIATVGVGEATVPRMPVTLRQAGISERDFFRETNASFKLGVKFCNWNKDAKGKRIDYVNPFAHGQMLEGLEAAEYFLRFGNGDRDFTQSISPHDDLARLCKGARLLGQPEFEQRFGYAYHLDAVKFAGMLTRVCTQRGVEHIRDEVQSVELNEQGNVSHLMLERAGRHDIEMVVDCTGFRGLIINQALGEPFMDYSDYLPNDRAMALQIEHPNPRKIESVTRSTALGAGWTWRVPLYNRVGTGYVYSSAHRTDDQAADEYLEWLGDSGKGATPRVIPMRIGRVRNAWVKNCVAIGLAGGFIEPLESTAIHMVDHAVRWFAEHLPTRDIEPSLRDRYNRQMNKLYDEVLDFICLHYKLNNRTDDQYWIDARTEMKVPDRLAENLELWKNRLPMQHDVEFATLFDHRVYQTVLLGKQVYDTGYGTGIRDRIRPLRKDIWFQWWKGAKVDLAQILKAMPDHKTLLRDIRGELKQPTFAMAKAAQPTVPMPGAAPEPVVIQNMPNLAEIQSGKKDLQLF

SEQ ID NO: 87801 - protein, 501 aa, Caulobacter sp.
  misc_feature (1)..(501): tr|A0A318B3U1|A0A318B3U1_9CAUL Tryptophan halogenase OS =Caulobacter sp. D5 OX=357400 GN=DMC18_08675 PE=4 SV=1
MTAGPIRNVTIVGGGTAGWMSAALLARALGPSATITLVESEEIGTVGVGEASIPQLRFFNAFIGLDEDAFLRATQGTIKLGIEFVDWLRPGHRYMHAFGSVGRSLGTTPFHHWWLDARRRGTAGEDFWAWSANALAARAGRFGRVAPEGGEPLSWAFHFDAVLYARHLRGHAEAQGVQRVEGRVVAVDQDPDSGFVRAVTLKDGRRVEGELFVDCSGFRGLLIEEALKTGYEDWSRWLPMDSAWAVPSRDAAPPVPYTRAWARDAGWQWRIPLQHRTGNGHVFSGAWTDKETARQVLMDNLEGEPLADPRLLTFVTGRRKAFWNRNVVALGLASGFMEPLESTSIHLVQSGLARLLALFPDQGFDPALTAEFNRQTGDEYARIRDFLVLHYKATERDDTPFWASRKAMEIPESLAARLSLFTGPGRVFSHEDDLFKETSWVQVLLGQGLTPAAAHPMTAAVADARVDDWLADLAHAAARTANALPTHAAFLAGAVRAELVG

SEQ ID NO: 87802 - protein, 518 aa, Rheinheimera sp.
  misc_feature (1)..(518): tr|A0A437R5J2|A0A437R5J2_9GAMM Tryptophan 7-halogenase OS=Rheinheimera sp. KYPC3 OX=1834037 GN=EOE67_02345 PE= 4 SV=1
MTTAVKKLVIVGGGTAGWLSAAIIAAQHRSNTAEGLQVMLVESADIPTIGVGEGTWPTMKNTLQQIGLKEADVFAHCHAVFKQGGKFVNWVRSAAQLSSDSGPEQEFYYHPFTVPMGYGRIDLAPYVDDVSQFAIDSNFQHQICEAGLAPRTLAEGEYQGQCNYAYHLDAGAFADLLKQHCKTKLGVEQRIGTVERCELTADGQIKALHLTDGSEPIEADLFVDCTGFASLLLGKTLGVPFESVDHLLFNDSALAMQVPYDNPDAPIPCHTIATAQNAGWIWDIGLTHRRGVGHVYAAKYLSDDEAEFNLRRYIGKAAEGVAVRKISFATGHRTKFWQHNCVAIGMAAGFVEPLEATAIMLVEISARFVADNLPADQATMPLVARRFNQQMLYRWQRILDFLKLHYMLTKRPEPYWQAHLDPATIPQSLQDDLQLWRHRGPQIADFNGALELFPAASYQYVLYGMGFKPDFSAQAYLYQQQGQAQQIIRRNQQLTTQMLQTLPSHRDYINRWLAGSRG

SEQ ID NO: 87803 - protein, 528 aa, Rheinheimera sp.
  misc_feature (1)..(528): tr|A0A437QIJ4|A0A437QIJ4_9GAMM Tryptophan 7-halogenase OS=Rheinheimera sp. KYPC3 OX=1834037 GN=EOE67_15905 PE= 4 SV=1
MDNPIRSLVIVGGGAAGWITAGLLAAEHNADQGVLAAIPKLTISLIESPDVPIIGVGEGTWPSMRLTLQKIGIGETEFLLCCDASFKQGSKFIHWRGQTAANRSFPDSYIHPFSLPIGQQELNLCPFWLPHQQDVAFADAVCQQFQLAELGLAPKQISTAEYSFINNYGYHLNAGKFSQLLQKHVTEKLGVRYIADHVTAIHSQQNGDIASLSTKSHGEISGDLFIDCSGSRSMLLGEHLQVPMISQQQVLFNDSALAVQMPYPTADAAIASCTHATAQSCGWIWDIGLPTRRGIGHVYSSAHLSDDAAEQQLRRYLTADFGASAASSAEFRKLSFAPGHRALCWKNNCIAIGMAAGFIEPLEASALALVEWTAKALSSQLPANRAVMDIVAARVNKVFLQHWQQIVEFLKLHYVLSQRADDDYWYEHRESSSIPTSLQDALQLWRYQVPSAMDISHSDVLFPAASYQYVLYGMGFQTQLSGSQKPSLQRKAQQLFNENIQRIQTLKQVLDDNRSLLQKIRQHGLPTI

SEQ ID NO: 87804 - protein, 509 aa, Caulobacter sp.
  misc_feature (1)..(509): tr|A0A318B0E3|A0A318B0E3_9CAUL Tryptophan halogenase OS =Caulobacter sp. D5 OX=357400 GN=DMC18_18405 PE=4 SV=1
MTQAVRNIVVVGGGTAGWMTAAALSQVVGTKRYSITLVESEQIGTVGVGEATIPMILLFNKVLGLDEDVFIRETNATFKLGIEFVDWRRRGHSYFHPFGLYGADMDGVGFQHFWLRWARESGQTDHSLFNAESLAAKAGRFLRAPPQSLATLPKINYAFQFDAALYAAFLRRYAEARGVVRVEGKISGVERDGESGHVSRLVLDDGRAIEGDFFVDCSGFRGLLIEETLGAGYDDWSQWLPCNRAAAMPCVRAGELTPYTRATAREAGWQWRIPLQHRTGNGYVFSDAFIAEDEAVRLLGERLDGAALADAKVLKFTAGRRRKSWIGNVLAIGLSSGFLEPLESTSIHLVQAAIAKLLALFPKTGFDPWVVDKFNREMSLEYEQVRDFIIAHYKVTERDDTEFWRWCQAMVPPDSLTQRLEVFRSRGEVLVGQQELFKETNWFAILAGQGLIPEDYHAVADTISSDELRRRVGMIRSAINERVAGMPPHDLYLDKAGLLGAAARAAVPA

SEQ ID NO: 87805 - protein, 502 aa, Caulobacter sp.
  misc_feature (1)..(502): tr|A0A318AWS2|A0A318AWS2_9CAUL Tryptophan halogenase OS =Caulobacter sp. D5 OX=357400 GN=DMC18_22510 PE=4 SV=1
MDRAIGSIAILGGGTAGWMAAAVLAQVLRGTGTSITLVESADIPTVGVGEATIPPIVDFLRLLEIDQAEFMVATEGTFKLGIRFDDWTTPGERYWHPFGTFGPTIDRRPFHNMWHRLRAAGDDPRVEAYSLSAALGDAGRMAFADPRAGGVGPSGGLRHALHFDAGLVARFLRTWSERRGVTRLERKVEGAVLRDDGFVEALALKGGGHLAADLFIDCSGFRGVLIEEALKTGYEDWSRWLPCDRAVAGLTARDPNPPPFTQAAARPAGWRWRIPLRHRTGNGYVYSSAHVGDDEALADLAREAGPLLSEPRFLRFKGGRRKAFWSRNVVALGLASGFLEPLESTSIHFVTSGLMKLLDHFPDKDFDPANIAAYNAALIAEYEAARDFIVLHYQPTRRDEPFWRERAAAIPDTLAERLELYRGTGRIPFRPGELFTDLSWFYVLEGMGVRPAAYDPLVNFSNLAETRAGLVGWRGRVAQGVAEAATHEAVLDAIAARARPAA

SEQ ID NO: 87806 - protein, 499 aa, Catenovulum sp.
  misc_feature (1)..(499): tr|A0A2S0VTD8|A0A2S0VTD8_9ALTE Tryptophan halogenase OS =Catenovulum sp. CCB-QB4 OX=2172099 GN=C2869_13940 PE=4 SV=1
MMKKVITIVGGGTAGWMAATLINKVLNEENIQVQVNLVESPEISTIGVGEGSTPQLKNFFQQLGIAEYEWMKCCQATYKLGIKFSGWSSRAESDSYFHPFISQVDDQTAPAFFFNSQMRRKGADVIGHPDTFFLNSYLAKQGLSPIARNNFPFETAYGYHFDAGLLGQFLRDYAVKNAIKHIQTKVENVHLAHDGSIAYLETTKGELQSDIFIDCTGFNGLLIQKALKVPFIDFSDNLFNDSAVVLPTESLEKKPTYTGASTLKNGWLWSIPLRNRTGSGYVYSSQFTDSDLAETELRNSLGLIDSEIEARHIKMKVGRIQSHWYKNCLAVGLSQGFIEPLEATALHLVQETIQNFCAAYKAGNYTNQHQSRFNQVINNRFEGIRDYIVAHYRVNSRNDSEYWRANANNNHLSNNLVQILQTWMAGDNITQVLEQLKLSQYYASYSWHCLLAGYGIYPDSSQLLAPNEEASQHNIDEIKDFITRCSMNFLEHQEALDLS

SEQ ID NO: 87807 - protein, 503 aa, Verrucomicrobiae bacterium
  misc_feature (1)..(503): tr|A0A2A2YDZ3|A0A2A2YDZ3_9BACT Uncharacterized protein OS=Verrucomicrobiae bacterium AMD-G2 OX=1982328 GN=CAK8 8_03080 PE=4 SV=1
MIQSILVLGSGSAGLIAALTIKRKIPQVRVTIVRSPEIGIIGVGEGTTPNFPRHLFDYLGISRKEFYAIAKPTWKLGIRFLWGERKEFYYGFSQQLDAQWSALPKPNGYYCDDDFSAVDLPVAMMEQGKVFARQANGAPDVQPWHAFHIENVNLVECLERYARAIGVEIIDGKVVGAERGPKGISAVFTEDGRKFEADFYVDSSGFHSELLGKTLEEPFVSFDKSLFCDRAVVGGWERGADEPILPYTTAETMDSGWAWQIEHEHHVNRGYVYSSHFISDDQAAEEFTRKNPKAPKSPRVVKFRSGCYKRMWVENVVAIGNAGGFVEPLEATALMIVCSESQTLVEFLLHSNLKPTDTFRNLFNKALWNTWEEIRNFLALHYYANTRMDTPYWKACREETDISGLQELLAFYRENGPTGFGRHTLPHTGTDFGMEGYLVMMVGNKVPYQNRSTPTEAEWNIWRSAQAQNRAIASQAMTVKEALYFVHHPGWQWTSDAQPLISK

SEQ ID NO: 87808 - protein, 511 aa, Altererythrobacter aquimixticola
  misc_feature (1)..(511): tr|A0A4T3F1D7|A0A4T3F1D7_9SPHN Tryptophan 7-halogenase OS=Altererythrobacter aquimixticola OX=2489173 GN=E5222 _00265 PE=4 SV=1
MSGQPITQVVIVGGGTAGWMAAAAISKIMGAFPGLSIRLIESEAIGTVGVGEATIPQINQFNKLLGVDEREFVRETHATYKLGIEFVDWTRLGDRYVHPFGFYGIDMLGIEFHHFWLKGRELGDTSRLDDYSIGAMAGKANKMFWPQPDQPNSPLARLGYAFQFDASRYAGYLRKLAEKQGVTRVEGRINGVEQDPESGHVTSVTLENDESIAGELFIDCSGFRSLLLGQTLEVPFNDWSKWLPCDRAVAIPCTSAGDREPLTRSTARPAGWQWRIPLQHRIGNGHVYSSAFMEDDAAIELLLANLDGEPLAEPNRLRFTGGHRAKNWEKNVVALGLAGGFLEPLESTAIHLVQAGIARLMAYWPTTDFTPTEIARFNAETERDYVDIRDFLVLHYKATERDDSEFWNYCRNLEPPDGLKDKLEMFRSSGRVIREHNELFTETSWLSVMACQGVQAGGYHPAAGLLPDAELLQRLGHVRQVISQAVSQMPTQEEFLASNGSAIDPGQRITA

SEQ ID NO: 87809 - protein, 502 aa, Rheinheimera sp.
  misc_feature (1)..(502): tr|A0A437QMF9|A0A437QMF9_9GAMM Tryptophan 7-halogenase OS=Rheinheimera sp. KYPC3 OX=1834037 GN=EOE67_12940 PE= 4 SV=1
MNTTEAIKNVVVVGGGTAGWITAALLVKMLGKVINITLVESDDIGIVGVGEATIPPMINFNAALGIDEKAFLRETKGTIKLGIEFENWGTPGERYMHAFGAIGKEFPFCNFHHFWLKSQQQGMGFDFWDFSLTYQAAKQHKFGRLDRIEGVNLPGLAYAYHFDAGLYAQYLRRFAEPLGVKRQEGTIAQVKQCPQSGDVTSVVLKSGVEISGDLFIDCSGLHSLLIEKTLNTGFEDWSHWLPADSALAVPCESVTPITPYTKSIAHPNGWQWRIPLQHRIGNGIVYSSKYCSDEEAKATLLANLDGKPLAEPRKISFRTGRRLKQWHRNVVSIGLSSGFLEPLESTSIHLIQSGVFRLLKFFPHQGIADSDRDEFNRQSKIEFEQIRDFIILHYKLNQRSDSQYWRDCQAMDIPETLARKMEIFAATGRVFREQDELFSEVAWQQVLIGQGLIPKDYHPLVNALSDEQLRDLMQNLKDIMAVTATRLPDHQAFLDSCGGMAK

SEQ ID NO: 87810 - protein, 504 aa, Caulobacter sp.
  misc_feature (1)..(504): tr|A0A318AY98|A0A318AY98_9CAUL Tryptophan halogenase OS =Caulobacter sp. D5 OX=357400 GN=DMC18_14360 PE=4 SV=1
MLDQPIRKVVVVGGGTAGWMTAAAFSRLLVGPTVQVEVVESEAIGTVGVGEATIPTIRHFNEKLGLDEVEFIRQTQASFKLGIDFRDWGRIGHRYFHAFGDFGADHEHVQAHQLWRRLRVLGDDSGLEDWSLPTAAAALNRFIPPSPDPRSPLHDYSYAYHFDAGLYAAFLRRYAEARGVVRTEGRIVDVALRGEDGFVEAVVLDDGRRVEGDLFVDCSGFRALLIEGTLKAGFEDWSRWLPCDRALAVPCATGGDGLTPYTRSTAHEAGWQWRIPLQHRTGNGYVYSSAFVDDQRAADTLMSNLDGAALDDPRPLRFLAGRRRKFWDRNVVAVGLSGGFLEPLESTSISLIQNGIARLLEFFPDRRCDPLLADEFNRVSAQEYERIRDFIILHYCINQRDEPMWRQVREVELPDSLQAKIALYKARGHVAIHEGDSFARPSWISIYNGLGVVPETYDPLADRIPEAELRRLMDHRRAVIRHAAQSIPTQAAFIAQHCAAEPIG

SEQ ID NO: 87811 - protein, 505 aa, Caulobacter sp.
  misc_feature (1)..(505): tr|A0A318B5Z5|A0A318B5Z5_9CAUL Tryptophan halogenase OS =Caulobacter sp. D5 OX=357400 GN=DMC18_14365 PE=4 SV=1
MQDTDRSLRKIVVVGGGTAGWMAAAALSQLVGGRFGAIEVIESDEIGTVGVGEATIPPLHLFHALLGIDENAFVRATQGAFKLGIEFRDWGRKGGRYFHPFGAYGAPMGLSPFHQAWLRASAEGVADDLDAYNLAASAAALNRFVRPPAGQAPPVFSTFGYAFHFDASLYAKFLRRFAEARGAQRTEGKIVDVALRDDDGFVEAVTLEDGRRIDGDFFIDCSGFRGLLIEQALKTGYEDWSHWLPCDRALAVPSANAGPLTPYTRSTAEAAGWRWRIPLQHRTGNGHVYCSAHISDDEAASALLAGLDGEALADPRPLRFTPGRRRKAWNRNVLALGLASGFIEPLESTSIHLIQTAITRLFSYFPDRDFDPATVDEYNRLSAQEFEEARDFVILHYAVGERDDTELWRYCQAMSLPGSLRRKIDLYRGHGRIHVLPNELFKEHSWLAVLEGQGARPERLDPLTSLIDGAALRGQLGAIQAAVRQTAQALPSHEAFIASHCRAEA

SEQ ID NO: 87812 - protein, 517 aa, Caulobacter sp.
  misc_feature (1)..(517): tr|A0A318AUX4|A0A318AUX4_9CAUL Tryptophan halogenase OS =Caulobacter sp. D5 OX=357400 GN=DMC18_20625 PE=4 SV=1
MSQDVREGRIRSIVIVGGGAAGWMAAAALRRHFGQSPIGITLVESSEIGTIGVGEATIPTIRAFYRNLGLDDLEVLRATQGTCKLGIRFKDWMAPGSAFIHPFGLYGQDLNGVAFQHYWAKARASGEVGAFGEYCLGASLAAAGKFTVPAANPPSSLSVFDWALHFDASLFAQLMRRVAEANGVRRIDAKVVKVNLRPDDGFVASLDLHTGQTIEGDLFIDCSGFRGLLIEEALETGYEDWSQWLFCDRALAVQSQPPANSSGEGAEPPPYTDVTAHDAGWRWRIPLQHRYGNGYVYSSRHIDDEAAKAELVAAVPDRLLHEPRLIRFTPGRRKQVWNRNVVALGLASGFLEPLESTSIALIETGIEKLKALFPDRGFDPAVIDEFNDWSRREMERVRDFVILHYKAAQRGDTPFWRTTRDADIPETLARKVELFRARGHVARYRWEMFQPPSWLAILDGFDIRPQGWDPALDGIDGRALAASLNQMRAGVARVVAEAPTHGEFLRRYVAAQPAAAE

SEQ ID NO: 87813 - protein, 507 aa, Altererythrobacter aquimixticola
  misc_feature (1)..(507): tr|A0A4T3F1A6|A0A4T3F1A6_9SPHN Tryptophan 7-halogenase OS=Altererythrobacter aquimixticola OX=2489173 GN=E5222 _00250 PE=4 SV=1
MTGETQPKLRVVVLGGGTAGWMTAAGLVRMLPGLCTVALIESQDIGIVGVGEATLPHIRGFVERLGIDEAAFMKATHATYKLGIDFRDFGRVGESYIHPFGTFGEDVGGIGFHHYWLELQRQGLAAELGTYSLAVAACRANRFAPPSEDSSLGSTYGYAYQFDATLFGPFMREFGTANGVTRHEGLVTEVERDPESGDVTALILKDGRRIEGELFVDCSGFRSLLLGQELEEAWDDWTHWLPCDRAAAMPCTHRTSDIRPYTIATAMPAGWRWQIPLQHRMGNGYVFSSAHIGEDEACEAIRNSAEGDPLADPRILKFRPGRRTKSWSHNVIGVGLASGFLEPLESTSIYLAQMAITYLIELFPTDGRIDPRDRDEFNRLVDMEYDRVRDFLILHYNATTRDDSDFWNHVRTMQVPDTLADKLELWKRTGRIEKYSEGLFYDVSWMAVYLGQGLLPEAHDSRVSLPDPQRVAGAMERLQREIDAHVAAMPGHVDYLTREAARLAQAA

SEQ ID NO: 87814 - protein, 506 aa, Xanthomonas arboricola; identical to SEQ ID NO: 86615
  misc_feature (1)..(506): tr|W4S666|W4S666_9XANT Tryptophan halogenase OS=Xanthom onas arboricola pv. pruni str. MAFF 311562 OX=1414836 G N=XPU_3185 PE=4 SV=1

SEQ ID NO: 87815 - protein, 495 aa, Verrucomicrobiae bacterium
  misc_feature (1)..(495): tr|A0A2A2YAE0|A0A2A2YAE0_9BACT Uncharacterized protein OS=Verrucomicrobiae bacterium AMD-G2 OX=1982328 GN=CAK8 8_07440 PE=4 SV=1
MKIQSVIVLGGGSAGFTAAITLKRLLPQLTVTILRSPEIGIIGVGEGTTPFFPHHFHQFLKLPLKEFYERAQPTWKLGIRFLWGQRESFDYSFDQQFAKRSPGLPRNNGFYHEEPPAAWCLGAGLMARNKAFTRNQRGIPEITLDTTAYHIENIKLVAYLEWQATELGVVVRNETVGQVDHQQDQITTLHLLSSEKMTADFFVDASGFAAKLLGETFQEKFHDYSDTLFCDSAIIGPRHREEHEEIQPYTTAETMDHGWCWRIDHENHINRGYVYSSKFVSDEDAEAEFRRKNPAVQQTRIVRFRSGRYQRSWIGNVVAVGNAAGFVEPLEATALMILCGQCRSLAEALIDSDCDPGPMLKTMFNRFMGERWDEIRDFLAIHYRFNKRLNTPFWQHCRENTPLHGAEEIYQFYLENGPSMLANAIFISPNDQFGAEGYLAMFLGMQVPHQKKHQPNEQELAVLKQLDQTIATRASSGATVAEALQVIRDPRWRWA

SEQ ID NO: 87816 - protein, 498 aa, Rheinheimera sp.
  misc_feature (1)..(498): tr|A0A437QFP4|A0A437QFP4_9GAMM Tryptophan 7-halogenase OS=Rheinheimera sp. KYPC3 OX=1834037 GN=EOE67_17330 PE= 4 SV=1
MQNNSNQAVKKVVVAGGGTAGWVAAAALSKRLKGLVEVVLVESEDIGTIGVGESTIPPVQLFHNILGIDEQEFMRATDATFKLGISFENWGQIGDRYIHPFGTTGKGSFLTDFQHYFLHGQKLGVEASFGDYCYELQAAKAHKFGKSATSNISYAYHLDAGRYARFLRTFSESHGCRRIEGKIASVTQHQNGDIKSLLLASGEEVSGDLFIDCTGFRALLIEQTLQTGFVPWDHWLPCNKAVVVQTESAATIPPYTRAIAHDSGWQWKIPLQHRVGNGLVYASDYLSDELARQRLVDGLETSALFEPRFLSYQTGQRKKFWNKNCVALGLSSGFIEPLESTSIYLFMNGVVRLLRLFPFDGVRQALADEYNQQSISELEKIRDFIILHYHQTERTNSPFWNYCRTMQVPDSLAHRMELFRESAHAFQSGEEMFRLESWTHVMLGQRLQPNSYHQLVASLPEQELRQHLQNIRDTIGRAVEKLPSHRDFLRQYCPANDK

SEQ ID NO: 87817 - protein, 502 aa, Sphingopyxis sp.
  misc_feature (1)..(502): tr|A0A0M4CR79|A0A0M4CR79_SPHS1 Tryptophan halogenase OS =Sphingopyxis sp. (strain 113P3) OX=292913 GN=LH20_0045 5 PE=4 SV=1
MGDSRITKVVIVGGGTAGWMAAAALSRTMDGLSIRLVESEEIGTVGVGEATIPSIRLFNALVGIDENDFIRETRGSFKLGIEFQNWGRIGDVYMHAFGQIGRSLGMLPFQQYWLRGRAEGIAGRFGTYSLNETAALQNRFARLPHIPNTGLEGIAYAFHFDAALYSAYLRRIAEAAGVDRTEGKVAEVRQNGESGHVEAVVLEDGTAIDGELFIDCSGFRALLVGDALQTGFEDWTHWLPCDRAIAVPSENAGPARPYTQAIAHQSGWQWRIPLQHRTGNGHVFCSDFISEDEAAAVLLANIEGRPLAEPRTLRFRTGMRSRAWSGNVVALGLASGFLEPLESTSIHLIQNGIARLLAHFPGRDFDGANVDAYNRRVRFDYERIRDFIILHYHANQRTDSAFWARCREMAIPETLTLKIDLFRSQGQIVREADELFVEIGWFQVLTGQNVAPRAYHPMADQLSRDELSGFFGDIETIVAGTASRLPTHDDFIAQHCAAGVPA

SEQ ID NO: 87818 - protein, 503 aa, Catenovulum sp.
  misc_feature (1)..(503): tr|A0A2S0VUT1|A0A2S0VUT1_9ALTE Tryptophan 7-halogenase OS=Catenovulum sp. CCB-QB4 OX=2172099 GN=C2869_16750 PE =4 SV=1
MNKTTIAIIGGGTAGWMTAAILAKGLPQAQYNITLVESPDIPTVGVGEATIPPIIQLCKYLEVEEKALLEAVEGTYKYGIHFENWSQIGHSYMHAFGKTGTEFYHDDKPVSFEKMWLQHAAQLGLKSFTAFSPTATAAYNNKYSDAIPAPENANPKFYYPLSHLFHAYQFDAGLLANWLKEYAVPLGVNFISATVNDISQHSNGNIACVHLDNGEKISSDYFVDCSGAKGLLSKQTLNGEFIDWSAYLPCDSAWAVQTKPTTLPFPYTKSIAQSSGWRWQIPLRQRNGNGYVYSSQFIDDQQAKNELEQALKGQEQLTEPKQIKFNTGCLKQAWHKNVIALGLSAGFMEPLESTSIHLIHKYAIELKNAFIYGKNMQQEADMFNSKYLEDTHAILDFLTLHYHCTQRSDSAFWRHCSNMPIPESLADKLQQFTNTGWIDLPQGALFSYSSWLQVLMGQGYLSSYEQFKQNDISEHSARQFFTNVHAALNNEVAKLPAHSLALL

SEQ ID NO: 87819 - protein, 504 aa, Novosphingobium fuchskuhlense
  misc_feature (1)..(504): tr|A0A117UU02|A0A117UU02_9SPHN Tryptophan halogenase OS =Novosphingobium fuchskuhlense OX=1117702 GN=AQZ52_1324 0 PE=4 SV=1
MTEAHAKQGPKRRVVIAGGGTAGWMAAAALARTMGDAIDLVLVESDNIGTIGVGESTIPPLVTYNRLLGIGEADFMRATQATFKLGINFENWRVPGESYFHSFGNTGRDHWSAGFQHFWMHGLSKGHTASYDDYCIELQAARSAKFAHLPDGRINYAYQLDSGLYAVFLRKLAEADGCRRVEGKIAEVLLDGESGDIAALLLESGERLEGDLFLDCTGFRALLIEGALHVGYDDWSHWLPCNSAIAVQTASVRPPVPYTRAIAHDAGWQWRIPLQHRQGNGIVYCNRYLSKDAALDRLLSTVEGDVLTKPNVISFTTGARRKQWHRNCVAVGLSGGFMEPLESTSIHLIQRAILRIIRMLPAGSISPRDVAEFNDQQMTDMEQIRDFLILHYKATDRRDSPFWRQCAAMEIPESLTHKIELFRETGRVFRKNEELFVENSWVQVMMGQGIMPQSYHPVAKKLSDTELGHLLAGLRESVAKTVAGLPDHQAYVAQYCGAQEARAA

SEQ ID NO: 87820 - protein, 515 aa, Sphingomonas sp.
  misc_feature (1)..(515): tr|A0A2T7VRT4|A0A2T7VRT4_9SPHN Tryptophan halogenase OS =Sphingomonas sp. TPD3009 OX=2171625 GN=DC425_07120 PE= 4 SV=1
MTLPVPDHAIHNIVIVGGGTAGWMAAAAFSRLLNTGYTRVTLIESEEIGTVGVGEATIPPLLNFNRMLGIDENEFLSATAGTFKLGIEFRDWGAIGDRYIHPFGTFGQDLQGISFHQLWLRERSRRAIPDITAWSMSAQAAARGRFGRAREDARSPVRELFYAYHFDASLYARYLRSYAERGGVTRIEGRIADVRLRGQDGYVEALTLADGRQVAGDLFIDCSGFRGLLIEEALHTGYESYAQWLPCDRAVAVPCALPNAREPDPYTRATARAAGWQWRIPLQHRMGNGYVYCSDDLSDEAAEFDLLASLEGEPLGDPRRLRFTAGRRRQSWNRNVIALGLSSGFVEPLESTSIHLVQAGIQRIVAMFPDTRFDPAERDEFNRQLHGLYEDIRDFIILHYAQTRRTDTPFWDRVRTMPLPDSLTRKLDLWRGKGRLFREGYDLFSVPSWVAVCLGQGLVPSTWEPAADALDETLVAEAMETMRRGYADTAERLPTHGDFLRMVAPSPLANWGQAR

SEQ ID NO: 87821 - protein, 531 aa, Lentzea flaviverrucosa
  misc_feature (1)..(531): tr|A0A1H9SG03|A0A1H9SG03_9PSEU Tryptophan halogenase OS =Lentzea flaviverrucosa OX=200379 GN=SAMN05216195_10738 PE=4 SV=1
MNAGADVTRTIPDRVVVVGGGTAGWMTASYLKAAFGHRVSVTVVESSRIGTIGVGEATFSDIRHFFEFLDLKEEDWMPACNATYKLAVRFQDWRRPGHHFYHPFEKLPSVGGFPLTDWWLRNGPTERFDADCFVLASLCDAERSPRRLDGSLLDRGAIDGGSTPMGLTMSEHQGATQFPYAYHFEAALLAKYLCQYAVDRGVRHVVDDVEDVLLDQRGWITSVRGKESGEIHGDLFVDCTGFKGLLLNKALEVPFVSYQESLPNDSAVALQVPLDMRERGIPPYTQATAQEAGWIWTIPLFGRIGTGYVYASDYCAPDEAERVLREFAGPAAADAEANHIRMRIGRSAESWVRNCVAIGLSSGFVEPLESTGIFFIHHAIEQLVKHFPDAGWSEHNRGMYNSAVGNVMDGVREFLTLHYLAAERSDTQYWRDAAHRPMPDGMAERLERWKVQLPDTENIFPYYHGLPPYSYMCILLGMGGIATSYPPAVGLSDDTAAQKEFAAIRGRAGHLIESLPNQYDYFAQMRKGSLR

SEQ ID NO: 87822 - protein, 546 aa, Acidobacteriia bacterium
  misc_feature (1)..(546): tr|A0A321M1D7|A0A321M1D7_9BACT Tryptophan halogenase OS =Acidobacteriia bacterium AA117 OX=2169412 GN=DMG65_015 75 PE=4 SV=1
MESKPKKVLIVGGGSAGWMTAAYLSKVFGRQVNISLVESATIGTIGVGEATFSTIHLFFKFLGLQEEDWMPACNASYKLAIKFVNWNAERRHFYHPFQRYEVVQGHNVAEWWLKGDREECFDESCFVIPAICEAQRSPRYMDGRVYDNLFAKQVADCPNDSFLLRELKVQYPYGYHFDASLIAKFMAKYAQERGVTEILDEVDDVVLAEDGSILGVQTRAHGRLDADLFVDCTGFRSLLINKALGEPFIPFSESLLCDRAVAMQVPSDPQNEGINPYTSATALSAGWVWNIPLFHRTGTGYVYSSAFISPEEAEREFREHLGERSKGCKPNHIKMRIGRNRNSWVKNCVAVGLASGFVEPLESTGIFFIQHAIEELVNHFPGNSIDPATVKSYNKAIAGCIDGVRDFLVLHYVASTRADSAFWKATKTEIRIPENLAENLELWKRRLPTNRTINPQFHGFEAYSYSVMLLGLGFRPTEGLPILDYCGHAPALKQFENLRSRSEYLVATLPSTYEYLASLYQDNGRKKEIYHKAHAAPVAYPQSRPT

SEQ ID NO: 87823 - protein, 506 aa, Sphingomonas sp.
  misc_feature (1)..(506): tr|A0A2T7VRT0|A0A2T7VRT0_9SPHN Tryptophan halogenase OS =Sphingomonas sp. TPD3009 OX=2171625 GN=DC425_07110 PE= 4 SV=1
MAGERRQTTRVVIVGGGTAGWMTAAAIARLLPHRAEVHLIESEAIGVVGVGEATLPHIRAFNERLGIPEAEFMARTRATFKLGIEFRDWGAIGDSYIHPFGTFGTGSGAVDFHHYYARLLCEGAKLPPLDRLSYACALAREGRFAMPETDRRSLAGTFGYAYQFDALLFAPYLRGLAEEMGARRSEGIVVDVARDGKSGDIVAVTLADGTRIEGDLFVDCSGFRSLLLGEALGEPFEDWSRWLPADRAVAMPCRTETAVTPYTSAIAMPAGWRWRIPLQHRTGNGYVYASAFLSDDAAAAALRGVVEGEALADPRPLRFKAGRRRHSWSHNCVGIGLASGFLEPLESTSIYLVQQAITLLVELFPDGRTSAADRDEFNRVIDLEYDRIRDFLILHYHATTRSDSPFWDYVRTMPIPDTLSEKLELWRRRGRVVKYREGVFLDASWIAVYMGQGIVPAGWDPRADVSPEGDLRRGIGSLAEQIAADVARRPGHRAFIDGYCPMAEAA

SEQ ID NO: 87824 - protein, 462 aa, Amycolatopsis keratiniphila
  misc_feature (1)..(462): tr|R4T0R7|R4T0R7_9PSEU Putative tryptophan halogenase O S=Amycolatopsis keratiniphila OX=129921 GN=AORI_6626 PE =4 SV=1
MRATTQILVIGGGPAGSTAAGLLAKEGFEVTLLERDHFPRYHIGESLLPSCRPILERLGVWDKIAAAGFQPKGGAYYFWGPEEWEVRFRPHGRDGSTSAWQVIRADFDKILLDHAREVGVDVTEGIAVKKLDFDGDRPVAAHWAEAKNPANSGRIEFDYLVDASGRGGVMATKYLKNRKFHNVFRNVAAWSYWKDAKQLDRGPSGAITVASVGDGWFWGIPLPDGTMSVGLVTGRDSFNAARNELGGVDPVYHKAIGDCPAIQQLLIEAEQVTEVKVEQDYSYAAERFQGPGFLLAGDAACFLDPLLSTGVHLGTYSALIGTAAISSVIRGEIGEREAWDFYEVVYRRAYERLLVLVSTFYESYRGKEHHFFRAQQLSEKDWEGMDVQAAFDRFVTGIADLEDTEEVYRRIQGHLLGEESGKHNPLDNLNRVHEHKQAPEKPEKAINGLYLSYEPHIGIRRA

SEQ ID NO: 87825 - protein, 491 aa, Amycolatopsis keratiniphila
  misc_feature (1)..(491): tr|R4T052|R4T052_9PSEU Tryptophan halogenase OS=Amycola topsis keratiniphila OX=129921 GN=AORI_1485 PE=4 SV=1
MSVEDFDVVVAGGGPGGSTVATLVAMQGHRVLLLEKEVFPRYQIGESLLPATVHGVCRMLGVADELANSGFPIKRGGTFRWGARPEPWTFHFGISAKMAGSTSHAYQVERAKFDDILLKNAKSKGVVVREGCSVNDVVEDGERVTGARYTDADGNAHEVSARFVIDASGNKSRLYTKVNGSRNYSEFFRSLALFGYFEGGKRLPEPVSGNILSVAFDSGWFWYIPLSDTLTSVGAVVRREDADKIQGDREKALNTLIAECPLISEYLSNATRVTTGRYGELRVRKDYSYQQDSYWRPGMVLVGDAACFVDPVFSSGVHLATYSALLAARSINSVLAGDLDEKTALNEFEARYRREYGVFYEFLVSFYQMNVNEESYFWQAKKVTQNQSTDIESFVELIGGVSSGETALTAADRIAANSAEFAAAVDKMATGDGDDMVPMFKSTVVKQAMQEAGQVQMKALLGEDAEPELPLFPGGLVTSPDGMKWLPHHPA

SEQ ID NO: 87826 - protein, 495 aa, Shewanella sp.
  misc_feature (1)..(495): tr|A0A2N7CUB3|A0A2N7CUB3_9GAMM Tryptophan halogenase OS =Shewanella sp. 10N.286.51.B7 OX=1880836 GN=BCU84_08685 PE=4 SV=1
MTKKITNVVIAGGGTAGWMAAVAFSKLLGKNINVTLVESDLIPTVGVGEATIPTLHVFHDLLKIKEADFMAATNATFKLGISFENWRDVNQDYMHSFGYIGQSCWAAGFQHFWLKGFNQGVASDIGDYCPEHVASRVGKFAVLPNQDRNHAFHTDAGLYARFLRAFAEKHGANRIEGTIAKVNLNNENGFIDSLTLANGECIAGDLFIDCTGFKGLLIEEALHTGYDDWRHWLPCDSAVAVQTKQTKPLVPYTRSIARESGWQWQIPLQNRMGNGLVFCSKYLTDDQAKALLVENIEGEQLNEPRVLKFRTGTRRKHWNKNCVAIGLSSGFIEPLESTSIHLIQQSIVRLMQNLPTTAMESGVVDDFNQKMRVEIENIRDFIVLHYHVTERQDSEFWRYCKQMDIPESLQKRIDMFKQSGQVYKTDQELFGEASWLQVMLGQGLLPEQYHPIVDNMSDQELAQFLGTIKQSIKRRVNSWPNHIDFINNYCKSNIL

SEQ ID NO: 87827 - protein, 442 aa, Caballeronia peredens
  misc_feature (1)..(442): tr|A0A158F1W3|A0A158F1W3_9BURK Tryptophan halogenase OS =Caballeronia peredens OX=1777132 GN=AWB71_00371 PE=4 S V=1
MQEDAQIWDVAVIGGGPAGSTAATLLAERGYRVRLLEKARHPRFHIGESLLPANLRLFDKLGVAGEVRAIGMVKLAAEFVSPQHENRTQRFLFADAWDKSMPSAYQVRRSELDEILLRNAAKHGAEVSEGCRARDVAFAPDGAGATISAEHDDGRIEEVRARFVVDASGRDTLLANHFKTKRRNERHNSSALYGHFRNARRNAGENEGNITVFWFEHGWFWFIPLADGATSVGAVVWPAYLKRRPKGTSVEAFFRETIALCAPLAERLKDAELMSEVHATGNYSYTGDMTHGRNFLLLGDAFAFIDPVFSSGVMLAMQSAFMGADAIDTALADPSRAAAALAKFDRDVRHGPREFSWFIYRMTSPTMRNLFMGPRNPLRMKEALLSLLAGDIFGKTPIWHSLRAFKGVYYIAATLDWRNSLRAYRMRRRNLSEAERAELSAN

SEQ ID NO: 87828 - protein, 518 aa, Altererythrobacter aquimixticola
  misc_feature (1)..(518): tr|A0A4V6UGB6|A0A4V6UGB6_9SPHN Tryptophan 7-halogenase OS=Altererythrobacter aquimixticola OX=2489173 GN=E5222 _00270 PE=4 SV=1
MNGNDITNVVIVGGGTAGWMAAAALSKYLADGRRRFTLVESDAIGTVGVGEATIPPIRSFNQMLGLDENKFLRETKGTFKLGIEFVNWGKQGDRYFHPFGEYGQDLHGISFHQLWLREVALGGQAGGIHEYSMSSMAAMMGRFGRPAPGAQSLVSQIFYAFHFDAGLYARFLRGVAEGQGTVRREGKVAHVHRDSESGDVTAIELEGGERIAGDLFIDCSGFRGLLIEQALETGYEDWSHWLPMDRAIALPTSLPASPPPFTRATAHGAGWQWRIPLQHRMGNGHVFSSQYMDSEEATRILLDNVEGEPQAEPRELRFVTGMRSKAWNHNVVSLGLSSGFIEPLESTSIHLIQNGIQRLFALFPDKAISPAERDEYNRGMRELYEDVRDFIILHYKATQRDDTAFWRYVRDMDAPESLTRKMELWRLHGRVFRENAELFAMPSWIAVMLGQNIWPQRHDPMADTLDPDKVAGAMAQMRADYRRTAEALPTQEQFLRQAGAWVGDETASGMAASVMAPS

SEQ ID NO: 87829 - protein, 527 aa, Shewanella sp.
  misc_feature (1)..(527): tr|A0A2N7CX40|A0A2N7CX40_9GAMM Tryptophan halogenase OS =Shewanella sp. 10N.286.51.B7 OX=1880836 GN=BCU84_03895 PE=4 SV=1
MAQAIQNIIIVGGGTAGWLTAGILAAEHNADNGKLSPSPKLNITLIESPDVPTIGVGEGTWPSMRSTLKNIGISETEFLIHCDASFKQGSRFFNWTHSANTRNRSGEQYLHPFSLPIGTNELDLCPYWMPHREQVSFADAVGQQNQLSQLFLAPKQITTGEYQFQNNYGYHLNAGKFSQLLQKHCTEKLGVTHIQDHVTSIHKNDNGDISHLATKQSGILKADFFVDCTGVKSLLLGEQLSVPFICQKSVLFNDSALAVQVPYPSPDSEIASCTHSTAQTNGWIWDIGLPTRRGVGHVYSSSHTDQDQAEKQLIDYLRPTVNIDVDNLEFKKLSIAPGHRQVCWKNNCMAIGMAAGFIEPLEASALALVEWSANTLAKQLPANRQVMDIVASRVNQRFSQHWQQIIEFLKLHYVLSKRSDSDYWHDHRESSTIPDSLQQQIELWRTQAPNIHDIQHTDVLFPAASFQFVLYGMEFQTMVPTQLKPSLQHKAQQLFSENIKRTQGLKQILPTNRELLAKIAQYGLPKI

SEQ ID NO: 87830 - protein, 503 aa, Shewanella sp.
  misc_feature (1)..(503): tr|A0A2N7CXG7|A0A2N7CXG7_9GAMM Tryptophan halogenase OS =Shewanella sp. 10N.286.51.B7 OX=1880836 GN=BCU84_03485 PE=4 SV=1
MENNKIKNIVIVGGGTSGWMTAAMLSKLFKNQLSITLIESKDIGTIGVGEATIPPLQIFNSVLGIKEADFIKQTQASYKLGIQFENWGKEQDSYMHAFGDVGKDIGYTQFHHYWKKSQSQASHSQEPSSFWDYSLNYQTAKANKFNLMDRIQGSPLAGITHAYHFDASLYAKMLRQYSENLSVQRIEGLITSAELNSQGNIESVTLKDNQVINGDLFIDCSGFAALLIEKQLNVGYENWQHWLPCDSAYAVPCERSEPLVPYTRSIAHNAGWQWRIPLQHRTGNGLVYSSKHISDEAAKALLLDNLDGKALAEPKKINFKTGRREMQWHKNCIAIGLSSGFLEPLESTSLHLVQSAIIRLTKFFPHNGIQQANVDEYNRQSKLEFEQIRDFIILHYHVNNRANSSNNPDLWQQCRDMQIPDSLEQKIELFRATGTVTRYQDELFTEAAWVQVLLGQGIEPDDYNPLANNITDSDLKEFLANVKQIIATAVNQMPSHDDFIKRL

SEQ ID NO: 87831 - protein, 533 aa, Streptomyces sp.
  misc_feature (1)..(533): tr|A0A1V0R8N1|A0A1V0R8N1_9ACTN Tryptophan halogenase OS =Streptomyces sp. Sge12 OX=1972846 GN=B6R96_31210 PE=4 SV=1
MTSSDTRLQKVVILGGGTAGWMTAAYLGKALQGTVDITVLEAPSIPRIGVGEATVPNLQRSFFDYLGIAEDEWMRECNASFKMAVRFVNWRTDGQGESTARELPGGGPDHFYHPFGLLPDYDQTPLSHYWFKRKYEGRTTEPFDYACFREPPVMDAMKAPRWLDGRPATRYAWHFDAQLVADFLRRFSTEKQGVNHVQDEMVRVEQDGRGYVTTLHTKGGLALDADLFVDCSGFRGLLINQAMAEPFIDMSDHLLCDSAVATAVPHDDEANGVEPYTSAIAMSSGWAWKIPMLGRFGTGYVYSSKFADQDTATREFADMWGLDVEETKFNHIRFRVGRNRRAWVKNVVSIGLSSCFLEPLESTGIYFITAAIYQLAKHFPDKTFNEGLVNSFNHEIEVMFDDTRDFIQAHFFYAPRNDTPFWQANKKLVLPENIQQKISAYKAGLPINSPITDESTYYGNFEAEFRNFWTNGSYYCIFAGLGLEPDAPLPSLAHRPDSVASAEPLFDAVKRQQQNLLETLPSAYDYLRQLHGA

SEQ ID NO: 87832 - protein, 499 aa, Sphingopyxis sp.
  misc_feature (1)..(499): tr|A0A095AL37|A0A095AL37_9SPHN Tryptophan halogenase OS =Sphingopyxis sp. LC363 OX=1120705 GN=FG95_03752 PE=4 S V=1
MSDRKPVQRVVIAGGGTAGWMMAAAIARTMGHTVDLTLVESEAIGTIGVGESTIPPLVNFNRILGIAETEFMRAAQATFKLGILFDNWKHDGDSYFHSFGLSGKDHWSAGFQHFWLNARERGHEQPYADYCLELVAGMQGKFAHLPEERMNYAYHVDATLYGRYLRKLAEADGCKRVEGKIARVELDGTSGDIAALHLDGERRIEGDMFVDCTGFRGLLIEGALHAGFEDWGHWLPNDSAIAVQAKHLGPPMPYTQAIAHDAGWQWRIPLQHRMGAGIVYASGYLSRDAAYERLMSSVGEPLIEPFDIKFRGGVRRKQWFRNCVAVGLAGGFVEPLEATTVHLIQRAVLRFIRLMPNGRVSERDAMEFNDQQRLDIEQIRDFVVLHYKATNRRDSPFWRHVAAMPIPDSLQQKIELFRETGRVFRKNEELFAENSWVQVMMGQGIEPQTYHPIAAKLRDDEVERLFQTLRDNIEQTVATLPEHHSYVARYCGAEEPKAA

SEQ ID NO: 87833 - protein, 513 aa, Acidobacteriia bacterium
  misc_feature (1)..(513): tr|A0A321M1M8|A0A321M1M8_9BACT Tryptophan halogenase OS =Acidobacteriia bacterium AA117 OX=2169412 GN=DMG65_019 95 PE=4 SV=1
MNNGKNSTENFDVIVTGGGPAGSTVASFIAMEGNKVLLLEREKFPRHQIGESLLPATINGICVMLGVSEELAKANFTYKLGGTYRWGRHPEPWSFTFGPSSMIPGSQAFAYQVERMKFDHILLNNARRKGVDVREQHTVTEVLEEGGRVVGVSFNDDQGQKKTAKARYVIDASGNTTTLSRTVGERIYSKFFQNVALFCYFKDGKRLPPPYSGNILSEAFSEGWCWYIPLSSELTSVGAVVAREHADRLKAGPEAAMQHFLNSTVMVKDFLSSATRIIEGPYGQYRIRKDYSYCNTRFWAPGALLIGDAACFVDPVFSSGVHLATYSALLAARSVNSCLRGEIGEERSFNEFEERYRREFSNFYQFLVAFYDMDKDMDSYFWSARKVLNTEERANDAFIRLVSGTSFTGEPLFSNAAEFFQAHVGVGDLFRTAYEEAANPIDDRNFDISKFDIAKFNPKDFIRDFRRGIVGLIRQAQTGTHRREAPVFDGGLISSSNGLSWMEPAEGDAAAGD

SEQ ID NO: 87834 - protein, 511 aa, Rheinheimera sp.
  misc_feature (1)..(511): tr|A0A437QIS8|A0A437QIS8_9GAMM Tryptophan 7-halogenase OS=Rheinheimera sp. KYPC3 OX=1834037 GN=EOE67_15920 PE= 4 SV=1
MQQVQFGAAASDAYSSIKNRPIKKVVIAGGGTAGWMTGAAISKLLGKNLDVVLVESDEIGTVGVGEATIPTLHIFHRLLGINEQEFMAATNATFKLGIMFENWLQQDQKYLHSFGFLGKDCWACGFQHFWSKAQQRGIAREIGDYCVEHLAARQGRFAVLPNQDLNHAYHMDATIYAKYLRKLAEQHGLKRVEGKIAEVQQHADGHISALRLMSGELIEGDLFIDCTGFRALLIEQTLNTGYEDWSHFLPCDSAIAVQTKTTESPVAYTRAIAHPSGWQWKIPLQSRVGNGMVFCSKFMSDDEAKALLLANIEGERLIEPRVIKFRTGTRHQHWNKNCIAIGLSSGFLEPLESTSIHLIQRSIVRLLQMFPSNGIQTAEVDEFNKQTQIEMHNIRDFIILHYKATQRDDSKFWRYCRDMAVPESLTHRMELFAQSGKVYKFAQELFGESSWIQVMMGQGILPAQYHPIVDAMSDGELTDFLGTIAANVQKTVQNFPTHQDFLQYYCKSAIV

SEQ ID NO: 87835 - protein, 544 aa, Luteimonas sp.
  misc_feature (1)..(544): tr|A0A5C5U1W9|A0A5C5U1W9_9GAMM Tryptophan 7-halogenase OS=Luteimonas sp. YD-1 OX=2599615 GN=FQY79_06505 PE=4 S V=1
MSEGRIRRVVIAGGGTAGWIAACALTHQFPKDVLKVVLVESEQIGTVGVGESTIPTIRTFHDLLGIDEREFMSSVAASFKLSISFENWLRPGHRYFHPFGLTGLNTWACEFHHFWLDSRRRGVQSELGDFCLETVASRADRFVLLGKDGSAGQWSTRWASGGMSPDRLRVNYAYHFDAGLYAAYMRERAERQGLVRIEGRIEQVRQHPETGYIEALVLDDGTVIEGDLFIDCTGGRAVLSEQALKTGYEDWDNWLPSNRAVALQTEADGPAVPYTRAIAHEAGWHWKIALQHRIGCGIVFSNAHMSDDEATARLLKENPAKPLRDPWIIPFRTGRRRKAWNKNVIAIGLSSGFIEPLESTSIHLTLSGVARLIKLFPHDGIDESMVRRYNDVSRSEMEHVRDFIILHYHLNQRDEPMWQQVRHMQLPDELAHRIQMFRDRAHATQGENELFRLDSWTHCLLGQGVEPRSWHPLARTLADDDLKRLFDGIRQPIRQAVAAMPSHQQFLDQYCKAPQSAWELMYERARAHARITGKIAGVGGELRQ

SEQ ID NO: 87836 - protein, 493 aa, Rheinheimera sp.
  misc_feature (1)..(493): tr|A0A437QG95|A0A437QG95_9GAMM Tryptophan 7-halogenase OS=Rheinheimera sp. KYPC3 OX=1834037 GN=EOE67_16305 PE= 4 SV=1
MIKKVVIAGGGTAGWMAAALLKKVLHQQIDVELVESDDIGIIGVGEATIPPIQVFNQYLGLDEAEFLRETKATIKLAIKFENWKTKGESYYHTFGAPGAQLGFCPFQHYWLQAKKAGLTESLWDFDLNFLCAEQGKFNIIKTPNPLYEMPYAYHFDSGLYGRYLRKIAEKAGVVRTEGMIEHIQQDAMSGHIRSLHLKDGRQIDGDLFIDCTGLRALLIRKTLGVAFENWSQYLPANSALAVPSERFAQTLPYTRSIAHKVGWQWRIPLTHRNGNGLVYCSDYLSDDEAHHTLMGNLDSKALAEPRKISFQTGRTMQQWCKNVVSIGLSSGFLEPLESTSIHLIQSGIVRLLKMFPHQQISQTVIDYYNADSKQEFETVRDFIVLHYHVNQRDDSKFWRDMRQMAIPARLTEKIALFQETAAIFNDQNDIFRDASWLQVMLGQGIAPRDYHPAAKAVPDAQLLQTLQKIRGAKQQPLAQMLSHDEFLLRYTKQ

SEQ ID NO: 87837 - protein, 433 aa, Kangiella koreensis
  misc_feature (1)..(433): tr|C7R9X3|C7R9X3_KANKD Tryptophan halogenase OS=Kangiel la koreensis (strain DSM 16069 / KCTC 12182 / SW-125) O X=523791 GN=Kkor_2584 PE=4 SV=1
MPELNSQYDVIIIGAGPAGSLAASLLTQNNVSVLVVEKQHFPRFSIGESLLPQSMVYLQEANMVDAIKAAAPELGFQYKDGAAFFADNHPCHFDFGEKFTPGPGSTFQVKRAPFDQLLAQVAEQQGATFCFGQQVTQVRLQDPCIVTLQDEDGTSRDIQTRFILDASGFAKVLPRLLDLTLPSTFPVRSSVFCHVQDNIDSKTYDRNKILIETHPQCKDVWYWLIPFADGTASVGCVAKPDFFEKLESEQLETVSSSHEHSSHEHSVHEQWFDEAVNQSVRIKQLLATSTKANSVQYITAYSSNVKQLFGERYALLGNAGEFLDPIFSSGVTIAFKSAKLATDVLLKQLNDEDVCWQSEFADPLQQGVQTFKAFVESWYQGQLQDIIHFDDAPENIREMVCSILAGYAWDTNNPFVKHAKRRLNTLGQLCATS

SEQ ID NO: 87838 - protein, 519 aa, Alteromonadaceae bacterium
  misc_feature (1)..(519): tr|A0A1Y6BSR6|A0A1Y6BSR6_9ALTE Tryptophan halogenase OS =Alteromonadaceae bacterium Bs31 OX=1304903 GN=SAMN0274 5866_01666 PE=4 SV=1
MGNAVKNIIILGGGSAGWLTAGLIASEHGIDRARGMNITLVESPDIPIIGVGEGTWPTMRRTLKKIGVSESDLFKECEASFKQGAKFEKWVNGTADDFYYHPLVEPLGYSDTELFYQWKNGEYNTSFGDAFCFQGHICEHGRAPKLITTPEYSGIANYAYHLNAYKLGEFLKKHCINKLGVNHVIDNVLKACSHDNGDIAALETENKGLLKADLFIDCSGLSSILLGKHYGIPFISKRHILFNDSALAAQVPYREPDDAITSHTISTAQKNGWIWDIGLPSRRGVGHTYSSAHTSDEQAEIELRQYICHSLGEQRSAELSLRKISFEPGHREVFWHRNCVAVGMASGFLEPLEASALVLVEMAANRISEEMPANRTVMDIVSKRYNQRFLYNWDAIVDFLKLHYVLSKRTDSQYWLDNVSKESIPERLRELMLLWRYQPPNRHDFPYAEEVFPSASWQYVLYGMGFNSSQRPTRKAMNRSALSDKYFRETQEFAARCVSKLPSNRELIDKIVQFGMQPV

SEQ ID NO: 87839 - protein, 525 aa, Altererythrobacter aquimixticola
  misc_feature (1)..(525): tr|A0A4V4U994|A0A4V4U994_9SPHN Tryptophan 7-halogenase OS=Altererythrobacter aquimixticola OX=2489173 GN=E5222 _01020 PE=4 SV=1
MTQFDPGEHLPQPPSDQSLRRVLVVGGGSSGWMAATMLATTLSKDISVELVESEAIGIVGVGEATIPPMQKFNHFVKLDEAAFMAATQGTFKLGIEFHNWGRKGDRYLHQFGAVGREIDALVKLHHWWLLGRLAAAQDGRPYPQFQELYVAQAAARENRFAPAGRPKDQLPNRYTHAYHFDAHLYARHLRSVAEERGAVRHEGRITDVERDGESGFVSAVVLEDGRRLEADLFIDCSGFRSLLLGGALEEEWDDWSRYIPSDRALAVPSKRPDGDIRPYTQGIAHSVGWQWRIPLQHRTGNGHVFASAFSSESEAEERLLATIEGEALDTPRLIKFRTGRRKRAWVKNVVGLGLSSGFLEPLESTSIHFVQSALERLVDYFPTRAMDPALAEAFNRRTEQEWLDVRDFIVAHYHLSEREDSEFWRYTRNMAIPDSLAHVLDVWRARGILDISGGHLFQLGSWSSMLIGQRCLPGGVHALADRADPAYAAQAVRRIADECRTAASRLPKHADFIAGYCAAQPMEMA

SEQ ID NO: 87840 - protein, 500 aa, Sphingopyxis sp.
  misc_feature (1)..(500): tr|A0A095B3T6|A0A095B3T6_9SPHN Tryptophan halogenase OS =Sphingopyxis sp. LC81 OX=1502850 GN=FG91_00026 PE=4 SV =1
MNEDKRVQRIVIAGGGTAGWMAAAAIARTLGQAVDLTLVESEAIGTIGVGESTIPPLVNFNRILRINEADFMRATQATFKLGILFDDWKDLGTQYFHSFGLTGKDHWSAGFQHFWLYGRTKGHQQPYDDYCMELKAAIAGKFAHLPEDRMNYAYQLDSGLYARFLREMAEADGTKRIEGKIARVELGGTSGDIAALVLDGDRRIEGDLFIDCTGFRALLMEGALHAGFDDWSNWLPCDSAIALQTPNVHPPVPYTRVMAHDAGWQWRIPLQHRTGNGIVYCSRYLDKDAALDRMLGNIEGDVLTEPNFLRFTAGTRRKQWYRNCVAMGLSAGFMEPLESTAIHLIQRSVLRFIRMLPAGRVSERDVAEFNEQQMQDMLQIRDFLVLHYKVTNRRDSPFWRHCAAMPIPDTLAQKIELFRETGRVFRKNEELFAENSWVQVMMGQGIEPQSHHPIAEKLRDDELDRLLEAIRSEVRQTVASLPAHQDYVARYCGAAVPQAA

SEQ ID NO: 87841 - protein, 501 aa, Novosphingobium fuchskuhlense
  misc_feature (1)..(501): tr|A0A117UVD1|A0A117UVD1_9SPHN Tryptophan halogenase OS =Novosphingobium fuchskuhlense OX=1117702 GN=AQZ52_1230 0 PE=4 SV=1
MRIVVAGGGTAGWMAAAAFGHFLDAGFTVTLVESEEIGTVGVGEATIPQIRMFNQALGIDEDAFIRATQATFKLAIEFVGWGAPGERYMHAFGDVGRDVGLCAFHHIWSRGHRLGLAGPLGNYAINDIAAHAGRMHRGSPLTSRNVPEMPHAFHFDAGLYAAFLREFAEGRGVIRREGKIADVRKEPLSGDITALVLASGEEIAGDLFIDCTGFRGLLIGGAMGSGYVDWTNWLPCDRALAVPSGRVEDFTPYTRATAHTAGWQWRIPLQHRTGNGRVYCSAFTSDEEAAESLLAHLDAPALADPRPIRFTTGRRVEAWRGNVIAVGLSSGFLEPLESTSIHLIQSAISRILKFMPGKEQTQAERDAYNHQFTFEMERIRDFIVLHYHVNQRPEPFWQAMREMALPDSLAERIELFRANGHIFRHGDELFSEVGWFQVMAGQGIVPKRSHALAETIDEADLKSYLETLNGLYRREVERYPSHAEFIVQHCAAPPINLGVAA

SEQ ID NO: 87842 - protein, 561 aa, Alteromonas sp.
  misc_feature (1)..(561): tr|A0A010QAL0|A0A010QAL0_9ALTE Tryptophan halogenase OS =Alteromonas sp. ALT199 OX=1298865 GN=H978DRAFT_3483 PE =4 SV=1
MSNSQNQYGLHRVVIVGGGTAGWLSAGVLAAKLSAKHSVTLVESPTVSSIGVGEGSWPSLRDTLQDIGINESEFLTLCQGAFKQGSSFVNWRKGGHRYHHPFTIPTGYNELDLHACWQAFAPDVKYEDAFSLQAAMCAADKAPKQIATPDYAHVLNYGYHFDATKLAELLKKHCVDKLSVDHVIGHIATVISHPNGYIEKVVTECGQEVFGDLFIDCSGNNGLLIDKHFNVPWVPVKHAMLNDRAIAVQVPYADNDNEIKSTTMATAQTCGWTWDIALQHRRGTGLVYSSQFTNAEQAKQVLIDYVCERYPGAKEHELSFRTLSFEPGYRSQFWVKNCLSLGMSSGFVEPLEASAIAMVELGLRMLCEAFPQNKAHMEIVSKRYNTRFEYRWQRVIDFLKLHYVLSDREEPYWVAQRSDASIPDSLAELLKLWKFQSPSRLDLIENEEIFPSASYQYVLYGMGFTTLAPPLCMNEKEKRKSLHIRETLQQTKNTYFQGLPTNNALLKDIAKRYNDEQKHLHAHFQRQDYGHTLASSDSATDINNNTSLNKKDTSYDRIGFR

SEQ ID NO: 87843 - protein, 501 aa, Alteromonadaceae bacterium
  misc_feature (1)..(501): tr|A0A1Y6BRZ9|A0A1Y6BRZ9_9ALTE Tryptophan halogenase OS =Alteromonadaceae bacterium Bs31 OX=1304903 GN=SAMN0274 5866_01665 PE=4 SV=1
MSDYKLNVVVAGGGTSGWMAAAAISKLLSDKVNVTLIESDEIGRIGVGEATIPPLREFNRLLGIDEQDFMSSINATFKLGIEFNNWGRKDDSYIHSFGVTGRDCWACDFHNFWLKGKNEGIVEDFGQYCVELQAARHKRILGSDQHGVNYAYHLDAGLYAQYLKELALKNNTRRLEGKIVSVNLCEKSCNIKSLSLDDGMLVEGDLFLDCTGFKALLIEGALNVQYEPYGQYLPCDSAIAIQSEISGEPRPYTQAIAHDAGWQWRIPLQTRVGNGLVYCSRHLSDENAEQLLLKNLESRPITESRMFRYKTGRRIEAWKNNCIAIGLASGFLEPVESTSIHIAMSSILRLLRLFPVDKTFSNTLVAEFNQQTKTEMEQIRDFIIMHYNVTERDDSEFWRYCKNMSIPETLKHRLELFQQTAAFPIMEKELFKIDSWIQVMMGQRLVPESYHPIVDLLSKKELEGFFYSILTKVRSSVENMPGHQDFINQYCKSKEAEGLPK

SEQ ID NO: 87844 - protein, 587 aa, Microcystis aeruginosa
  misc_feature (1)..(587): tr|A0A552BNS7|A0A552BNS7_MICAE Tryptophan halogenase OS =Microcystis aeruginosa Ma_OC_LR_19540900_S633 OX=24862 61 GN=EWV62_06630 PE=4 SV=1
MMKTTNSVRQFVYDVVIMGAGFAGVCQARHLMLKVPNIKIALIDPRPENRSDKDLKIGESTVEIANLFICKELGLYEYMIENHPPKFGLNFHWPKDSHKTDTIEDYYHIWTNRQPPLASSQMNRAKFERDLLRMNKEMGVDFYNGRVVDVTIHPGNDPHQVKVKLHDEVIELTAKHLVDAAGRQFIIGKKTDNVIFDPEHLCGVNTGSAWVRVKNIDRTLFHSGYDPEATSCSHYYATNHWFGQGHWLWMIPTDTDTQEISIGVIHHHEIIPADYLNQEQKFYAFLKANHKLLYDLLSSGEKIDFHYWPRIAHTSKEVLSADNWYVIGDAAYIFDAFYSMGTSLTTFAIESVTEVIRSKLAGEADAEVKRVAYNQFNLAQAEGVNQLMRDHKTQLGHASIMSWRIYFEYIWWFGILVPLYVGKWHLNVSFIEGFVKIHRQTVNSLFVEIYEQLNQLVERKANLGLLDCYRGDQLLGDYQPLVHFDSFLENVQYEPFRSNIFTSIKYTHFYGAIWYLVFQWRGFGLGGVIAPKHLYHFLRLLLLSGVASFGEFYHRLKMKKIPHNHQIACTTEEFKHYQYQSSLNPWF

SEQ ID NO: 87845 - protein, 473 aa, Acaryochloris marina
  misc_feature (1)..(473): tr|B0C5X8|B0C5X8_ACAM1 Tryptophan halogenase, putative OS=Acaryochloris marina (strain MBIC 11017) OX=329726 G N=AM1_5024 PE=4 SV=1
MGTKDQTTFDVCVIGGGPAGSVVSHRLASLGYKVCIIESQKFPRPNHIGASLLPSTLPLLDCIGVRESVENTGFLLHERTIVWWSETFPIYKNQHEQPGFHVDRGQFDQLLLQNAKENGVEVHQPAHAFRPERIKTQKWQIRIRQDGMQRTILSKIVVDASGGRSLVPGRRILASAPLLALYAYWKGTNFQTIEARIEAGESEWFWYAPLSQNKAVTAVFLDPSCLSLNSKQGIENIYHKLLNRFRLFPAKFIKGIEGKVKICDASTRYAENPIGDSFIRIGDACLCLDPLSSQGIQSAVASGLQAAIIINTFLKYPEDTELAISFYNARQKEKRNEYITKTASFYQQVAAVRNKLFWHQRATFPEGQLAPILKTKSFDGNCKIQLSDHAYMNSTPIIEGNRIISKHALYHDMLSRPIAFVGGVEIVPLLRKVSPGTTIQDILQVWSKNLPVELSYNIMAWLWIRKIIVPFHL

SEQ ID NO: 87846 - protein, 561 aa, Phaeobacter inhibens
  misc_feature (1)..(561): tr|I7DTD4|I7DTD4_PHAIB Putative tryptophan halogenase O S=Phaeobacter inhibens (strain ATCC 700781 / DSM 17395 / CIP 105210 / JCM 21319 / NBRC 16654 / NCIMB 13546 / B S107) OX=391619 GN=PGA1_c26580 PE=4 SV=1
MNNRLRKITIVGGGTAGWMTALILETELSRTSAPKDRPKICLIESPNIATVGVGEATVPRMPKTLRQAGISERAFFRETNASFKLGVKFCNWNKDAKGNRIDYVNPFAHGQLLDGLEPAEYFLRFGNGDRDYTQSIAPHDDLGRLCKGARPLGQPEFEQRFGYAYHLDAVKFAGMLTKVCTKHGVEHIQDEVTSVELDEQGNVSHLMLEQRGRHDIEMVIDCTGFRGLIINQALGEPFMDYSDYLPNDRAMALQIDHPDPEKIESLTRSTALGAGWTWRVPLYNRVGTGYVFSSAHRTDDQAADEYLEWLGDSGKGATPRIIPMRIGRVRNAWVKNCVAIGLAGGFIEPLESTAIHMIDHAVRWLTEHMPTRDIAPSLRTRYNRQMDKLYDEVLEFICLHYRLGNRTDDQYWIDARTEMKIPDRLAENLELWQHRLPMSHDIEFATLFDYRVYQTVLLGKQVYDTGYGPGIRDRLRPLKKPIWFQWWKGAKADLAQILKAMPDHKTLLRDIRGELDQPGFGMAAAMKPTVPMPGAAPVPWAIQNMPSFSEIESGQKDLQLF

SEQ ID NO: 87847 - protein, 504 aa, Alteromonas sp.
  misc_feature (1)..(504): tr|A0A010PBW3|A0A010PBW3_9ALTE 2-polyprenyl-6-methoxyph enol hydroxylase-like oxidoreductase OS=Alteromonas sp. ALT199 OX=1298865 GN=H978DRAFT_0131 PE=4 SV=1
MTAKLKIFILGGGTAGWMTANLLAKAWEKQGVSITLMEAPDVPTVGVGEGSTPYIRRFFERMNISESEWMPKCHATYKTGIRFTDWSTTPGFQHYFHPFTTELDNVTFNLFKHHVSLRRQGLNIHVHPDDYFLMTRLANNFQLPSSNDFVKQQTFYAYHFDAKLLGDYLKNKALEQGVSHVEGKVLGVEKHPNGDIAAVHDQSLQRFDADIFIDCSGFKSLLMQKALKVPFISYGDTLLNDAAVAIPTAAEKPYCPQTLSAAMPCGWRWKIPLTQRTGNGYVYSSSHLSAEDAEKQLRHSLGADSETNAAHHLKMKVGRNTKHWYRNCLAVGLSQGFIEPLEATGLQMTLVTIEQFITHFEKGKYTNEYQDNVNNGINAAFDHIRDYVSLHYLANSRNDTRYWQDCRNDIAISDSLKRVLEVWSQGGDLEQELNQQNISQYYPSLSWFAILTGMGIYPKTCTVDKKEIERFHQARANMASFFNNYITPSGKGNSAQQHGVVRYA

SEQ ID NO: 87848 - protein, 527 aa, Rhodopirellula islandica
  misc_feature (1)..(527): tr|A0A0J1EPZ5|A0A0J1EPZ5_RHOIS Tryptophan halogenase OS =Rhodopirellula islandica OX=595434 GN=RISK_000637 PE=4 SV=1
METDDTTVLHHDQQLGDSPSANAPHIVVVGGGTAGWMSAATLKRRLGCRVTVVESARVPPIGVGEATIPAIVDWIENMGIDEDDFIRRTGATYKLAIRFDNWVEPQHRYWHPFGICGSPIDGVDLIHTWQRGVRQGWIPVESKYTDYSFQRELCERGRGPRAPGQPSLAHNYAFHLDAGKLAAFLQEIAINEGVQHVVADVCGAAHDEQGNIQSLSLDGQTAVAGDLFIDCSGFASVLIEREMRSEWTDWSGQLICDRAITMRRPRNELGDDEESSAELPPFTISTGMNSGWSWQIPLHENTGCGYVFSSAHISDEDARSELIDLVGGDGETMETRVVPMRVGMRPMSWVGNCVSIGLSAGFVEPLESTGIFLVQRALDELVECLPTTILPGVFDKRSCDTQSFNTRMTEVYAQVRDFVLMHYVVSQRRDTAFWKEAATVALPDSLARLLEEYTRTGRVLMPQRDPTFLDVNHHYILSPAGVQPGCLPGARDSQPGTAQFLEHIRSTHTEIAMRLPSHASLIDTIHP

SEQ ID NO: 87849 - protein, 500 aa, Streptomyces qaidamensis
  misc_feature (1)..(500): tr|A0A143CDU1|A0A143CDU1_9ACTN Tryptophan halogenase OS =Streptomyces qaidamensis OX=1783515 GN=A4E84_32635 PE= 4 SV=1
MTAAYLRAAFGERISVTVVESKRIKTIGVGEATFSTVRHFFSYLGLPENVWMPRCNATYKLGIRFENWRRKGHYFYHPFERLRKVDGFPITDWWLDRRTGDRFDQDVFLMAAICDAERSPRHLDGTLFEQEFKERGDSEAERSTLAEQDTQFPYAYQFDASLLAEFLTEYATERGARHIEDDVVEVAQDERGFISAVRTREHGDVEGDLFVDCTGFRGLLINQTLDVPFQSFQDMLPNDSAVALRVPVDMEQRGLRPCTTATAQDAGWIWTIPLFGRVGTGYVYASDYTTPEEAERTLREFAGPGAEGLEANHIKMRVGRSRSSWVKNCVAIGLSSGFVEPLESTGIFFIQQGIEELVKHFPDESWDPGVQASYNRTVADAIDGVREFLVLHYRCAARADNDYWRDAKKRVLPDGLAERLEIWKSRTPTAENIYPHYHGFEAYSYHAMLLGLGGLELRPPAALRLMDGAGAEREFQMLRDQSKELVSRLPSQYEYLAQMH

SEQ ID NO: 87850 - protein, 520 aa, Novosphingobium fuchskuhlense
  misc_feature (1)..(520): tr|A0A117UXC3|A0A117UXC3_9SPHN Tryptophan halogenase OS =Novosphingobium fuchskuhlense OX=1117702 GN=AQZ52_0487 5 PE=4 SV=1
MAHAGKRQGAAEGNALVNEGDRRIRSVLVVGGGSAGWMSAAMLATMLKRDCRITLVESDEIGIVGVGEATIPPIRLFNETLGISEADFIRETRGTFKLGIEFVDWGSVGSRYFHPFGPHGRNFDMVPLHQYWLKTREEPGAFPLDELSMAWQIARAGRMARPVPDQRSLLSTFDYAYHFDASLYAAFLRRHAEARGVTRVEGKIGDVTLNGETGIVESVTLEDGRTLEADLFIDCSGLRALLIEGALKTGFEDWSHWLPCDRAVAMPCANAGPPTPYTRSTAREAGWQWRIPLQHRIGNGYVYSSPFLEDDKAAELLTSRLDGEALGDPRFVRFRTGRRKLHWNRNVVAVGLSSGFLEPLESTSIHLIQANISKLIGLFPDRDFDPATIDEFNRIAHAETDRIRDFLILHYKLTQRQDHELWRYVSSMDVPDTLALKLEHFRRHGRLIAREMDLFAPASWLAVHIGQHNYPEGLDPLIAHRGIDARDYLAKLRAGMAAEAAKLPSHEAYIAGLIGAPAAA

SEQ ID NO: 87851 - protein, 510 aa, Alteromonas sp.
  misc_feature (1)..(510): tr|A0A010PKB6|A0A010PKB6_9ALTE 2-polyprenyl-6-methoxyph enol hydroxylase-like oxidoreductase OS=Alteromonas sp. ALT199 OX=1298865 GN=H978DRAFT_3224 PE=4 SV=1
MNHSSNTSQKQRIVIVGGGTAGWLTAAIVAAKHKVAMGECGLDITLVESSDIPTVGVGEGTWPTMRNTLKDIGLSEKEVFRRCSAAFKQGGKFVSWVKGNGDSYYHPFTVPLGYGRVEMAPYVGDVANFANATNFQQHVCERNMAPRTLSEQEYSSAQSNYAYHLDAGAFADMLRDFCKTELGVKHIVATVQSVAATSSEHIENVTLNNGMVLDADLFVDCSGFRSLLLGETLGESVISTDDVLFNNSALALHVPHEEDFEIKPYTQATAQEAGWIWDIGLSSRRGVGHVYSTDFTTDERAEEVLRQYVGDEHGDLKARTIRFNSGYKKRIWKGNCIGVGLSAGFVEPLEATALMLIEISARYIAEQMPLPASAMPIVSQRFNKQMNYRWQRIIDFLKLHYIFNQRSEPYWVANRDASSIPDSLKEDLEIWKYRGPQIADFSAAIELFPAASYQYVLYGMGFSPDFSLQSHFYNERDLADKVIQQNQLITQQKLSSLPNHRDYIEQWLAS

SEQ ID NO: 87852 - protein, 497 aa, Alteromonas sp.
  misc_feature (1)..(497): tr|A0A010Q4W8|A0A010Q4W8_9ALTE Tryptophan halogenase OS =Alteromonas sp. ALT199 OX=1298865 GN=H978DRAFT_1386 PE =4 SV=1
MINQTVKNVVIVGGGTAGWISAAVIKRLIGEGVNVTLVESEEIGTVGVGEATIPPIITLNNVMGIDEKEFLRETNATMKLAIKFENWRVQGESYFHTFGAAGKSYAFCHFHHYFKRAQELGLSDSIWEYDLNYLACKAGKFAHIKSPDPIIEMPYAYHFDASLYARFLRKKCEAMGVTRREGIIVDVKQDSNTGFITGVTLKDGAHIEGDLFIDCSGFKGLLTQQTLNTGYEDWSHWLPCDRAVAMPSERHEHTHPYTRSIAYAAGWQWRIPLQHRNGNGLVYSSNYYTDDQALDILSSNLDTRPLADPNFIRFRTGRRRKQWNKNVVAVGLSSGFLEPLESTSIHLIQSAVVRLIHLFPHDGFKQHQIDEYNKQSQLEYEQIRDFIILHYHVNERTDSHFWKDLREMDVPDSLTHKIELFRESGNLFREQNDLFLESSWLQVLMGQGVIQKDYHPLANALSEQKLQELMQNIKRIKNEPIDKIASHDDFLKQFCGS

SEQ ID NO: 87853 - protein, 510 aa, Streptomyces griseoflavus
  misc_feature (1)..(510): tr|A0A0L8MMY8|A0A0L8MMY8_9ACTN Tryptophan halogenase OS =Streptomyces griseoflavus OX=35619 GN=ADK76_35110 PE=4 SV=1
MGERAVANSANAGNPANPETYDVVIVGGGPAGSTLGALVARQGHRILILEKEFFPRYQIGESLLPSTVHGVCRLTGVADDLAAAGFTRKRGGTFRWGATPEPWTFSFSVSAHMAGPTSYAYQVERSKFDEILLRHAGRCGAEVREGCAAADVIADEERVRGVRYTDADGAEREAYGTFVVDASGNKSRLFQRVGGQRTYSEFFRSLALFGYFEGGKRLPEPNSGNILSVAFDSGWFWYIPLSPTLTSVGAVVRREMAEKIQGDQEEALRALIAECPLISEYLANARRVTTGQYGQLRVRKDYSYHQTTFSRPGMMLVGDAACFVDPVFSSGVHLATYSGLLAARSINSVLAGLVDEAVALREFEARYRREYSVFYEFLLSFYEMHHSEQSYFWRAKKVTHHRRSEMEAFVDLVGGVSSGEAALIDADAMAERLRADSAEFAGAVDQLAHSEDGSMLPLFKSSVVSQVTREGSQVQMRALLGADAEPETPLLPGGLVSSPDGMFWLPASSG

SEQ ID NO: 87854 - protein, 512 aa, Stenotrophomonas sp.
  misc_feature (1)..(512): tr|A0A4V2FGL2|A0A4V2FGL2_9GAMM Tryptophan halogenase OS =Stenotrophomonas sp. BK441 OX=2512175 GN=EV592_0141 PE =4 SV=1
MTEGNRVDNRRIRKVVIAGGGTAGWLAGCALSHQFGRELDITLVESEQIGTVGVGESTVPPIRAFHHFLNIDEQEFLRAVAGTFKLSISFENWRRPGERYIHPFGMTGQNTLVCHFHHYWLDSLRRGMESSLGDYCLETVASRGDRFALGTQPQVNYAYHFDAGLYARFLRARAEKQGLVRVEGKIQQVHQDPHSGDVVALTLEDGQRLDGDLFIDCTGFRGLLTEQTLHTGYEDWNQWLPSDRAVAVQTESVGPPVPYTRAIAHEAGWRWHIALQHRVGCGLVFSSKHMSDDEARAKLLRDVGAPAIKEPWLVPFRSGRRLKAWNRNVVALGLASGFIEPLESTSIHLTISAIVRLLQLFPSSGDEDALRTLYNETSQKEMEHVRDFIILHYHATQRDEPMWKAAREMELPESLAIRLRAWRERAHAWQGTDELFRVDSWTHVLLGQGTQPGAPHPLARALSDADLSRLLAAVRQPIERTVAQMPSQQGFIDRYCKAPPEVWGARKPVAFA

SEQ ID NO: 87855 - protein, 737 aa, Mucilaginibacter ginsenosidivorans
  misc_feature (1)..(737): tr|A0A5B8UT13|A0A5B8UT13_9SPHI Tryptophan 7-halogenase OS=Mucilaginibacter ginsenosidivorans OX=398053 GN=FRZ5 4_05295 PE=4 SV=1
MSKTASPMKIILTARQTGSVLYNFLLVQLNYIEWVSCTGLDYQAVKNGSEADFYINILEGNTLGEIIDICAFFRNKKKKSITVSSWNNSLVTGPTHFPGKSAGADSAILILQQEYGHPADKLELKSQITSTVSANDVRDNPDIFYTAFAGLLNELKILYNDKPAQRLNFVDGVRLFRLHQKDQATYESKYIYPIFDNGADGVPHESLADYKVLVGKFLHSVSQIKNGFFNAPPPEGPEDEYKNVAIIGGGTAGYLTALLFKEKYPKMQVTLIESSKIPVIGVGEATTPEIRSFLFGVLKFSAHEFYEKVKPTWKLGIKFFWGLPGDYYFNYPFGWPDVKSSYVADGDINNSSLTATLMDQESSFVVAANDGRGLQQYSTLSDDLFYALHLDNVSFINYLKIKAQEKGIIHIDDLIVDAERKVDSDELAAVIGETGRRHVYDFYVDCTGFSSLLLGKTLKSEYVSYDKSLFCDTAIVGNIPGVKKIKTYTYAESMDHGWCWNIPMRGEDHRGYVFSSGYCSIGEATDEFLRKNPEIRNPGIVRFKTGRHREICIGNVFAIGNSFAFVEPLESTGIHMIITEAKRLVNNFSELKRSPALRKKINTDINDNWDYLRDFLAIHYKFNKKFDTPFWKDCRALTDVSGIQDMIDLYHEVGLLSCANKSLVRMINSSIKDVIFGLVGFDVMMMGQGEIPKNFDRSVRNQHIWKSNVETWKAIRSLTVPVDKDLDILNEYLESRW

SEQ ID NO: 87856 - protein, 494 aa, Alteromonadaceae bacterium
  misc_feature (1)..(494): tr|A0A1Y6BX99|A0A1Y6BX99_9ALTE Tryptophan halogenase OS =Alteromonadaceae bacterium Bs31 OX=1304903 GN=SAMN0274 5866_02130 PE=4 SV=1
MKNDKKLHVVIAGGGTAGWMTAASLSRMMNHHVRVTLVESDDIGTIGVGEATIPTMQTFHHLLQIDEQEYLKETQGTFKLGIQFENWGKPGDKYIHSFGETGKDSWAGEFQHFWRRGLDEGVDAPFGDYSPELQAALAGKFAITNKPRLGFAYHIDATLYAKYLRKLSEEKGATRLEGKICNVNIDPGNGHIQSLALESGELVEGDLFIDCTGFNGLLIEKALHTGYQDWTNLFLCDRAVAVQTQAVADPIPYTRAIAHKYGWQWRIPLQHRVGNGLVYSSKYMSEDEARELLLDNIEGERINEPRVIKFKPGRRLKVWNKNCVAIGLASGFIEPLESTSIHLISSSIIRLMRMLPLTGIKEVDVDEFNRQAIEELESVRDFVALHYKVTQRDDSEFWQYCKNMKVPESLRSRVAMYSDSARLYWGADELFTVNSWNQVMLGQGIMPETYHPIADIMSSEDLKEYLEKYRSSLQDFITKLPSHKDFIAQYCSAS

SEQ ID NO: 87857 - protein, 507 aa, Porphyrobacter sp.
  misc_feature (1)..(507): tr|A0A2L0GMV4|A0A2L0GMV4_9SPHN Tryptophan halogenase OS =Porphyrobacter sp. HT-58-2 OX=2023229 GN=CHX26_14690 P E=4 SV=1
MDRPEVRKLVIVGGGTAGWITAAAFARLLGERLSIELVESEAIGTVGVGEATIPQIIRLNAILGLDEHAFLRATSGTFKLGIEFVDWGSKGSRYLHTFGDTGMNLGNVAFHHYWRRSAGEAPDPKGLWHWSLHQLAADQARFGKLERVGNTAMTGLAYAYHFDASRYALFLRAYAEGRGVKRSEGIVESVQRDGESGDITAITLKDGKQVSGDFFIDCTGFRALLLGETLGVGYQDWSKWLPCDRALAVPSERLPTIVPYTRATAKDAGWQWRIPLQHRTGNGHVYSSGFKSDDDAADTLLAGLDTKPLGDPRPIRFTTGRRAAFWAHNCAAIGLSSGFLEPLESTSIHLIQSHVSRLIQLFPRTGDAAAERAEYNRRCAAEFAQIRDFLILHYHQTTREDSEFWRYCKHMEVPDSLTHKRELFAASGRVGRDVDDLFRDASWVQVMLGQGITPASYDPMADQIAPAQLAEFLANLRTLIARAVASLPNHEEYLRQHCPVDPALLAA

SEQ ID NO: 87858 - protein, 496 aa, Rhodanobacter sp.
  misc_feature (1)..(496): tr|A0A1E4Q316|A0A1E4Q316_9GAMM Tryptophan halogenase OS =Rhodanobacter sp. SCN 68-63 OX=1660134 GN=ABT19_08315 PE=4 SV=1
MTALLLAHSGYGRLLQVTVLESPQVGIIGVGEGSTPWLRGFFEELGIEEAEWMPACHATYKSGIRFDGWSTRPGHESYFHAFASMLDNLTMTQFVDHVHRRLDGEDVPAHPDRYFLAARLAHECKAPRPRHEFPFDVWYGYHFDSVLLGAFLQRKAIERGIRHLPRHVTSVDRNEHGDIAALQLEGGEALAADFFVDCTGFAGLLIDKTLKTPYVSYADALFNDAAVALPTPLHGPIMSQTISTAFDHGWAWTIPLTQRYGNGYVYSTAFCTPEQAETELRTRLGLLDADVPAPHLRMRTGRVERHWHGNCLAVGLAQGFIEPLEATALMLVQRTASLFVDALEKGDLGAAAQATFNAAVNAQFDGTRDYIVAHYKTNTRTDTDYWRANAANTQLSEPLTRLLKTWLARRPIVGGIQQGAFGQGYPVMSWYSLLAGMGLFPEQASVPTSGSQTPPHSVAAIENLIERSALNFPDHRSLLQNIPPARREESLQVYFW

SEQ ID NO: 87859 - protein, 510 aa, Lysobacter aestuarii
  misc_feature (1)..(510): tr|A0A508AMK6|A0A508AMK6_9GAMM Tryptophan 7-halogenase OS=Lysobacter aestuarii OX=1706195 GN=FKV25_04080 PE=4 SV=1
MKHVAVVGGGSAGWMTALLLANSAYGERLRVTVIESPQVGTIGVGEGSTPWLRGFFDGLGIEEAEWMPACNATYKAGISFEGWSTRPGFERYFHPFASMLDNLTMTQFVQNVHARLQGADVDAHPDRFFIAARLARDALAPRPSRNFPFDVWYGYHFDSSLLGAFLHRKALERGVRHVPRHVRAVNRAANGDIATLELDGDETLAADFFVDCSGFASLLIGKALETPFVPFSDNLFNDAAVALPSPASGPIMTQTVSTALSHGWAWKIPLTERHGNGYVYSTAHCTADQAETELRAHLGLLDADVPARHLKMRVGRAAASWRHNCVANGLAQGFIEPLEATALQFVQRTASLLVEALESGDIGDAARSRFNDTLNAQIEGTRDYIVAHYKTNNRTDTEYWRDNAANAHLSESLVQLLRTWMARKPIIGGLRQGQFGNAYPVVSWYCLLAGMGIFPDAASLQAPTPLQAQHNLAAIENLIERSALNFPDHRGLLADIPPRPKEDALQLYLW

SEQ ID NO: 87860 - protein, 503 aa, Gammaproteobacteria bacterium
  misc_feature (1)..(503): tr|A0A4Q5VG50|A0A4Q5VG50_9GAMM Tryptophan 7-halogenase OS=Gammaproteobacteria bacterium OX=1913989 GN=EOO52_04 940 PE=4 SV=1
MSTTLKKVVILGGGTAGWMTAAAMIKLLGPQYCEVVLVESDEIGTVGVGEATVPPMSIFNKTLDIDENDFLKNTQGTFKLGIEFVNWGKIGDRYIHAFGDVGKDMNSLHFYQYWLKMHLAGKAHYLEEYGLNAKASYQNKFMRSENRGNSPLSNIAYAFHFDAGLYAKYLRNYAEQRGVIRIEGKVQQVNLRPEDGFIKSLLLNDGQIIEGDLFIDCSGFRALLISDALKVGYEDWSHWLPCDRAWAVQCEAAADPVPYTRSTAHAAGWQWRIPLQHRVGNGHVFASQYMSEEKAREILIENLESPPITEPRLVKFKAGKRKEIWHKNCVAVGLASGFLEPLESTSIYLVQSAIARLLALFPSTEFKQEDIEEFNRQSDFEYEKIRDFIILHYYANERDDSEFWRYCRNMSVPEALTRRINLFKSSGRVFRQTVEMFCELSWVEVLLGQGVTPRAYDPLVDRMSEDEIAQRLESVRQVIQRSVDYMPSHAEFIAHNCKAEKMM

SEQ ID NO: 87861 - protein, 508 aa, Caulobacter sp.
  misc_feature (1)..(508): tr|A0A318AT29|A0A318AT29_9CAUL Tryptophan halogenase OS =Caulobacter sp. D5 OX=357400 GN=DMC18_20620 PE=4 SV=1
MANNLRKIVIVGGGSAGWITAAMLSHYLKDSSCEIELIESEQIGIIGVGESTIPPFLQLIRGLGIDEVEFMQETQAAFKLAIRFENWRQKGEVYYHPFGLIGGPVDVHEFYQVWLRGKAEGHPAALQDFAPASVMADRWKFMSPAMAPRTMIANANYAVHIDAALLAKFLRKFAEARGVKRTEGIVSDVATRPDGFIEKVILQDGREASGDLFIDCSGFRSLLNGKTLGTEFLDWSDVLLCDRAIAVQTANLRDPHPYTLAQAQDSGWRWRIPLQHRAGNGYVYCSQFCSDDEARATLMSQVEGEAVREPWLVPFKTGMRKQLFNKNCVAIGLAGGFIEPLESTALHLIYRGVDYLLRFFPDRDCDATLAAEYNRRMRADYEEIRDFIVLHYFTTKRDDTPFWRAYQQVTPPESLRERIALFKAGGVLRDGVDDMFRAPSWQSVMEGMGIRPQRYQQLVDTLPAGVVKGLLDKSAPMLSDLVDTLPSHGDFLRQYCPAPVPEALRKAG

SEQ ID NO: 87862 - protein, 502 aa, Idiomarina atlantica
  misc_feature (1)..(502): tr|A0A094IJM8|A0A094IJM8_9GAMM Uncharacterized protein OS=Idiomarina atlantica OX=1517416 GN=IDAT_11560 PE=4 S V=1
MTDPYHIVILGGGSAGWMTAAALSKVLDRQHYKITLIESKVIGTVSVGEATIPGIREFNQLLEINEDEFLKATHGSFKLAIAFENWQNIGDFYLHPFGPYGITLNGIPFHHYYLRHEREQGANAVPLADVNLEWTVARQHKFTRPIADKRSPLGHIKYAYHFDAQKYAAFLKDFACKRGVMALEDRVLEVKQREKHGAIQALITEQHGEVGGDFFVDCSGFKALLIGEAMGVPYHDWRKWMPCDSAVALPGQHDAEDILPYTRSIAHPEGWRWKIPLQHRTGEGWVYSSRFTDHEKAEQDFRETIGNFDSKANHLRWINGRRDEPWKHNCAAIGLAAGFIEPLESTGLQLTQSAIIRLISLLPGAGEMRQRAKAFNHFCAEEITNIRDFVMCHYKLTNRDDSEFWRYCRDMEIPDSLQERIDLFRENASIFRNSNNELFNEISWFSMFHGQGLRPHNVHPLAEQMSQQELAQHIHTVQRIFKQVTAPLPSHAQFIQQHCKAQ

SEQ ID NO: 87863 - protein, 507 aa, Caulobacter sp.
  misc_feature (1)..(507): tr|A0A318B8K5|A0A318B8K5_9CAUL Tryptophan halogenase OS =Caulobacter sp. D5 OX=357400 GN=DMC18_03725 PE=4 SV=1
MSDQRLKSVVIVGGGTAGWMTAAALAKTLSAQGLKITLVESEAIGTVGVGEATIPPILTFNAMLGLDERAFMRATKASFKLGIEFVDWGAIGETYHHPFGTFGLDLEGVKFHQVWRKFAKQAGPIGDFNLTEAAARRWRFALPDPDPAKVMSSLKYAYHFDAGLYARFLRGFAEARGVMRVEGRIAQVDQHAETGFVEAVVLEDGRRVEGEFFVDCSGFRGLLIGQALKVPYQDWSRWLPNNRAVAIPCELGGDGLTPFTRATAREGGWQWRIPLQHRIGNGYVYSSHHVDDERALDTLLTNLDGRPTDEPNFLRFTPGRRERAWEKNVCSIGLSAGFIEPLESTSIHMIQAGITKLLALFPGHGVDPLEIDEYNRLTAEQVDRIRDFVVLHFHATRRDDTDYWRYLSSMTVPDSLARRMELFAHRGRWFPSDYDLFHEPNWLAVLLGQGITPEEWDPLVDSLPGDQVMQRLAHLSALITRTAEAMPSHADFVARYCGEPAPSGVPA

SEQ ID NO: 87864 - protein, 508 aa, Rheinheimera sp.
  misc_feature (1)..(508): tr|A0A437R546|A0A437R546_9GAMM Tryptophan 7-halogenase OS=Rheinheimera sp. KYPC3 OX=1834037 GN=EOE67_01200 PE= 4 SV=1
MKIKKIAIVGAGTAGWLAANHLGHELRADPEVQITVIESADVPTIGVGEGTVPYVMKGLERFGISEAELLLQCDTTFKQGIKFVDWLDKETHGDNHYYHPFDSPYPAGFDISPYWLTQQDKLPFDDIGIQARIAELGLAPKQRSSAEYQGPLAYAYHFNALKFAALLAKNAKQRFRVVHQIATVTGAETDEQGLIRCLNTSNGDQLHFDFYVDCSGFASILIDKTLKVPFISKADELLTDRALVQQIPLTDGQSLPPYTTATAHAAGWIWDIPLTSRRGTGFVYSSKHMSDDEARREFASYLGLDPATFAPRQIPMPIGYREQFWLGNCVALGLAQGFVEPLEATSILVTDFAAELLARHFPRHLADVTVCQPYYNQVLRYVWDGVVDFIKLHYFLSDRQDSAFWQDNRDESKLSAQLKNRLAMFKLRPPQQSDFFSRFDLFNEKNFLYVLYGMKFQTQLQPLTPYEIRRSEELLQSNQQLVAGASREFMPHRAWLDALKQAAQQRAG

SEQ ID NO: 87865 - protein, 511 aa, Proteobacteria bacterium
  misc_feature (1)..(511): tr|A0A1Z8V5H6|A0A1Z8V5H6_9PROT Uncharacterized protein OS=Proteobacteria bacterium TMED61 OX=1986601 GN=CBC21_ 11945 PE=4 SV=1
  misc_feature (30)..(30): Xaa can be any naturally occurring amino acid
  misc_feature (33)..(33): Xaa can be any naturally occurring amino acid
  misc_feature (42)..(42): Xaa can be any naturally occurring amino acid
  misc_feature (177)..(177): Xaa can be any naturally occurring amino acid
MKPMTSQPTNIPKNILIVGGGTSGWMVAAXLAXQWKDKDVSXKLIESESIGTIGVGEGSTPKMRRFFDSLNIDEREWMPKCNATYKCGIRFPSWATREGFKSYYHPFFSQKDDTSIRAFHQNATLRSKNFNVYAHPDSFFVSNFLASEKLAPTPDKKTDYHTDYAYHFDASLLGEFXRNFSVQNGVTHVSDTVSEVLRSENGDISGVETDQHGTIDADFFIDCTGFSGLLINKTLGVEFLPYKKFLYNDSAVALPSHINLDKGLPAQTVSKALKNGWMWNIPLTNRFGNGYVYSSDFTDRNSAEEELRKQLGLMDAAVEARHLKMRVGRSAVCWEKNCIAIGLSQGFIEPLEATALMIVQDTAETFANKLESSGNTDNSRAEVNTKVNSIFDGVRNYVQMHYKLNTRSDTEYWLENRKNVHISDDMEKILRVWDKGGDLLSELRNQASRLVYSPTSWYCILAGMGRFRNKPKRPKANVQYYSKKQAEEHSRSFIQQFPSHLGAIQEHSKTP

SEQ ID NO: 87866 - protein, 96 aa, Modestobacter multiseptatus
  misc_feature (1)..(96): tr|A0A543C4R0|A0A543C4R0_9ACTN Tryptophan halogenase OS =Modestobacter multiseptatus OX=88139 GN=FB553_1034 PE= 4 SV=1
MQHWDVVVVGGGPAGAACAAAVRRASPAGSVLVLDRSGFPRDKVCGDGIAPEALDVLAGLGIDTAALIEGFPAVPRLRLSSPGGTTVERTMQGLRS

SEQ ID NO: 87867 - protein, 520 aa, Lysobacter aestuarii
  misc_feature (1)..(520): tr|A0A508A4M9|A0A508A4M9_9GAMM Tryptophan 7-halogenase OS=Lysobacter aestuarii OX=1706195 GN=FKV25_09310 PE=4 SV=1
MSEAIRDVVILGGGSAGWLVAGILAADHGAASGGGLRVTLVESPDVATIGVGEGTWPTMRDTLRRIGVSESDFFRECDASFKQGSKFIGWRDGTAGDQYHHPFVLPQGYLEADLVGAWLQHPAEAFGERVCFQPRLCEAGRAPKQFATPEFAAVANYAYHLDAGKLGAFLRRHCVERLGVRHVSDHVTAIDAADNGDIAGLRTRDHGILAGDLFVDCTGMRAVLLGEHYGIAHESQQHVLFADRAIAVQVPYADPRGPIACQTLSTAQPNGWTWDIGLQSRRGVGHVYSSAHTSDDKAADVLRRHVLATGGAEPDPASMRRIGIRPGYRKQSWHRNCVAIGLSSGFVEPLEASSLVLVELASTMLSDQMPATRATMDLVAARFNDSFAYRWERVVDFLKLHYLLSTREDSDFWRDHRRPESIPPRLQVLLELWRHHPPSRYDLPRVEEIFPSASYQYVLYGMGFRPPPAPAPTARRRVDAIAKADRYSREAADLARRMIAGLPSHRDMIDHAIQHGMPRL

SEQ ID NO: 87868 - protein, 497 aa, Sphingomonas sp.
  misc_feature (1)..(497): tr|A0A2T7VMK1|A0A2T7VMK1_9SPHN Tryptophan halogenase OS =Sphingomonas sp. TPD3009 OX=2171625 GN=DC425_08500 PE= 4 SV=1
MSAVTPRRIVIAGGGTAGWMAAAALTRTLGRTATVTLVESDAIGTVGVGESTIPPLITFNRLLGISEAEFMAATQATFKLGIQFDGWKGPDDSYFHAFGLTGKDHWAAGFQHFWLDGQARGHTESYDDYCLELVAAREGRFAHLPDDRMSYAYQLDSTLYGRFLRRMAEGDGATRIEGKIARVELEGESGDIAALVLDSGVRVEGDLFLDCTGFRALLIEQALHVGYNDWTHWLPCDAAIAVQTESVRPPVPFTRAMAHDAGWQWRIPLQHRVGNGIVYCSRYLSQDAALDRLLGNVEGAVLTEPNRLRFVTGARRKQWHRNCVAIGLAGGFMEPLESTSIHLIQRAILRLIRLLPPAGAISAHDIAEFNDQQLTDMDQIRDFLILHYKVTERRDSPFWRQCAAMDIPDSLAQKIGLFRETGRVFRRNDELFAENSWIQVMLGQGIVPQTHHPIAAKLPDDELARFLGGLRKGVATTVRGLPAHADYVARYCGAAPA

SEQ ID NO: 87869 - protein, 325 aa, Idiomarina baltica
  misc_feature (1)..(325): tr|A0A348WR81|A0A348WR81_9GAMM Tryptophan halogenase (F ragment) OS=Idiomarina baltica OX=190892 GN=DCR58_09725 PE=4 SV=1
MNNSQNQCGLHRVVIVGGGTAGWLAAGVFGAKLSTKHSVTLVESPTVSSIGVGEGSWPSLRDTLLDIGISESEFLTLCQGAFKQGSSFVNWRKNAHSYYHPFTVPAAYNELDIHACWKALAPNTPYQDAFSLQAAMCVAGKAPKQIATPDYAHVLNYGYHFDATKLADLLKQHCVDKLNVDYVSGHIGSIKSSSDGYIEKLITECGKEIVGDLFIDCSGSSGLLIDKHFNVPWIPVKRTMLNDRAVALQVPYSDTDTEIKSTTVATAQTCGWTWDIALQHRRGVGLVYCSQFTNEEQAKQVLIDYVRERYPSAHDAELSFRTLSF

SEQ ID NO: 87870 - protein, 508 aa, Pelomonas saccharophila
  misc_feature (1)..(508): tr|A0A4R3VLM1|A0A4R3VLM1_PELSC Tryptophan halogenase OS =Pelomonas saccharophila OX=304 GN=EV671_1002285 PE=4 S V=1
MRSRALRKVVIVGGGSAGWITAAPLARMLCRPGQPDHCEVTLVESTEIGTVGVGEATLPTISFYNQMLGIDEADFVRKTQASFKLGIEFRDWGRVGHRFFHGFGGFGPAIHNRPLWAYWLRLRRLDPTLPSYEEWSTATVMARNMRFMPPQPGEPSPTNAFNYAYHFDASLYGAYLRSYALHHGAQRVEGTIVRVETSEHDGFVTAVHLSDGRRVEGDLFIDCSGFRALLIGGAMNSPYEDWSHWLPCDRALAVPCARVDPMTPFTTSTARGAGWQWRIPLQHRTGNGLVYCSGHLGDDAAADLLLSHLDGQPLDEPRQQRFVTGRRRQGWVKNVVAIGLSSGFLEPLESTSIQLIMDGVSRLTSMLPDRDFAPKLADEFNRQMAYRYESVRDFIILHYKLGKRRDSEFWRQCAAMSIPDGLAHQIELFSQAGRVTILEPEGFLEPSWASMFLGLEVLPERHDPYIDLVDVEQIRRHMWGVHDSIRRAVERMPTHGKFVASVAGNQPA

SEQ ID NO: 87871 - protein, 515 aa, Sphingomonas sp.
  misc_feature (1)..(515): tr|A0A2U0VFY7|A0A2U0VFY7_9SPHN Tryptophan halogenase OS =Sphingomonas sp. CF311 OX=2135485 GN=C7501_0058 PE=4 S V=1
MQPRSNPSATPLRVVIVGGGTAGWMTAAGLTRLVPNSDYALTLVESDEIGTVGVGEATLPHIREFNAMLGLDEAEFMAATQGSFKLGIEFVGWDKPGGRYVHPFGTFGERWGGLDFQHHWLRARAAGQEVGEWPEYSFAAAMCREGVFDLPSEDTRSIRSTFSYAYHFDAGLYARFLHAWSTARGVRRVEGKITQVARHPATGLVEHVTLESGAVIEGDLFIDCSGFRSLLLGNAMGVAWQDWSAWLPCDRAMAVPSASVDGITPFTRSTAQTGGWTWRIPLQHRTGNGYVFSSAFCTEEQARETILDAIDGAPLADPRTLRFQAGRRDKGWVGNVVAIGLASGFLEPLESTSIFLIQAAVMDLANLMPLPGAAPDPRLAAEFNRLYEIHYDRTRDFLVLHYTANARHGEPLWDHVRNMTLPDSLAHKIALFRSSGRAPDYKLGLFSRDSWLAVLMGQGIIPEAYDRQADRAPLDEVTGRLADLRTRIATNAAAMPPHAAFLTGYCAAGDRAAVA

SEQ ID NO: 87872 - protein, 517 aa, Amycolatopsis rhizosphaerae
  misc_feature (1)..(517): tr|A0A558CJD8|A0A558CJD8_9PSEU Tryptophan 7-halogenase OS=Amycolatopsis rhizosphaerae OX=2053003 GN=FNH05_1731 0 PE=4 SV=1
MVEKIVIVGGGTAGWMTAAYLRKAFTDRISITLVESGKVGTIGVGEATFSDIRHFFEFLDLPETEWMPACNATYKLAVRFQNWREPGHHFYHPFEQLRSVDGFPLTDWWLQSGHSDRFDKDCFVMASLCDAERSPRYLDGGLLDGPFREGTEEPVGLTMSEHQGKTQFPYAYHFEAALLAKFLTGYAKDRGVRHVVDDVLEVPQDERGWISGVRTAEHGVLEGDLFIDCTGFRGLLLNQALGEPFISYQDTLPNDSAVALQVPLDMRARGIRPCTTATAQDNGWIWTIPLFGRIGTGYVYARDYCEPEEAERTLRAFVGPEAAGVEANHIRMRIGRSRNSWVRNCVAIGLSSGFVEPLESTGIFFIHHAIERLVKHFPGNDWNPAQRELYNEAVGHVMDGVREFLVLHYVSAARENTQYWKDTKTRKIPDGLAERLERWRVQLPDSETIYPYYHGLPPYSYMCVLLGMGGIKLTPSPALRLADDTAAHKEFEQIRDKAKCLVETLPSQYEYFAATRS

SEQ ID NO: 87873 - protein, 502 aa, Sphingopyxis sp.
  misc_feature (1)..(502): tr|A0A095B6Y9|A0A095B6Y9_9SPHN Tryptophan halogenase OS =Sphingopyxis sp. LC363 OX=1120705 GN=FG95_00838 PE=4 S V=1
MGDSRITKVVIVGGGTAGWMAAAALSRTMDNLSIRLVESDEIGTVGVGEATIPAIRLFNALIGIDEDEFVRETRGTFKLGIEFRDWGRLGDSYMHAFGQIGRSLGMLQFPQYWLRGRAEGVAGRLGDYSLNETAARQNRFARLPQIPNTGLDGIAYAFHFDAALYAAYLRKVAEGAGVVRTEGKIESVKRNGASGHVGAVVLENGEEIGGELFIDCSGFRALLIEQALETGFEDWARWLPCDRAIAVPSENVGPARPYTQAIAHKAGWQWRIPLQHRTGNGHVFCSDFIGEDEATATLLANIEGRPLAEPRTLRFKTGMRSRAWNGNVVALGLASGFLEPLESTSIHLIQNGIAKLLAHFPDRDFDAANIDAYNRRVRFDYERIRDFIILHYHANQRTDAPFWIRCREMEIPETLARKIALFKSQGQIVREGDELFIEIGWFQVLTGQNIMPDGYHPMADQLTDDELAGFFADIETIVARTASHLPRHEEFIAQHCAAGVPA

SEQ ID NO: 87874 - protein, 485 aa, Sphingopyxis sp.
  misc_feature (1)..(485): tr|N9WC99|N9WC99_9SPHN Tryptophan halogenase OS=Sphingo pyxis sp. MC1 OX=1174684 GN=EBMC1_12175 PE=4 SV=1
MAAACLRRFLPAGWSMSLVESDEIGTVGVGEATIPQIRLFNDALGIDEDEFLAATQGTIKLGIEFNGWTRPGHRYMHAFGAVGRGLGLLEFHQYWLRARAAGVAETLDHYSLNERAAYARRMQRDAPRTSPHLLEMPYAFHFDAALYAAFLRRRAEASGVERIEGKVVDVRLNGETGDVTGVALDDGRSVEGDFFIDCSGFRGLLIEGALETGYEDWSHWLLNNRAVAVPCAHGATPQLPWTGATTRDAGWQWRIPLQHRIGNGYVYCSDHVSDDEAVATLLANLDGPAQAEPNRLRFVSGKRRRMWNRNVVALGLASGFMEPLESTSIHLVQAGISRLLKMLPSGATDPAVAAEFNRQSDFEWERIRDFIILHFKATERRDTAYWRDRTEMPVPDTLAAKIELFRAQGLIFREHEELFTESGWLQVLVGQGVAPRAWHPLAEGIGADDLARYMAGVAAMVEAEVAQMASYDDFLAATSRAAVAA

SEQ ID NO: 87875 - protein, 536 aa, Pelomonas saccharophila
  misc_feature (1)..(536): tr|A0A4R3UF31|A0A4R3UF31_PELSC Tryptophan halogenase OS =Pelomonas saccharophila OX=304 GN=EV671_10466 PE=4 SV= 1
MSETATVFNQQLAARSAGGSTDAPPPVRHVCVVGGGTAGWMTALMLATTAYGPRLKVTVLESPQVGIIGVGEGSTPWLRGFFDGLGIEESEWMPACNATYKSGITFEGWSTKPGFQRYFHPFASMLDNMTMHQFVDNVHARLEGADVHAHPDRFFVAAALARQGRGPRARPNFPFDIWYGYHFDATLLGQFLAAKALERGVQHLQRHVTQVQLNEQGDIAHLQLDGGEPLAADFFVDCTGFASLLIGKALQTPFVSYAENLFNDAAIAMPTPLGGPIESQTVSTALRHGWAWKIPLSNRHGNGYVYSSAHCSADEAETELRRHLGLLDADVPARHLKMRVGRMENQWSRNCVAVGLSQGFIEPLEATALLFVQRTAAALVEALEQGDLGPAAQQRFNDSMRTRFENTRDYIVAHYKTNSRTDTDYWRANAENMRLSESLQGVLMTWLSRKPLAAGLKAGRFGGGYPIVSWYALLAGMGIFPDPRELQPPTSHQARHRLDAVDDFVARSATNFPDHRELLAAIPPRVGDKTLQLYLW

SEQ ID NO: 87876 - protein, 530 aa, Lentzea flaviverrucosa
  misc_feature (1)..(530): tr|A0A1H9SEW4|A0A1H9SEW4_9PSEU Tryptophan halogenase OS =Lentzea flaviverrucosa OX=200379 GN=SAMN05216195_10737 PE=4 SV=1
MDDNQIRKVLVLGGGTAGWMTASYLGRALGSAVEITVVEAPSIPRIGVGEATIPNLQKTFFDFLGLKEEEWMPECNASFKMGVRFLNWRTPGTGQSAARTLPEGRPDQFDHLFGLLPDHDNLPLSHYWVQQRLSGSTDVPFDHACYRQPPLLDAKLAPMLPDGTPYASYAWHFDANLVADFLRRFATQRQSAVHVEDVYIGPEFDSRGYLTAINTESGRRFEADLFIDCSGFRSLLMNGAMEEPFLDMSDHLLNDRAVATAVPHDDSQGIEPYTSAIAMSSGWTWKIPLLGRFGTGYVYSSRFTSEDEATAELCGMWGLDPEGQPLNHVKFRVGRNRQAWVRNVVGVGLSSCFVEPLESTGIYFIYATLYQLVKHFPDKRFEPVLRDRFNAEVETMFDDTRDFLQAHFTFAPRTDTEFWRACKELRFSDRFAEKVAMYKAGLTVDTPVTDESNYYGNFEAEFRNFWSNANYYCIFAGLGLLPDRPTPVLSFRSDSVESAEKLFAEVKQDQARLLETLPTTYDYLRRLHSR

SEQ ID NO: 87877 - protein, 500 aa, Asticcacaulis excentricus
  misc_feature (1)..(500): tr|A0A3G9GB13|A0A3G9GB13_9CAUL Tryptophan halogenase OS =Asticcacaulis excentricus OX=78587 GN=EM6_2270 PE=4 SV =1
MIVGGGSAGWMAAAALAKTLGESLDIHLIESEEIGIVGVGEATIPPILKYNDLLGIDEATFVRETNATYKLGIEFVDWRAKGHSYFHPFGHSGREIESFPFHHYWLADWRRRGGEYDYTQFNLETVAAYKGRFGYLPAEGDKPGLNYAFQFDAVLYAKFLRNYSAERGVTRHEGRIVSVEQHPESGFVTAVVTADGRRLEGDLFIDCSGFRGLLIEGTLNCGYEDWSRWLPMNSAVAVPCERVADITPYTRATAREAGWTWRIPLQHRTGNGYVFSDQFLSVEDAKTRLLGCLDGAPLAEPRLLKFVTGHRKRVWDKNVVALGLASGFLEPLESTAIHLVQSGITRLLAFFPKTGIVPSVVAQYNRDVLFDYNNIKDFLIAHYKISERDDTPFWRWVQAMEMPDSLKERLDMFRETALLIAREPELFRETSWLAVMMGQGLLPKTSHPIVETIEAADLRLHMSRWRKMLESRADSLPGHEDYVRRFAPSADLKMRMASAG

SEQ ID NO: 87878 - protein, 504 aa, Pseudoalteromonas peptidolytica
  misc_feature (1)..(504): tr|A0A510UEG4|A0A510UEG4_9GAMM Tryptophan halogenase OS =Pseudoalteromonas peptidolytica OX=61150 GN=PPE03_3624 0 PE=4 SV=1
MKSQKIVILGGGTAGWMAANMMAKSWADKAIEITVVESSSIGIIGVGEGSTPQFKGFMDYLGISEAQWMPACNATYKNGIRFIDWSTKTGFSSYFHPFPAQPDDYSAPAFFHNSFVRRKAIDVEGHPDHFFLATHLANTNKSPIAAQNFPFEINYGYHFDSSLLGEFLAREAEKRNVKHIDATISDVRKHVNGDIAALVTSQGVEIAGDIFVDCSGFKSLLLQQALDVGFESFGNNLFNDAAVVLATKQGDIIRSETQSVARKYGWSWHIPLTNRTGNGYVYSQRYCDRDQAETELRAALGLLDSDVEARHIKMKVGQVKTHWKNNCIAVGLSQGFIEPLEATALHIVQETVQSFIECYQEAGFTDGNRDKHNHSIATRYQAIRDYIVAHYRVNSRTDTQYWLDNANNNNLSRSLFNVLQTWVSGNNLSDELARQNIDQYYPSVSWHCLLAGYGVYPDQAQLKPGNALAKQYNIEKIEDYLRRCGLNFKAHRLELDALASTFHK

SEQ ID NO: 87879 - protein, 531 aa, Streptomyces fradiae; identical to SEQ ID NO: 83175
  misc_feature (1)..(531): tr|A0A3B7R3Z2|A0A3B7R3Z2_STRFR Tryptophan 7-halogenase OS=Streptomyces fradiae OX=1906 GN=D3X13_32785 PE=4 SV= 1

SEQ ID NO: 87880 - protein, 516 aa, Sphingomonas edaphi
  misc_feature (1)..(516): tr|A0A418PY96|A0A418PY96_9SPHN Tryptophan 7-halogenase OS=Sphingomonas edaphi OX=2315689 GN=D3M59_10755 PE=4 S V=1
MSVDVFPQHLVILGGGSAGWMAAAYLDRTFNLPGRRRLPIIVVESPAIGRVGVGEATIPTLLRFAQFLGIDEATLMKRTFATFKHGVRFLDWNGPGTDYFHPFEALDASSNFNPGPSWLARRAAGVAAPFDLESGIQRRVALAGRAPKRMTDPDYAGLMPYAYHLDAEEFGDLLADVARDRGVSHVSGRVAEVEKSETGDVQALVLDDGRRIDGDFFIDCSGFASVLLEKAMGVPFESFSDYLLCDRAVAMPKPYADGEQARPYTTAIAMDHGWSWRIGLQHREGTGYVYSSKFCDQEDAERALRIATGAGEEVAARHLKMRVGMPSETWRGNVVALGLAGGFIEPLESTGLHMVELGLEYLVRYFPLSGVNPAARSRFNHLMRSRYQELRDFVVAHYCLTKRADTPFWQAVRDPAQIPTGVAEKTELWSDRHPAAEDNEYSRLLFAHSNWAAVLYGMEAVGELAMANSARWCPNPGAHLPELNAAADRLINGLPEQSIWLEGLKTIPVRDQSWAA

SEQ ID NO: 87881 - protein, 482 aa, Brevundimonas sp.
  misc_feature (1)..(482): tr|A0A0S9NSG8|A0A0S9NSG8_9CAUL Tryptophan halogenase OS =Brevundimonas sp. Leaf280 OX=1736320 GN=ASF31_02340 PE =4 SV=1
MAAAALAHAFEGAGKIVTLVESEAIGIIGVGEATIPEILKFNARLGIDEADFLRETKATFKLGIEFDGWRREGERYFHPFGAFGLDMEGIAFHHFWLKACAEGGAEPLETYSMAWQAARRGRFFHPQGGPQSPLSSLGYAYHFDAALYAAFLRRFAEGLGVVRCEGRVVEVQQAADGDIAGVRLDDGRVVEGDFFIDCTGFVGLLIEQALASGYEDWSSWLPCDSAVAVPCEREGALSPYTRSTAREAGWQWRIPLQHRVGNGYVYSSAHISHQAAEDALMSRLEGTALAEPRRLRFATGRRKDCWKRNCVAVGLSSGFLEPLESTSIHLIQSAITKLITLFPSHKNSDGLRREFNVLMEEEFVTVRDFLILHYKVNQRAGSFWSQVRDMPIPDRLAAKIALFEDTGRIVRRDHDIFSESSWLAVAVGQGLTPHGRHPISDVIGHDANLGRLSAIRDSIWRTADALPTHEDVLATTMNRKAF

SEQ ID NO: 87882 - protein, 516 aa, Sphingomonas sp.
  misc_feature (1)..(516): tr|A0A2U0UYL2|A0A2U0UYL2_9SPHN Tryptophan halogenase OS =Sphingomonas sp. CF311 OX=2135485 GN=C7501_3138 PE=4 S V=1
MKDGGMGSGAIERVVIVGGGTAGWMAAAALGAHLAGTGTRITLIESSEIGTIGVGEATIPTIRRFYAALGMGDAEVMRACEATAKLGIRFVDWKPGTSFVHPFGRFGQDLRGIDFHHYWLKARQAGQAAPLEEYSLGAMLAREGHASVPVPNPPSQLSIFDWALHFDAALFAAHMRSFAERVGVQRIDAKITEVSLHGETGFIESVTLDRGGKVEGDLFIDCSGFRGLLIGEALGVGYQEWSHWLLCDGAFAVQSERAGPPPSCTTVTARTAGWQWRIPLRTREGNGIVFSSHFQSDEDARAELLANVSAKPTTEPRRLRFTPGRREVAWTKNCVSLGLASGFLEPLESTSIALIETGIERLKQLFPDKSFDPAVIQEYNIQCAEEMERVRDFIILHYNLSTREGPFWRACREMALPDSLNAKLDLWRARGAFVRYRWEMFHPASWLAIYGGFEHLPDRIDPALAAVDPEELAGALAQMRASIARTVSDTPTHTEFLATVDGATVEPSNQPLRTRA

SEQ ID NO: 87883 - protein, 507 aa, Asticcacaulis excentricus
  misc_feature (1)..(507): tr|A0A3G9FYV4|A0A3G9FYV4_9CAUL Tryptophan halogenase OS =Asticcacaulis excentricus OX=78587 GN=EM6_0093 PE=4 SV =1
MSDAIRRIIIAGGGTAGWMCAAALRKGLGRTVELVLIESEDIGTVGVGEATIPPIRKFLEHVGVNELDFIRATEASFKLGIEFAGWGAPDSRYFHGFGDFGAVHEAVRPYQLWRLLHEAGDETPLEAWSLPAALAKAGKFFPPNPDPRSPMHDYAYAYHFDAGLFARFLRRHCEAQGVQRINAKIDAVQVRPADGFIAGLRLDNGTSEAADFFIDCTGFRGLLIEGALKAGFEDWSHWLPADRAWAVPTARHAGAGITPYTTSTAHAAGWQWRIPLQHRTGNGHVFASAFMDEETARDVLLRHLEGPALKDPMLIRFTTGRRPQPWTKNCVAVGLSSGFLEPLESTSINLIQSGIAQFLELFPSRQAEAVLRREYNHQMGLSYERVRDFIILHYKLNTRSEPLWRYCADMPIPDTLAHKIELFSARGDVVSYDWDHFAEPSWIAVMNGQGLRSRFADPLARRLPLEGVRALMAQRRDAIAQVVRQLPAHADFIAQHCASAPASAAEV

SEQ ID NO: 87884 - protein, 515 aa, Lentzea flaviverrucosa
  misc_feature (1)..(515): tr|A0A1H9BNY5|A0A1H9BNY5_9PSEU Tryptophan halogenase OS =Lentzea flaviverrucosa OX=200379 GN=SAMN05216195_10153 9 PE=4 SV=1
MLKNVVVVGGGTAGWMTASYLTAAFGDRVGVTLVESKRVGAIGVGEATFSTVRHFFEYLGLEEKEWMPACNATYKLAIRFENWREPGHHFYHPFERQRVVDGFPLTDWWLREPRSDRFDKDCFLVGTLCDDLKSPRQLNGELFEGGLGGRSAYRTTLTEQTTQFPYAYHFDAALVANYLRDYAVARGVKHVLDDVQDVALDDRGWISHVVTKESGNLTGDLFIDCTGFRSLLLGKALAEPFQSYQDSLPNDSAVALRVPQDMENRGLRPCTTATAQEAGWIWTIPLFDRIGTGYVYAGDYISPEEAERTLRAFVGPAAEHADANHIKMRIGRSNRHWVNNCVAVGLSSGFVEPLESTGIFFIQHAIEQLVKHFPDERWDDGLRTAYNKLVNNVMDGVREFLVVHYYAAKRQDNQYWKDTKTRALPDGLAERLERWQTRLPDNESVFPHYHGFESYSYVCMLLGLGGLDLKSSPALGLMDAAPAQHEFKLVGEQAAELARTLPTQYEYFAQLHRAR

SEQ ID NO: 87885 - protein, 491 aa, Asticcacaulis excentricus
  misc_feature (1)..(491): tr|A0A3G9G3B9|A0A3G9G3B9_9CAUL Tryptophan halogenase OS =Asticcacaulis excentricus OX=78587 GN=EM6_0007 PE=4 SV =1
MRPVKKVVIAGGGTAGWCAAAALSKLLGTLIDITLIESEEIGIVGVGEATIPTARTFHHFLGIDERAFLKATNATYKLGIAFENWARDGDRYIHSFGEIGKSNWMAPFHHVWMAARDKGFGGDLGDYCFELRAAEEGKFFTSDTARINYAYHFDAVLYGRFLRQFSEAHGARRIEGRICEVRQDADTGFITALALESGEVIDGDLFIDCTGFKGLLIEETLKTGFEDWSHWLPTDRALAVQTARSGRLDPYTRAIAHGEGWRWRIPLQNRVGNGLVYASGHLTDEAARERLLSLVDGEPLTEPRLIRYRTGRRKKIWNKNCLTVGLSSGFIEPLESTSIHLFQIAVTRLIQMFPFGGITEAVSDHYNEIARREIEKVRDFVILHYKLTQRDDTAFWRERRDMSVPDSLTERLEMFREHGHAWQAADDLFRVDSWVQVLLGQRLEPQSHHAIGQLMSEAQLRQALDGLKTHIARTVEAMPTHEAFLKSYLAA

SEQ ID NO: 87886 - protein, 518 aa, Novosphingobium sp.
  misc_feature (1)..(518): tr|A0A4R1VYF7|A0A4R1VYF7_9SPHN Tryptophan halogenase OS =Novosphingobium sp. ST904 OX=1684385 GN=EDF59_11649 PE =4 SV=1
MTTDYPSSGRVVILGGGTAGWLSAAYLSRTLKMADVTLVESGEIGIIGVGEGTFPTIRTTLAGLGIGEAEFLARADATFKQGVLFDGWATGSDSYFHPFNLPVGGEDEALLPHWIGDDSAARPSWADAVTVQEQVIRAGRAPKRAEDPDFSGPMNYAYHFDAARFAAYLRDISVAAGVTRIEGTVAAVERKDGSGDITALMLADGRRIEGDFFLDCSGFSALLIGRTLGSPFTSCAGSLFNDRALAMQVPYAEPGAPVRPYTLATAHEAGWTWDIGLSERRGVGYVYSSNHCSDDEAETTLRRYLGSEGAALTPRQLRFETGYRETQWIGNCVAVGLSAGFFEPLESTGIMLIEAALKMIGEFLVPGDRGARAAAARSFNRLMAARFERIVHFLKLHYCITRRTDTAYWRDNADPASIPEALQDMLAQWRHRPPSRFDFVVDLETFLPPSYHYILYGMGFETRLSAGIRRYPGAQEARDVFARVRAAHAGARAALPDHRTLLERYHARSVPRFSKVSR

SEQ ID NO: 87887 - protein, 527 aa, Amycolatopsis keratiniphila
  misc_feature (1)..(527): tr|R4SX80|R4SX80_9PSEU FADH2 O2-dependent halogenase I OS=Amycolatopsis keratiniphila OX=129921 GN=prnA PE=4 S V=1
MDNRIENVLVLGGGTAGWMTAAYLGKALGETVTVTVLEAPGIPRIGVGEATVPNLQRVFFDFLGIDEDDWMRECNASFKTAVRFVNWRTPGRGEAEARDLEGRPDHFFHPFGLLPTHDGVPLSHYWARDRLRGVTEEPFDYACFREPPMMDALRAPKWFDGTPATRYAWHFDAQLVAEYLRRFAIERLGVRHVEDEMTEAEIDERGFITRLRTRSGRTLAADLFVDCSGFRGLLINKALDEPFLDMSDQLLCDSAVATAIPHDDEARGVEPYTSAIAMSSGWSWKIPMPGRFGTGYVYSARHTDKDDATEEFSRMWGLDPERTAFNHIRFRVGRNRRAWVNNCVSVGLSSCFLEPLESTGIYFITAALYQLAKHFPDRRFDPVLVDRFNREIELMFDDTRDFIQAHFYLSPRVDTEFWADNKKLTLPENIQEKIAMFRSGLPINEPVTDEATYYGNFDAEFRNFWTNGSYYAIFAGLGHTPDRVLPALNYRPETDAGHLFDEVRKRQRDIVETLPSNHEFLVKLHGR

SEQ ID NO: 87888 - protein, 548 aa, Streptomyces sp.
  misc_feature (1)..(548): tr|F3ZBX7|F3ZBX7_9ACTN Putative tryptophan halogenase O S=Streptomyces sp. Tu6071 OX=355249 GN=STTU_4817 PE=4 S V=1
MPVRDDPTSETRRTPMPETDNRIRKVVILGGGTAGWMTASYLGKALQGTVDIQVLEAPAIPRIGVGEATVPNLHRVLFDYLGIPEEEWMRECNASFKMAVKFVNWRTPGRGEPDSRTRPDGKPDHFYHPFGILPDHDNTPLSHYWFKNKYEGVTDKAFDYSCFREPPVMDAKKSPKWMDGESSTRYAWHFDAALVADFLRRFATDKQGVEHIQDEMVRAEQDERGYVTALHTKSGRVLDADLFVDCSGFRGLLINKALGEPFIDMSDHLMCDRAVATAVPHDDDANGIEPYTSAIAMSSGWAWKIPMLGRFGSGYVYSSRFTTQEEATREFCELWNLDPETTKFNHVRFRVGRNRRAWVNNVVSIGLSSCFLEPLESTGIYFITAAIHQLAKHFPDRTFPQALVDSFNEEIEVMFDDTRDFIQAHFYYAPRDDSEFWRAQKTLKLPENIQRKIAAYKAGLPINSPITDESTYYGNFEAEFRNFWTNGSYYCVFAGLGLEPDAPLPALAHKPESVAGAQPLFTKVAQEQRHLLDTLPSAHDYLRRLHAK

SEQ ID NO: 87889 - protein, 454 aa, Amycolatopsis keratiniphila
  misc_feature (1)..(454): tr|R4TAV3|R4TAV3_9PSEU Tryptophan halogenase OS=Amycola topsis keratiniphila OX=129921 GN=AORI_5364 PE=4 SV=1
MDDYDVIVVGGGPGGSTVAGLTAAEGHRVLLLDKDRFPRYQIGESLLPATIHGICAMLGVRDEIERAGFVRKRGGTFKWGSGAEPWTFSFAASDRMAGPTSYAYQVERTRFDALLLDGARRLGAEIRQGHRALGTLRAGERIGGVRYLDDTGNERHATARFVVDASGHGSRLHHDVGGIREYSPHFRNLALFGYFEDGRRMPAPDAGNILCVSFPDGWFWYIPLSDTLTSVGAVVKQEAADRVQGDPDAAYAALIEDCPLVKDFLRDARRATEPPYDRLRVRKDYSYDRTVLWAPGMVLVGDAACFIDPVFSSGVHLATYSALLAARSINSTLAGFSDEKRCFAEFEARYRREFALFRDFLITFYRLDSGEDDYFRQARRLTGHHGTADEAFAELVGGVSSQDFSRAMFGDVLAEGVQLQLRGLLGEAAGDEPPMFPGGLVPTADGRRWRVPDA

SEQ ID NO: 87890 - protein, 486 aa, Asticcacaulis excentricus
  misc_feature (1)..(486): tr|A0A3G9G2I1|A0A3G9G2I1_9CAUL Tryptophan halogenase OS =Asticcacaulis excentricus OX=78587 GN=EM6_0528 PE=4 SV =1
MTAALLARLTEGKLGQIHLIESEDIGTIGVGEATIPPIQDFNRLLGIDETTFLRETKATFKLGIEFRNWHQKDDSYIHPFGVIGAQIGRAAFHHYYIRAALSGDTTPFEAYSLASVAARQGRFAPAPRHDTGVHSTLGYAYHFDAGLFAQFLRRYAEARGVVRHEGRITQVNQRAEDGFITGVQTERGDTLDGDLFLDCSGMHALLLQKTLETGFEDWSHWLPANRAWAVPCANISEPLPYTRATAHSAGWQWRIPLQHRTGNGHVFSADFMSEDEAQRILLDNLDAPPLADPRLIRFRTGRARQFWHKNVVAIGLSGGFLEPLESTSIHLIHSGLIKFMDLFPDPDFNPLLSQQYNQAVGMDYDTIRDFLIAHYKLTKRDDSDFWRYCREMSIPASLQYKLDQFNESGRVIMSRGDLFQIPSWLAVLFGQGLRPRRYDPLADLIEPQDLSAILHQMQDTITDYANTMPPQARYLEKLGLTIVAGE

SEQ ID NO: 87891 - protein, 496 aa, Rheinheimera pacifica
  misc_feature (1)..(496): tr|A0A1H6JVB4|A0A1H6JVB4_9GAMM Tryptophan halogenase OS =Rheinheimera pacifica OX=173990 GN=SAMN05660691_00631 PE=4 SV=1
MTNNAVKQVLIVGGGTAGWMTAAMLSKLMGPQLSIRLIESDAIGTVGVGEATIPAIQHFNAALGINEAEFLQSTQGTIKLGIQFENWGNAGDSYMHAFGPVGRPLGFTAFHHYWLAAQARGDNSSFWDYSLNYQAAHTGKYAPLPQIPNTPLQGLVHAYHFDASLYAAFLRRYSEQRGVVRTEGTIGAVVKTPAGDLASVILKDGQSFSADLFIDCSGLRALLIGGELGGGYEDWRHWLPCDSALAVPTAATLPVMPYTRAIAHSGGWQWRIPLQHRTGNGLVYSSRFLDDNAARQTLMSNLDAEALAEPRKISFVTGRRNQQWLQNCVAIGLSSGFLEPLESTSIHLIQSAVVRLVQCFPQQTDMAALRLEYNRQSQQEFEAIRDFIILHYHLNQRNDNGLWQYCRTMALPDSLAQRIELFRQSGAVFRQQDELFTEVAWQQVMLGQHLRPQHYHPLADSLTDDQLSGFLADLKAIISRTAAQLPAHQQFLQQGR

SEQ ID NO: 87892 - protein, 477 aa, Cellvibrio mixtus
  misc_feature (1)..(477): tr|A0A266QDP1|A0A266QDP1_9GAMM Tryptophan halogenase OS =Cellvibrio mixtus OX=39650 GN=CBP51_10090 PE=4 SV=1
MAAAAFAKKFGELLEITLVESDEIGTVGVGEATIPPMRVFHKLLGIDEQEFMRATKATFKLGISFENWARQGDKYIHSFGKTGKETWLGDFHHFWLRSRELGMDFEFGDFCLEFQAAQANKFFTGPGADINYAYHLDASRYATFLRAMSEKYGAKRIEGKVIEVKQDHDTGFISALVLASGVVVEGDFFIDCSGFRGLLIEQTLRTGYEDWSQWLPCDTALAVQTESVGPAVPYTRAIAHHAGWQWQIPLQHRVGNGLVYCSNFMTDEEARATLLQNINGPRVNEPRLIKFRTGRRRKSWNKNCVALGLASGFIEPLESTSIHLFIMAITRLMRFFPFSGVEPVLVDEYNRETLAEIEPIRDFVIMHYKATERDDSPFWRYCRNMEVPATLAHRMELFKKTGHAYQAQGELFRIDSWTQVLFGQRVMPEQYHHIAQLMSEQELRQFLMRMKESIRDSTEKLPLHEEFVRQYCRAQME

SEQ ID NO: 87893 - protein, 500 aa, Nostoc linckia
  misc_feature (1)..(500): tr|A0A1Z4LA92|A0A1Z4LA92_NOSLI Tryptophan halogenase OS =Nostoc linckia NIES-25 OX=1091006 GN=NIES25_46520 PE=4 SV=1
MEKTIHNVVVLGGGSAGFLSALALKVKIPWLNVVVVHSTTVPVIGVGEATTAWIPWFLHKYLGLNREQFYEETQPIWKLGIKFIWGDSTQSHFNYPFVTHLADKLSVLSKSTAYYCLDSTTESSIYSLLMEQNKSPCFQRENGDFVVDERFGYHIENTSFVAYLERRAAELNIKIIDKAVVNIEVGENGYIRQLLFNDSTTLAGDLFVDCSGFRSTLLGETLQEPFCSFSSSLFCDSAITGTWMRDEGIQPFTTAQTMQSGWCWQIDLQDKVNRGYVYSSAFISDDDALQEMKLQNPLMSDEHNLIRFKSGRHQRFWVKNVVAVGNASGFVEPLESTGLHMIGETIKCVCDVLIDSDQQPTPGLINLANRAIAEKWDDIRDFLSIHFKFNRRVESEFWRQCWQKTDIGDAEAVVDFFQNNGPSPIGQILLRKNSVFGYNGYLNLLMGQQVATKYQSNNDSLDLDNWRQVKNYFIKNCANALPIPQAIQVVKERKCQWLTS

SEQ ID NO: 87894 - protein, 498 aa, Pseudoalteromonas lipolytica
  misc_feature (1)..(498): tr|A0A1I6X7R9|A0A1I6X7R9_9GAMM Tryptophan halogenase OS =Pseudoalteromonas lipolytica OX=570156 GN=SAMN04487854 _101215 PE=4 SV=1
MEAKKITKVVIAGGGTAGWITAALLNKVLGKSLDITLVESAEIGTVGVGEASIPPILHLNGALGISEKEFIKATGATIKLGIEFENWRSQGHSYMHAFGEIGKDFPFCAFYHFWLKANQTQNAPDFWDFSLNYQAAKAHKFAHLKNIPNTQLAGLHYAYHFDATRYGEFLKELAQSRGVNRIEGKIETISQCDQTGSINALKLEDGSLIEGDLFIDCTGLRALLIEQTLNTGFEDWSHWLPCDSAVAVQSESASNAIPYTRSIARESGWQWQIPLQHRVGNGLVYSSRYLSDENAKQQLLNNLPAKPLTEPRIIKFKTGRRLKQWHKNVVSVGLSSGFLEPLESTSIHLIQSAAIRLIKFFPHQGIKQNLVDEFNKQSKTEFERIRDFIILHYKLTERDDSPFWRLCKGMDIPSSLAKKIALFKTSGKLVREDDELFAEVAWQQVLIGQGLIAEDYHPLTNALTDNQLNELFSNLKTLINSTVEQLPSHSEFLEKIQN

SEQ ID NO: 87895 - protein, 497 aa, Mycobacteroides chelonae
  misc_feature (1)..(497): tr|A0A1S1M731|A0A1S1M731_MYCCH Tryptophan halogenase OS =Mycobacteroides chelonae OX=1774 GN=BKG84_18855 PE=4 S V=1
MTASYLKVAFGDRIAVTVVESARIGAIGVGEATFSTIRHFFEYLGLEEHEWMPSCCATYKLGIRFQDWRKPGHHFYHPFERQRVVDGFGLTDWWLDNPRSDSFDRDCFLIGTLCDNDKSPRRLDGSLFMGTDGENTAYRTTLSEQDTQFPYAYHFDASLLADFLRDFAVRRGTRHVVDDVVDVLQDDRGWISQVRTRAHGSIGGDLFIDCTGFSGLLLGRAMGEPFESYQGSLLNDRAVALRVPTDRDRGHLPPYTTATAQDAGWIWSIPLFDRIGTGYVYAEDYCSPEDAERALRDFVGPEAEGLEASHIRMRIGRSRRSWVGNCVAIGLASGFVEPLESTGIFFIQHGIEQLVKHFPDANWEESLRDSYNRVINRCMDGVREFLVLHYYLAARVDTQYWRDSKSVQLPAALAERIEHWRSKLPDTGSVYPHYHGFEPYSYVCMFVGLGGIPARPSTVVRYLDATRAQREFDLLAQQASRLRHSLPTHREYLAQMY

SEQ ID NO: 87896 - protein, 516 aa, Sphingopyxis sp.
  misc_feature (1)..(516): tr|A0A0M8JI02|A0A0M8JI02_9SPHN Tryptophan halogenase OS =Sphingopyxis sp. C-1 OX=262667 GN=SC1_02736 PE=4 SV=1
MAAHAPYRIVILGGGTAGWMCASGLSGLLAAADYDITLIESDEIATVGVGEATLPHIKTFNDMIGIDEAEFMRETAGTIKLGIEFVDWLRPGVRYIHPFGTFGDRWTNADFQHHWARARLAGTDSRSLQDYSFAVAAALANGFEHPNGDPKSIRSTYSYAYHFDAGLYAAYLRKWATARGIRRMEGKVVDVVRDAESGDVASLTLASGAEISGDLFVDCSGFRSLLLGQTMGVPWIDWSEWLPCDRAFAVPCTGVEPLTPYTRATAQRAGWTWRIPLQHRIGNGYVFSSRFCSEEEARQTVLGAIDGDALDEPRLLRFQAGRRQVGWAGNCIAVGLASGFLEPLESTSIFLIQAATIDLAGLIPRRGEKIDPRMVREFNRLFAVHYDRTRDFLVLHYTANERVGEPLWDHVRNMPLPDSLAHKMALFRESAAAPEYRLGLFSRDSWLSVLEGQGVLPSAANPLTHRLSAADLQARLDDLAERIAVNAADMTPHAEFLATYCASEAKARPGIPANAA

SEQ ID NO: 87897 - protein, 495 aa, Pseudoalteromonas lipolytica
  misc_feature (1)..(495): tr|A0A1I7BDJ2|A0A1I7BDJ2_9GAMM Tryptophan halogenase OS =Pseudoalteromonas lipolytica OX=570156 GN=SAMN04487854 _11216 PE=4 SV=1
MTNHFTKHVVIAGGGTAGWMAAAALAKLLGNEITITLIESDEIGTVGVGEATIPPIRTFHKLLGIDEQRFMTQTQATFKLGISFENWHKPKSDYIHSFGMTGKECWAGEFHHFWLHAQNQGVKDDFGDYCYELQAAKHGKFGFNKQNPINYAFHLDANRYALFLRDFAEQHSVKRIEGKIEHINKSATNGFIESVTLKNGTTVSGDFFIDCTGFKGLLIEQALHTGFEDWSHLLPCDSAVALQTTGSDEILPYTRSIAHQSGWQWQIPLQNRTGNGLVYCSRYLTDADATHLLLNNISGEILTDPKVIKFKTGRRLKGWNKNCLALGLASGFLEPLESTSIHLIMTGIIRFIRLFPFTHISQHAIDEYNKQLKSELESIRDFIVLHYRVTDRDDSEFWRHCKTMEITQTLSHKIALFKQTGRVFLDDGDIFRVDSWVQVMLGQGIKPQQYHHVASLMSEQELMQFLHGIKQQIAHRLAQLPNHKEFVSKYCSQNN

SEQ ID NO: 87898 - protein, 493 aa, Verrucomicrobia bacterium
  misc_feature (1)..(493): tr|A0A2V6PM23|A0A2V6PM23_9BACT Uncharacterized protein OS=Verrucomicrobia bacterium OX=2026799 GN=DME18_08710 PE=4 SV=1
MKISSIVVLGAGSAGLMTALTLKRKVPQLAIRVVRSPDIGIIGVGEGTTVVFPRHFFEYLKMKPRDFYAEADPTWKMGLRFLWGPRKEFYYTFSFEFEKRLPELSRNNGFYYSDDCPWLGHASAFMAHNKVFPRQPDGLPQFHNNHAFHIENKKLVGWLENRCRDHGVGILDATVRAEKGGEGIDSLVTETGERITAELFVDASGFRSELLGRALGEPFRGYQDALFCDRAVIGGWPRADEPILPYTTAETMDAGWCWQIEHEHFINRGYVYSAGFISDDDALAEFKRKNPKLATAPRVVKFRSGRYQRSWVGNVVGVGNAVGFVEPLEATALQVIAVEASTLADSLLDSLCEPTPSLIRLYNRYNGDQWDDIRNFLAIHYKFNTRIDTPFWSACRADTALHGAQDIVDWYRENGPSVLAGVALVHPSNSFRMDGYLALLAGQKVPHNKPYHPPPAEQNFWRQHCRSLAAEAQRGLDVKQALQAIRSPDLKWA

SEQ ID NO: 87899 - protein, 497 aa, Mycobacteroides chelonae; identical to SEQ ID NO: 83022
  misc_feature (1)..(497): tr|A0A1S1LM64|A0A1S1LM64_MYCCH Tryptophan halogenase OS =Mycobacteroides chelonae OX=1774 GN=BKG82_25075 PE=4 S V=1

SEQ ID NO: 87900 - protein, 350 aa, Streptomyces leeuwenhoekii
  misc_feature (1)..(350): tr|A0A0F7VR95|A0A0F7VR95_9ACTN Tryptophan 2-halogenase OS=Streptomyces leeuwenhoekii OX=1437453 GN=sle_35630 P E=4 SV=1
MSSALFGVPDEYDVIVIGGGPAGATTAGLLAQRGRRVLVLDRERFPRYHVGESLIPAFMRPMQEMGITERMDARGFERKYGGTLVWGNKQVPWNFSFIEGGAHEYAFHTRRADLDALILDRARELGAFVIEDATVKEPVLVDGRVTGVRFALRGLDGLHEVRARLVVDASGQARVLGRRLTDVEWHEELRNVAVWTYFDNCERLPGDEYTNILIEGLDGGWFWAIPIDKGTISVGYVTRSTTAGENGQSLEDLFHAERQRTTKLAKMLAGARQSAGFRTARDWSYHSNRFYGDGWVLVGDSAAFVDPLFSTGVALATLAGSTLAKILDRIVENPQIEEKALDRFQHVGAA

SEQ ID NO: 87901 - protein, 496 aa, Colwellia sp.
  misc_feature (1)..(496): tr|A0A2N1HP13|A0A2N1HP13_9GAMM Tryptophan halogenase OS =Colwellia sp. Bg11-28 OX=2058305 GN=CXF79_01405 PE=4 S V=1
MNSPIKKVVVLGGGTSGWISAALLKKILGSAIQLELVESDAIGTIGVGEATIPPIKHLNNVLGINEAEFLRETKATIKLGINFENWKSQGHSYLHSFGAAGKSLAFCHFHHLLKRANQLEDDSHLWQYDLNYLCAKAGKFAQIKSKDPIIELPYAYHFDAGLYAKFLRKFSEKIGVIRTEGLVEHVEQCPNSGHITSLKLKSGQTVTGDLFIDCSGFKGVLIQEKLRTGYEDWSHLLQCDRAIAVPSERLEKTLPYTRSIAHAAGWQWRIPLQHRNGNGLVYSSSHCSEQQAMDTIMGNLDSKAIADPKVIKFQTGRRYQQWNKNVIAIGLSSGFLEPLESTSIHLVQSAVVRLAHLFPHQGINSSLVDEFNKQSATEFEQIRDFLVLHYHATERTDSDFWQDMRHMKIPDSLAHKIEIFKQSGRLFREQNDLFTDSSWLQVMLGQGVVPQDYHPIANIMSDEKLAEMLRKVKEIKQAPIDKLPSHDEFLRIFCQQ

SEQ ID NO: 87902 - protein, 546 aa, Mycobacterium marinum
  misc_feature (1)..(546): tr|B2HL71|B2HL71_MYCMM Tryptophan halogenase OS=Mycobac terium marinum (strain ATCC BAA-535 / M) OX=216594 GN=M MAR_3632 PE=4 SV=1
MDDNLIKKVVVLGGGTAGWMTAAYLGKALQGNVEITVLEAPSVPRIGVGEATVPNLQRVVFDFLGIPEDEWMRECNASFKTAVKFINWRTPGEGSPVARHWQGRPDHFYHPFGLLPSPQHIPLSHFWARNQLKGGTSEPFDYACFREPAIMDAMKAPRYLDGTQATYYAWHFDAALVADFLRRFATKNLGVVHVQEKMTLAEKDSNGYITALRTEEGRRLDGDLFVDCSGFRGLLINEAMNEPFIDMNDHLLCDSAVATPIRHDDAANGIEPYTSAIAMKSGWTWRTPLLGRFGSGYVYSSQFASQDEAIRDFCNLWQLDPEDTPLNKIRFRVGRNRRSWVKNVVSVGLSSCFLEPLESTGIFLIYAALYQLAKHFPDRRFDPVLIDRFNRKIDTLFDETRDFLQAHFYFSPRTDTEFWRANKELTLTDSIKEKVAMYKAGVPVNPPIATESSYYSNFDAEFENFWTNGSYYCIFAGLGVLPDHTLPAINYQSEAIHEADALFLDVKQKQRHLVETLPSNYEYLLKLHGKDMEPNDPMEPEVTFVA

SEQ ID NO: 87903 - protein, 494 aa, Colwellia sp.
  misc_feature (1)..(494): tr|A0A2N1HG44|A0A2N1HG44_9GAMM Tryptophan halogenase OS =Colwellia sp. Bg11-28 OX=2058305 GN=CXF79_07945 PE=4 S V=1
MKDKIENIVIAGGGTAGWMAAAAFSKLLGKNLNITLVESDDIASVGVGEATIPPIKTFHKLLGINEQEVMRATHATFKLGIGFENWGQQGDHYIHSFGVTGKECWAGEFHHFWLHGLRKGIKADFGDYCYELQAAKANKFALSKNTPINYAYHLDATRYAKYLQEFSKKLGVIRVEGKIQQVNKGNKTGEINSLTLASGQVIEGDFFIDCTGFQGLLIEQALHTGFDDWSHWLPCDRAVAVQTKAVAAPLPYTRSIARKSGWQWRIPLQNRVGNGLVFCSKYCSDEEAISTLTANIEGELLTEPRIIKFNTGRRRKGWNKNCVALGLSSGFIEPLESTSIHLIMSGIIRLLRLFPFDGIHQSAINEYNNKLDSELNAVRDFIILHYKATQREDSNFWLHCKNMEIPPSLVHKMQLFKDTGRVFLDDGDIFRVDSWTQVMLGQGIMPTQYHKIAEIMNDKELENFMSNLKASITNAVEQLPSHTEFIQSYCKSDY

SEQ ID NO: 87904 - protein, 503 aa, Sphingobium yanoikuyae
  misc_feature (1)..(503): tr|A0A0J9FVN8|A0A0J9FVN8_SPHYA Tryptophan halogenase OS =Sphingobium yanoikuyae OX=13690 GN=BV87_02395 PE=4 SV= 1
MHADFPTSDRVVKRVVVAGGGTAGWVTATALVRHLGPLIDIILVESDAIGTIGVGESTVPTFRGFHQLMKIREDRFMAEAQATVKLGIEFKNWGQVGDRYIHPFGTIGLQWSWMADFHHFWLHARAQGFGGELGEYCLEWMAGEANRMSLSSSVAPSYAYHIDAARYARFLRSLAEPAGVKRVEGKIRNVELTPESGHIAALVLESGTRIEGDLFIDCTGFRSLLLSEALGVGFEDWGQWIRTDRAVAVQSTSDGPAQPYTSAIAHEAGWRWRIPLQHRDGNGFVFASDFMSDDEAHARLLAEIEGEPIVDPWLVRFKTGTRTRAWHKNCVGLGLAGGFIEPLESTSIHLMMAAVTRLIEDFPFHGFDDALLDHFNRKSRLEFENIRDFIILHYHVTQRDDSPFWDHCRTMEIPDSLKERLALWQENGRAYQLGHELFRVDSWSSVLLGQRMHPRGYHHVAAMMPEPQLREELARMRKDIAGVVAEMPSHREFLRRYCPAELA

SEQ ID NO: 87905 - protein, 505 aa, Pseudoxanthomonas dokdonensis
  misc_feature (1)..(505): tr|A0A0R0CKR1|A0A0R0CKR1_9GAMM Tryptophan halogenase OS =Pseudoxanthomonas dokdonensis OX=344882 GN=ABB29_05770 PE=4 SV=1
MTASGNPIGSIVVVGGGSAGWMAATALATYLGRQASVRLVESEEIGIVGVGEASVPYMKQFNAGVLGIDEFDFVARTQGTFKLGIQFNDWGQIGDSYLHGFGRIGQGIGPLPFHQFWLKLFLAGRARPIGEYSLPTLAAPLGKFMSSPGNVPQDSPLADIAYAYHFDAGLYARYLRELAERRGVQRIEGKISHALQRGEDGFIEAVVLESGEQVAGDLFIDCSGFRGLLIEQTLDTGYIDWTHWLPCNRAMAVPCATAGAPTPYTRATARTAGWQWRIPLQNRIGNGYVYSSEHISDDEAAATLLANLDGPALADPRPLRFTTGMRRKLWNRNVVALGLASGFMEPLESTSIYLVQSGIQRLLGLFPDRGFDPILERQFNEESAFEYESTRDFLILHYCATRRSDSAFWDYCRTMSIPDTLRRKIDMFRSGGRYFRTGDEFFALPSWVQVMLGQGIIPEGYHPIVDDMPEPALIEHVARVHRSIADGAAAMPAHQAYIDRYCRAS

SEQ ID NO: 87906 - protein, 568 aa, Variovorax paradoxus
  misc_feature (1)..(568): tr|A0A0H2M4H5|A0A0H2M4H5_VARPD Tryptophan halogenase OS =Variovorax paradoxus OX=34073 GN=VPARA_16580 PE=4 SV=1
MTGTAQRCDAVIMGGGLAGLTLALQLKQRFQDIDVLVLERRTHPVPHAAHKVGESSVEIGAHYFDTVLGLKPHMDGAQLRKFGFRFFFSEGRRDIDQVTEIGASRYLAVPSYQIDRGIFENYLAEEAVRRGVRFDDAALVRRVDLAPDAEAPHRLEWTRGNETHSAEARWLIDACGRAGLLKRKLGLAQANAHDVNAVWFRIGERIAIDEWSDNATWRERCDPQARWLSTNHLVGAGYWAWLIPLASGSHSVGIVADPKLHPLDTIDTFEKAMQWFATYQPRLYDALDGKRHLLQDFAFLKHFSHGCKQVFSGRRWALTGEAGLFLDPFYSPGSDFIAISNTYITDLVAHDRAGRSVEARAQLYDQIYHSFYESTLALYQDQYPLFGDPEVLPVKVIWDYAYYWGVLSQIFFQQRLTDLMLLGSLKEELQHCQRLNLAVQQLLRSWSAASARRNAPVMLDQAAMPWFAELNRSLKDPRLGDAEFRARIRASVAQLRQLAGEILGRARADNADLSGCALPSVLEEDIAALPAGAQAGAMLFAALPDDSRKPRLPNFTERSSPVAPRARP

SEQ ID NO: 87907 - protein, 498 aa, Novosphingobium sp.
  misc_feature (1)..(498): tr|A0A258HZZ4|A0A258HZZ4_9SPHN Tryptophan halogenase OS =Novosphingobium sp. 32-60-15 OX=1970410 GN=B7Y89_11455 PE=4 SV=1
MPTLPRRIVIAGGGTSGWMAAAAIARTLGPVVEVTLVESDAIGTIGVGESTIPPLVAYNRLLGIGEAEFMKATQATFKLGIMFENWKDVGERYFHSFGGTGKDHWSAGFQHFWMHGKTQGHTEPYDDYCLELKAAEAGKFAHLPDDRINYAYQLDSSLYGAFLRTMAEADGCKRVEGRIAHVELDGATGDIAALLLDGGRRIEGDLFVDCTGFRALLIEGALHAGYDDWSHWLPCDGAVAIQTASVRPPVPYTRAIAHEAGWQWRIPLQHRAGNGIVYCSRYMDRDAALERLLGTIEGKTLTEPNFISFKTGARRKQWHRNCIAVGLSGGFMEPLESTSIHLIQRAVLRLLRMLPAGRPSERDIAEFNDQQFTDMEQIRDFLILHYKATERTDSPFWRHCASLEVPDSLEQKIELFRETGRVFRRNEELFAENSWVQVMMGQGIMPQSYHPVAAKLSNDELAYLLASLRDNVARTVAGMPEHFAYVSHYCGVREAQVA

SEQ ID NO: 87908 - protein, 510 aa, Pseudoxanthomonas dokdonensis
  misc_feature (1)..(510): tr|A0A0R0CJA6|A0A0R0CJA6_9GAMM Tryptophan halogenase OS =Pseudoxanthomonas dokdonensis OX=344882 GN=ABB29_09385 PE=4 SV=1
MANGRIRKVVIAGGGTAGWLAATALSHQFRDLLEITLVESEQIGTVGVGESTVPPIRTFHRFLQIDEQEFLRAVAGTFKLSISFENWRRPGERYIHPFGITGQSTRACGFHHFWLDSVRRGMASELGDFCLETLASREDRFTLSSQPQVNYAYHFDAGLYARFLRGIAEGYGLKRVEGKIREVRQDPQDGFVQALVLEDGQVLEGDLFIDCTGFRGLLIEQTLQSGYEDWHQWLPSDRAVAVQTESVGPPVPYTRAIAHEAGWRWHIALQDRVGCGWVYSSRHMSDDEATQKLLDAVGARPIREPWRVPFRSGRRLKAWNKNVVSLGLASGFIEPLESTSIHLSMSAVMRLVQLFPLDGIPQSLVGVYNEVGRAEMEHVRDFIILHYHANQRDEPMWRECRDMQLPPSLQIRLDAWRERAHAWQGADELFRVDSWTHVMLGQGIMPSQHHPLARALSDQDMQRLLHSIQQPMRQAVQQMPTQQAFIDSYCRSDPRVWATLSPVTPQATPA

SEQ ID NO: 87909 - protein, 509 aa, Sphingomonas melonis
  misc_feature (1)..(509): tr|A0A0D1MCP2|A0A0D1MCP2_9SPHN Tryptophan halogenase OS =Sphingomonas melonis OX=152682 GN=SR41_01425 PE=4 SV=1
MTDAHPNPPLKTITIVGGGTAGWMAAALLSRLTLGAYTIRLIESEEIGTIGVGEATIPAIRTFNGLAGIDEFEMVRATQATFKLGIEFRNWGAPGDSYIHGFGKIGQDLYWLHCHQFWLKERAAGRAKHLDHYALNTLAARMNRFAMPDPSNPQSPIADIDYAYHFDASLFARFLRRRAEAAGVERIEGRIVAANRRGTDGFLDHVMLADGRRVDGDLFVDCSGMRGLLIGDAMGVGYEDWSEWLLCDRALAVPSARGTGPLAPYTRATAHGAGWQWRIPLQHRTGNGHVYASRFVSDEAAATTLLEHLDTPALGDPRPVRFRPGKRHRAWEKNVVALGLAGGFLEPLESTSIHLIQTGILRLIALFPGRGFNAADTDEYNRQTDFEYRDVRDFIIAHYKVTAREDTEFWRYLKHMAVPDSLTERLELFRSSARFFMHAKAELFREESWVQVLLGQGLQAHHDPMVDMIPAEQTTAFLKDVEDVVADVAAGLPTHEAFIARHCQAPKVG

SEQ ID NO: 87910 - protein, 544 aa, Idiomarina halophila
  misc_feature (1)..(544): tr|A0A432XZQ6|A0A432XZQ6_9GAMM Tryptophan 7-halogenase OS=Idiomarina halophila OX=1449799 GN=CWI69_01350 PE=4 SV=1
MRKRKILIVGGGSAGWMTAAYLNGALNQRGEAPRVEIELLESPDTPRISVGEATIPSMRHLLAVVGVDEMEFMRVTEATFKQSIKYVNWVHNDNSFYHHPFSSMRTQPIDYAGQNWLMSDRSIPFMETCSIQPLVCEWGRAPQMFGQWQMGARLNYAYQMNAQKFADYLCDFSVARGVQHTLANLSAVQKHPNGYIKSVLTDQGQTLEADVFVDATGFRALLLEKEMGVDFEDFGKYLLCDRAVTMHLPYDKYYPGSVRPYTTATASSNGWIWDIPMQTRRSIGYVHASAFIDEAAAEQELRAYQGPGCEDEPCRFIPFKAGRRHQQWAGNCVAIGLSGGFIEPLESTGLYLSDLGAVLLAEHFPWRDEDMPRLAARYNRLMTNRYYEILDFINMHYCMTKRTDTDFWRTVQENEHITDRLLAKLNFWRTKPPSAHDFQDQWFAGMASQDTTATGSFADSRTPIDTGGLWNHESYECILYGMEFLQAECDRWFGEQRPPTKVHPMIMQRLQMARQMLPPHEMWLQRALGMADYPTATRPKGWVV

SEQ ID NO: 87911 - protein, 491 aa, Sphingomonas melonis
  misc_feature (1)..(491): tr|A0A0D1L0D3|A0A0D1L0D3_9SPHN Tryptophan halogenase OS =Sphingomonas melonis OX=152682 GN=SR41_01720 PE=4 SV=1
MTPPPPSIAILGGGTAGWMAACLMAKAWPQARITVIESPDIGIVGVGEGSTPQLKALFDTLGLAEADWMPAADATYKAGIAFHGWADDTPAYFHPFAGQIDLHTQGAFFASTRARRHGADVPAHPDRFFLNARLAEAGRAPIAPAHFPFRIGYGYHFDAHKVGHVLRDAALARGVVHLPRRVHDVVVDAAGQVAALTLDEGDAVHAALFVDASGFASVIAQQALGVPFRSFANTLFADRAVVMPTPRQGALPVQTKATALSAGWAWDIPLTSRTGNGYVYASRYLSPDAAETELRRHLGLLDADVAARHLSMKVGRVETSWTANCLAIGLAQGFIEPLEATALHIVQATIEGFIGAYQAGSRDAFNAAIARRYDGIRDYIVAHYRLNRRSGVFWRDVAANDDLSDDLKAIMTAWFTGGDVAAVVEGRGLAGYYAPMSWEVLLAGYGTFPDATRLRTAPPVADIAAIDTLLSGCLLNFPDQQAALDGHRRMP

SEQ ID NO: 87912 - protein, 505 aa, Caulobacter sp.; identical to SEQ ID NO: 84094
  misc_feature (1)..(505): tr|A0A0Q6V759|A0A0Q6V759_9CAUL Tryptophan halogenase OS =Caulobacter sp. Root343 OX=1736520 GN=ASC70_05220 PE=4 SV=1

SEQ ID NO: 87913 - protein, 160 aa, Mycobacterium ulcerans
  misc_feature (1)..(160): tr|X8FF79|X8FF79_MYCUL Tryptophan halogenase family pro tein OS=Mycobacterium ulcerans str. Harvey OX=1299332 G N=I551_2012 PE=4 SV=1
MRRFATKNLGVVHVQEKMTLAEKDSNGYITALRTEEGRRLDGDLFVDCSGFRGLLINEAMNEPFIDMNDHLLCDSAVATPIRHDDAANGIEPYTSAIAMRYGWTWRTPLLGRFGSGYVYSSQFASQDEAIRDFCNLWQLDPEDTPLNKIRFRVDATAGRG

SEQ ID NO: 87914 - protein, 503 aa, Sphingobium yanoikuyae
  misc_feature (1)..(503): tr|A0A084ELW6|A0A084ELW6_SPHYA Tryptophan halogenase fa mily protein OS=Sphingobium yanoikuyae OX=13690 GN=CP98 _02339 PE=4 SV=1
MHADFLTSDRVVKRVVVAGGGTAGWVTATALVRHLGPLIDITLIESDAIGTIGVGESTVPTFRGFHQLMKIREDRFMAEAQATVKLGIEFKNWGRVGDRYIHPFGTIGLQWSWMADFHHFWLHARAQGFGGELGEYCLEWMAGEANRMSLSSSVAPSYAYHIDAARYARFLRSLAEPAGVKRVEGKIRNVELVPESGHIAALVLESGTRIEGDLFIDCTGFRSLLLGEALGVGFEDWGQWIRTDRAVAVQSTSDGPAQPYTSAIAHEAGWRWRIPLQHRDGNGFVFASDFMSDDEAHARLLAEIEGEPIVDPWLVRFKTGTRTRGWHKNCVGLGLAGGFIEPLESTSIHLMMAAVTRLIEDFPFHGFDDALLDHFNRKSRLEFENIRDFIILHYHVTQRDDSPFWDHCRTMEIPDSLKERLALWQENGRAYQLGHELFRVDSWSSVLLGQRMNPRGYHHVAAMMPEPQLRDELARMRKDIAGVVAEMPSHREFLRRYCPAELA

SEQ ID NO: 87915 - protein, 503 aa, Idiomarina halophila
  misc_feature (1)..(503): tr|A0A432XWR7|A0A432XWR7_9GAMM Tryptophan halogenase OS =Idiomarina halophila OX=1449799 GN=CWI69_07250 PE=4 SV =1
MTHPYQIVILGGGSAGWMTAAALSKVLDQQKYRITLVESAAIGTVSVGEATIPGIREFNQLLEINEDEFLRETNGSFKLGIAFENWQNIGDFYMHPFGPYGVTLHGVHFHHYYLRHQREQGEADAMPLSDLNLEWRAAIEHKFTRPIADKRSPLGHIKYAYHFDALKYAQYLKKYATARGVVALDDRMVEAKQQVKHGPIDALMLEKNGELAGDFFIDCSGFKALLIGEALDVSYHDWRKWMPCDSAVALPGQHDNADILPYTRSIAHHEGWRWRIPLQHRTGEGWVYSSRFTDSEKAEREFRDTIGNHDSKANHLRWINGRRDQAWRHNCAAIGLSAGFIEPLESTGLQLTQSGIMRLISLLPGQGELSERAAAFNRFTAEEITNIRDFVMCHYKLTNRDDSEFWRYCRDMEIPDSLQQRLDLYQENASVFRNSNNELFNEISWFSMFQGQGLRPANVHPLAEQMPAATLQQHLQTIQRVFAQSVAQLPTHEQFIKEHCKAP

SEQ ID NO: 87916 - protein, 513 aa, Pseudoalteromonas lipolytica
  misc_feature (1)..(513): tr|A0A0P7ELN7|A0A0P7ELN7_9GAMM Tryptophan halogenase OS =Pseudoalteromonas lipolytica OX=570156 GN=AOG27_08515 PE=4 SV=1
MQKNEVKKVVILGGGTAGWLSAGLIAAQPHLTHNAQITLIESPDIATIGVGEGTWPTMRQTLKTIGISESEFIQRCDASFKQGSRFDGWCDDEGDAHYYHPFSLPVAYQQLNIAPYWFANKDAVSFSHAVASQTYLCDHHKAPKNHLHSAYHGEANYGYHLNAGKFAMLLQQHCTTKLNVEHIVSHVECINSDEDGYISSLQTRDHGTIAGDLFIDCSGTHAKLLHQHYGIELIEQHDVLFNDRAVAVQVPYLNPQQEILSYTKATAQDAGWIWDIGLQSRRGLGMVYSSRFANSEDAKQALSQYIAKTQPGTAQNELIFREISFTPGYRRRFWYKNCLAIGMSAGFIEPLEASALVMVELGLNNLLANFPTHRAAMPTLAKRFDEQCHYRWKRIIEFLKLHYVLSKRTSPYWQAHKEANSIPLQLQENLALWQYQSPWLNDFDRAQEVFSAASYQYVLYGMKQLPQFPVLAMPAAIIEHFSANQQQAKRGLQQLPTNRELLNHIQQFGIQPI

SEQ ID NO: 87917 - protein, 489 aa, Streptomyces sp.
  misc_feature (1)..(489): tr|A0A1Q5LS16|A0A1Q5LS16_9ACTN Tryptophan halogenase OS =Streptomyces sp. CB03234 OX=1703937 GN=AMK26_15845 PE= 4 SV=1
MTATYLKAAFGERIQVTLVESEQVSTIGVGEATFSTVRHFFRFLGLAEHEWMPECHASYKLAIRFEDWRAEGHYFYHPFERPRTVNGFSLAEWWQHLRPGDRFDRDASVLAALCDARSSPKYLDGTLFEMAGEDPTQFPYAYHFDATLLARFLRGYGTRRGVRHVVDDVLDVRLDERGHIRNVLTKEHGELAGDLFVDCTGFRGMLLNKALGVPFLSYQDSLPNDSAVALRVPVDVARRGMRPCTTATAQAAGWIWTIPLLDRLGTGYVYASDYCSPEEAERTLREFVGPEADDVTANHIRMRIGRSAQSWAGNCVAIGLSSGFVEPLESTGIFFIQNGIEQLVRYFPDGRDDERLRQAYNRQVGHVMDGVREFLVLHYYAAARDDNQYWRDAKTRPMPDALAERIEQWHTSLPDADSVYPYFHGFEPYSYTAMLLGLGGIRTRPLPVLARLDGTDAVKEFHRIRQQADSLVDRLPSQYDYLAQLRGGA

SEQ ID NO: 87918 - protein, 514 aa, Pseudoalteromonas sp.
  misc_feature (1)..(514): tr|A0A3R8SDJ0|A0A3R8SDJ0_9GAMM Tryptophan 7-halogenase OS=Pseudoalteromonas sp. J010 OX=998465 GN=EAG18_18850 PE=4 SV=1
MVKKVLIVGGGTAGWLTAARLAKQFIDSGSDIEVSIVESANIPTIGVGEGTWPTIRDTLKTLDICETEFLNTCDATFKQGAKFVNWKKVSDENEDIYYRHLFTSLYDPWEFNLAPFWSSGVAGELPYSEAVSMQGDVCEQGKAPKNITTPQYEGLQGYAYHLDAAKFANLLKDKAVNKMKVRHIIADIGHVSVQSDGSIEYVETVTGEKLHADLFIDCTGFKCLLLGDAMKVPFVDLSHTLFVNRAVALQVPYENPNSPIACETISTAQSEGWIWDIGLQSRRGIGFVYSDKYISKDCAEQRIREYAGINTDGISAKHLEFQVGYREKFWHKNCVAIGLSAAFVEPLEASAIFLVEAAVNMLCDKFPHSQHEFEFIEKQFNRSFLFRWNKTIEFIKMHYVLSQRTDGQFWLDNKNINSIPDELRSKLAHWQNNPLSKYDFASAFEPFVMDSYQYVLYGMGFKTEVDSSRLSAEKTKKARAMFAEVNKYRTIVQENLPNHRELIEKLKEYKFPKV

SEQ ID NO: 87919 - protein, 515 aa, Sphingomonas melonis
  misc_feature (1)..(515): tr|A0A0D1K8D4|A0A0D1K8D4_9SPHN Tryptophan halogenase OS =Sphingomonas melonis OX=152682 GN=SR41_02115 PE=4 SV=1
MTLPVPDHAIRNIVIVGGGTAGWMAAAAFSRLLNTGYTRVTLIESEEIGTVGVGEATIPPLLNFNGMLGIDENEFLAATAGTFKLGIEFRDWGAIGDRYIHPFGTFGQDLQGISFHQLWLRERSRRAIPDISAWSMSAQAAARGRFGRAREDARSPVRELFYAYHFDASLYARYLRGYAERGGVTRIEGRIADVRLRGEDGYVEALTLADGRQVAGDLFIDCSGFRGLLIEEALHTGYESYAQWLPCDRAVAVPCALPNAREPDPYTRATARAAGWQWRIPLQHRMGNGYVYCSDLLSDEAAEFDLLASLEGEPLGDPRRLRFTAGRRRQSWNRNVIALGLSSGFIEPLESTSIHLVQAGIQRIVAMFPDTRFDPAERDEFNRQLHDLYEDIRDFIILHYAQTRRTDTPFWDRVRTMPLPDSLTRKLELWRGKGRLFREGYDLFSVPSWVAVCLGQGLVPSTWEPAADALDETLVAEAMETMRRGYADTAERLPTHGDFLRMVAPSPLANWGQSR

SEQ ID NO: 87920 - protein, 537 aa, Colwellia sp.; identical to SEQ ID NO: 82612
  misc_feature (1)..(537): tr|A0A2N1HL50|A0A2N1HL50_9GAMM Tryptophan 7-halogenase OS=Colwellia sp. Bg11-28 OX=2058305 GN=CXF79_06530 PE=4 SV=1

SEQ ID NO: 87921 - protein, 517 aa, Cellvibrio mixtus
  misc_feature (1)..(517): tr|A0A266QC54|A0A266QC54_9GAMM Tryptophan halogenase OS =Cellvibrio mixtus OX=39650 GN=CBP51_07995 PE=4 SV=1
MSKSVLIVGGGTAGWICAAYMARMLAADTPGGVTITLVESDEIGILGVGEGTFPIIRKTMSRIGLDESELIREADATFKQGIRFNNWKKNPADDPHDTYFHPFQVASQHTDMDLLPYWLLGVAGDVPWAEACTVQERVVDAKLAPKLITHPNYNAPLNYAYHFDAGKLAQVVCRQAMAMGVKRLIDTIDDVKVDEHGIASVQGRTHGELKADLYIDCTGFRARLIGEALGSGFTSYKDQLFCNRAVAMQVPYDRPDAPIPSCTYTSAQDAGWIWDIGLHNRRGVGYVYASDYCSDDEALATLKRYIGPAADNLQHRKLAFEAGFRKTQWHKNCIGVGLSVGFIEPLEATGISFAEVAALMLCNLFPWSGDYERSAQQFNQAMTKRFEHVIDFIKLHYYLSERTDTAFWRDNRAPASASDYLKGKLEQWRHRPPSFLDIDASHDIFDENSWQYILYGMGFKTDISARAGALRFYDDAKREFESIRQQSNKAMTAVPNHRDLINEVVARGFRNASGGQR

SEQ ID NO: 87922 - protein, 893 aa, Nostoc linckia
  misc_feature (1)..(893): tr|A0A1Z4LA69|A0A1Z4LA69_NOSLI Tryptophan halogenase OS =Nostoc linckia NIES-25 OX=1091006 GN=NIES25_46510 PE=4 SV=1
MADFIDNIPQVPRINPNAHLILSEAGEVCSWVGSEVFVLEGIQPNIIRQLLVLIDGVRPLEGIYAELADFGDVYDGLRLRNYLNEIVSALSKLNIIQEVVTQAAPQNHRWELPIVSKQVGQKAIALLGNHQLLDTLDRAFAAAGFENRRAFYLKNFASCQTPEFRAIGQERILVNGTSKYLSSLAPTAYQDSLDSVSISGLSQLFKEFDFVVCALEGIPFQALLDVNKSALASGTPCLFVTASQETALIGPTVIRGATACFGCRVIALEELPPVFEDIWPQLSTPIVAKADSGILFSVAQACLEEAISLLGPTLTPIRATNVLKITQQGKDTIKRLLPSSKCHECAPRLDEPLGVMERSAIAAAAEEIGRIWPNSPKAAIPPASDGYRTVGILGGGTAGYLTALAFRAFRPDIKVTLLESSAIPVIGVGEATTPELVKFLHSPRFLGLDIVDFYQRVRPTWKLGIKFQWGLPDDYEFTFPFQRGRLLESLIYDETLNNQSLGAMLMSGDRVPIFDRGDGTPLSLLHQIRWAYHLDNRRFVRYLQEEAMAAGIEHIDVQISDAQISADGETITHLITEDGQKLSYDLYIDCSGFRSLLLEKLGSKFVSYQDTLSTDRAIAATVPHNGTVKPYTLAETMNNGWCWNIPFEDADHRGYVFSSAFCSDDQALEEMRAKNPGMGDPWVVKFRSGRHEHFWKGNVVAIGNSYAFVEPLESTAIHTIVLELELLLTNFPASKRDEGIKSALNRKMSDRWDALRWFLGIHYKFNHRLSTPFWQAANRDTDISGAIERLALFTERAPLSYRNSLFYTLHPSDFFSDDHSYDTLLAGQQVPARFMEPVEDRATWQRQMAILKGLASTAMPQHEALWCLRDKRPDLLYDFAKRRDSWLHTWLPA

SEQ ID NO: 87923 - protein, 495 aa, Shewanella sp.
  misc_feature (1)..(495): tr|A0A2N7DV52|A0A2N7DV52_9GAMM Tryptophan halogenase OS =Shewanella sp. 10N.286.48.B5 OX=1880834 GN=BCU57_00275 PE=4 SV=1
MNKKITNVVIAGGGTAGWMAAAAFAKLLGKNINVTLVESDLIPTVGVGEATIPTLHIFHDLLKINEAEFMAATNATFKLGISFENWRDVNQDYMHSFGYIGQSCWAAGFQHFWLKGVKQGVASDIGDYCPEHVASRVGKFAVLANHDRNHAFHTDAGLYARFLRQFSEKYGAKRIEGTISKVNLNEQNGFIESLTLADGQQIAGDLFIDCTGFKGMLIEETLHTGYDDWRHWLPCDSAIAVQTKQTKPLVPYTRSIAHPCGWQWQIPLQNRMGNGLVFCSQYLSDDDAKSLLLENIEGELINEPRVIKFRTGTRRKHWNKNCVAIGLSSGFIEPLESTSIHLIQQSIVRLMQNLPTTAMESGVVDNFNQKMRIEIENIRDFIVLHYHVTERKDSEFWRYCKQMDIPESLQKRIDLFKQSGQVYKTDQELFGEASWLQVMLGQGLMPEQYHPIVDNMSDDELAQFLGTIKQSIARRVNSLPNHVDFINNYCKSTIS

SEQ ID NO: 87924 - protein, 528 aa, Sphingobium chinhatense
  misc_feature (1)..(528): tr|W1KP68|W1KP68_9SPHN Tryptophan halogenase OS=Sphingo bium chinhatense IP26 OX=1346790 GN=M527_26995 PE=4 SV= 1
MSVDIPSLFMGNFDMIHPVRNIVIVGGGTAGWLTAGVIAARHRSRIGNGFTVTLVESPNTPIIGVGEGTWPTLRTTLSRMGISETDLFRECDAAFKQGARFARWTTGTPDDGYYHPLMLPQNFGQVNLAPHWLAGDGDESFCDSVCSQGRICDDGLAPKTIATAEYDALANYAYHLDAGKFAPFLQRHCTEKLGVRHVQADVEQVLMKEDGDIRAIRTTQAGEIEGDLFVDCTGFKALLIEGAMKVPFRDCNDVLFCDTALAMQVPYDRPDSPMASHTISTAQSAGWIWDIGLPTRRGIGHVYSSNHISDEEAERELRAYIGPPAEGLSARKIPIRSGHRETFWKGNCVAVGLAAGFLEPLEASAIVLIELSAKIIAEQMPACREVMDIVASRFNATTHYRWGRIIDFLKLHYVLTKRTDSDFWRDNVREETIPDRLQELMLLWRYQSPWFLDEFDRVEEVFPAASYQYVLYGMGFRTEVDRPALARDAHLADRARRENAAMTAKLRAGLPRHRDLIDKIVTHGLQPV

SEQ ID NO: 87925 - protein, 533 aa, Streptomyces sp.
  misc_feature (1)..(533): tr|A0A429U9M3|A0A429U9M3_9ACTN Tryptophan 7-halogenase OS=Streptomyces sp. WAC05950 OX=2487419 GN=EF904_02430 PE=4 SV=1
MTSTDTRLQKVVILGGGTAGWMTAAYLGKALQGTVDITVLEAPTIPRIGVGEATVPNLQRSFFDYLGIAEDEWMRECNASFKMAVRFVNWRTDGQGESTARELPGGGPDHFYHPFGLLPDYDQTPLSHYWFKRKYEGRTTEPFDYACFREPPVMDAMKAPRWLDGRPATRYAWHFDAQLVADFLRRFATEKQGVNHVQDEMVRVEQDSRGYVTTLHTKGGLALDADLFVDCSGFRGLLINQALQEPFIDMSDHLLCDSAVATAVPHDDEANGVEPYTSAIAMSSGWAWKIPMLGRFGTGYVYSSKFADQDTATREFADMWGLDVEETKFNHIRFRVGRNRRAWVKNVVSIGLSSCFLEPLESTGIYFITAAIYQLAKHFPDKTFNEGLVNSFNHEIEVMFDDTRDFIQAHFFYAPRNDTPFWQANKKLVLPENIKQKISAYKAGLPINSPITDESTYYGNFEAEFRNFWTNGSYYCIFAGLGLEPDAPLPTLAHRPESVAGAEPLFDTVKRQQQNLLETLPSAYDYLRQLHGA

SEQ ID NO: 87926 - protein, 504 aa, Pseudoxanthomonas dokdonensis
  misc_feature (1)..(504): tr|A0A0R0CN88|A0A0R0CN88_9GAMM Tryptophan halogenase OS =Pseudoxanthomonas dokdonensis OX=344882 GN=ABB29_01525 PE=4 SV=1
MPETTDSNACNRPIRRVVIAGGGTAGWMAAAALSRTLGKVLDIKLIESDEISTVGVGEATIPTLVTFHRLLDINEQEFMAATQATFKLGISFENWRDVGQDYIHSFGITGKDHWSAGFQHFWLKGRERQLASDYGDYCLELKASQQNRFAHLPKGGMNYAFHMDAGLYARYLRRFSEGFGAQRIEGKIVEVCKDDASGHIRSLMMDSGEEIEGDLFIDCTGFRGLLIGQTLGAHYQDWSQWLHCDSAIALQTRSVGEAIPLTRSIAREAGWQWRIPLQHRVGNGIVFSSQHWDDEQALRTLRDNIEGEVLTEPRVIRFKPGQRSETWIGNCVALGLSSGFLEPIESTSIHLIQRGIVRLLQMFPASGISPADVAEYNQQTRNEIEHIRDFIILHYHVTQRRDSAFWRGCREMEIPASLQHRIDLFRQTGRVFRVPNELFAENSWVQVMLGQGLVPEQRHPVADLMDDGELARFLDGIRDRVNKTVAQLPAHQTYVQTYCPGERI

SEQ ID NO: 87927 - protein, 512 aa, Pseudoxanthomonas dokdonensis
  misc_feature (1)..(512): tr|A0A0R0CN86|A0A0R0CN86_9GAMM Tryptophan halogenase OS =Pseudoxanthomonas dokdonensis OX=344882 GN=ABB29_01510 PE=4 SV=1
MDAVRSIVIVGGGTAGWLTAAVLAARHGPAGIGVTVVESPDVATIGVGEGTWPTMRDTLHSIGVSETDFLRQCDASFKQGSLFRGWVDGQPGDQYLHPFVLPHGHTETNLVDGWLASGGDVAFADLVSFQPHLCARGKAPKQASTPEFAAVANYAYHLDAGRFATFLRQHCTDKLGVSHVADHVLAIHAADNGDIDALQLKSGGALHGDLFIDCTGMQSLLLGQHYGVALIEQKHVLFNDRALAVQVPYRDPGQEIASQTISTARQSGWIWDIGLPSRRGIGHVYSSAHCDDAAAEQALLRYLHEHGAPDDLPTPRKLSFQPGYRQRFWHRNCVAIGLSAGFIEPLEASAIALVELSAAMLADRLPADRAEMDLLARRFNDCFEYRWQRVIEFLKLHYLLSRRQDSDFWRENRRPEGIPPRLQEQLLLWRHHPPSRHDFNQVEEVFPSASYQYILYGMGFMPQTKVDASSAAVRKAQDYFREAAALAARMIPALPGNRALLEHVQQQRLPRI

SEQ ID NO: 87928 - protein, 525 aa, Colwellia sp.
  misc_feature (1)..(525): tr|A0A2N1HP22|A0A2N1HP22_9GAMM Tryptophan halogenase OS =Colwellia sp. Bg11-28 OX=2058305 GN=CXF79_01255 PE=4 S V=1
MSVISSQPKKVIILGGGSAGWMAASLIHKAWAKKGTEILLIESDVISKIGVGEGSTPSLRLFFKHLGISEQEWMPECNATYKCGISFPGWTSIDNPAYADYPAYIHPFYSQADWKTGNAFMHNARLRREGIDVPAHPDDYWLQSYLAKNFKAPIAFQQLRDEMDYGYHFDSALVGNFLKKRLLSMGLSHLIDTVDDVNLSDSGQISSIITKDNGAHSADLFIDCTGFAARLIGQALKVDFIDYSDCLFNDRAVAIQTPIDCSKDIPSNTTSTALSSGWAWQIPLSNRYGNGYVYSSKYITDDEAEKELREHIGPSSKDQDARVIKMRLGRVSQHWHKNVLAVGLSQGFIEPLEATALMLIQHTVESFISSYEDMQGAKREVIAQQGIFNNQLNEVFESIKDYIVAHYRLNSRTDSQYWCDNRENKNNSARLTALLSAWHTPGEDFEAELHRHNAELTYFAPSWYCLFAGKGHFPTSLNKPSSNTKVAPVAEIIKYCHQVSQQFYNHNEQLAKVYDERWHKLEAHR

SEQ ID NO: 87929 - protein, 537 aa, Pseudomonas sp.; identical to SEQ ID NO: 82294
  misc_feature (1)..(537): tr|A0A1K1TG12|A0A1K1TG12_9PSED Tryptophan halogenase OS =Pseudomonas sp. NFPP09 OX=1566211 GN=SAMN03159479_0017 2 PE=4 SV=1

SEQ ID NO: 87930 - protein, 495 aa, Shewanella sp.
  misc_feature (1)..(495): tr|A0A2N7DSI0|A0A2N7DSI0_9GAMM Tryptophan halogenase OS =Shewanella sp. 10N.286.48.B5 OX=1880834 GN=BCU57_06115 PE=4 SV=1
MNNNKIKHIVIVGGGTSGWMTAAMLVKLFKQQLYITLIESEDIGTIGVGEATIPPLQIFNNVLGIKEADFIKQTQATFKLGIEFENWGNQQQSYMHAFGNVGKDIGFTQFHHYWNKSKPTDINHFWDFSLNYQAAKNNKFSIMDRVQGTPLAGITHAYHFDASLYAKLLRNYSEKLSVKRIEGLITSTTLANDGSIESVSLKDGQIISADFFIDCSGFAALLIEKQLDVGYENWQHWLPCDSAYAVPCERTEALTPYTRSIAHDASWQWRIPLQHRTGNGLVYCSQYLSDEQAKALLLENLDGKPLAEPRKINFKTGRREKQWHKNCVAIGLSSGFLEPLESTSLHLVQSAIIRLSKLFPHNGVQQANVDEFNRQSKLEFEQIRDFIILHYHLNQKETHNDLWQQCRDMAIPDSLKQKIELFKATGTVSRYQDELFTEAAWIQVMLGQGIMPNDYNPLANSVSDADLHDYLGNIKQIINRAVAAMPSHQQFIDKL

SEQ ID NO: 87931 - protein, 502 aa, Cellvibrio mixtus
  misc_feature (1)..(502): tr|A0A266QD72|A0A266QD72_9GAMM Tryptophan halogenase OS =Cellvibrio mixtus OX=39650 GN=CBP51_13020 PE=4 SV=1
MTHESKKPQKILIVGGGTAGWMTANLLAARWGGIEIGLLESSDIGIIGVGEGSTPHLKFFFDEVGIEESEWMPRCNATYKNGISFVNWSSIPGFESYFHPFPAQTDDIFTVPAFLNSIHARMQGYNVNAHPDSYFLETYITQKNLGPIPTENFPFGVAYGYHFDSGLLGQYLAEKAVSRGVKRIFGTVTEVLMNESGELSSVRLDDDSQLAADFFIDCSGFKSLLLQSALKVTYKSFKENLFNNAAVVMPTAMAEIIPPETKSTALSNGWAWKIPLTNRFGNGYVYSADYITPDQAEAELRQHLGMLDSDVAARHLQMKIGRVEKHWAKNCVAVGLSQGFIEPLEATALALSFNTVSAFIKCYEKGAYTNQYEDEFNKEMNARFDGVRDYIVCHYKANQRKDTDYWKDNAANTHLSDVLKQLLHFWQAGGDFAKNMYANNLIGSYQPKSWACLLAGYGVFPPLRASENNDHYKSPHDMAQLADFIRRCGLNFKKHNELLRLT

SEQ ID NO: 87932 - protein, 515 aa, Novosphingobium sp.
  misc_feature (1)..(515): tr|A0A258HY24|A0A258HY24_9SPHN Tryptophan halogenase OS =Novosphingobium sp. 32-60-15 OX=1970410 GN=B7Y89_11440 PE=4 SV=1
MNAEIQRVIIVGGGTAGWLSACQLAAKRPELSVTLVEAPDIPTIGVGEGTWPTMRGTLASIGIDEAEFISCCDASFKQGSRFDGWVTGGADDSYLHPFTPPPPYATEALVAAWAARNTECALPYADAMTAQAAAVARNLAPRQAAMPGYAGALNYAYHLDAGKFAALLMRHATRRLGVTHIATRVTDVTKSANGNLAVLVTDDAGTIPGDLFIDCTGLAGLLIGKHCGVDWIDRSDVLFNDTALAVQVPVLPDSAIASATIATAHEAGWIWDIGLPGRRGIGCIYASRFMDENGARAVLADYIAKAVPGADIAGLSPRKISFPTGHREQFWRGNCVAVGLSAGFLEPLEASAIVMIELSLQALCANFPQSRAVLPIHAERFNALFRYRWDRIIEFLKLHYLPSQRSEPYWLAQRDPAHVPPRLAALMELWRDQPPSDWDFPQAHEIFPAESHAYVLYGMGFSPPPFAGANAGNIAEARQRLDEVAHRSRALASALPTNSALLPKACVEPVLESLP

SEQ ID NO: 87933 - protein, 538 aa, Burkholderia dabaoshanensis
  misc_feature (1)..(538): tr|A0A2N7VMZ2|A0A2N7VMZ2_9BURK Tryptophan halogenase OS =Burkholderia dabaoshanensis OX=564714 GN=C0Z18_16445 P E=4 SV=1
MSKPIKNIVIVGGGTAGWMSASYLVRALEQQANITLIESAAIPRIGVGEATIPSLQKVFFDFLGIPEREWMPHVNGAFKAAIKFVNWRKAPDGSRDDHFYHLFGNVPNCDGVPLTHYWLRKREHGFKQPMEYACYPQPDALDRNLAPCLPDGTRQMSHAWHFDAHLVADFLKRWATERGVTRVVDEVVQVHLDDRGFISSLSTKEGRTLEADLFIDCSGMRGLLINQALKEPFIDMSDYLLCDSAVASAVPNDDAHVGVEPYTSSIAMNSGWTWKIPMLGRFGSGYVFSSKFTSRDQATADFLDLWGLSDKQPLNQIKFRVGRNGRAWVNNCVAIGLSSCFLEPLESTGIYFIYAALYQLVKHFPDTSFDARLTDAFNAEIVHMFDDCRDFVQAHYFMTPREDTPFWRANRHDLRLSDAIKEKVERYKAGLPLTTTSFDDSTYYETFDYEFKNFWLNGNYYCIFAGLGMLPDRSLPLLRHRPESIDKAEAMFARIRREAERLRTSLPTNYDYLRSLRDGGAGLARNQPGPTLAAPEIL

SEQ ID NO: 87934 - protein, 496 aa, Colwellia sp.; identical to SEQ ID NO: 82639
  misc_feature (1)..(496): tr|A0A2N1HG27|A0A2N1HG27_9GAMM Tryptophan 7-halogenase OS=Colwellia sp. Bg11-28 OX=2058305 GN=CXF79_07810 PE=4 SV=1

SEQ ID NO: 87935 - protein, 505 aa, Erythrobacter longus
  misc_feature (1)..(505): tr|A0A074N2F7|A0A074N2F7_ERYLO Tryptophan halogenase OS =Erythrobacter longus OX=1044 GN=EH31_05330 PE=4 SV=1
MGEPRPLQKIVIVGGGSAGWMTAAALSDALGTACNITLVESEAIGTVGVGEATIPPIRTFNQRIGIDEATFVKETAGSYKLGIQFVDWSRKGHSYFHPFGQYGAEFDKVPFYHYWMRESLAGRMEGPIDDFSMCWAMAKAGKFAHPVPDRRKIQSTFDYAYHFDAGLYAAYLRRLSEARGVTRIEGRVTDVTQRAEDGFIQSVTLDSGEVVSGELFIDCSGFRGLLIEGTLKAGYENWQHWLPCDRAVAVPCSKGEEITPYTRSTAKEAGWQWRIPLQHRTGNGYVHCSEFISEDEATATLMGSLDGEPQADPRTLRFVTGMRRKFWDKNCVAIGLSAGFMEPLESTSLHLIQYGILRLLALLPDNAMSPLLAREYNRQTASEYERIRDFLILHYKATTRDDTELWRYCSAMEIPDSLQYKVDHFREYGLLVSDERELFANPSWIAVYLGQDITPKRAPAITQMREGVPVSERMGMVAAAMEGAVAEMPAHADFLRQFCPSPLAV

SEQ ID NO: 87936 - protein, 498 aa, Shewanella sp.
  misc_feature (1)..(498): tr|A0A2N7DMI0|A0A2N7DMI0_9GAMM Tryptophan halogenase OS =Shewanella sp. 10N.286.48.B5 OX=1880834 GN=BCU57_13815 PE=4 SV=1
MNIPNKPIKKVVIAGGGTAGWMTAAALTKLLGKNLEVVLVESDEIGTVGVGEATIPTLHIFHRLLGIKEQDVMAATNATFKLGISFENWHDVGKDYIHSFGFLGKDCWACGFQHFWLKGQQRGLVSEIGDYCTEHLAAREGRFAVLPNQDYNHAYHMDASLYAKFLRVIAEQHGIKRIEGKISAVQQHHDNGHISALTLMSGEVIEGDLFIDCTGFKALLIEQTLNAGFDDWSHWLPCDSAIAVQTKTTSKPIPYTRSIARESGWQWRIPLQSRTGNGIVFCSKYISDDEAKATLMENIEGEPLTEPRVIKFRTGSRRKTWDKNCVAIGLSSGFLEPLESTSIHLIQRGIVRLLQMFPSQGIVEEDINEFNQQTRTETENIRDFIILHYKVTDRVDTRFWRHCKSMDVPASLQHRIDMFDASGKVYKHGNELFGESSWIQVMMGQGLAPKQYHPIVDMMEDAELESFLGNIKAKVKHKVANLPDHYEFVQHYCKSKML

SEQ ID NO: 87937 - protein, 509 aa, Colwellia sp.
  misc_feature (1)..(509): tr|A0A2N1HP54|A0A2N1HP54_9GAMM Tryptophan 7-halogenase OS=Colwellia sp. Bg11-28 OX=2058305 GN=CXF79_01260 PE=4 SV=1
MSMKKIVVVGGGTAGWLAANHLGKKFKDNAEITVTLIESPDIPPIGVGEGTVPKIRQTLSSFGISETQFIRECDVTFKQSIKFVNWMDKQKHGSDNFFHHLFDAPDKFSEDLTPYWLKHGQGIQYADMLSPQHSACEYNKAPKSITTPEYEGTLGYAYHLNAAKFANLLCKNAVDKFAVEHLKANVVDVELNNDGAIAALITKELGKLEYDFYLDCTGFESLLLGKALNVPFIEKSKELLVNSALVVQVPTKEEDEIPPYTVATAHQAGWIWDIALTNRRGVGFVYSNNHMSDDEAKTKLDHYLKGNPSELTYRKLPMKVGHREKFWHKNCVSLGLAQGFLEPLEATSILLTDFAASFLADRFPESDEQMIMLEQRFNHVMGYAWDRVVDFIKLHYCISDRTDSKFWLDNKKEETIPPMLRKRLQLWQQFNPQKEDFFSKFEIFDYDNYLYLLYGMCYQTKLPPLSSHYHDKAKAKAEGIKVIAAQLSLQLPNHRVLINKIKQYGLQNI

SEQ ID NO: 87938 - protein, 546 aa, Shewanella sp.
  misc_feature (1)..(546): tr|A0A2N7DUU2|A0A2N7DUU2_9GAMM Tryptophan halogenase OS =Shewanella sp. 10N.286.48.B5 OX=1880834 GN=BCU57_18815 PE=4 SV=1
MSKSLANNPIDEQHQQQNKTIENIVIVGGGTAGWITAGTLAAKLNKQHEKNFSITLVESANVAPIGVGEGTWPTMRRTLKNMGIRETDFIRQCHVSFKQGAKFCQWVTGKQDDYYYHPLMLPEGGEHDNLAAHWFNIQFPYHQANEEWVPNQALSFSMCLSPQEAICQAGLAPKLITTAEYDAVANYAYHLDAGRFSKFLKQHCISQLNVNHIVDDVIAINNDDSGDIQCVTTAKSGDVYGELFIDCSGFKSLLLGEHYQVPFKSCKDILFVDNAIAVQVPYENEQSPIASQTISTAQTAGWIWDIGLSSRRGVGHVYSSKYISEQTAIAELKQYLAPSVSNIDELTFRKIPINPGYREQFWHRNCVAVGLSAGFLEPLEASALLLVEISANMIAQQLPANRACMDIVAKRFNQTFTYRWERNIDFLKLHYMLTQRDDSQFWIDNRHPDTIPQSLKTLLSLWKYHIPSDNDFIHATEVFPAASYQYVLYGMGFKTEASHRGLADTAQKDAALLFQKVASDTSQLSAHLMSNRELLKLINQYGLQRV

SEQ ID NO: 87939 - protein, 124 aa, Burkholderia sp.
  misc_feature (1)..(124): tr|U2FSG5|U2FSG5_9BURK Tryptophan halogenase PrnA OS=Bu rkholderia sp. AU4i OX=1335308 GN=L810_5674 PE=4 SV=1
MANDTSAPTDPKDPKDPCNCKTCAVNAAITDAVTQTNVKVVGEAPAMATGSLYQAQSHSLSVLFENAVQQQSQAAVQLPTSTNVGTMQLYTLGPASAGAAATEIGSNGVLSVLADVLALGKALA

SEQ ID NO: 87940 - protein, 324 aa, Bradyrhizobium japonicum
  misc_feature (1)..(324): tr|A0A0A3XSS1|A0A0A3XSS1_BRAJP Tryptophan halogenase OS =Bradyrhizobium japonicum OX=375 GN=MA20_29310 PE=4 SV= 1
MSPLVQPVLRQLGLWPTFLAQGFAPSHRTLTSWDQAGLTSNELLLEARGPSWRVDRRAFDGWLTAAGCRAAERVDAKVCQLAREADGWSVVCDDGNSHSARLIIDATGRARALADGQGARPKAQDRLIAAYAEATTSGPAAPELLVEAFEDGWWYTMALDQGRRAFACMTDADLARGLGLNTPDGWCAALARTQFVSALGSRIIRLEQPRLIPAGSRYAATTAGFHFLCAGDSASAFDPISGHGVVKAMRSGVFAAYAACDCLARGDAAALDRYGAWIAREAAAYATTLSEHYGSVSRWSERPFWRRRRADAPSRNPSSSLLEQ

SEQ ID NO: 87941 - protein, 60 aa, Mycobacterium ulcerans
  misc_feature (1)..(60): tr|X8FHC6|X8FHC6_MYCUL Tryptophan halogenase family pro tein OS=Mycobacterium ulcerans str. Harvey OX=1299332 G N=I551_2011 PE=4 SV=1
MRECNASFKTAVKFINWRTPGEGSPVARHWRGRPDHFYHPFGLLPSPQHIPLSHFWAAIS

SEQ ID NO: 87942 - protein, 498 aa, Cellvibrio mixtus
  misc_feature (1)..(498): tr|A0A266QAT3|A0A266QAT3_9GAMM Tryptophan halogenase OS =Cellvibrio mixtus OX=39650 GN=CBP51_08215 PE=4 SV=1
MNSIKKIVILGGGTSGWIAAAMLAAHVRRDLCSIELIESDDIGAVGVGESTIPPVVRLITSLGIDEEDFIRETQACYKLGIKFVDWRHRNQSYFHPYGAIGQRIGSQDFYQCWLKATMAGESYPLQDFSPCSVMAAQGRFFLPSQSMNTPIGGAGYAIHLDAKLVAAYLRRYAEARGVTRSEGNYVAVERRDNGFISALVLADGRKIEGDFFIDCSGFRALLIDGAMAAGFEDWSHYLPCDRAIVVKTEAAGSRMPYTTATARKAGWSWRIPLRNATGHGYVYSSRFCTDADAKTTLLSNLDAPRINDPRLISFTAGRRLEFWKNNCLALGLSGGFVEPLESTAIHLITRGMDYFLRFFPDLECDPSLRREYSRRMGADYEEVRDFILLHYCTSERSDSDFWRWCQTMPLPDSLRERIELFKAHGIVREEHDELFRSTSWQSVFEGMGIRPAKYSPRVDNIELAQITEKLALARSAILNMVKILPTHDEYLDHRFGER

SEQ ID NO: 87943 - protein, 503 aa, Sphingobium yanoikuyae
  misc_feature (1)..(503): tr|A0A430BYS5|A0A430BYS5_SPHYA Tryptophan 7-halogenase OS=Sphingobium yanoikuyae OX=13690 GN=DAH51_08465 PE=4 SV=1
MYADFPTSDRVVKRVVVAGGGTAGWVTATALIRHLGPLIDITLVESDAIGTIGVGESTVPTFRGFHQLMKIREDRFMAEAQATVKLGIEFKNWGQIGDRYIHPFGTIGLQWSWMADFHHFWLHARAQGFGGELGEYCLEWVAGEANRMSLSSSVAPSYAYHIDAARYARFLRSLAEPAGVKRVEGKIRNVELAPESGHIAALMLESGTRIEGDLFIDCTGFRSLLLGEALGVGFEDWGQWIRTDRAVAVQSTSDGPAQPYTSAIAHEAGWRWRIPLQHRDGNGFVFASDFMSDDEAHARLLAETEGEPIVDPWLVRFKTGTRTRAWHKNCVGLGLAGGFIEPLESTSIHLMMAAVTRLIEDFPFHGFDDALLDHFNRKSRLEFENIRDFIILHYHVTQRDDSPFWDHCRTMEIPDSLKERLALWQENGRAYQLGHELFRVDSWSSVLLGQGMHPRGYHRVAAMMPEPQLREELARMRKDIAGVVAEMPSHREFLRRYCPAELV

SEQ ID NO: 87944 - protein, 504 aa, Erythrobacter sp.
  misc_feature (1)..(504): tr|A0A2Z4K500|A0A2Z4K500_9SPHN Tryptophan halogenase OS =Erythrobacter sp. KY5 OX=2011159 GN=CD351_14295 PE=4 S V=1
MTIQHIVIVGGGTAGWMAAAALSRLKSGRKLDISLIESEQIGTVGVGEATIPPFVGFNDLLGIPESELLSNVQGTFKLGIQFENWGKRGDSYIHPFGAYGYTMGGISFHHVWHKFAEEGDNRPIQVFNVETMAAYFGKFMRSEDYQKQRDDLPPINYAYHLDAGKYAAFLRQYAERRGVIRHEGKVSDVSLDGETGFVTGLTLDDGRSLEGDLFIDCSGFRGLLIEQALKTGYEDWTHWLPCNRAVALPCGRDDGSPPPPFTKATAHSAGWQWQVPLQHRNGNGHVYCSDFMEDQEALDILLGNIAGKPQADPNFLRFTTGRRKKFWNKNVVALGLSAGFMEPLESTSIHLINTGVDKLLSLLSLDGVTQTQEDTFNRLTGREYARIRDFLILHYNATSRDDSGFWNYVRTMDVPETLTEKVELFKANGQIFREEDELFTETSWAAVMMGQGIAMHGHNAMADSLDPVSTRKEIDEMEQSIRFLVQHMPGHGEYLSRYCPAKAA

SEQ ID NO: 87945 - protein, 514 aa, Sphingobium yanoikuyae
  misc_feature (1)..(514): tr|A0A291N0A7|A0A291N0A7_SPHYA Tryptophan halogenase OS =Sphingobium yanoikuyae OX=13690 GN=A6768_12820 PE=4 SV =1
MASPVRNIVIVGGGTAGWLTAGVIAARHQNRMGRDLTVTLVESPNVPIVGVGEGTWPTLRTTLSRMGVSETDFFRECDASFKQGARFARWTTGAAGDSYYHPLMLPQNFGQVNLAPHWLAQEDDESFCDAVCSQGRICDDGLAPKTIATAEYDALANYAYHLDAGKFASFLQRHCCQKLGVRHVLADVETVSMKDDGDIRAVWTIQAGEIAGDLFVDCSGFKALLIERAMQVPFKDCSDTLFCDTALAMQVPYECPDSPIASHTISTAQSAGWIWDIGIQTRRGIGHVYSSNHISHDAAEQELRAYIGPAADGLTARKIAIRSGHRETFWKGNCVAVGLAAGFLEPLEASAIVLVELSAKIIAEQMPACREVMDIVAARFNATTRYRWGRIIDFLKLHYVLTQRTDSAFWRDNVRSETIPDRLKDLLLLWCYQSPGLLDEFDRVEEVFPAASYQYVLYGMGFKTQVNAHDLSYDRHLASRARRENAAMTAKLRAGLPRHRDLIDKIVAHGLQPV

SEQ ID NO: 87946 - protein, 513 aa, Caulobacter sp.; identical to SEQ ID NO: 84104
  misc_feature (1)..(513): tr|A0A0Q6UJS0|A0A0Q6UJS0_9CAUL Tryptophan halogenase OS =Caulobacter sp. Root343 OX=1736520 GN=ASC70_13510 PE=4 SV=1

SEQ ID NO: 87947 - protein, 501 aa, Pseudoalteromonas sp.
  misc_feature (1)..(501): tr|A0A3R8TLS3|A0A3R8TLS3_9GAMM Tryptophan 7-halogenase OS=Pseudoalteromonas sp. J010 OX=998465 GN=EAG18_02340 PE=4 SV=1
MKTHLPTKTIQSLTILGGGTAGWMCAAYLAKHQPTLSVTVIESPHIASIGVGEGSTPHLQHFMQSLGVKECDWMPACQASYKTGISFDNWNGDNSGYFHPFFSEMDAKTAEVYFVNANARRRGSEYIDKPEHYFLAAVLADKQQAPIPQQPLPRALEFGYHFDAQKLAQWLSAFSLARGVKHRQSTVTSVQHDSQTVIALMLESGEQIKSDFYVDASGFNALLIEKTLEVPFISFSDQLLNDSAIAIAGDKITPLPSSTAAIAMPSGWRWQIPLQGRTGHGYVYSSAHISAQQAELQLRQAAQLDTGPAKHLTMKVGMMARCVEGNVFAIGLAQSFIEPLEATALMVTGYSIELLHRLLSQQLEAQAINQQLSDLVLGIKEYVLAHYATSKRTDTQYWQDAKVAALNLHELDALLTHWRDGGDFDAWLHQHRSQSPYIRPSWYCLLGGMDHRDSCCQMPFEQAPTHIELAAKAYLTQLSDKHFIAHTKALQQLLLSDQRSA

SEQ ID NO: 87948 - protein, 125 aa, Mycobacterium ulcerans
  misc_feature (1)..(125): tr|X8FGT3|X8FGT3_MYCUL Tryptophan halogenase family pro tein OS=Mycobacterium ulcerans str. Harvey OX=1299332 G N=I551_2013 PE=4 SV=1
MTRCSSIGSTERSIPYSTRPAISCRLHFYFSPRTDTEFWRAKKEFTLTDSIKEKVAMYKAGVPVNPPIATESSYYSNFDAEFENFWTNGSYYCIFAGLGCCLITHCRRSTTSRRLSTKRMRCSSM

SEQ ID NO: 87949 - protein, 501 aa, Marinimicrobium koreense
  misc_feature (1)..(501): tr|A0A3N1P452|A0A3N1P452_9GAMM Tryptophan halogenase OS =Marinimicrobium koreense OX=306545 GN=EDC38_2114 PE=4 SV=1
MTDSIKRIVIAGGGTAGWMAAGLLSQTLGKNLDIKLVESDDIPTVGVGEATIPPLMTFHKMLDIDEREFLAEVNGTFKLGISFENWREKDHKYIHSFGYAGKDCWACSFLHFWLAGKAKGIDYPYGDYCAELLASHKNKFAVLPNGRMNYAYHMDAGRYAAFLRRRSEKLGVERVEGKIEKVNLNPDNGEIQSLTLASGKQVDGDFFIDCTGFRGLLIEQSLNAGFEDWSHWLPCDRALAVQTESVGEPIPYTRSIAHDAGWQWRIPLQNRVGNGLVYSSRYMSDEQARETLLGNLEGEPITDPKPIQFRTGTRRKHWVKNCLALGLSSGFLEPLESTSIHLIQRSLVRFVQLFPASGQMVQSDIDEFNQQTKLEVERIRDFIILHYKVTERDDTPFWRYCKNMEIPAPLRQRIDLFSDSARVFKIENELFGEESWIQVMMGQGITPKAYHPMADVMTEKELADFLKKLRQSTEQLVAKLPSHQAFIDYYCKMPMAQAANG

SEQ ID NO: 87950 - protein, 532 aa, Bradyrhizobium sp.
  misc_feature (1)..(532): tr|A0A1Q5RI44|A0A1Q5RI44_9BRAD Tryptophan halogenase OS =Bradyrhizobium sp. NAS96.2 OX=1680160 GN=AC628_20285 P E=4 SV=1
MTGESIVILGGGSAGWMTAAYLKKALSGVDIVLIESANVGTIGVGEASFSTIRLFFDYLGLDESEWMPQCNATYKLAIKFSNWTAGGGYFYHPFQRYQVVDGSNLGEWWLHLKPNETPFDTACFSTSSLCENNRSPRYLNGEVFDDKVKATFNSANKVPPNVFLSDHRLQYPYGYHFEASLLASFLRNYATALGVRCIKDDVEDVLLSTEGSIECLRTRRNGTVKGSLYVDCTGFRGLLINQALKEPFLSFQDVLLNDRAVALQVPYQADRSDIEPFTSATALQSGWAWNIPLYKRVGTGYVYCSQFISSEQAEFELRAHIGPRAKDCIANHIRMRIGRCRSSWVKNCVAIGLSSGFVEPLESTGLFFIQLGIEELLRHYSGPTTDPDVVADYNRIMADCIDGVRDFLVLHYRASDRVDTPYWQATKEISVPPSVDQRLQLWKKRLPNERSINPCYHGFEFYSYSVMLLGLNYRPVRSLPTLRHSNVSAALAAFQEVRDRTGELLRTLPSHLEYLQHLRRARNSSPAADAST

SEQ ID NO: 87951 - protein, 506 aa, Xanthomonas citri
  misc_feature (1)..(506): tr|A0A2H1SXZ8|A0A2H1SXZ8_XANCI Tryptophan halogenase OS =Xanthomonas citri pv. fuscans OX=366649 GN=prnA PE=4 S V=1
MIPAPLRNIVIVGGGTAGWMAAAAFARVLGPTFKVQLIESEQLGTVGVGEATVPHIKAFNNLLGIDEAEFVRQTQGSFKLGIEFVDWQRPGSTYMHGFGTQIGHPLGLLPFHQYWIKQHARGKAQPLGAYTLNTVAATRGKFMTSAGDVPANSPLANIAYAYHFDATQYAHFLRRYSQQRGVSRIEGLVEQVQLHPESGHVQSLQLASGQVVHGDLFIDCSGFGGLLIEQALHTGYHDFTHWLPCDRALAVPCEKVGPPTPCTRSTARAAGWQWRIPLQHRTGNGYVYCSAHISDDEAAATLLANLDGKPLADPRPLRFTTGRRKQCWNRNVVALGLASGFLEPLESTSIHLIQSGISKLLELFPREGISPVLVQRYNDRLAFEFDRIRDFLLLHYHATERDDSAFWRHCRHMPITPELQATLDLFRDSGRFYRNAEEMFAEISWVQVLVGQGILPQGYHPLVDQVPDRDAEGFLASVAQTISHCVDVMPSHQQFIDRYCKAATLP

SEQ ID NO: 87952 - protein, 514 aa, Mycobacteroides chelonae
  misc_feature (1)..(514): tr|A0A4Y6IRF1|A0A4Y6IRF1_MYCCH Tryptophan 7-halogenase OS=Mycobacteroides chelonae OX=1774 GN=FJK96_17490 PE=4 SV=1
MVVLEEVVIVGGGTAGWMTASYLKVAFGDRITVTVVESARIGAIGVGEATFSTIRHFFDYLGLEEHEWMPSCCATYKLGIRFQDWRRPGHHFYHPFERQRVVDGFGLTDWWLDNPRSDSFDRDCFLIGTLCDNDKSPRRLDGSLFMGTDGEDTAYRTTLSEQDTQFPYAYHFDASLLADFLRDFAVRRGVRHVVDDVVDVLQDDRGWISEVRTRAHGSIEGDLFIDCTGFSGLLLGRAMGEPFESYHGSLLNDRAVALRVPTDQNGGHLPPYTTATAQDAGWIWSIPLFDRIGTGYVYAEDYCSPEDAEHALRNFVGPAAEGLEANHIRMRIGRCRRSWVGNCVAIGLASGFVEPLESTGIFFIQHGIEQLVKHFPDENWEESLRDSYNRVINRCMDGVREFLVLHYYLAARVDTQYWRDTKSVQLPAALAERIEHWRSKLPDAGSVYPHYHGFEPYSYVCMFVGLGGIPARPSTVVRYLDATRAQREFDLLAQQASRLRHSLPTHREYLAQMY

SEQ ID NO: 87953 - protein, 500 aa, Asticcacaulis excentricus
  misc_feature (1)..(500): tr|E8RU44|E8RU44_ASTEC Tryptophan halogenase superfamil y protein OS=Asticcacaulis excentricus (strain ATCC 152 61 / DSM 4724 / VKM B-1370 / CB 48) OX=573065 GN=Astex_ 3382 PE=4 SV=1
MIVGGGSAGWMAAAALAKTLGDTLEIDLIESEEIGIVGVGEATIPPILKYNDFLGIDEATFVRETNATYKLGIEFVDWRAKGHSYFHPFGHSGRDIESFPFHHYWLADWRRRGGDYDYTQFNLETVAAYKGRFGHLSAEGDRPGLNYAFQFDAVLYAKFLRNYSAERGVIRHEGRIVSVEQHPESGFVKAVVTADGRRLEGDLFIDCSGFRGLLIEGTLNCGYEDWSRWLPMNSAVAVPCERVADITPYTRATAREAGWTWRIPLQHRTGNGYVFSDQFLSVEDAKTRLLGCLDDAPLADPRLLKFVTGHRKRVWDKNVVALGLASGFLEPLESTAIHLVQSGITRLLALFPRTGIVPSVVTQYNRDVLFDYNNIKDFLIAHYKISERDDTPFWRWVQAMEMPDSLKERLEMFRETALLVTREPELFRETSWLAVMMGQGLLPKTSHPIVETIEAADLRLHMSRWRKMLESRADSLPAHEDYVRRFAPSADLKMRMASAG

SEQ ID NO: 87954 - protein, 524 aa, Sphingobium amiense
  misc_feature (1)..(524): tr|A0A494W9Q3|A0A494W9Q3_9SPHN Tryptophan 7-halogenase OS=Sphingobium amiense OX=135719 GN=SAMIE_1033990 PE=4 SV=1
MTSPPFSWVNPHMATPVRNIVIVGGGTAGWLTAGVIAARHQGRRDFTVTLVESPNTPIIGVGEGTWPTLRTTLSRMGVSETDFFRECDAAFKQGARFARWTTGAPHDGYYHPLVLPQAFGQVNLAPHWLAEDGDESFCDRVCPQGRICDDGLAPKTIATAEYDALANYAYHLDAGKFAPFLQRHCCEKLGVRHILADVEDVLMRANGDIRAIRTQQAGEIEGDLFVDCTGFRALLIEKAMGVPFRDCNDILFCDTALAMQVPYDAPNSPIASHTISTAQSAGWIWDIGVQSRRGTGHVYSSSHISDEEAERELRAYIGPAAEGLTARKIKIRSGHREIFWKRNCVAVGLAAGFLEPLEASAIVLIELSARIISEQMPAVREVMDIVSARFNATTHYRWGRIIDFLKLHYVLTQRTDSDFWRDNVREETIPERLRELLLLWRYQPPGFHDEFDRVEEVFPAASYQYVLYGMGFKTEVDRGALARDASAAGRAVRENVALTAKLRAGLPRHRDLINKIVAHGLQPV

SEQ ID NO: 87955 - protein, 561 aa, Ruegeria sp.
  misc_feature (1)..(561): tr|A0A0C1GJV1|A0A0C1GJV1_9RHOB Tryptophan halogenase OS =Ruegeria sp. ANG-R OX=1577903 GN=RA27_03265 PE=4 SV=1
MSNRLRKITIVGGGTAGWMTALILDMVFSRTSATKDRPQICLIESPNIATVGVGEATVPRMPVTIRQAGISERDFFRETNASFKLGVKFCNWNKDAKGNRIDYVNPFAHGQMLQGLDAAEYFLRFGNGDRDFTQSISPHDHLGRLCKGARQLGQPEFEQRFGYAYHLDAVKFAGMLTKVCTKRGVEHIQDEVQSVELDEQGNVSHLMLERKGRHDIEMVVDCTGFRGLIINQALGEPFMDYSDYLPNDRAMALQIEHPNPDKIESLTRSTALGAGWTWRVPLYNRVGTGYVFSSAHRTDDQAADEYLEWLGDSGKGATPRIIPMRVGRVRNAWVKNCVAIGLSGGFIEPLESTAIHMIDHAVRWFAEHLPTRDIEPPLRARYNRQMDKLYNEVLEFICLHYRLGNRTDDQYWIDARTEMKLPDRLAENLELWQHRLPLNHDTEFTTLFDHRVYQTVLLGKQVYDTGYGTGIRDRLRPLKKPIWFQGMKTAKADLARIIKSMPDHKTLLRDIRGELEQPAFGMAAAMKPTVALPGGAPAPVAVQNMPNLAEIQSGEKDLQLF

SEQ ID NO: 87956 - protein, 506 aa, Altererythrobacter ishigakiensis
  misc_feature (1)..(506): tr|A0A562UT47|A0A562UT47_9SPHN Tryptophan halogenase OS =Altererythrobacter ishigakiensis OX=476157 GN=JN10_038 7 PE=4 SV=1
MNYGNPIKRIVIVGGGTAGWMAAAVLSRLKKGRDLDIVLVESEAIGTVGVGEATIPPFVEFNQMLEIDEREMLAEAQGSFKLGIQFENWGEVGDSYIHPFGAYGYHMGGIAFHQVWRRMREAGEKRPIQAFNLETMAAYFGKFARTQDYAQDDLPPVNYAYHLDAGRYAAFLRKYAEKRGVIRKEGRIGDYTLDRESGFVMSVVLESGESISGDLFVDCSGFRGLLIEQALETGYEDWTHWLPCNRAVALPCNRDDGSPPPPFTKATAHSAGWQWQVPLQHRNGNGHVYCDAYMSADEAHDILVSNIAGKPTAEPNHLRFITGRRKKFWNKNVVALGLSAGFMEPLESTSIHLINTGVNKLVALLSLEGINPAQVDAFNRLTAKEYARIRDFLILHYNATERTDSEFWNYCRTMSVPDTLTEKVELFKTNGQIFREEDELFTETSWAAVMMGQRIVMGGHNPVADTFDLPATKSEMDEMEKSIRFVVQHMPGHEDYLKRYCPAPTI

SEQ ID NO: 87957 - protein, 501 aa, Mycobacterium sp.
  misc_feature (1)..(501): tr|A0A433AGJ9|A0A433AGJ9_9MYCO Uncharacterized protein OS=Mycobacterium sp. OX=1785 GN=EKK34_26500 PE=4 SV=1
MIKSVLVVGGGTAGLLTALAVKKEIPEMQIRVVRSKAMGVIGVGESTTPQFPKLLFDYLKLPQKLFYSTVRPTWKTGIHFLWGPRQSFDYAFQFQLDAFYSDLKRYNGFYCADEFDSVNTNAALMAQGKAFEKHPSGQGPLITGDAAMHLFNPALVAALETACGARGIDIIDARITGVPVDERGVQSIVLDDGRAFTADLYVDATGFRSELLGRALGTPFVAYDRSLFCDRAIVGSWDRTDEFIYPYTVAETMEAGWCWQIDHEHAINRGYVYSSQFLSDDQARDEFLGKNPKATTWDHVVKFRSGRYEKGWAKNVFAIGNACGFVEPLEATALMVASSQIKAMVEMLVQSKLDPTPSIKALYNTLFVDWWDGIKDFLSIHYRFNTRIENEFWTACGNEVDVTPVQPLLDFYRENGPTGFCRHYLTSTIGQDNQFGLEGFLVMLVGQKVPYCDAHPPSEAELATFNRHRAENRARARSGLSVAEALQYVHRPDWRWNSDLQ

SEQ ID NO: 87958 - protein, 127 aa, Bacillus sp.
  misc_feature (1)..(127): tr|A0A1V2SIP3|A0A1V2SIP3_9BACI Tryptophan halogenase (F ragment) OS=Bacillus sp. VT-16-64 OX=1917019 GN=BLX87_0 5905 PE=4 SV=1
GVRHLKGLLTDVALAEDGSIAHVATREHGALEADLYIDCSGFRAELIGKALGAPFKSVRDQLFTDRALACKIGYDRADAPIESFTIATAHPAGWTWDIALEVARGIGCVYSSAHMTDDRAAEMLQRY

SEQ ID NO: 87959 - protein, 559 aa, Rhodospirillaceae bacterium
  misc_feature (1)..(559): tr|A0A2E4NJG0|A0A2E4NJG0_9PROT Tryptophan halogenase OS =Rhodospirillaceae bacterium OX=1898112 GN=CMM76_16085 PE=4 SV=1
MAEPISKVSIIGGGTAGWMAAVHLVTRLNSRAEKPVEVCLIESPDIPTVGVGEATVPTMKRWFQELELDESAFIERCNASFKLGVRFANWDHDINGNPLNYVHPFDGLGDDIAGYNPAYYFHKFNDPGGAGNYSIYHSPITAIVEGRKGPKPLDAENFEGVLNYAYHLDAGLFAKYLREIGIERGVTHILDSVNDVELDHDGFVSAVQLQDNGRHEVELVIDCTGFRSMILQQTLGVEFEPYDKYLLNDRALAVQLPHLEPTRLDPCTRSTALGAGWSWRVPLYSRIGTGYVFSSAHRTDDEATQEFLRHLGPVAKGAEPRAIPIRVGRAKQSWAKNCISVGLSGGFIEPLESTAIYIVDKALGWIVDFFPDKDFSPVLSNRYNKLSESLYTEIRDFIVMHYCTGTRNDSDYWKAAREDIIVPDSLQAKLDLYKHALPTEDELDSGFLFSGLSYLIVLFGKGYFKDVTFAADRAISAEDWERYQNVLHGVTAELITNLPDHHQLLTQIRSRNAPKDENQALRDAINQTVANQPVITLPGQLMAPDISFAGQPDNGGNIL

SEQ ID NO: 87960 - protein, 491 aa, Asticcacaulis excentricus
  misc_feature (1)..(491): tr|E8RRR9|E8RRR9_ASTEC Tryptophan halogenase OS=Asticca caulis excentricus (strain ATCC 15261 / DSM 4724 / VKM B-1370 / CB 48) OX=573065 GN=Astex_0704 PE=4 SV=1
MQPVKKVVIAGGGTAGWCAAAALSKLLGTLIDITLIESEEIGIVGVGEATIPTARTFHHFLGIDERAFLKATNATYKLGIAFENWARDGDRYIHSFGEIGKSNWMAPFHHVWMAARDKGFGGDLGDYCFELRAAEEGKFFTSDTARINYAYHFDAVLYGRFLRQLSESCGAKRIEGRIRQVRQDADTGFITALELESGEVIDGDLFIDCTGFKGLLIEETLKTGFEDWSHWLPTDRALAVQTAPSGRLDPYTRAIAHGEGWRWRIPLQNRVGNGLVYASGHLTDEAARERLLSLVDGEPLTEPRLIRYRTGRRRKIWNKNCLTVGLSSGFIEPLESTSIHLFQIAVTRLIQMFPFGGITEAVSDHYNEIARREIEKVRDFVILHYKLTQRDDTGFWRERREMSVPDSLTERLEMFREHGHAWQAADDLFRVDSWVQVLLGQRLEPQSHHAIGQLMSEAQLRQALDGLKTNIARTVEAMPTHEAFLKSYLAA

SEQ ID NO: 87961 - protein, 502 aa, Asticcacaulis excentricus
  misc_feature (1)..(502): tr|E8RTX0|E8RTX0_ASTEC Tryptophan halogenase OS=Asticca caulis excentricus (strain ATCC 15261 / DSM 4724 / VKM B-1370 / CB 48) OX=573065 GN=Astex_3307 PE=4 SV=1
MTSYLKEIVILGGGSAGWMTAAALSSLVDPQKVSVVLVESDQIGTIGVGEATIPDIINFNRMLGISEDAFMKATHATFKLGIEFVDWGRKGQAYIHPFGTHGVDMNGFDFHQYWLRARQGGNTHPIDHYSMSAVAARQARFDLPPAGENSPRAHIRYAYHFDATLYARFLRNYAEQRGVRRVEGKVERVVQNPGSGDIEALALDNGQTLTGELFFDCTGFSALLLGKTLGVGYHDWSHWLPCDAAQAVACTHAGPLLPYTRSTARPSGWQWRIPTQSRTGNGHIYSRAFMDDGDATEILLANLDGEVISTPRQIRFTAGHRHTFWKNNCIAIGLSAGFLEPLESTSIYLIQEGISRFIALFPDASLPVVVRDEYNRHMRTEFEQVRDFIILHYKATERDDTPFWDYCRNMTIPDSLTHKIELFRTAGRTFRYEDELFARTSWVAVFLGQGIVPHTCDPVVAHVPYDTVIGSLESMRAAMAAEAGRMPTHAAFLQSYCPAVRA

SEQ ID NO: 87962 - protein, 498 aa, Sphingopyxis sp.
  misc_feature (1)..(498): tr|A0A1G3KMP7|A0A1G3KMP7_9SPHN Tryptophan halogenase OS =Sphingopyxis sp. RIFCSPHIGHO2_12_FULL_65_19 OX=1802172 GN=A3E77_03150 PE=4 SV=1
MSDKKPVRVVIAGGGTAGWMMAAAIARTMGPTVDLTLVESEAIGTIGVGESTIPPLVNFNRILGIPEPDFMRATQATFKLGILFDNWKHDGDSYFHSFGLSGKDHWSAGFQHFWLNARERGHEQPYADYCLELVAGMQGKFAHLPEDRMNYAYHVDATLYGRYLRKLAEADGCTRVEGKIAHVELDGTSGDIAALHLDGERRIEGDMFVDCTGFRGLLIDGALHAGFEDWSHWLPNDSAIAVQSKHLGPPMPYTQAIAHDAGWQWRIPLQHRMGAGIVYTSGYLSRDEAYDRLMSSVGEPLIEPFDIKFKGGVRRKQWYRNCVAVGLAGGFVEPLEATTVHLIQRAVLRFIRLMPNGRVSERDAMEFNDQQRLDIEQIRDFVVLHYKATNRRDSPFWRHVAAMPIPDSLQQKIELFRETGRVFRKYEELFAENSWVQVMMGQGIEPQSYHPIADKLRDDEVERLFQSIRDNIAQTVATLPEHHAYVARYCGAEAPKAA

SEQ ID NO: 87963 - protein, 511 aa, Thiotrichales bacterium
  misc_feature (1)..(511): tr|A0A2E2BCJ7|A0A2E2BCJ7_9GAMM Tryptophan halogenase OS =Thiotrichales bacterium OX=2026796 GN=CMO23_06185 PE=4 SV=1
  misc_feature (40)..(40): Xaa can be any naturally occurring amino acid
  misc_feature (114)..(114): Xaa can be any naturally occurring amino acid
  misc_feature (208)..(208): Xaa can be any naturally occurring amino acid
  misc_feature (216)..(216): Xaa can be any naturally occurring amino acid
  misc_feature (230)..(230): Xaa can be any naturally occurring amino acid
  misc_feature (247)..(247): Xaa can be any naturally occurring amino acid
  misc_feature (257)..(257): Xaa can be any naturally occurring amino acid
  misc_feature (264)..(264): Xaa can be any naturally occurring amino acid
  misc_feature (273)..(273): Xaa can be any naturally occurring amino acid
  misc_feature (285)..(285): Xaa can be any naturally occurring amino acid
  misc_feature (300)..(300): Xaa can be any naturally occurring amino acid
MKPMTSQPKNIPKNILIVGGGTSGWMVAATLARQWKDKDXSLKLIESESIGTIGVGEGSTPKMRRFFDSLNIDEREWMPKCNATYKCGIRFPSWATREGFKSYYHPFFSQKDDXSIRAFHQNATLRSKNFNVYAHPDSFFVSNFLASEKLAPTPDKKTDYHTDYAYHFDASLLGEFLRNFSVQNGVTHVSDTVSEVLRSENGDISGVXTDQHGTIXADFFIDCTGFSGLXINKTLGVEFLPYKKFLXNDSAVALPSXINLDKGXPAQTVSKAXKNGWMWNIPLTXRFGNGYVYSSDFTDXNSAEEELRKQLGLMDGAVEARHLKMRVGRSAVCWERNCIAIGLSQGFIEPLEATALMIVQDTAETFANKLESSGNTDKSRAEVNTKVNSIFDGVRNYVQMHYKLNTRSDTEYWLENRKNVHISDDMEKILRVWDKGGDLLSELRNQASRLVYSPTSWYCILAGMGRFRNKPKRPKANVQYYSKKQAEEHSRSFIQQFPSHLVAIQEHSKTP

SEQ ID NO: 87964 - protein, 484 aa, Ruegeria sp.
  misc_feature (1)..(484): tr|A0A0C1JED3|A0A0C1JED3_9RHOB Tryptophan halogenase OS =Ruegeria sp. ANG-R OX=1577903 GN=RA27_00050 PE=4 SV=1
MPTDIETEICVIGAGPSGASTALRLAQLGRRVCLVERAAFPRQHVGESLPSSVWPILEVLGVAERVLQAGFLRAAGSILNWGGAFERRGADGNQPGLLVDRGQFDALLLKAALSAGVQVVQPARAYRPVRVESGWKIPVRSDMGTHQIRTQVLVDAAGRQAGLGRRFRPTSKPLLALYAYWQSPPGFGALTRVEAGSSHWYWGGSLPGGIVNAMVFVDPSVCTGLAPAARRDLYLNLLTQSTLLSPCLEQRRIGPVRHSDATSRSETTPPAFDFLRVGEAAFSVDALSSQGVQLAMAQAVQAAVVVNTLLMKPEYSDLALSFYADRQSERVQTHSALAADFYAQQQAVCPAPFWAERAEPVAWLPDLPRDHNPEELDGDQLLRLAPKARLAVSGVQTATLIEPRAVLMHPNLPRPVAVLDDVPLAPLLQRLGGWATADHITQQWSDTLDARRVARVLRWLWYHRVLVPVDEDDVIPVSSASRMA

SEQ ID NO: 87965 - protein, 510 aa, Asticcacaulis excentricus
  misc_feature (1)..(510): tr|E8RTW9|E8RTW9_ASTEC Tryptophan halogenase OS=Asticca caulis excentricus (strain ATCC 15261 / DSM 4724 / VKM B-1370 / CB 48) OX=573065 GN=Astex_3306 PE=4 SV=1
MPNPEETKQDLRIRKIVIVGGGTAGWMAAAGMSKLMPSREVAIRVIESDAIGTVGVGEATIPHIHYFNRLLGLDENEFIRKTNATFKLGIEFVNWGGLGQSYIHPFGAYGANMDGIHFHHFWLRYAKMGKAPSLDAYNLMVCAAKAHRFQRPDPTRLNAALNGISYAFHFDASLYARLMRELAEKRGVIRTEGRITRVVQDSHSGHIDSVVLESGETVEGDLFIDCSGFRGLLIAQTLEAGYDDWSHWLPCDRAVARACAKVADPIPYTRSTAKTAGWQWRIPLQSRTGNGHVYSSGYISDEAALESLNSDLDGAPLSEPNFLRFTAGVRRAPWTKNVVSIGLASGFLEPLESTSIHLIQTAIARLMANFPDKSFNQPDIDYYNARTRLEFEQVRDFIILHYKATERDDTPFWAYCRHMEIPDALRERLAIYQENARQYRHDNELFSEVSWLAVMHGQNVRPKRYHPIADMIPEEELIRRMTQLEDEVTRALALMPDHQAFIDRHCRAAV

SEQ ID NO: 87966 - protein, 538 aa, Pseudomonas sp.
  misc_feature (1)..(538): tr|U7A754|U7A754_9PSED Tryptophan halogenase OS=Pseudom onas sp. CMAA1215 OX=1387231 GN=P308_19170 PE=4 SV=1
MNKPIKNIVIVGGGTAGWMAASYLVRALQQQVDITLIESAAIPRIGVGEATIPSLQKVFFDFLGIPEREWMPQVNGAFKAAIKFVNWRKSPDPSRDDHFYHLFGNVPNCDGVPLTHYWLRKREQGFQQPMEYACYPQPGALDGKLAPCLPDGTRQMSHAWHFDAHLVADFLKRWAVERGVNRVVDEVVEVQLNDRGYISTLLTKGGRKLEADLFIDCSGMRGLLINQTLKEPFIDMSDYLLCDSAVASAVPNDDARDGVEPYTSAIAMNSGWTWKIPMLGRFGSGYVFSSKFTSRDQATADFLKLWDLSDNQSLNQIKFRVGRNKRAWVNNCVSIGLSSCFLEPLESTGIYFIYASLYQLVKHFPDTSFDSRLRDAFNAEIVYMFDDCRDFVQAHYFTTSREDTPFWLANRHELRLSDAIQEKVQRYKAGLPLTTTSFDDSTYYETFDYEFKNFWLNGNYYCIFAGLGMLPDRSLPLLQHRPESIEKAEAMFASIRREAERLRSSLPTNYDYLRSLRDGDAQVSGNQRGPTLATREGR

SEQ ID NO: 87967 - protein, 519 aa, Unknown
  misc_feature (1)..(519): tr|B8KI96|B8KI96_9GAMM Tryptophan halogenase OS=gamma p roteobacterium NOR5-3 OX=566466 GN=NOR53_1882 PE=4 SV=1
MAKAIQTVVIVGGGSAGWLTAGLLAAELRRAGSPNRVRLVESPDVSPIGVGEGTWPTMRSSLIRMGISETEFLKSCDASFKQGTHFVGWLQGGSESYYHPFTPPRGFSDINLARHWQAVRKQVPFCDAVSPQAQVCKQALGPKQIVTPEYASNLNYGYHLDAGKFAVLLQQHCVNRLGVEHLLENVDSIENDETGDICALHTTTGRVVTGDLFVDCTGMRSLLLSEHYGIDFKDMSHLLFNDSALAVQVPRTDESEPVASATVSTAKEAGWIWDIALPTRRGTGYTYSSRYTSDERAEQVLRDYLAETSGLEFSQSCAPRKISFRPGYRERFWHRNCVAIGLSAGFVEPLEASALVMIELSAKMLAELMPPDREVMNIVADRFNVRFGAHWERIMEFLKLHYVLSEREDSPYWRDHRDPESIPARLRDSLVLWGYHCPWHGDQAQVDELFSTASYQYVLYGMNFHSEGAAGIAQADPAAHKRAQNLFAENARETQKMLAALPPNRELIDKINRYGLSRV

SEQ ID NO: 87968 - protein, 538 aa, Burkholderia sp.
  misc_feature (1)..(538): tr|A0A228HDY1|A0A228HDY1_9BURK Tryptophan halogenase OS =Burkholderia sp. AU16741 OX=2015347 GN=CFB89_29560 PE= 4 SV=1
MTHPIKNIVIVGGGTAGWMSASYLVRALQQHANITLVESAAIPRIGVGEATIPSLQKVFFDFLGIPEREWMPQVNGAFKSAIRFVNWRKAPDGSRGDHFYHLFGNVPNCDGVPLTHYWLRKREQGFQQPMEYACYPQTEALDARLAPCLPDGTRQMSHAWHFDAHLVADFLKRWATERGVKRVVDEVEQVHLNDRGYIASLSTKEGRMLEADLFIDCSGMRGLLINQALKEPFIDMSDHLLCDSAVASAVPADDAREGIEPYTSAIAMNAGWTWKIPMLGRFGSGYVFSSKFTSRDQATADFLDLWGLSDKQPLNQIKFRVGRNRRAWVNNCVAIGLSSCFLEPLESTGIYFIYAALYQLVKHFPDTSFDPRLADAFNAEIVYMFDDCRDFVQAHYFTTSRDDTAFWRANRHDLRLSDAIQEKVERYKAGLPLTTTSFDDSTYYDTFDYEFKNFWLNGNYYCIFAGLGLLPDRSLPLLRHRPESIDKAEAMFARIRRDAEHLRASLPTNYDYLRSLREGDAAQSRSRPGPTLATPEIL

SEQ ID NO: 87969 - protein, 499 aa, Asticcacaulis excentricus
  misc_feature (1)..(499): tr|E8RL37|E8RL37_ASTEC Tryptophan halogenase superfamil y protein OS=Asticcacaulis excentricus (strain ATCC 152 61 / DSM 4724 / VKM B-1370 / CB 48) OX=573065 GN=Astex_ 1988 PE=4 SV=1
MVDTVQRIVIAGGGTAGWMTAAALSQIMGEQLSLTLIESEEIGSVGVGEATIPMIAHFNALLRLDENDFLRETKGTIKLGIAFEGWRHEGHSYMHAFGTLGRDLGSVPFHHYWLQAHLEGQDDDLWAYSLNERAAYANRFAPLNQIPNTPLPGIPYAYHFDASLYALYLRRLAEAKGARRIEGRIRDIALHAETGHVTRLSLEDGQQVEGDLFIDCSGFRGLLIEGALKTGFESWKHLLPCDRAYAVPCESVSPLTPYTRSIAREAGWQWRIPLQHRTGNGYVFCSDHISEDEAATRLLSRLDGQALADPRLIRFETGRRRLQWNGNVIALGLSSGFIEPLESTSIHLIQSGIARLITLFPHRGFDPAVVGEYNRQSALEFELIRDFIVLHYHANERHGEAFWDQVRHMPIPEALAHKMALFRACGLIQPNPNDLFQLPAWLQVMVGQNVCPAAAHPFVAAVPNAARQDYLANLRTIIGRTADGLPTHDAYIAQHCCAV

SEQ ID NO: 87970 - protein, 496 aa, Sphingopyxis sp.
  misc_feature (1)..(496): tr|A0A1G3KX44|A0A1G3KX44_9SPHN Tryptophan halogenase OS =Sphingopyxis sp. RIFCSPHIGHO2_12_FULL_65_19 OX=1802172 GN=A3E77_06360 PE=4 SV=1
MSARQRPVRRIVIVGGGSAGWMAAAALGRALAGQSHTLTLVESEAIGTVGVGEATVPPIHEFNRYLGLDQAEFLRATHGTIKLGIQFDGWGGVGHRYFHPFGFFGVEMSGIHFHHYWLRHLAAGGDADGGPYNLETMAARAGRFAPMTRHGPVHHAVHFDAAAYAQYLRGYAEAKGVVRVEGRVADVRLDPEDGFITSIAMADGRVIEGDLFVDCSGFRGLLIEGALATGYAEWSHWLPCDSAVAMPCENDGDPAPYTCSTAREAGWQWRIPLQHRDGNGYVYSSAHLDHDEAERLLRSRLPGAALADANRLRFNAGHRKAIWNRNCVAVGLAGGFLEPLESTSIHLIQTTIIRLLALLPRDAIDPHVVARFNRDALHEYETIRDFVIAHYALSNRDDTSFWRDIAAAGLPDSLAERIEAFRATGNILFEPGDLFGPTNWYAVLTGQGVRPQSWHPIADGLANEELAARLATLRSRVSEQLAELPTHGEFLRRLGR

SEQ ID NO: 87971 - protein, 559 aa, Rhodospirillaceae bacterium
  misc_feature (1)..(559): tr|A0A2E7RF65|A0A2E7RF65_9PROT Tryptophan halogenase OS =Rhodospirillaceae bacterium OX=1898112 GN=CMM28_12905 PE=4 SV=1
MAEPISKVSIIGGGTAGWMAAVHLVTRLNSRAEKPVEVCLIESPEIPTVGVGEATVPTMKRWFQELELDESAFIERCNASFKLGVRFANWDHDINGNPLNYVHPFDGLGDDIAGYNPAYYFHKFNDPGGAGNYSIYHSPITAIVEGRKGPKPLDAENFEGVLNYAYHLDAGLFAKYLREIGIERGVTHILDSVNDVELDQDGFVSAVQLQDSGRHEVELVIDCTGFRSMILQQTLGVEFEPYDKYLLNDRALAVQLPHLEPTRLDPCTRSTALGAGWSWRVPLYSRIGTGYVFSSAHRTDDEATQEFLEHLGPMAKGAEPRAIPIRVGRAKQSWAKNCISVGLSGGFIEPLESTAIYIVDKALGWIVDFFPDKDFSPVLSNRYNKLSESLYTEIRDFIVMHYCTGTRNDSDYWKAAREDIIVPDSLQAKLDLYKHALPTEDELDSGFLFSGLSYLIVLFGKGYFKDVTFAADRAISAEDWERYQNVLHGVTAELITNLPDHHQLLTQIRSRHAPKDENQALRDAINKTVANQPVITLPGQLMAPDISFAGQPDNGGNIL

SEQ ID NO: 87972 - protein, 521 aa, Croceicoccus sp.
  misc_feature (1)..(521): tr|A0A2D6EEA0|A0A2D6EEA0_9SPHN Tryptophan halogenase OS =Croceicoccus sp. OX=1927144 GN=CL820_00580 PE=4 SV=1
MTARKDIVTINAVDRVVIVGGGTAGWMTAAAMSRFFDNGRRKITLVESDAIGTVGVGEATIPPIRNFNGMLDIPENEFLRATHGTFKLGIEFVDWGRKGDRYIHPFGNFGRDLHGIPFHQLWLRENARGGGADISDYSMSSVAALMGRFGRPSPDARSPVSEMFYAFHFDASLYAAYLRQLAERQGTIRREGRIVKAHRDGESGYITSVELEGGIHIEGDLFIDCSGFRGLLIEDALETGYEDWSHWLPVDRALAMPTSNIASPAPFTRATAHGAGWQWRIPLQHRTGNGHVFCGAFMEDDEAERILRRHVEGEPIAEPRLIRFQTGMRRKAWNHNVVSLGLASGFIEPLESTSIHLIQNGIARLFSLFPEKEISPLERDEYNRGMREIYCDIRDFIILHYKATQRDDTEFWRYVRDMEVPESLARKMELWRLHGRVFRENAELFTVPSWVAVMLGQNMWPERYDPIADTLDEQRVAQAMEQMREAYRQTAQQLPTQEQFLRQAGAWAADHAPMATAGAMR

SEQ ID NO: 87973 - protein, 524 aa, Alteromonas aestuariivivens
  misc_feature (1)..(524): tr|A0A3D8M9Z1|A0A3D8M9Z1_9ALTE Tryptophan 7-halogenase OS=Alteromonas aestuariivivens OX=1938339 GN=DXV75_0735 0 PE=4 SV=1
MSVTAAQSVRSIVILGGGAAGWLTAGILAAEHNLPDNPNLTITVVESPDISILGVGEGTWPTMRDTLRKLGLNEKTFLKRCDASFKQGTCFNGWVNGQPGDRYYHPFSLPAGFFDTDLFAWWQLHRPAQPFAALFSTQTQLCEQHKAPKQPQTPDFAAVANYGYHLDANKFAEMLREHCLTQLGVGHILDHCDEVLTDNEGYITALSGRQQGQIAADLFVDCSGFAARLIGQHYGEILTPVGHTLMNDTAVAVQAPYKDEHTPIASATHSTADEAGWIWDIGLQHRKGVGYVFSSAFCSEQEAKQRLLNYLANDSSTSRVSEEQIRTIQFTPGYRKHLWVKNCVAIGTSAGFIEPLEASALVMIELSATMLARQLPLTQPAMHGAARHFNTVFSQRWQRIVDFLKLHYVLSQRRDTPYWRAMTDQAACSEQLADWLQQWATRSPSLSDFMFSEEIFPHASYLYILCGMGFPSDIDPMRYTPYKMADVSKIIEKNQQLTRQHLQGLPANRELLQSTFGLIVNHAS

SEQ ID NO: 87974 - protein, 496 aa, Alteromonas aestuariivivens
  misc_feature (1)..(496): tr|A0A3D8M7Q2|A0A3D8M7Q2_9ALTE Tryptophan 7-halogenase OS=Alteromonas aestuariivivens OX=1938339 GN=DXV75_0985 5 PE=4 SV=1
MTKENPSTNSRIVIAGGGTAGWIAAAALAKKMGPLLDITLVESAEIGTVGVGEATIPPLRVFHKLLRIDEQAFMQATSATFKLGIQFENWGQVGDSYIHSFGQTGQQSWLAEFVHFWLEARKRGLAGNYGDYCLELEAALQGKFATSPQSDINYAYHLDAGDYARFLANFCQALGVKRIEGKIEQVEQHENDFISALVLTDGTRIEGDLFIDCTGFRGLLIEQTLHTGYEDWSHWLPCDSAVAIQTESVAPAQPFTRSIAHHAGWQWQIPLQHRVGNGLVYSRQHMSDDEAREYLLSHVEGTPITEPRVIHYRTGRRLKAWNKNCVALGLASGFVEPLESTSIHLIIMGITRLMQLFPFNGWDSALIDEYNQQTIEELERIRDFIVLHYHVTERNDSPFWDYCRRMEIPETLLHRINLFATQGHAFQKHNELFRVDSWTQVMLGQRLLPKHHHPAPALMTDQQLSQALSQHREQILQLVNRLPDHQTFINQYCKRS

SEQ ID NO: 87975 - protein, 497 aa, Asticcacaulis excentricus
  misc_feature (1)..(497): tr|E8RU45|E8RU45_ASTEC Tryptophan halogenase OS=Asticca caulis excentricus (strain ATCC 15261 / DSM 4724 / VKM B-1370 / CB 48) OX=573065 GN=Astex_3383 PE=4 SV=1
MTDTPVRPVRKVVIVGRDEALWLTAAVLQRTFARSDLSFTAVELPSLLRPGEVLPTLGSQAGFHARLGLDEAVLMRALGATFTLGQQYVGWAKTAPPVFVGYSSTGVALQNVPFHHLWLRARASGMNVAFEDFAINAACAKQGRLLTPDADLSGFAEANSGFHLPAAPYAEMLRQVALKRGVRHLPTAHISPVVKGSQMTAVVLSDGQTVEGDLFIDTTGSDARLLSQMPDSGFTSWRHWLPFDRLLTTYAAPATPLPAFAQITAFRSGWAGLFPLRDYTAVQQVYTRDDLSDEEAFENAAMVVKMSLHPEATVTPFEAGRRPAWSGNVIGLGEAAAVLDPLGSARMPALLLGLSHLTALFPLDTSGLESAVYNRTVGQAYERLRDAQIWLYSLNKRRDQPVWDHLRSVSLPPELAYKREVFAACGHLPVYDDETFDEAWWTAAGLGHGLLPAAHDVRADQLAEPELIRHFQTVLGYVRKQVEAMPTPDSVLRARTA

SEQ ID NO: 87976 - protein, 501 aa, Alteromonas sp.
  misc_feature (1)..(501): tr|A0A3A9UKB8|A0A3A9UKB8_9ALTE Tryptophan 7-halogenase OS=Alteromonas sp. BL110 OX=1714845 GN=D7031_04710 PE=4 SV=1
MTVSGLDSSNNQTPVKNVVIAGGGTAGWMAATALSRLLGKSIKVTLVESKDIGIVGVGEATIPPIRTFHKLLGIDEKAFMRATQATFKLGIEFENWREQGHSYIHSFGITGRECWAGEFHHFWLRAKEYGFGGEFGDYCPELIAAKQNKFATSEAMPLNFAYHFDAVAYGRFLKSLACEAGVTHKIGDIEKVDVFPQSGNIQSLQLASGEVVDGDFFIDCTGFKGLLIEQALHTGYDDWQHYLFCDRAVAMQTELTAPPVPYTKSVAHQAGWRWQIPLQERMGNGLVFCSRFMSDGEAIDTLKSQVPGAPINEPRVIRFTPGKRRRGWNKNCVALGLSSGFIEPLESTSIHLIMTGLIRLMRLFPFDGITQSAIDEYNNKFDSEMSAILDFIVMHYKVTQREDSPFWQQCQRMDVPPSLTHKLALFAESGRVFLDDGDIFRVDSWTQVLMGQGMTPKQYHRVADEMSEQSLKQFMAGLKQQVDNHVAKLPAHEAFLTQYLK

SEQ ID NO: 87977 - protein, 501 aa, Croceicoccus sp.
  misc_feature (1)..(501): tr|A0A2D6EBP6|A0A2D6EBP6_9SPHN Tryptophan halogenase OS =Croceicoccus sp. OX=1927144 GN=CL820_16795 PE=4 SV=1
MDDTQQPTILIAGGGTAGWMAAAALSRFAAGHRIVLVESDAIGTVGVGEATIPQIHLFNSAIGLDEAEFLRETRGSFKLGIEFDGWLRDGHSYMHAFGQIGRGIGLLPFQHYWLRARQLGFAKPLQRYSLNELAARTMRMQRGRTSAGAEMPYAYHFDAGLYAALLRRHAEARGVERHEGTMASVDRDGGSGDIASITLDDGRVLAADFFIDCTGFRGLLIEGALETGFDDWSNYLPCDRAMAVPCEGGGDFTPYTKSIARKAGWQWRIPLQHRIGNGLVYSSAHLPDDEAAEMLLANLDGATQADPRPIRFTTGKRRKHWNRNCLALGLAAGFMEPLESTSIHLIQSAISRFLALLPDGRPSEAAISHFNAQADFEWTRIRDFLILHYTANERHGEPFWDAVRTMPLPSTLTDKIALWRDTGFIHREHEELFTEVAWFQVFAGQGVEAQGHNPIADTLDEAQLRDLMQGTEAALVEQVRAMPRHIDFLQDFINGRAKEPA

SEQ ID NO: 87978 - protein, 498 aa, Burkholderia sp.
  misc_feature (1)..(498): tr|A0A1Q8ILT0|A0A1Q8ILT0_9BURK Uncharacterized protein OS=Burkholderia sp. SRS-W-2-2016 OX=1926878 GN=BTH42_30 930 PE=4 SV=1
MLNFRAMRNFVVLGGGTAGWFAALELQRLFGTQASITVIESPRINVIGVGEGGILNLPGALARYGIEEAAFIEATGAVLKLGFEYAGWNSGRDDDVFYHLFHAAPNAADGSLVDGVPVDWAMLVANGVGVQYAESALPLIRNNASQTETLGVRAALGARLPTSMHFDAHRVAAYLKSVATGRGVRLLEATVQDLDIATDSGHVTALRIEDSEQPVPVDFLIDASGFARLTLGRRFQVPMRPFGEYLLHDRAIPFYLPHPRQNPHLVTRAVAMNAGWMWQIPVQERVGCGYVYSSAHLSDDAALQEIEARVGKVEAVRTIRFEAGHFEDVWIGNVMAVGLASGFIEPLEATSIGQMLGQVLTFGELVAGSAYIVPQTSITMFNERNRVDWMGIRDFLRMHYDVPRRDTAFWRDVNALKLPDTYATLKACWQHRLPRSADLQPYRQGNFMHFEATSWISVGQGTGVIPPQAAAADLARLPRESVVKSHQFLMGVKSRFAL

SEQ ID NO: 87979 - protein, 512 aa, Alteromonas aestuariivivens
  misc_feature (1)..(512): tr|A0A3D8M7B7|A0A3D8M7B7_9ALTE Tryptophan 7-halogenase OS=Alteromonas aestuariivivens OX=1938339 GN=DXV75_1024 0 PE=4 SV=1
MVKPVDIVILGGGTAGWMSAAALSRLLPASRYRITLVSAPELQTVGVGEATIPHIRYFNQTLGIDENEFIRSVGATYKLAIRFKGWGYEASDYCHGFGYSGERINDIEFHHYFLRAFGRSSEVDYDRFCLASLAARAHRFEYPKQGDSMAGRYGYAFHLDATRYADYLREFSLANGVKHILGKVESVQLSLSGDICSLRLLNGEIIEGDWFLDCSGFSARLIEQELNSGYESWQQWLPCDRAVAGASGAMDSPPTYTLSQTHCAGWRWQIPLQHRTGNGVVYASHEMSDDEAAVLLNRSVEGIDESRLKVLSFLPGKRRKSWQRNCVAIGLSSGFLEPLESTSLYLVQVAIEKFIEYLPADRNCHAERQAFNQFIDIEYERIRDFLILHYHQNGLNSSFWRYCATMALPDSLNLRLQLYDETGHFSGYRQGLFMPVSWVTVALGQGRYPQGIDGRMQKWPKHQIAQELTSYQAKLVSLVGQMSAHKYALGRAGEEGLRYPEASPSLYGFVSG

SEQ ID NO: 87980 - protein, 522 aa, Rhodospirillaceae bacterium
  misc_feature (1)..(522): tr|A0A2E6GT32|A0A2E6GT32_9PROT Tryptophan halogenase OS =Rhodospirillaceae bacterium OX=1898112 GN=CMM52_16690 PE=4 SV=1
MKLNDRITRFTIVGGGSAGWLAASLLTATLNRRNDGPDTEITVIESPNLPIIGVGEATTLSTFVTFAQLKIDEQDFLNHCDASFKGAVRFKGWNINPDGTDGDYYHPFDVPELIYGVLPAYHYHRRKAEGISQPSFAHSMSVLPTLMDANRAPKALDAQPFEGLANYSFHLDASLMGEYLKEYCTTLGVTYISDDVVDVTLDERGFVSALELKELGTHPVEFVIDCSGFRSLILQQALGEKFIPYKDHLLCDRALAVQIPHREGAPLEPYTTSSALGAGWSWNVPLYSRRGTGYVFSSQFRSDDDAIEEFLNFLGDDAKDAEPRVIPMSIGRARHSWVKNCLGVGLSAGFIEPLESTSIHLIQVAIRRFLDHLPDRNCDPALVDRYNHLVTDMYEDIRDFIAMHYAISNRDGEFWQTARSENAVPDRVRERLALWKHKLPTELDIGTTNPLFTEWSYLYVLFGKNYVDNVNYSLEAALSDEDYEAFAADMNQRRDQLLLQAPDHRQYLDSLRANGTEAWYRP

SEQ ID NO: 87981 - protein, 502 aa, Sphingopyxis sp.
  misc_feature (1)..(502): tr|A0A1G3KWI5|A0A1G3KWI5_9SPHN Tryptophan halogenase OS =Sphingopyxis sp. RIFCSPHIGHO2_12_FULL_65_19 OX=1802172 GN=A3E77_11890 PE=4 SV=1
MNPMRLIIIGGGTAGWMAAACLRRFMPDGWSVQLIESDDIGTVGVGEATIPQIRLFNDALGIDEDEFLTATQGTIKLGIEFADWTRPGHRYMHAFGAIGRGLGLLEFQHYWLRARDLGAAQELGAYSLNEQAARARRMQRGSPRTSAYLHDMPYAFHFDAALYAAYLRRRAEASGVERIEGKVAGVRRDGETGDVAGVTLADGRAVDGDFFIDCSGFRGLLIEGALATGYDDWSGWLLNDRAVAVPCAHGAAPQLPWTGATARDAGWQWRIPLQHRIGNGYVYSSAHLSDDAAIDTLLAHLDGPVHAEPNRLRFTSGKRRRMWNHNVVALGLASGFMEPLESTSIHLVQSGISRLLKMLPAGVADPAVAAEFNRQSDFEWERIRDFIILHFKATERRDTPYWQDRAAMPIPDTLAAKIELFRAQGLIFREHEELFTESGWLQVLVGQGIEPRRWHPIADGIGDTEIAQYMAGIALMIEREVAAMQDYDAFLAATRPAAGVAA

SEQ ID NO: 87982 - protein, 566 aa, Colwelliaceae bacterium
  misc_feature (1)..(566): tr|A0A2D6RGR1|A0A2D6RGR1_9GAMM Tryptophan halogenase OS =Colwelliaceae bacterium OX=2026726 GN=CL811_07735 PE=4 SV=1
MSCSSNNAIKHIVIVGGGAAGWLTAGIIAAQHNGHLDSGIKVSLIESSAIPTIGVGEGTWPTMRDTLSTIGIEESEFIACCDASFKQGSKFIGWARDLTEETTNDADKSYQASIKGTHTYYHPFVAPHGFGQSDLVQHWLRQNQDTAATNPDSHSNTYDEPSFAHALGSQAHLCDYNKAPKQIQTPPYAAVANYGYHLDAGKFSALLKQHCCNKLGVNHIDDVVTGVSASEDESIEAVLTEQHGQIAGDLFIDCSGQHALLIGKHYQIPLREQSHVLFNDSAIAVQVPYPSDSHPISSQTNATAHDNGWIWDIGLPTRRGVGCVYASQYCDKATALNALKEYIAKTAPDIEFSTLEPRHIAFTPGYREKFWHKNCVAVGMAAGFIEPLEASALALIELSAKMIAKELPSVKSIMPITANRFNERFEYRWQRIIEFLKLHYVLSERTSDYWQANRERNSIPARLQELLTLWEHQEPSYNDFPQVEEIFPAASYQYVLYGMGFKSNLRHWQRQFDNPLLSEKLVQENKQLIDRYLGGLPTNRELINALVQQYQRQHDKEHELNKQQAI

SEQ ID NO: 87983 - protein, 246 aa, Colwelliaceae bacterium
  misc_feature (1)..(246): tr|A0A2D6RGG0|A0A2D6RGG0_9GAMM Tryptophan halogenase (F ragment) OS=Colwelliaceae bacterium OX=2026726 GN=CL811 _07085 PE=4 SV=1
RGVGHVYSSNHTSHEQAELALRNYVESSNALGNRTDNVGAIKTQDINTRIIKMKVGYREKFWQNNCVALGLSQGFVEPLEATGLLVFDVTAKMLAEQFPTCRAEMPLIANLFNQRMRESWDKVIDFIKLHYCISKRDDSDFWFDNRTSTSIPDSLQERLERWRYQPPTKYDFFSGVEIFNLENYLYVLYGMHYPTASGLLSTKTNQVAQADAYRQWLEKQSEQALKHLPSNRELINKIKQHGFKKL

SEQ ID NO: 87984 - protein, 519 aa, Novosphingobium resinovorum
  misc_feature (1)..(519): tr|A0A031JPU1|A0A031JPU1_9SPHN Tryptophan halogenase OS =Novosphingobium resinovorum OX=158500 GN=BV97_04678 PE =4 SV=1
MTIDNPPSGRVVILGGGTAGWLAAAYLSRTLGMTGITLVESSEIGIIGVGEGTFPTIRSTLAGLGISEAEFLVRADATFKQGVLFEGWATGTDSYFHPFNMPIGGEDEALLPHWLADTSPQRAAWADAVTVQEQVIRAGRAPKRPEDPDFSGPMNYAYHFDAARFADYLRDISIAAGVVRIEGTVGNVQRKADGDIAALELTDGRIVEGDFFLDCSGFRALLIGQTLGADFTSCSDSLFNDRALAMQVPYDRPDAPVRPYTLATAHEAGWTWDIGLTERRGIGYVYSSRHCSDDEAEATLRRYVGPQGDALNPRQLRFETGYRQQQWIGNCVAVGLSAGFFEPLESTGIMLIEAALRMVGDFLGPDLLAGADRDARDAAARSFNRLMSARFERIVHFLKLHYCITRRTDTAYWRDNADPATIPEPLRDMLAQWRRRPPSRFDFVVDLETFLPPSYHYILYGMGFETTLAGARYPGAAQAREVFARVRAAHAGARGGLPDHRALLNHYHARTGVPSSKVS

SEQ ID NO: 87985 - protein, 507 aa, Asticcacaulis excentricus
  misc_feature (1)..(507): tr|E8RKM3|E8RKM3_ASTEC Tryptophan halogenase OS=Asticca caulis excentricus (strain ATCC 15261 / DSM 4724 / VKM B-1370 / CB 48) OX=573065 GN=Astex_1894 PE=4 SV=1
MSDAIRRIIIAGGGTAGWMCAAALRKGLGRTVELVLIESEDIGTVGVGEATIPPIRKFLEHVGIDELDFIRETEASFKLGIEFAGWGTPDSRYFHGFGDFGAVHEAVRPYQLWRLLREAGDETPLEAWSLPAALAKAGKFFPPNPDPRSPMHDYAYAYHFDAGLFARFLRRHCEAQGVKRINAKIDAVQLRPADGFIEALTLDNGTSEAADFFIDCTGFRGLLIEEALKAGFEDWSHWLPADRAWAVPTAHHTGAGITPFTTSTAHAAGWQWRIPLQHRTGNGHVFASAFMDEETARDVLLHHLEGKALKDPMLIRFTTGRRPHPWTKNCVAVGLSSGFLEPLESTSINLIQSGIAQFLELFPSRQAEAVLRREYNRQMSLSYERVRDFIILHYKLNTRSEPLWRYCADMPIPDTLAHKIELFSVRGDVVSYDWDHFAEPSWIAVMNGQGVVSRFTDPLAQRLPLESVRALMAQRRDVLAQVVRQLPAHADFIAHHCPSPDTLKASV

SEQ ID NO: 87986 - protein, 508 aa, Pseudoxanthomonas composti
  misc_feature (1)..(508): tr|A0A4Q1JRD9|A0A4Q1JRD9_9GAMM Tryptophan 7-halogenase OS=Pseudoxanthomonas composti OX=2137479 GN=EPA99_18440 PE=4 SV=1
MLDAVTSLPSTPVRRVVIAGGGTAGWMAAAALSKVLGKALQITLVESEEIGTVGVGEATIPSLATFHRLLEIDEREFLSATQGTIKLGISFENWRTEQHRYIHSFGTTGQDHWTAGFQHFWLKGRERGLAGSYDDYCIELQAALHDRFAHLQGYRMNYAYHLDASYYARYLRQLSERHGCRRIEGKIAQVHTDAATGFITGLQLERGELIEGDLFIDCTGFRALLIGQTLGVGFEDWSHWLLNDRAFATQTTAVRDAVPYTRAIAEPWGWQWRIPLQHRVGNGVVYSSKYVSDEEAKARFLATAEGEIIKAPFPISFRPGRRMECWNRNCVALGLAGSFIEPLESTTIHLIQRGITRLMQSFPAVITRVGIDQYNTQLADELQHVRDFVVLHYAATERRDSPYWEYVANMTLPATLQHRIDLFRQTGTVFHAPQELFAENSWIQVMMGQGIVPRHRHPAPDLMGDAELSAFLGSIAKRVRETAAQLPPHMDYLRRYSPAQPPARPAAA

SEQ ID NO: 87987 - protein, 513 aa, Devosia sp.
  misc_feature (1)..(513): tr|A0A2L1S2C9|A0A2L1S2C9_9RHIZ Uncharacterized protein OS=Devosia sp. I507 OX=2083786 GN=C4375_01815 PE=4 SV=1
MDKPSHYVIVGGGTAGWIAAFIIQDEARRRGLDFRISVVESSKIPTVGVGEATTAAFRVLLKHFGIDELEFMRKTDASFKLGIRHEDWRRKGFTYYGPIDDPHQVVQPPAGAPSDYLNVYAVAAGRPVQDMHMFQPLLEQWKAPYARKPDGGLIPLGPFHHAYHFDQALVGKFFASKSKGVEKVDALVEGVERHAETGDITALVLADNQRLEGDFFIDATGFRKQLIVKELQAPWVSYAHELPVNRALPFWIDVEEGEELPTYTRAWAQNSGWMWQIPTRTRFGCGYVYSDAFSTPEQAKAEVEAALGQEIEVRGDIRFQIGRLENAWIGNCLAVGLSSSFLEPLESTSIHGTIVQMMLFAQRYMDRPERIEQKARDDYNARVGRQVDDFRTFVNTHYVTERDDTPFWREVRANRIHPETKERLTRWQTQMPRNEHFPNYLGGLPHIETQLHYPVLDGLGLLDQSLARREMEAAPKLRQFARETFDSLVREYRGAAQQALGHAEFLKIVQDMG

SEQ ID NO: 87988 - protein, 517 aa, Sphingomonas sp.
  misc_feature (1)..(517): tr|A0A0M2LS34|A0A0M2LS34_9SPHN Tryptophan halogenase OS =Sphingomonas sp. Ag1 OX=1642949 GN=XM50_12310 PE=4 SV= 1
MKRQVANIVIVGGGTAGWLAAATIAACADPTAQPPVQVTLIESPDVPTIGVGEGTWPTIRRTLARIGISEAEFLLACDASFKQGSRFDSWRNGAPDDSYLHPFSAPVEADPRALVAAWQAGEEEGFAAAVTPQARACALDLAPRQRAMPDYAGALNYAYHLDAVKLAALLRRHATQRLGVRHVRDHVLSVDRRHDGDIAAVRCRDHGAMEGDLFIDCTGHAALLIGGALGVHFIDRGHELFNDRALAVQVPVAAGSAIASTTNATAHEAGWIWDIGLPTRRGVGCVYSSAHLTDDAAEGILRAYLGRTTPAANLDALAPRKLTFRSGHRTRFWERNCLAIGLSSGFLEPLEASAIVTIELALDALVANFPATRASMDAHADRFNALFRYRWDRIVDFLKLHYVLSDRGQPYWRDNRDRSSIPHSLAGLLAIWREQPPSGHDLGMVDEVFPAASYQYVLYGMGMAPPPPGPMRIEGVPPASAALRQAAQRARALAASLPTNRAYLDVLRADRQNEIIA

SEQ ID NO: 87989 - protein, 511 aa, Croceicoccus sp.
  misc_feature (1)..(511): tr|A0A2D8D118|A0A2D8D118_9SPHN Tryptophan halogenase OS =Croceicoccus sp. OX=1927144 GN=CL820_00585 PE=4 SV=1
MKGDPIQKIVIVGGGTAGWMAAAAISKILGDFPGLSIRLVESEAIGTVGVGEATIPQIISFNNLLGINEFEFMRETNATYKLGIEFVDWLRKGHSYIHPFGTYGVDMLGIEFHQFWLRGQALGHTARLDDFSISAMAGEAGRFAHPRKDQPNSPLSRMAYAFQFDAALYGRFLRKRAEAQGVERVEGRIVEVLQNGESGFVTGVKLEDGAIVEGDLFVDCSGFRSLLLGQTLGVPFMDWSKWLPCDRAVAAPCALAGPDKPLTRSTARPAGWQWRIPLQHRIGNGHVYSSSYMSDGDAEDLLLSSLDGEPLAQPNRLRFTAGHRERIWDRNVVALGLAGGFLEPLESTAIHLVQSGIARLMALFPTKAFSPAEIERYNRETVADYVEIRDFLVLHYRASERDDSEFWRYCRNIAPPPALADKLEMFHSSGRIFRENQELFTEASWLAVMVGQGIEPEAYHPAAGLLSQEETLRRLRHIRQVVIDTAQQLPPQDEYLAMHGAAIENSLRQPA

SEQ ID NO: 87990 - protein, 44 aa, Desulforhopalus sp.
  misc_feature (1)..(44): tr|A0A4U0ZY02|A0A4U0ZY02_9DELT Tryptophan 7-halogenase OS=Desulforhopalus sp. IMCC35007 OX=2569543 GN=FCL48_03 250 PE=4 SV=1
MKKGEKLVIVGCSGSGGPAAMMSKKLMPEVDVTVIRKEDFFIVR

SEQ ID NO: 87991 - protein, 518 aa, Unknown; identical to SEQ ID NO: 86405
  misc_feature (1)..(518): tr|A0A061QHP3|A0A061QHP3_9PROT Flavin-dependent tryptop han halogenase RebH OS=alpha proteobacterium Q-1 OX=149 2281 GN=rebH PE=4 SV=1

SEQ ID NO: 87992 - protein, 560 aa, Rhodospirillaceae bacterium
  misc_feature (1)..(560): tr|A0A2E6Q9Y7|A0A2E6Q9Y7_9PROT Tryptophan halogenase OS =Rhodospirillaceae bacterium OX=1898112 GN=CMM48_09490 PE=4 SV=1
MGEPISKVTIVGGGTAGWMAATHLVTRLNSRAEIPIEVCLIESPNIPTVGVGEATVPTMKRWFESLDLDEAAFITHCNASFKLGVRFVNWDHDINGNPLNYIHPFDGFGDDIQGYNPAYYFHKFNDPGGGSNYSIYHSPITAVVEGRKGPKPLEAENFESVLNYAYHLDAGLFAQYLRQIAIERGVIHILDDVEEIELDEKGYVSSLQLKQQGRHEIELVIDCTGFKSMILQQTLGVEFENYGQYLLNDRALAVQLPHLEPTKLEPCTRSTALGAGWSWRVPLYSRIGTGYVFSSAHRNDEEATAEFLDHLGPLGKGAEPRAIGMKVGRARQTWAKNCIAIGLSGGFIEPLESTAIYLVDRALGWIVEYFPDKDFNPILSDRYNRLSESLYTEIRDFIVLHYCTNTREDSDYWKAAREDITIPDSLKEKLELFKHALPTEDELDSGFLFSGLSYLIVLFGKGFFKDVTFPADRAISASDWERYQNVLHGVTAELITNLPDHHQLLSSIRASRGGDSDTRELSEAIEKAAQNKPVVALPDQALEPEISFAGVADEAGGNIL

SEQ ID NO: 87993 - protein, 524 aa, Streptomyces brevispora
  misc_feature (1)..(524): tr|A0A561V5E7|A0A561V5E7_9ACTN Tryptophan halogenase OS =Streptomyces brevispora OX=887462 GN=FHX80_115321 PE=4 SV=1
MESRIRNIVVVGGTTAGWLSAAYLAGIFRGAVQVTVLEAPAGEQRADTGMTGGVQALPAEMQSEFFDPLGIQESDWMRACDASFRMAARYTNWRTGGSAQWVARELPNGIPDYFYDPVGGTGTGTGTGTGTENSEFALPYHWAWRRSAGETLEPLDRSCFRAPPLLDAKKSPRWLDGRAALPYGWHVDEGLFTAYLRRVATGAWDVRTAQGVLRGVDRDSQGYVRAVVTTGGLRIPGGFFLDCSGARAALLAGALGEPRIADAGRLLCDSTVTLTSPADPDAGIAPYTSLTAAPDGWLWRMPLPGRTGVGRAFSTVLARPEDAGRELAVLCGLDPEAADVRHHALSSGRIRRAWVKNCVAMGSSASVVEPIGTAGTDGVLHALRQFVRHFPSAVAREAPAPRFNREAERRYEADRDHVQLHYASAPRRDSPFWRAQSARPVPAALQDLRSAYRGGFPLSGADLRSLTVLASLDTGPPLAPPVLAHLDRERAEAAKQFAWIARQQRILAETLPPASEYLARLHGK

SEQ ID NO: 87994 - protein, 514 aa, Unknown
  misc_feature (1)..(514): tr|B8KI93|B8KI93_9GAMM Tryptophan halogenase OS=gamma p roteobacterium NOR5-3 OX=566466 GN=NOR53_1188 PE=4 SV=1
MNNTIKKVVIAGGGTAGWMAAASLSKLIGKNLEITLIESDEIPTVGVGEATIPPLILLHQLLDMDEKEFMKAVHGTFKLGICFENWRDVNEDYIHSFGYTGKDCWAANFLHFWLKGLKEGISKDYGVYCTELIAAQQNKFAVLQSGALNYAYHIDAGRYAALLRKIAEKHGTTRQEGRIDSVATNEHTGYIESVTLASGQRIEGDLFIDCTGFRGLLIEQTLHTGYDDWSHWLPCDSAVAVQTRSVGPPIPYTRSIARDAGWQWRIPLQSRVGNGLVFCSRYLSDDEAIQTILNNVEGETITDPRVIKFRTGQRRKHWNKNCVAMGLASGFIEPLESTSIHLIQKAVTRLIQNFPFEGIHESEIKEFNTQMDADTENIRDFIILHYHVTNREDTRFWRHCKNMSIPDSLQHRIDLFKETGRVFKSPNDLFVENSWIQVMLGQGLMPKQYHTIVDEMSDEELRKFMQGAELSVQRTVSQLPSHQAFIDHYCKADLGTAGEHAMPLNPQSGVRAAS

SEQ ID NO: 87995 - protein, 502 aa, Asticcacaulis excentricus
  misc_feature (1)..(502): tr|E8RU46|E8RU46_ASTEC Tryptophan halogenase OS=Asticca caulis excentricus (strain ATCC 15261 / DSM 4724 / VKM B-1370 / CB 48) OX=573065 GN=Astex_3384 PE=4 SV=1
MTPIRNITILGGGTSGWMAAAVLSRAFAPEACTIRLIESEEIGIVGVGEATLPQVRDFNTYLGIDEAEFMRATNATFKLGIEFCGWGTSGSYHHPFGVHGQSAGGIPFHQLWLKARSFMDPGSIEDYAFPIRLARENRFDFPVADSKSIRSTYAYAYHFDAVLYARYLRQWCEARGVQRIEGQVTGVNQNAETGFVETLTLASGETVGGDLFIDCSGFRAVIVGQALNLGWEDWTSWLPCDRALAVPCERTDDLTPYTRATAREAGWTWRIPLQHRTGNGYVFSSRFSTEDRAREVLLGALDAPAQAEPRLLRFQAGRRTASWSKNVIALGLASGFLEPLESTSIYLSQIALTFLMRLMPDMRFDPTLAREFNRLIDIEYERVRDFLILHYHANSASEGPLWDYVRTMPVPDSLKEKMALFRHRGHVQQYKDGLFSPASWIAVFMGQDIMPQAYDRQADSMGEEVLTDYLKRLKRKIDSNLAVLPSHAEFVAAHCYDPNSGI

SEQ ID NO: 87996 - protein, 512 aa, Croceicoccus sp.
  misc_feature (1)..(512): tr|A0A2D8D644|A0A2D8D644_9SPHN Tryptophan halogenase OS =Croceicoccus sp. OX=1927144 GN=CL820_09745 PE=4 SV=1
MDTVDNIVIVGGGTAGWLTAGVIAARHQGRRKHGFTVTLVESPNVPIVGVGEGTWPTLRTTLRKIGVSETDFFRECDAAFKQGARFNRWTTGEADEGYYHPLMLPQSFGRLNLVPHWLKDGDESFCDAVTPQGRICDEGLAPKTIATPEFEGQANYAYHLDAGKFSEFLKRHCCEKLGVRHVLADVTEVECAANGDVASLKTKDGPVIEGDLFIDCTGFKDLLIEGAMGVPFRDCNDVLFCDTALAVHVPYEDPSDPVASHTISTAQSAGWIWDIGLPTRRGVGHVFSSSHVDADHAERELRDYIGPAAKDLSVRRIPIRSGHREIFWKRNVVAVGLAAGFLEPLEASAIVLIELSAKMIAEQLPPNRAVMDVIARRYNDTTTYRWGRIIDFLKLHYSLTKRTDTDFWCDNARPETIPDRLLGLMELWKYQTPWLHDEFDRAEEVFPAASYQYVLYGMGYRTHVPPGDADADRELAQRAWRENRNLTAKLLAGLPGHRELLNKISQHAMMPV

SEQ ID NO: 87997 - protein, 506 aa, Rhodanobacter thiooxydans
  misc_feature (1)..(506): tr|A0A154QHP0|A0A154QHP0_9GAMM Tryptophan halogenase OS =Rhodanobacter thiooxydans OX=416169 GN=RHOFW104T7_1247 5 PE=4 SV=1
MTDPRIRNIVIVGGGTAGWMAAAAFAKVLDAGCSIRLVESEEIGTVGVGEGTVPHLKLFNNLLGIDDVEFVRNTQGTFKLGVQFNDWGRLGDSYVHGFGTIGHDVGLLPFHQYWIKARQAGKADEIGAYSLNTVAAPRGRFMPSASDAPPGSPLANVAYAYHFDAGRYARFLRGYAEQRGVRRTEGKVAQTVLRAADGFVEAIVLESGERIEGELFIDCSGFRGLLIEQALHTGYLDFSHWLPCDRALAVACEKVGPPTPYTRSSARPAGWQWRIPLQHRTGNGYVYSSAHVSDDEAATTLLGHLDGAPMGEPRLLRFTTGVRRQAWSRNVVALGLAGGFLEPLESTSIYMIQSGITRLLNLFPRHDFSPVLTERYNAQSRFEYEHIRDFLILHYHATERDDTPFWNQCRMMSIPPPLADNIRLFRDSGRFFRDGEEMFATPSWVQVMLGQRIAPKGYHPLVDQMPDAELAGFMASVSHVVASCVEVMPAHQAFIDRCCTAPAMVA

SEQ ID NO: 87998 - protein, 563 aa, Alteromonas sp.
  misc_feature (1)..(563): tr|A0A3A9ULW9|A0A3A9ULW9_9ALTE Tryptophan 7-halogenase OS=Alteromonas sp. BL110 OX=1714845 GN=D7031_04715 PE=4 SV=1
MSNSQNQCGLHRVVIVGGGTAGWLAAGVLAAKLSAKHSVTLVESPTISSIGVGEGSWPSLRDTLLDIGINETEFLTLCQGAFKQGSSFVNWRKGGHRYHHPFTIPTGYNELNIHACWQAFAPDMPYEDAFSLQSAMCALGKAPKQIATPDYAHVLNYGYHFDATKLADLLKKHCVEKLNVNHLIGHIASVTSHSNGDIEKVVTECGQEVFGDLFIDCSGSSGLLIDKHFNVPWVPVKHAMLNDRAIALQVPYADNDNEIKSTTMATAQTCGWTWDIALQHRRGTGLVYSSQFTNAEQAKQVLIDYVCERYPGANEHELAFRTLSFEPGYRSKFWVENCLSLGMSSGFVEPLEASAIAMVELGLRMLCEAFPQNKAHMEIVSKRYNTRFEYRWQRVIDFLKLHYVLSDREEPYWVAQRSDASIPDSLAELLKLWKFQSPSRLDLIENEEIFPSASYQYVLYGMGFTTLAPPLCLNEKEKRKSLHIRETLQQTKNTYFQGLPTNNALLKDIAKRYNDEQKHLHAHFQRQDYGHACASSESNSATDINNNTSLNKKDTSYDRIGFR

SEQ ID NO: 87999 - protein, 481 aa, Sphingomonas sp.
  misc_feature (1)..(481): tr|A0A0M2LSD4|A0A0M2LSD4_9SPHN Tryptophan halogenase OS =Sphingomonas sp. Ag1 OX=1642949 GN=XM50_12325 PE=4 SV= 1
MAAAAIARTMGRAAQVTLVESEAIGTIGVGESTIPPIVGFNRLLGINEAEFMAATNATFKLGIVFDGWRNGTDRYVHAFGLTGKDHWAAGFQHFWLAGRAKGHQAPFGDYSVELQAALAGKFAHLPDDRLNYAYQLDSGLYAKFLRGMAERDGAVRIEGKIATVQLDGDSGDIAALVLEDGTAIAGDLFLDCTGFRALLIEGALHAGFDDWTHWLPCDSAIAVQTASVGPAVPYTRAMAHDAGWQWRIPLQHRVGNGIVWCSRYLSREDALERLLGNVEGEVLTQPNHLRFTTGVRRRQWHRNCVAVGLSGGFMEPLESTSIHLIQRAVLRLIRMMPAAGPISPRDIAEFNDQQHADMVQVRDFLILHYKATDRRDSAFWRQCAAMPIPDSLEQKIELFRDTARVFRRNEELFAEHSWLQVLLGQGIEPHAWHPITGKLTDEELARLLQTLRAQVTRTVNGLPAHADYVARYCAGARQSAA

SEQ ID NO: 88000 - protein, 496 aa, Alteromonas aestuariivivens
  misc_feature (1)..(496): tr|A0A3D8M8P9|A0A3D8M8P9_9ALTE Tryptophan 7-halogenase OS=Alteromonas aestuariivivens OX=1938339 GN=DXV75_0824 0 PE=4 SV=1
MNKIQNVVVLGGGTAGWMSAALIKKVLGNSVGLTLVESDSIGTVGVGEATIPPIRLVNKVLGLNEGEFLRETKATIKLAIRFENWKQQGESYYHTFGAPGKSMAFCHFHHMWMKGREQGVARDLWDYDLNYLCAEAGKFAQIQSADPMLELPFAYHFDAGLYAQYLRKLSEKAGVKRIEGKVERVLRNERDGTVKALQLEGGQLVDGDLFIDCSGFSALLIEKALGTGYDDWSHLLPCDTAIAVPSERRETTRPFTRSMAHKAGWQWQIPLQHRNGNGHVFCSRYMSDDEAQSILLNNLETKPLADPKVIRFTTGRRRKQWVKNVVAIGLSSGFLEPLESTSIHLIQSGIVRLLQLFPHNGLHPASVNEYNEQSEREFLQIRDFLVLHYTLNERNDSQFWKDMRELELPPLLKHKMDLFRENGKLFRDQNDLFLESSWLQVMLGQGLIPGDYHPLVNTMSDEHIRNTLNRISEIKAQPIAELPYHDDYLAHVMRSA

SEQ ID NO: 88001 - protein, 501 aa, Sphingopyxis sp.
  misc_feature (1)..(501): tr|A0A1G3KX57|A0A1G3KX57_9SPHN Tryptophan halogenase OS =Sphingopyxis sp. RIFCSPHIGHO2_12_FULL_65_19 OX=1802172 GN=A3E77_06370 PE=4 SV=1
MGDKFDLVIVGGGTAGWMCAAACAAKLDPARFRVRLVESEEIGTVGVGEATLPQMKDFNDFLGLDEVEFMKATQASFKLGIEFVNWGRRGDRYIHPFGTFGRPIGEADFFSYWIRAHRAGTAAPLFDYCFPIVTALQNRFMLPNGDGNDVRSAFAYAYHLDAFLYARYLRAWAEARGIERVEGRIVAVEKDGESGDIAAVTLASGAQVAGDLFVDCSGFRSLLLGTALGVELEDWSHWLPCDSAQAVPSARSDDFTPYTRSTRRKAGWQWCIPLQHRTGNGYVYSSADISDDEAAATLLANLDGEPLADPRVLRFKAGKRHQAWAKNCIAMGLAGGFLEPLESTSIYLVQMAIMHLLTLMPDGAAIDPALPAEFNRVMDVEYDRIRDFLILHYVANEADAPLWQRVTAIDLPDTLAGKIDRFRHRGHVQAYRDGLFGPPSWQAVFVGQGIVPRAADRLADALPADLLDERLAKLAATIADAAATVPSHADFIARYCPAPAP

SEQ ID NO: 88002 - protein, 499 aa, Asticcacaulis excentricus
  misc_feature (1)..(499): tr|E8RKM2|E8RKM2_ASTEC Tryptophan halogenase OS=Asticca caulis excentricus (strain ATCC 15261 / DSM 4724 / VKM B-1370 / CB 48) OX=573065 GN=Astex_1893 PE=4 SV=1
MDPLRIIIVGGGTAGWMTAAGLSYACRDRIAQVTLIESDEIGTIGVGEASIPSLVTFNQFLKIDEREFMAHTKATFKLGIEFRNWGALGDRYMHPFGPFGHDFGMAAFHHYWLRAQASGDLTPLSDYNLNSVLARRNAFAPPASDRNSPLSALVYAYHFDAGLYARYLRSYAENFGVTRIEGQVVKVGQDAESGYITGLTLSDGRRVEGDLFVDCSGFRALLIEETLKVGYEDWSGLLPCDRAVAVPSENQYPLTPYTRATARGAGWQWRIPLRHRTGNGLVYASDHLSDDQATESLLSHLDGKPLADPRLIRFRTGRRRTAWVKNCVAIGLSAGFLEPLESTAIHLTQRGVTKLITSLPRKGFDAVLAKRFNQETRFEYEDVRDFLVLHYALTRRHDTAFWNESRTRDISETLKARIALFETTGRIQIGSDELFKDASWLAVMTGQGLRPRDYDPLADMIDAEDLRRSLDFIRAAFARTAEQVPSHDQFLKAQFGPLG

SEQ ID NO: 88003 - protein, 509 aa, Cellvibrionales bacterium; identical to SEQ ID NO: 84382
  misc_feature (1)..(509): tr|A0A1Z8MZK1|A0A1Z8MZK1_9GAMM Tryptophan halogenase OS =Cellvibrionales bacterium TMED21 OX=1986745 GN=CBB81_0 3340 PE=4 SV=1

SEQ ID NO: 88004 - protein, 517 aa, Caulobacter sp.
  misc_feature (1)..(517): tr|A0A0Q7WLW9|A0A0Q7WLW9_9CAUL Tryptophan halogenase OS =Caulobacter sp. Root1472 OX=1736470 GN=ASD47_00070 PE= 4 SV=1
MENPGKISHLVIVGGGTAGWMSAAFFSKVFTPRQMRITLVESAEIGTVGVGEATIPPITFFNQVVGLDEGRMLTATEGSFKLGIEFVGWGDPAGRYMHPFGNYGTPMDGVSFHAYWLRARQRGYKAELFEFSLSDLAAKAGRFDWRAEDPRDPRAAMAHAYHFDASLYAKLLREVAEGRGVQRLERTIRGVNLDPLDGTIASLALDDGEILAGDFFIDCSGFRSLLIGEALKVGYDDWSQFLPADRAVAVPSARYEDPIPYTRAIADKAGWRWRIPLQHRTGNGYVYVSDHIGDDEAADVLLASLAREHPENKALADPRFLRFATGRRTRSRVKNCAAIGLSSGFLEPLESTSIHLIQHGLIKLAGSFPRAKDDPAAAGIYNRILGDEMEQIRDFLIYHYHANRRVGEPLWDRLRHMAVPDSLREKMELFRTRGATIFPNQTIFQEPNWLAIMMGQAGEPEGYDPLADLMDERLLAERLHHMRVACRQAADRMPTHASVLARFPADSQKRRADAPVA

SEQ ID NO: 88005 - protein, 485 aa, Colwelliaceae bacterium
  misc_feature (1)..(485): tr|A0A2D6RET4|A0A2D6RET4_9GAMM Tryptophan halogenase OS =Colwelliaceae bacterium OX=2026726 GN=CL811_04135 PE=4 SV=1
MAANLMVKRWGNRANIRLVESPDVGIIGVGEGSTPSLRRFFQLIDVEEHQWMPRCQATYKLNISFKDWSPASGIQAYSHPFPAQVDSFTKRAFMVNTRTRRMGLKTHTLPQDFLLNGLLANEYCGPKAPANFPFKLEYGYHFNSALLGEFLSELAQQRGVAYQQAHVTSVEQHPNGELAALVTDSSEKIAGDLFVDCTGFAALLMQKTLGVQFNSYKENLFNDSAVVAPTPMLSAEQGDIPVETTSTALSNGWCWKIPLTERFGNGYVYASDFISADQAETEFRQHLGLLDSDQAVNHLKMKVGSLSQHWSHNCIALGLSQGFIEPLEATALHLVQVSIELFMQQFEAGGFTAQNRAQFNQQMAERFAGVRDYIVAHYKLNTRDDSEYWRANRENMALSDSLKQLLHVWYSKGDLSEEIARQNISTHFDDVSWHCLLAGYGAFPDLHPNQPGKGDLYQEQGVQAFLSGCRLNFKSHRENLEALAL

SEQ ID NO: 88006 - protein, 505 aa, Rhodanobacter thiooxydans
  misc_feature (1)..(505): tr|A0A154QC90|A0A154QC90_9GAMM Tryptophan halogenase OS =Rhodanobacter thiooxydans OX=416169 GN=RHOFW104T7_0371 5 PE=4 SV=1
MNDPRIRRIVIVGGGTAGWLAAALLAQALGPQVQIQLVESAEIGTVGVGEATIPQIRHINRFLGIDEDAMLRFAHGTYKLGVQLNDFTRLGDSYLHAFGDLGLPLGLTPFHHYWLRAVQERGHADTPDLWAYSLNAAAAAENRFAPLEKIPDSPLGGLRYAYHFDASRYAQYLRERIAPGSVQRTEGKVVDARLREGDGFIESLQLDSGELVEGDFFIDCSGFRGLLIEGALNTGYENWQQWLPCDRALAVGSAPGGPMRPYTQASARTAGWQWRIPLRHRTGNGHVYCSRFISDDEAAAQLLANLETEALGDPRPLRFVTGMRKLAWNRNCLALGLAAGFMEPLESTSIHLVQSGVSRLLAMFPDRRCDSALVDEYNRQTRFEYEHVRDFLILHYKATERTDTPFWQQCGAMEVPPSLARRVELFRRTAMVFREGDELFAETGWVQVLLGQRIAPQRHHPLADALTDAQLDGFLADIRTLIGRAKNTLPPHHKFVARAGGSLAA

SEQ ID NO: 88007 - protein, 501 aa, Sphingomonas sp.
  misc_feature (1)..(501): tr|A0A0Q4J6A2|A0A0Q4J6A2_9SPHN Tryptophan halogenase OS =Sphingomonas sp. Leaf230 OX=1735694 GN=ASE82_04070 PE= 4 SV=1
MAEQRIRKVVIAGGGTAGWLAAAALSRQLGQLLDITLVESEEIGTIGVGEATIPTMRAFHTILGLDEREFMRATQATFKLGISFENWARDGDRYIHSFGDIGKSTWMGDFHHFWLAAKADGDSSEIGDYCLELQAAKAERFALPSEGQINYAYHLDAGLYARFLRARSEANGLKRIEGRIASVERDGQTGFIRALVLDSGERVEGDLFIDCTGFRGLLIEGTYAAGYEDWSHWLSTNSALAVQTPATGPAHPYTRAIAHDAGWRWRIPLQHRVGNGLVYASDYLSDDEAHARLLATIDGAPLTEPRLIRFRTGRRRQVWMGNCVALSLASGFVEPLESTSIHLIMTGITRLMQTFPFGGIAPALVKRYNDQAQAELERVRDFIILHYHLNERTEPFWAARRDMPIPDTLVERIALFTEGAQAYQGGDDLFRVASWVQVMLGQRLTPRDHHRLGSIMGGPQLAGVLTNIRSTIADAVAGMPTHQQFLDRYLAAPVTASHGMR

SEQ ID NO: 88008 - protein, 524 aa, Streptomyces sp.
  misc_feature (1)..(524): tr|A0A1A9IQF9|A0A1A9IQF9_9ACTN Tryptophan halogenase OS =Streptomyces sp. SAT1 OX=1849967 GN=A8713_00440 PE=4 S V=1
MSTPEHATDTTTAGPAGSYDVVVVGGGPGGSTTAALVAMAGHRVLLLEKESFPRHQIGESLLPATIHGVCRFLGVTEELEKAGFMPKRGGTFRWGSNPEPWNFLFAYSPLMSGPTSTAYQVERMKFDKILLDNARRLGVEVRERCTAVATLSEGERITGLRWTDEDGRTHETAARYVVDASGSNSRLARTVGKRNYSDFFRNVALYGYYEGGKRLPGPDAGNILCCAWDDGWFWYIPLTDTLTSVGAVVNRSQVGTLSRDPEGAMAQFIEQAPMIKEFLQDAERVTEGPYGELRVRKDYSYAMERFWQPGMVLVGDAACFVDPVFSTGVHLATYGGLLAARSINSALGGGLDEERAFGEFERRYRREYGVFYEFLLAFYDMQHNEESYFWQARKVSRAEATDLRAFVELVGGVSSGESALTDLEGLKERFGGSSRELADAVTRTGPAQTESGERMGELFGTQVVTEVMQGMNEVQARASMGGATTLEKPLFSDGLVASSDGLGWAVPATADAGAAVPAQGGPAA

SEQ ID NO: 88009 - protein, 505 aa, Sphingomonas sp.; identical to SEQ ID NO: 85570
  misc_feature (1)..(505): tr|A0A0Q4ILK4|A0A0Q4ILK4_9SPHN Tryptophan halogenase OS =Sphingomonas sp. Leaf230 OX=1735694 GN=ASE82_04910 PE= 4 SV=1

SEQ ID NO: 88010 - protein, 506 aa, Massilia sp.
  misc_feature (1)..(506): tr|A0A418XAT1|A0A418XAT1_9BURK Tryptophan 7-halogenase OS=Massilia sp. K1S02-61 OX=2320864 GN=D3872_22145 PE=4 SV=1
MNTHNRISNITIVGGGSAGWMAAAALATYLGKGAAIRLIESEEIGIVGVGEASVPHIRLFNGQWLGIDEAEFVKRTQATVKLGIEFKDWSRIGDSYIHGFGAIGRSLGPLPFHQFWLKLHLSGRADPIGGYSPQTVMAPQGKFAPGDRNAPAGSPLADIAYAYHFDATLYARYLRELAEQRGVQRIEGKIVGVNQRAGDGFVESLTLENGQVVGGELFIDCSGFRGLLIEQTLKTGYVDWSHWLPCDRAMAVPSERVDPITPYTRASARAAGWQWRIPLQHRTGNGYVYSSRHISDDEAAATLLANLDGKALADPRPLRFTAGMRKKFWNKNVVALGLASGFLEPLESTSIYLAQSGITRLLSLFPTRDANPLLAERYNRESVFEYERIRDFLILHYCATERGDTPFWNYCRTMDIPDSLREPIELFRRDGRYFRNGEDFFALPSWVQVMLGQRIVPQGYHPIVDEMPAERLVEYVEGMRTTLAQAVAMMPTHQEWIDRYWKASPP

SEQ ID NO: 88011 - protein, 508 aa, Altererythrobacter ishigakiensis
  misc_feature (1)..(508): tr|A0A562UMC0|A0A562UMC0_9SPHN Tryptophan halogenase OS =Altererythrobacter ishigakiensis OX=476157 GN=JN10_226 2 PE=4 SV=1
MTDPRSDPLRKILIVGGGSAGWMAATFLSRILGRVAEIELLESDAIGVVGVGEATIPPIRKFNQFCGIDEAAFLRDTQGTFKVGIQFENWGKVGDRYLHAFGRVGQELDALVRMHHWWRLGQQAGAADYPRWESLFLGRAATDQSRFGFDPRNPGQLSDLLPHAYHFDAIAYGAHLRKVSETQGVTRIEGVAVGVERSPESGDVDAINLEDGRRIKADLFIDCSGFRSMLLGEAMDEPFDDWSHWLPADRAVVIQSKPNSSQIIPATRSIAHAVGWQWRIPLQRRVGNGHVYASSFSSDNDAEARLLTNLDGELIGDPRLLRFTTGRRQRAWVGNVVGLGLAAGFLEPLESTSIHLVQTALERLADLLPARDISPALRDRFNNQSSREWCQVRDLIIAHYKVNQRDDSEFWRYCAAMDVPESLAENLDLWEREGALTIDGGHLFQLGSWAAVLIGQNLLPQRVHSLTARVAASDIAPHIERLAKSLQQQAQSLPDHASFLERYGASSS

SEQ ID NO: 88012 - protein, 569 aa, Rhodobacteraceae bacterium
  misc_feature (1)..(569): tr|A0A2S8EY40|A0A2S8EY40_9RHOB Tryptophan 7-halogenase OS=Rhodobacteraceae bacterium WD3A24 OX=2086263 GN=C2I3 6_00320 PE=4 SV=1
MAAPIGSVTIVGGGTAGWLTALLLSTYLAPKSAREAPAIRLIESPTVATVGVGEATVPAMPRTLRLAGIAESKFFRDCNASFKLGVRFDNWNVDQRGDPIDYVNPFSRGVTIDGVSVAEYFVRYGARGLSYSEVISYCDDLARAHKGPRPLGAKPYDQSVGFAYHLDAGRFAAMLQEVCTKRGVRHILDDVVDVERDEHGYIAALDLKEGGRHPVELVIDCTGFRGMIINEVLEEPFLSYARYLANDRALAVQLPHPDPNKLESLTRSTALGAGWVWRVPLYNRVGTGYVFSSAHRTDEEARAEFLAHLGPAGEGAEPRVIPMRIGRTRNPWVKNCVAVGLSAGFIEPLESTAIHMTEMAVRNLLTYFPDSDYAEPLRERYNAVANRLYDEVRDFICLHYALSNRTDSQYWIDAREALELPDGLAENIELWRHKLPTHDDIGYYSLFSRDTYIAVLLGKRVYQMEGFARSDTRAGVHTDPDKWRNYLRKARAHVGEVVAKSADHRALLDELRGASRARGAAATRKTPAGAKPTVPLPGQSAPLTAPIRPAAAPRPTRADSKTDDGHNLL

SEQ ID NO: 88013 - protein, 527 aa, Rhodospirillaceae bacterium
  misc_feature (1)..(527): tr|A0A2E6GKF0|A0A2E6GKF0_9PROT Tryptophan halogenase OS =Rhodospirillaceae bacterium OX=1898112 GN=CMM52_03730 PE=4 SV=1
MASTKASLNRIDKVTIVGGGTAGWLSAAMLGTFLNERHDGPQVEITLIESPRVPTIGVGEATVPGMRALLQRIGLDEGEFLQRCNASFKYAVRFANWNLDKNGSGIEFFHPFDAPEPIQGKNPTYHYHRYGPKNGPGGLIETLLPNAAMIAGQYAPRLFGGNNFEGVISYSYHLDAGLFANYVRDVTLARGINYIRDDVIDVTLDENGFVSELTLEEGGAHPVEMVVDCTGFRGLIIGDALGEPFHPWNKQLLCDRALAIQLPHIDAKNIEPCTTATALGAGWVWNLPLYNRVGTGYVFSSAFRTDEEARDEFIAHLEGKGFTVDEEPRAIQMHVGRRERTWVKNCVAIGLSGGFVEPLEATAIHTISATLRLFAANFPDRSISQPLADRFNRSVGELYDNIVDFIVMHYLTSNRQEPFWLAARNEIDVPASLQENMALWQHILPGDADISGINLFGPPSFLSVLYAKGRFDDVDFPLEGSIDQSDWQDYVAQMQKLKTNYAQHLPRHYEFLTELRNQAARKVLGVA

SEQ ID NO: 88014 - protein, 795 aa, Methylorubrum extorquens
  misc_feature (1)..(795): tr|A0A1P8QUC6|A0A1P8QUC6_METEX Tryptophan halogenase OS =Methylorubrum extorquens OX=408 GN=BV511_21555 PE=4 SV =1
MFRSERSAPPRLVVAGGGPAGWMAALYLKRVLRRAGWTVTLVGSAPATGASAALATRPAFTRFLKGFGIDEAIFMRRCAATYRLASRYDDWFAEGQGHWHPFGACGPRIAGRDLFHYWMKFRGEGAEDEAGNYADYAPQALMAAEGRGPRPLADRSSLTESGDYGYHLDRTALVRFLRELALSEGVRGVTGRVREIERNLYGDVGALVLDGGQTIEGDIFLDCTGAAAQLIGAALGEAWVAGSGPGDRVARLSLERSSEVPPFTAYRGRAEGWTASLPLADRTEHLFVYDSRTTPPDAAAATLRRAFDGQAGIVDAELRHGRRAAPWQRNVVAMGAAAGAVEPLLGFDLDLVLAGFETFLAYLPRQGEGGDVLRRAYAARLNRFHDDAAEAVAAHYVLGRRSEPFWAAARAVMIPDRLADRLDLYELAGHVALSEEGPFSEGDHYLLFSGADFLPRRPFAPVDVADGREIARLLASIRAQSAQIAGAMAPHVRLMDALHGQAPAAAPAVRIAAASAPAGPAALRQTPEGARLADLVAGLGQPFGYERSVKASPAGLQTDRFLMSLHRASLGLTPEATLDRLAAGLGLPERERAEAAGLIGGADILHLGYEDGPSGALYKLYVEWSSRTDAAWTGADEAGAEPMLVHRAYKWKPGGTHPPVVTLYHWPRVRGPEEIEARLNRMAGAWGPAGAPARDTAHAILRLAQERGRGAVHYLEAREEPGLRLSYDLNLYACGLTVADAEPRLGQAFVDLGVPREAAAMVLRERLQETLGHVAGGVGRDGQPFVTVYSGVAGG

SEQ ID NO: 88015 - protein, 500 aa, Ideonella sp.
  misc_feature (1)..(500): tr|A0A437RCB9|A0A437RCB9_9BURK Tryptophan 7-halogenase OS=Ideonella sp. KYPY4 OX=1862385 GN=EOE66_17220 PE=4 S V=1
MSLEPVRNIVIVGGGTAGWMAAAALSKVLEGHHQIRLVESDEIGIIGVGEATIPHIGEFNSALGIDEDEFLRATQGTFKLGIEFVNWGAIGDRYVHGFGFVGQATQALPFHHFWLRMAQLGRALPLEAYSINTAAPRAGKFMRARKDMPGSPVADISHAFHFDAGLYARFLRRLAEGRGVRRTEGKIARVSQREPDGFIDAVVMESGERIEGDFFIDCSGMRGLLIEQTLKSGFEDWSHWLPVDRALAVPCASAGPLLPMTRSTAHPAGWQWRIPLQHRTGNGHIYCSSFMGQDEATDILLKHLDGEPLADPRPLKFTTGRRRQFWNRNCVAVGLSSGFLEPLESTSIHLIHTAISRIISFFPHAGFDAADIAEYNAQTHWEYERIRDFLVLHYKATERDDSEFWNYCRTMPVPETLQRKMDLFRSNGRVQRDGLELFAESSWLQVMVGQRLMPKAHHPFADLRSEDEVAAYVQHVAVVIDKCVKAMPTQAEFIAQHCRA

SEQ ID NO: 88016 - protein, 529 aa, Sphingomonas sp.
  misc_feature (1)..(529): tr|A0A0Q4IX13|A0A0Q4IX13_9SPHN Tryptophan halogenase OS =Sphingomonas sp. Leaf230 OX=1735694 GN=ASE82_18350 PE= 4 SV=1
MATNTGPGITSDHPITHIVIVGGGTAGWLTACLIAARADRDTARPLSVTLVESPDVATIGVGEGTWPTMRRTLERIGITETDFLLACDAAFKQGSRFDGWRTGAADDSYLHPFTAPVDGDPRDLVSAWSEHGGRFADMVGAQGAICHHDLAPRQRAMPDYAGTLNYAYHLDAGKLAALLTRHATERLGVRHVRDHVVGIDGTEHGDIVAVRTRASGAIAGDLFVDCTGHAALLIGDHYGVATIDRDRELFNDRALAVQMPVAAGSPIASQTNATAHAAGWIWDIGLPTRRGIGCVYSSGHLSDDAAADTLTRHIRATAPDAPDAPLPTFRQLKFQSRHRAKFWERNCLAVGLSAGFLEPLEASAIVLIELSLDALLDNFPSHRGAMDIQATRFNTLFRYRWDRIVEFLKLHYVLSERDEPYWRDHRDAASIPPRLVELLTLWRHQPPSRADFPMIDEIFPAASYQYVLYGMGFPPPTRGPIATADRARTETLLAQIDQRRRMLAAGLPSNRAYLDALRHTTAPAMDLSA

SEQ ID NO: 88017 - protein, 497 aa, Mycobacteroides chelonae
  misc_feature (1)..(497): tr|A0A0E3XSY2|A0A0E3XSY2_MYCCH Tryptophan halogenase OS =Mycobacteroides chelonae OX=1774 GN=GR01_16650 PE=4 SV =1
MTASYLKVAFGDRITVTVVESARIGAIGVGEATFSTIRHFFDYLGLEEHEWMPSCCATYKLGIRFQDWRKPGHHFYHPFERQRVVDGFGLTDWWLDNPRSDSFDRDCFLIGTLCDNDKSPRRLDGSLFMDTDGEHTAYRTTLSEQDTQFPYAYHFDASLLADFLRDFAVRRGVRHVVDDVVDVLQDDRGWISEVRTRAHGSIEGDLFIDCTGFSGLLLGRAMGEPFESYQGSLLNDRAVALRVPTDQNGGHLPPYTTATAQDAGWIWSIPLFDRIGTGYVYAEDYCSPEDAERALRDFVGPAAEGLEANHIRMRIGRSRRSWVGNCVAIGLASGFVEPLESTGIFFIQHGIEQLVKHFPDENWEERLRDSYNRVINRCMDGVREFLVLHYYLAARVDTQYWRDTKSVQLPTALAERIEHWRSKLPDAGSVYPHYHGFEPYSYVCMFVGLGGIPARPAAVVRYLDATRAQREFDLIAQQASRLRHSLPTHREYLAQMY

SEQ ID NO: 88018 - protein, 498 aa, Caulobacterales bacterium
  misc_feature (1)..(498): tr|A0A1F8HXU0|A0A1F8HXU0_9PROT Tryptophan halogenase OS =Caulobacterales bacterium RIFCSPHIGHO2_01_FULL_70_19 O X=1797585 GN=A2623_03275 PE=4 SV=1
MRQLKRILIVGGGTAGWMTAALLSKLFNGVYEIVLVESEAIGIIGVGEATIPAIKKYNELLGLDENEFLKRTQGSFKLGVQFVDWWKLGHSYIHGFGLIGRDLGWLRCHHYWLKARASGRVSDFADYSINTAAALENRFMRADPKMSESPLGHIAHAFHFDAALYSRYLRGLAEAAGVRRREGKVADVTLRSDDGFVQSVTMEDGEVITADLFIDCSGFRGLIIEQALKTGYEDWTRWLPCDRAIAVPCASTEPFTPYTRATARTAGWQWRIPLQHRTGNGHVYSSRFIDDAEAEAILLANLDGEQLAEPNRLRFTAGKRMKAWNRNCVAIGLAAGFLEPIESTSIHLIQSAIIRLVRLLPDAGFDPATIAEFNRQTDFEYERIRDFIILHYKATQRDDTPFWRYCREMEVPDTLQRKMDLFAANGRIFREDEELFAEESWIQVFLGQGVVPRGYDPLADLKTDAEVAAFLDNIETVIRKCVAVMPSHADYVARHCPA

SEQ ID NO: 88019 - protein, 500 aa, Izhakiella sp.
  misc_feature (1)..(500): tr|A0A4P8YKB5|A0A4P8YKB5_9ENTR Tryptophan 7-halogenase OS=Izhakiella sp. KSNA2 OX=2579935 GN=FEM41_13305 PE=4 SV=1
MLNLRSPAPQRIVVLGGGTAGWFAAIALRRLFSPKVDIQVIESSSIGIVGVGEGGLLNFINALQRYQIDIDEFVRETGAAWKWGFSYEGWRTGGEDDRFYHLFASQETPVSRWSERGFYPCLSAMIGQNIPLESYLAASPLIKANTPQDQASALLKANGGDIVPSFHFDSYKLATYLKKVALSRGVMHLDTVVEEVVFDQQGHARMLRCADNRTIDVDFLIDASGLSRKVLGKSMGGKWHSFSDYLLMDSAIPFYMPHPHENPMLVTRAITMDAGWMWQIPLIDRVGAGYVFSSKHISEQQAIAEIEQRLGYAITPHKTLRFDPGCFEEVWVGNVMALGLSSGFVEPLEATSIGQMLEQLYSFERVLVHSQGIISDKTIREFNQANFQSWLGIRDFLRMHYDNTRRDTPLWQAVSESPYPESYRALRECWQERTPRLLDVESYAINGWRGIFHAINWMFVAAPLGVVPSRAGQMDLLALPAEKRQQALNFAAERHQEINR

SEQ ID NO: 88020 - protein, 499 aa, Sphingopyxis sp.
  misc_feature (1)..(499): tr|A0A0W1G4G7|A0A0W1G4G7_9SPHN Tryptophan halogenase OS =Sphingopyxis sp. H071 OX=1759078 GN=ATE69_19920 PE=4 S V=1
MNQDNPLRRVVIAGGGTSGWMMAAAIARTLGHTVDLTLVESEQIGTIGVGESTIPPLVNFNRILGIAEPEFMRAAQATFKLGILFDNWKYDGHSYFHSFGLSGKDHWSAGFQHFWLAARAKGYPHSYDDYCLELVAGLQGKFAHLPEDRMNYAYHVDATLYGRYLRKLAEADGAKRVEGRIEKVELDGETGNIAALLLDGDRRIEGDMFVDCTGFRGLLIDGALHAGFEDWSHWLPNDSAIAVQSDHLGPPMPYTQAIAHDAGWQWRIPLQHRMGAGIVYSSGYLSRDEALNRLMSSVGTPRIEPFDIKFKGGVRRKQWYRNCVAVGLAGGFVEPLEATTVHLIQRAVLRFIRLMPNGRVSERDAIEFNEQQRQDIEQIRDFVILHYKATERRDSPFWRHVANMPVPDSLQQKIELFRETGRTFRKNEELFAENSWVQVMMGQGVEPQSWHPIAEKFGDDELEKFMAGLRENVARTAATLPDHHAYVARYCGAAEPQAA

SEQ ID NO: 88021 - protein, 508 aa, Sphingopyxis sp.
  misc_feature (1)..(508): tr|A0A0W1G664|A0A0W1G664_9SPHN Tryptophan halogenase OS =Sphingopyxis sp. H071 OX=1759078 GN=ATE69_18315 PE=4 S V=1
MSPSAEEPLHIVILGGGSAGWMTAALFAHLWRDSPIRISVVESPDIGIIGVGEGSTPQLKAFFDGLGIAEAEWMPACDATYKLGIAFEGWSAGGQESGYFHPFPGTLDVHTQAEFFRNAALRRTGVDVPANPDRFYLAGRVAARGGGPHGGESFPFDLAYGYHFDAYKLGAFLRDHAVSQGVTHLARKVVSVDVGADGNVRSLGLEGGEALAADFFVDCSGFGGLIAGQALGARFLPFAENLFNDRAVVMPTAHDERGPVVTATKSIAMTAGWRWAIPLTTRIGNGYVYSSRYLDRDQAERELRIALGLTDADGPARHLEMKVGRLEHSWTANCLAMGLAQGFIEPLEATALHIVIATAQEFITAFEGGGFTPRHRDIFNARIAARYEGVRDYIVAHYRMNQRDADRGYWRDAAGLETLSDNLKAMITAWFTGADIGEAIEDLRIGAFYPNISWHCLFAGYGVFPSNAAMRSPVTTDRPADLAAIDRFLSRAELNFVPPTFPVAARRP

SEQ ID NO: 88022 - protein, 516 aa, Sphingomonas sp.
  misc_feature (1)..(516): tr|A0A0Q4IT85|A0A0Q4IT85_9SPHN Tryptophan halogenase OS =Sphingomonas sp. Leaf230 OX=1735694 GN=ASE82_00030 PE= 4 SV=1
MTKRILIVGGGTAGWLTAGYLAKRLGADLPGGVAITLVESQDIGILGVGEGTFPTIRRTLATIGIDEADLIRRCGATFKQGAKFVHWRHAPGQGATDHYSHPFQVADSSDGLDLLPYWLLGHGGPENWDEVSNPQKKASDRHRAPKLPTNPDYVGPLNYAFHFDAVALAGLLREQGVKNGVRHLTDTVSEVLLDAEGAIGGVRTERNGVLDADLYIDCTGFRAELIGKAMKVPYRSCRDVLFCDRAIAAQLPYARPDDPIASYTISTAQKNGWIWDIGLDRRRGIGHVYSSDHGDDETAERVLRGYLGAAGEKADVRHFKFDAGYREVNWYKNCVAVGLSSGFFEPLEATGIAFAEVSAGMIANLFPWGGDYETSARQFNANMLRRYERALDFIKLHYCISERRDTAFWRDNVADTSVPDSLLELLDRWRFRPPNELDIDGQVDIFTEASWQYVLYGMGWKTDLSAKAGALRYHEDARRAFAEVQRQARYAIANLPSNRDLVAYAQTHSFGARAAA

SEQ ID NO: 88023 - protein, 491 aa, Sphingomonas sp.
  misc_feature (1)..(491): tr|A0A0Q4IVM5|A0A0Q4IVM5_9SPHN Tryptophan halogenase OS =Sphingomonas sp. Leaf230 OX=1735694 GN=ASE82_04445 PE= 4 SV=1
MTACLIAHRWRDRSVRVTLVESPEIGIVGVGEGSTPQLKHFFDTLGIAEAHWMPACDATYKLGIGFEGWSDRAGYERYFHPFPTALDGHTAPQFFYNTRARRTGRDVDAHPDQFLLPARLAATNCAPQPAANFPFEVSYGYHFDAYKVGAFLATHATEMLGVVHLQRRIASVERASTGEITALIDTDGERIAGDFFIDASGFRSTIFSALDVPFVSYADALFNDRAVVMPTARTPGTPIPSQTRATALSAGWAWHIPLTSRNGNGYVYSSRHLTEAQAEAELHTNISAEAGEARHLKMRVGRVRDSWSHNALAVGLSQGFLEPLEATALHLVIATVEAFLDGIDGGGATDAVRTAFNTRIAARYDGVRDYIVAHYRLNQRHDDPTGYWAEARGVDALSGDLKMLMSTWFTGADMVAAIDRAGLGRYYSAISWHCLFAGYGTFPDAARLIPPGADIDPIDLPKIDNFLTRCASNFGSHASRLRAAADHKDQI

SEQ ID NO: 88024 - protein, 500 aa, Sphingomonas sp.
  misc_feature (1)..(500): tr|A0A0Q4IWZ8|A0A0Q4IWZ8_9SPHN Tryptophan halogenase OS =Sphingomonas sp. Leaf230 OX=1735694 GN=ASE82_04900 PE= 4 SV=1
MSARIQVVIVGGGTAGWMTAATLAMSFAGRLADVTLIESEDIGTVGVGEATVPHIRFFNQRLGIDEADFIRRTNATFKLGIEFRDWGRIGDSYIHPFGDFGHDIDGLPFHQYWAHATRGGADGLPKLEDCSLPIVAARDNRFTPPLEDPRSIGSTYSYAYQFDATLYAAYLRDYVEARGVVRIEGRVDAVEQKDDGIGAVRLADGRRIAGDLFIDCSGFRALLIDGALKVGHEDWSHWLPCDAAWAVPTANAGALTPYTRATAREAGWQWRIPLQHRTGNGHVFSTRFTDPETARSVLMDNLEGEALAEPRMLRFRTGRRHRQWVGNCVAIGLSAGFLEPLESTSIHLIQLAIGKLIELFPSGGVFDPADEAEFNRAMALEYDRVRDFLVLHYCATDRDDTPFWRYMRTMTLPSSLTEKIAEFRERGIVASYREGMFLPASWLAVYYGQRIMPDRLNPLIADIPMATSRDHVARVAAACASAAKAMPLHEDYIARIKAAA

SEQ ID NO: 88025 - protein, 524 aa, Streptomyces sp.
  misc_feature (1)..(524): tr|A0A022MEK3|A0A022MEK3_9ACTN Tryptophan halogenase OS =Streptomyces sp. Tu 6176 OX=1470557 GN=CF54_29390 PE=4 SV=1
MSTPEHATGTTPAGPAGSYDVVVVGGGPGGSTTAALVAMAGHRVLLLEKESFPRHQIGESLLPATIHGVCRFLGVTEELEKAGFMPKRGGTFRWGSNPEPWNFLFAYSPLMSGPTSTAYQVERMKFDKILLDNARRLGVEVRERCTAVATLSEGERITGLRWTDEDGRTHETAARYVVDASGSNSKLARTVGKRNYSDFFRNVALYGYYEGGKRLPGPDAGNILCCAWDDGWFWYIPLTDTLTSVGAVVNRSQVGTLSRDPEGAMAQFIEQAPMIKEFLQDAERVTEGPYGELRVRKDYSYAMERFWQPGMVLVGDAACFVDPVFSTGVHLATYGGLLAARSINSALDGELDEERAFGEFERRYRREYGVFYEFLLAFYDMQHNEESYFWQARKVSRAEATDLRAFVELVGGVSSGESALTDLETLKERFGGSSRELADAVTRTGPAQTESGERMGELFGTQVVTEVMQGMNEVQARASMGGATTLEKPLFEDGLVASNDGLGWAVPVTADAAAAVSAQEGPAA

SEQ ID NO: 88026 - protein, 510 aa, Sphingomonas sp.
  misc_feature (1)..(510): tr|A0A0Q4IT60|A0A0Q4IT60_9SPHN Tryptophan halogenase OS =Sphingomonas sp. Leaf230 OX=1735694 GN=ASE82_00035 PE= 4 SV=1
MTSDGAARVTKVVIVGGGTAGWMTAAALSRLVPSGVSVTLVESEEIGTVGVGEATIPPLLDFNRMLGIDEDAFVRATGATFKLGIEFRDWVRLGDAYLHPFGTHGRDIGGVSFHQLWLRQAALGNPDPGPIGDYCLSAVAARRGRFTRPSANPESVLSTLFYAFHFDAALYAKLLRDMAEQDGVVRVEGRVVAVERDAGTGFIEAVRLEGDRRIDGELFIDCSGFRSLLLGDALDVPFTSWKHWLPCDRAWAVPSQRQGGLTPYTRATADTAGWRWRIPLQHRVGNGYVYSSAHIDDDDARRALLAGLEGEALGEPRQLRFEAGRRDRLWERNCVAIGLSGGFLEPLESTSIHLIQSGITRLMSLFPDLGFGVTEIDEYNRVMLREYEQVRDFIILHYHATERSDSPFWDRCRTMAIPASLSAKLALWSGKARVFREQGELFTPDGWIAVLLGQGIRPASFDPLASALPADESARFLAHVRDVIDKTAAAMPTHEAFIAQNCAARTHQAA

SEQ ID NO: 88027 - protein, 497 aa, Massilia sp.
  misc_feature (1)..(497): tr|A0A4R3V066|A0A4R3V066_9BURK Tryptophan halogenase OS =Massilia sp. GV097 OX=2135674 GN=C8K02_103562 PE=4 SV= 1
MEAAQHSAYKRIVVVGGGAAGWMAATALATALPASRVELVESEEIGIIGVGEATFPSIRAFHKILGIDEAEFLRATNGTYKLGIEFCDWRAQGERYFHTFGDLGALAGPQALWGQHRRLGSDSPGALGEQCLPSVMAGQGRFQVPPEREQFFNYAYHFDAVLYAGFLRALALKRGVRRTEGRIVEVARRADGGVAQLRLGDGRTVPGDLFIDCSGFASLLLGRTLDEPFVDFSHWLPVDRAWACPSERSGPDLAPYTRATALEAGWAWRIPLSNRTGHGHVFASRYIDEERARAQLLQQMDAPALGEPRLLRFTTGHRERFWVHNVVALGLSSGFLEPLESTSIFLVQSGLGRLIELLLPGAAPAAPAVADYNAAMVRQFERVRDFIILHYCLTGRRDSKLWRAMASMELPETLAFKIHAWRQAGALHQYSDEGFDATSWLAIHAGMGHWPERADPALRELAPDAVRQALRQRRDSIAAVVAAMPTHDAYLRSVLGR

SEQ ID NO: 88028 - protein, 520 aa, Xanthomonas campestris; identical to SEQ ID NO: 85115
  misc_feature (1)..(520): tr|Q8P3V3|Q8P3V3_XANCP Tryptophan halogenase OS=Xanthom onas campestris pv. campestris (strain ATCC 33913 / DSM 3586 / NCPPB 528 / LMG 568 / P 25) OX=190485 GN=prnA P E=4 SV=1

SEQ ID NO: 88029 - protein, 502 aa, Sphingobium amiense
  misc_feature (1)..(502): tr|A0A494W975|A0A494W975_9SPHN Tryptophan 7-halogenase OS=Sphingobium amiense OX=135719 GN=SAMIE_1002500 PE=4 SV=1
MQASQTGAASGGTRVVIVGGGTAGWMTASALATLMGGAVDIHLVESEEIGIVGVGEATLPHLRAFLERIGADEAAFMAATHATYKLGIQFDGFGCEGQSYIHPFGTYGRPLAGVGFHHFWLRARAEGHAARIDEYSLAVMAAEARRFARPQPDAAQVDSFGYAYQFDATLFGPYLRGIAEPRGVTRTEGRVASVERDAETGDVRALLLADGQRIEGDLFIDCSGFRALLIGDEAWEDWSHWLPCDRAVAVPCRAADAGIEPFTRATAMPAGWRWHIPLRHRVGNGYVYSSAHCSDEEAASALLAAIEGEALAEPRLLRFRAGRRRRSWVGNVVSVGLASGLLEPLESTSIYLIQMAITGLVEHFPGRGIDPIERDAFNREVDYEYDRIRDFLILHYHATERRDSSFWNHVRTMDIPDTLAEKLELWRSAALVPQYRRGLFLEPSWISVLVGQGVLPEGWDVRAELPESGGLAAALRGLHTHIASRVAAMPPHHAALGARAAP

SEQ ID NO: 88030 - protein, 514 aa, Asticcacaulis excentricus
  misc_feature (1)..(514): tr|E8RTY9|E8RTY9_ASTEC Tryptophan halogenase OS=Asticca caulis excentricus (strain ATCC 15261 / DSM 4724 / VKM B-1370 / CB 48) OX=573065 GN=Astex_3326 PE=4 SV=1
MTGKRRLLILGGGTAGWLAAAYLARYFDLNRQPRLELVLVESPEINSVGVGEGTFPTIRQTLKFIGIDEARFMRRTTATFKQGIRFADWVKTPVNGQHSHYFHPFEAPYYTEGEGLVPYWLLQDEATRKPFAEAVTFQKRVAEARRAPKRPHEGDFAGPLNYAYHFDAYQLAEVLAERAVALGVLHKPARLDGVVLDHTGQIDHIVADGEVLRADLYIDCSGFRAELIGKALGSPFRSVRDTLFTNKALACKAPYERPDTPIESYTVATGHSAGWTWDIGLVGQRGIGYTYSTDHTSDDEAEATLHRYVGSKAPLNLREIAFEPGYRERPWIGNCVAVGLAGGFMEPLESTGIVMIEVAVAMIAELFPHAGPIDAPARRFNALMTARYEHIVNFLKLHYALSRRSEAFWRDNADPQTWPDRLRELLDQWRYRPPSRFDFLIDVETFAFFNYQYILYGMGYRTDLSGARDQFPHVEDANRTFAKIHNFGERATLDLPPHRTLIRQIYAEGFAESA

SEQ ID NO: 88031 - protein, 376 aa, Corallococcus sp.
  misc_feature (1)..(376): tr|A0A3A8LN07|A0A3A8LN07_9DELT Tryptophan halogenase OS =Corallococcus sp. CA047B OX=2316729 GN=D7X74_01155 PE= 4 SV=1
MSDAHCDVAVLGGGPAGAGVALALRAQARLSVTLVERAPQAASRIGETLPPDARLPLAKLGVWGGFLRDGHLPSRGTASSWGSATVGYHDTLMSPWGSAWHLDRARFDASLRAHVVERGGTVKVGTTLVGCEALGEEGFRLHLSHPAEGPSTLSARFVVDATGWKADFATSQGARRQVVDRCFALYGDFRLREGAAFSTQALVEARPEGWWYSALLPGGRVVVALMGDGESLRGVRPSAPEAWLSLLGRTTATRERLDACDFTGEPLRAVPATVGLLDRPHARHWLAVGDAACTFDSLSSQGISKALGSALLAAEALEQHLRGVPDALDAYAARVRQGFVEHLRTRDFYYREERRWPDAPFWRNRREALASGALAA

SEQ ID NO: 88032 - protein, 513 aa, Asticcacaulis excentricus
  misc_feature (1)..(513): tr|E8RTX2|E8RTX2_ASTEC Tryptophan halogenase OS=Asticca caulis excentricus (strain ATCC 15261 / DSM 4724 / VKM B-1370 / CB 48) OX=573065 GN=Astex_3309 PE=4 SV=1
MRENPEAIKSICILGGGTAGWMAASALAHKLQSLPVSVTLIESEEIGTVGVGEATLPHIRSFNAALNIDEVTFMKATEATFKLGIEFCNWGRIGDRYIHPFGDYGTPIDGIPFYQYWLRLKQMGEAGRLDTYAYPIAIAEANRFRHPASDPAQIESTFGYAYQFDAGRYAAFLRRFAEGHGVIRREGKVVDCQLNPDNGHVAALTLDNGVVIEADLFVDCSGFRGLLIEQALKTGYDDWSQWLPCNRAVAVPTESRGGLTPFTRATALEAGWQWRIPLQHRTGNGHVYCSSFISDEAAHARLLGNLDAPTLADPRQLYFTTGRRRQFWNRNVVAIGLAAGFLEPLESTSIHLIQEGITELLQIFPDKHFRQSDIDEYNRRMGVNFERVRDFLLLHYVATQRDDTEMWRYFRNMTLPDSLEEKIQAWLTRAHLIRYEFGVFLPPSWVAVMLGQNLIPRHYDPRVDRLSSDEVRRAGDALKHRVSAAAAATPDHGAYIRKMGAASDTGPLLAKGA

SEQ ID NO: 88033 - protein, 501 aa, Chitinophagaceae bacterium
  misc_feature (1)..(501): tr|A0A4Q3TX78|A0A4Q3TX78_9BACT Tryptophan 7-halogenase OS=Chitinophagaceae bacterium OX=1869212 GN=EOO07_10325 PE=4 SV=1
MTTSVKKIVIVGGGTAGWMTAAGLKHHFKNIIDITLIDSSEIATVGVGEATIPTIRNFYRQLGMHDLDVMRATKATAKLGIQFNGWYKKGSSFIHPFGLFGQDLQGIEFHHFWLKLHRKNKAVDLGNYSLGAMLAQHNKFTTPISNPPSSLSVFDWALHFDAALFAAHMQQFSVGLGVHHIDSTILNVNIDDQSGFISSVDVQSGQKISADLFIDCSGFRGLLIEQALQTGYEAWSDWLLCDSAYAVQSKSMGEPNSYTKVTARTAGWQWQIPLQHRHGNGHVFSSRFISDEEACDTLIKNISAELTTSPKKLTFIPGRRKKAWNKNCVAIGLSAGFLEPLESTSIALIQTGIEKIKVLLQNAQFGDAIINEFNETTALEYERVRDFIILHYKATVRDDSEFWRYCKTMSVPDSLRHKMELFKANGHIVNYRWEMFHLPSWLAIFAGFNYLPETYNVLVDTIDEAMLEQSLEKMRGSIINIINDVPTHQEFISNCCAVVDE

SEQ ID NO: 88034 - protein, 504 aa, Massilia sp.
  misc_feature (1)..(504): tr|A0A1M5LLG8|A0A1M5LLG8_9BURK Tryptophan halogenase OS =Massilia sp. CF038 OX=1881045 GN=SAMN05428948_1487 PE= 4 SV=1
MNGQLEDIVIVGGGTAGWMTAAALSRLLPAGHRIRLVESDAISTIGVGEATIPSIRAFNHLLGLDENEFMRQTQATFKLGIEFRNWGGEGDNYIHGFGQIGRDQVLAKFYQYWLKLYQLGEADDLGAYSINTLAPRHGKFMRPPDDMPNSPLADIAYAFHFDAGLYAKFLRGVSEAQGVKRIEGRIVNTELRGGDGFIEAVVMENGEKIKGDLFIDCSGLSGLLIEKTLQTGFEDWSALLPADSAIAVPCVSDGSLAPYTRSTAHRSGWQWRIPLQHRTGNGHVFSSKFMSADEAQAILMANLEGEALAEPRLIRFTTGKRKKAWNRNCVAIGLAGGFMEPLESTSIHMVQTAIMRLIALFPDRSFRQADVDMFNAQSDDEYERIRDFLIMHYHVNRRTDSPFWTYCRDMAVPDSVRERIALYQGHGRIFRKGDELFADASWLQIMHGQGLRAQSYHPLVDQRSKDDIAAFVGAVHKTIAACVEAMPSHAEYVAAMCPAPKMAA

SEQ ID NO: 88035 - protein, 509 aa, Stenotrophomonas rhizophila
  misc_feature (1)..(509): tr|A0A4U3GQ19|A0A4U3GQ19_9GAMM Tryptophan halogenase OS =Stenotrophomonas rhizophila OX=216778 GN=SrhCFBP13529_ 05450 PE=4 SV=1
MNVADTTHGRIRKVVIAGGGTAGWLAGCALSHQFRDQLDITLVESEQIGTVGVGESTVPPIRTFHRFLQIDEQEFLRAVAGTFKLSISFENWRRPGDRFIHPFGTIGQGTWATPFHHFWLDSLRRGMPSDLGDFCLESVASRGDQFSLETQPTLNYAYHFDAGLYARFLRRKAEGHGLRRVEGKIREVRQHAHDGSVAALVLEDGQVIEGDLFIDCTGFRGLLTEQTLHTGYEDWHEWLPSDRAVAVQTEAVAPPVPYTRAIAHEAGWRWHIALQHRVGCGLVFSSRHMSDDEAQAKLLRDVDGPPLRDPWLVPFRSGRRLKAWNKNVVALGLASGFIEPLESTSIHLTISAVVRLIQLFPIDGISPALVALYNDVSRQEMEHVRDFIILHYHATQRDEPMWKACREMALPESLAIRLRAWRERAHAWQDPGELFRVDSWTSVLMGQGIQPGPPHPLAAAINDADLRTLLARIRQPVQQAVATMPSQAAFIERYCKAAADVWPRRSAVA

SEQ ID NO: 88036 - protein, 540 aa, Vibrio mangrovi
  misc_feature (1)..(540): tr|A0A1Y6IR30|A0A1Y6IR30_9VIBR Tryptophan halogenase OS =Vibrio mangrovi OX=474394 GN=VIM7927_01327 PE=4 SV=1
MENRDVIIIGGSKAGACLARQLKLSNPELDITIIERKNQFNSWVGESTLESFWDYMNKDLQLGHYLDSKFIYKHGLRFFFDNNDHSLPVNQMSEVGRSWYHSIPAVQIDRQVFDNDMVTFNREIGVEVRMGESVSDLEIDGEQGHTVITSKGTYKCRYLVDASGFSSPLGKKLGLIEPQDIKYSVSSMWGRFKFTNAIDQLGGTSWHERTNFTTRQLSTNHFMYKNYWFWLIPLDEQTVSIGLTSKDSQPDLGIKNQAAFIEFLQSHQCMKEILGDQFEIQDFQLMKRLSRRATVSFSKDRWFLTGMSSGFLDPMISPGSAYLTDANRMIGEIIQADLANDTTTFEGKIKAYNGYLYRWYESFKRHITGNYHGSYEVHRTNINASLIHWYGSILPKSFAKKYGYTESINSMTQEEIYQQIDKEVMMSGIYRVHQLAQEFEDVIKGHEYRLNQGEFFDIVLKEDQMMHSFTRGKYFNMSCEEIIDHDMLRAVYRNFIYSIHDFNNTQLNASEEKLSHAIECAISDQLSLAETMKLLLKEAA

SEQ ID NO: 88037 - protein, 506 aa, Alteromonas sp.
  misc_feature (1)..(506): tr|A0A3A9USX9|A0A3A9USX9_9ALTE Tryptophan 7-halogenase OS=Alteromonas sp. BL110 OX=1714845 GN=D7031_11795 PE=4 SV=1
MFTPLKKSINRVVIAGGGTAGWLAASLLKKLLGQAIEITLVESEAIGTVGVGEATIPPIRLVNQVLGIDEAQFIHDTKATVKLAIRFENWKTKGESYFHTFGAPGRSMAFCHFHHYWVKARQQGLENDLWDYDLNYLAAEAGKFAQINAKDPVLELPFAYHFDASLYAQYLRKLSEQMGVVRVEGKIARVQRFTDSGYIQALHLESGEVIEGDLFIDCTGFKGLLIEGALGAGYDDWSHLLPCDSALAVPSERHKHTAPYTRSIAHKAGWQWRIPLQHRNGNGHVYSSRYISDDQACDTLLSNLDTKPLADPKLIKFTTGRRRKQWYKNVVAVGLSSGFLEPLESTSIHLIQSAIVRLIQLFPHNGVTKSLIDEYNKQSEVEFEQIRDFLVLHYAVNERTDSAFFNDMRNITLPDSLAHKIELFKENGVLQREQNDLFLESSWLQVLYGQGVMPKDYHGLVNSVPDAQLSQMLTKLLELKREPIAKLPSHDDYINGMVAKYKRSLR

SEQ ID NO: 88038 - protein, 517 aa, Pseudoxanthomonas composti
  misc_feature (1)..(517): tr|A0A4Q1JSM2|A0A4Q1JSM2_9GAMM Tryptophan 7-halogenase OS=Pseudoxanthomonas composti OX=2137479 GN=EPA99_18425 PE=4 SV=1
MERNISHVVIVGGGSAGWLTAGLIAAEHRDRHGPTLRVTLLESPDVPAIGVGEGTWPTMRDTLHRIGVSESDFVRACDATFKQGSRFVGWCDGSANDAYYHPFVLPQGYGETHLVSGWLARDGRVPFAHLASFQPHLCDAGLGPKQFGTPEFAAVANYAYHLDATSLGVFLRTHCVQRLGVQHVVGHMEGVDSHEDGDIAAIRIRDAAVLQGDLFVDCTGMRSLLLGGHYGIPITAVGEVLFNDRALALQVPYTRADAPIASYTRSTAQEAGWIWDIGLSARRGVGHVYASAHTSDDAAEAALRRYIAATGGPAEDSLPAARRIELNPGYRRTAWHRNCVAIGLAAGFVEPLEASSLVLVELAATRLAEEMPATRQDMTLLAERFNDTFAYRWQRVIEFLKLHYVLSRRQGDYWRRHRDPATVPASLQAMLQLWRHQPPSRSDFPRSEEIFPSASWQYILYGMGVRPQPRPARRADDPTAAESWFGEAAAMAQRMLPALPSHRALVEHIKAHGLPRI

SEQ ID NO: 88039 - protein, 512 aa, Unknown; identical to SEQ ID NO: 86406
  misc_feature (1)..(512): tr|A0A061QC63|A0A061QC63_9PROT Flavin-dependent tryptop han halogenase RebH OS=alpha proteobacterium Q-1 OX=149 2281 GN=rebH PE=4 SV=1

SEQ ID NO: 88040 - protein, 494 aa, Rhodanobacter sp.; identical to SEQ ID NO: 83932
  misc_feature (1)..(494): tr|A0A1E4NP26|A0A1E4NP26_9GAMM Tryptophan halogenase OS =Rhodanobacter sp. SCN 66-43 OX=1660135 GN=ABT18_04025 PE=4 SV=1

SEQ ID NO: 88041 - protein, 501 aa, Alteromonas aestuariivivens
  misc_feature (1)..(501): tr|A0A3D8M7W8|A0A3D8M7W8_9ALTE Tryptophan 7-halogenase OS=Alteromonas aestuariivivens OX=1938339 GN=DXV75_1025 0 PE=4 SV=1
MTQQLRKIIILGGGSAGWMTAAALGKILKNQFCEIQLIESQDIGTVGVGEATIPQILLYNDLIGLDENEFLRRTQGTFKLGIQFTDWDEIGSRYYHAFGEVGKNMEGVQFYHYWMKMRAQGKAAPLDEYTLSSLACNEKRFMRSVDAGNSPLSNIAYAFHFDAGLYALYLRELSEKCGVVRTEGKVTEVQQHPDGSIKSLRLADGSVHEADFFIDCSGFRAVLIEQTLQTGFDDWRHWLPCDRALTVASTLNEEPWPFTRAAAQKAGWQWRIPLQHRIGNGHVYCSEFMDEAEARQILLSNLDGKPLNEPRLIRFVTGKRKKFWNKNCLAIGLSSGFMEPLESTSLHLVQMAISKFFSFFPTRQPVGADIDEFNRQMTFEFERIRDFLILHYHVTQRSDAPFWEYCRTMPVPDSLTQKIEQFKASGRVFRFNNEMFSDLSWFEVMYGQGLRPESFHGLTGLFGEDELARRLDGIRNVVRRSADYMPSHQAFINEYCKAPVG

SEQ ID NO: 88042 - protein, 530 aa, Streptomyces sp.
  misc_feature (1)..(530): tr|A0A2N3UXJ6|A0A2N3UXJ6_9ACTN Tryptophan halogenase OS =Streptomyces sp. GP55 OX=1798190 GN=AXZ45_7072 PE=4 SV =1
MSNRINKVVILGGGTAGWMTAAYLGKALQGTVDITVLEAPSIPRIGVGEATVPNLQRAFFDFLGIPEDEWMRECNASFKVAVKFLNWRTPGAGQATARSYQGRPDHFFHPFGLLPSHDNVPLSHYWEYRRLQGETDEPFDYACFTDIAVMDGNLAPRYPDGRKAVNYAWHFDAALVADYLRRFATDKQGVHHLSDEMTEVLKDGRGFITGLRTKAGRLVEGDLFVDCSGFRGLLINQAMAEPFLDMSDHLLCDSAVATAVPHDDEANGVEPYTSSIAMRHGWSWKIPMPGRFGSGYVYSSKFTEQGEATEEFCRMWGLDSDAKFNHIRFRVGRNRRAWVKNCVSVGLASCFLEPLESTGIYFTYAAIHQLAKHFPDRGFDQTLVDRFNREIQEMFDDTRDFLQAHFYLAPRTDSEFWRANKELALPDNIREKIAMFRAGVPINPPATDESNYYGNFDAEFRNFWTNGSYYCIFSGLGLRPDHPLPALTYRPESVQGSQRLFDQVKQRQRELTETLPTNLEYLKQLHGTRP

SEQ ID NO: 88043 - protein, 491 aa, Pseudoxanthomonas composti
  misc_feature (1)..(491): tr|A0A4Q1JY03|A0A4Q1JY03_9GAMM Tryptophan 7-halogenase OS=Pseudoxanthomonas composti OX=2137479 GN=EPA99_04665 PE=4 SV=1
MAAAAFAQVLGPSVAVTLIESEQIGTVGVGEATVPHIRAFNNLLRINEAEFVRKTQGTFKLGIQFVDWERLGKSYVHGFGSKIGQSAGLLAFQNYWFKARQQGWAKPLDAYTINTAAALAGKFMTSATDVPPESPLANIAYAYHFDAGLYARFLRHYSEQRGVTRLEGIVDAVELHPESGNVTTIRLQDGREVGGDLFIDCSGFRGLLIEQALKTGYHDFTHWLPCDRALAVPCEKVGPPTPYTRATARAAGWQWRIPLQHRTGNGYVYSSAHLSDDEAAATLLANLDGKPLGDPRPLRFTTGRRKLCWNRNVVALGLSSGFMEPLESTSIHLIQSGIAKLLELFPRDGFSPVLVQRYNDRLAFEFDRIRDFLVLHYHATERDDTAFWRECRNMTITPELQGNLDLFRDSGRFYRNGEEMFGEISWVQVMVGQGVMPRSYHPLVDQIPEQELRGFLSGVEQTIARCVDAMPGHQAFIDRFCAAAMTPAMRS

SEQ ID NO: 88044 - protein, 498 aa, Flammeovirgaceae bacterium
  misc_feature (1)..(498): tr|A0A2D7NTC7|A0A2D7NTC7_9BACT Tryptophan halogenase OS =Flammeovirgaceae bacterium OX=2026740 GN=CMB82_01075 P E=4 SV=1
MTDYKDRPINRVVIAGGGTAGWMTAAALSRLVGRKLHVTLVESEEIGTVGVGEATIPTLLTMNRLLQIPEPDFIKATSGTFKLGIRFENWLYEGHDYIHSFGDTGKGCWAGGFQHFWNKAQQKGLATEYGAYCTELRAALENKFGILSEHKLNYAYHLDATAYGQYLRRLAEASGTRRIEGQIDRVSLSETTGFIDYLQLKDGQQIAGDLFIDCTGFRALLIEDALKTGFDDWSHWLPCNRAWAVQTEPTDEPVPYTRAIAHDSGWRWRIPLQHRVGNGLVYCNHYLDDNAARERLLSSIDGTPIIEPRPIRFTTGQRKQYWHKNCIALGLSSGFIEPLESTSIHFIQNGIMWLLLMFPDSVMSQASVDEYNNKLRSEAERIRDFIVLHYYANQRTGEPFWDMCRDLPIPDSLSQRVALFKDAGRVFKPQEDVFSENSWVQVMMGQGIMPERYHNIVDSMSTEQLRQFLNDIQSDVERTVAALPNHGAFVDALVAQTK

SEQ ID NO: 88045 - protein, 491 aa, Alteromonas aestuariivivens
  misc_feature (1)..(491): tr|A0A3D8M9Z0|A0A3D8M9Z0_9ALTE Tryptophan 7-halogenase OS=Alteromonas aestuariivivens OX=1938339 GN=DXV75_0736 5 PE=4 SV=1
MQEQHKQKVVIAGGGTAGWMAAAALARTIGKTLDITLIESSDIGTVGVGEATIPTLVFFHKLLKVSEQEFMAATHATFKLGIQFENWRDVGEDYLHAFGVTGKDCWAAGFQHFWLKGLEKGFSQGFGDYCLERVAAEAGKFAHLPNNGLNYAYHIDASKYAQFLRQLSEKEGVKRIDAKIQHVNTRAKDGFIDHLVLDNGEKIAGDMFLDCTGFRGLLIEQALHTGYEDWSHWLPCDSAVAVQTEATGSPAPFTRSIAHESGWQWRIPLQHRVGNGLVYCSRYLKDEDAVTRLLDRIDGQPLNDPKVIHFRTGRRLKQWNKNCVALGLASGFLEPLESTSIHLIQQGIVRLLRMFPGREIQQTDIDEYNRQSDFDIEHIRDFIILHYHVTQRDDSPFWRHCRQMQVPKSLAHRIELFRQTGRVFREGSELFDDSWQQVMIGQGLMPKTYHPIVDAMSDQELQQFLSQILNNIRRTVERLPSHEQYLRQYCS

SEQ ID NO: 88046 - protein, 807 aa, Sulfitobacter delicatus
  misc_feature (1)..(807): tr|A0A1G7M368|A0A1G7M368_9RHOB Tryptophan halogenase OS =Sulfitobacter delicatus OX=218672 GN=SAMN04489759_1024 55 PE=4 SV=1
MREVLIVGGGTAGWITALTLQKFVPEARTGPIKYTVVEPSDIGRIGVGEATIPSLKQTLARLGLSERKLLRRTGATFKHGIRFTDWRKGPDGGGDVYFHPFERNVSGKFERFSPYHPAKSTQAVFDVAVSEIATLVGSQQLPDIFSRFQGVQTDLCDRMLPPKTADMPEYDGVVQYAYHLDAEALGDWLKEEGIARGISVIDAAVVDVERTENGNIAQVLTRDKTWIKADFFVDCTGFRSVLMRGALEAEFKDYGRHLLCDRAVAARLPSRNQEPRPFTTASARRHGWTWDLDLSHRRGMGYVYSSGHISDDEAEAFLRAASGQGDAPLEVRQLKMETGRLQQFWIGNCAAVGLASGFLEPLESTGIGLIEIGAYQLASTLIFGDNGAAAREYSRRMRNVFDDAADFVVLHYILSERRDTDFWVEATADARLTDGLRDKLEQWQFREPNAEDDGSLPRIFGFESVRSVLYGMGRRPNLPRAQSIEAAQALKRLVRQGVGRAVSQLPRHSEVLADLVQEIAAPEHSSMVPSSEEVVAAGPGDGKTPIKFRPNDIERVSISKGSMSPSKEKREDYQAEALVPAGPWRELTSAEKDALAAPKDAPMGQLIDVLRFPAKSIVEEMRNLFSRPGANAIDLPSTAEYRTLLERLTAELAPYCTGEMRCLGVITHPPNMETVTRQGPAEPLIGLHVDSWSRTMLGERQSVPNRLCINIGSKPRYLLLAPITIDEMALETGLAEKELQRMNPTDVGRLYLRQRPQAPILRIRIEPGEAYIAPTENVVHDGASTGATDVSLTFLGRFRSIPTPQPA

SEQ ID NO: 88047 - protein, 524 aa, Novosphingobium resinovorum
  misc_feature (1)..(524): tr|A0A1D7ZZR7|A0A1D7ZZR7_9SPHN Tryptophan halogenase OS =Novosphingobium resinovorum OX=158500 GN=BES08_00125 P E=4 SV=1
MTIDNPPSGRVVIPRVVILGGGTAGWLAAAYLSRTLGMTGITLVESSEIGIIGVGEGTFPTIRSTLAGLGISEAEFLVRADATFKQGVLFEGWATGTDSYFHPFNMPIGGEDEALLPHWLADTSPQRAAWADAATVQEQVIRAGRAPKRPEDPDFSGPMNYAYHFDAARFADYLRDISIAAGVVRIEGTVGNVQRKADGDIAALELTDGRIVEGDFFLDCSGFRALLIGQTLGADFTSCSDSLFNDRALAMQVPYDRPDAPVRPYTLATAHEAGWTWDIGLTERRGIGYVYSSRHCSDDEAEATLRRYVGPQGAALNPRQLRFETGYRQQQWIGNCVAVGLSAGFFEPLESTGIMLIEAALRMVGDFLGPDLLAGADHDARDAAARSFNRLMSARFERIVHFLKLHYCITRRTDTAYWRDNADPATIPEPLRDMLAQWRRRPPSRFDFVVDLETFLPPSYHYILYGMGFETTLAGARYPGAAQAREVFARVRAAHAGARGGLPDHRALLNHYHARTGVPSSKVS

SEQ ID NO: 88048 - protein, 495 aa, Cellvibrionales bacterium; identical to SEQ ID NO: 84406
  misc_feature (1)..(495): tr|A0A1Z8MW44|A0A1Z8MW44_9GAMM Tryptophan halogenase OS =Cellvibrionales bacterium TMED21 OX=1986745 GN=CBB81_0 6760 PE=4 SV=1

SEQ ID NO: 88049 - protein, 514 aa, Alteromonas aestuariivivens
  misc_feature (1)..(514): tr|A0A3D8MDT4|A0A3D8MDT4_9ALTE Tryptophan 7-halogenase OS=Alteromonas aestuariivivens OX=1938339 GN=DXV75_0070 0 PE=4 SV=1
MGNSVKHIVIVGGGTAGWLTACLLAAKHRGVKSAPQEMKITLIESDTVAPIGVGEGTWPTMRATLARIGISEQQLFSRANAAFKQASKFVDWHRNASGDSYYHPFSAPQGSARIDITPYWLSGYATGSYADDVCFQPHICELGLGPRPLQDNNGQSANYGYHLDAGLFVQLLRDHAVTQLGVQHIVDDVNHVVMSDNQGIEAVHTSKHGPISGQLFVDCSGFKGLLIGEALNVELQDCSDTLFADCALVCQQPYSDPHQPIKCYTQSTAQSAGWIWDIGLQNRRGVGHVFSTHYLSTDQATAQLLNYLGDETGNTSVREIRFSTGYRKRFWHKNCVAIGLSAGFLEPLEASALMLIERSATLLTDQLPATIQVMNKVARRFNQILEYQWQQTIAFLKLHYVLSNRDEAFWRANRNEDTIPAPLLDLLDEWRYRPPLDSDFSHVAEVFPAQSYRYILYGMQASTDPTFLARTLQDTEQAQRQFSLNRVLSEQLSRNLPSHRTLIEFITKNNNKNM

SEQ ID NO: 88050 - protein, 501 aa, Sphingomonas sp.
  misc_feature (1)..(501): tr|A0A1H7D0C7|A0A1H7D0C7_9SPHN Tryptophan halogenase OS =Sphingomonas sp. OV641 OX=1881068 GN=SAMN05428950_1056 5 PE=4 SV=1
MEAPDRVRRVVILGGGTAGWMTAAALSRSLGPGVAITLLESDAIGTVGVGEATIPTIHWFNELVGIDEAAFLRVTQATFKLGIEFVDWTAPGHRYFHPFGQFGAALPGVAFHHRWLKAQAEGLDVPLSALSLAAALAAQGRFAKPAGDARSILSTLGYAYHFDAGLYAAYLRRLSEGAGVTRIEGTLHHVERDAATGFVTALTTERGERIEGELFIDCSGFRALLIAGEMGEGYEDWSHWLPCDRAVAVPCARVAPTTPYTRSTARAAGWQWRIPLQHRTGNGYVYASAYLSDDAAAATLLGSLDGEPLAEPRFLRFTAGTRRRPWRGNVVAIGLSSGFLEPLESTSIHLIQSGIAKLLTLFPNRDFDPALSDRFNAVFARDMDGIKDFLILHYHATSGRDDPLWRHCRTMPLPDSLRAREEQYRRSGRIILESDELFREASWLAVLNGQGIVAGGYNPLADAIDGATNRAQVRQIAEVVARAAPTLPMHDAALAAILAAA

SEQ ID NO: 88051 - protein, 511 aa, Thiotrichales bacterium; identical to SEQ ID NO: 87865
  misc_feature (1)..(511): tr|A0A2D7KQD0|A0A2D7KQD0_9GAMM Tryptophan halogenase OS =Thiotrichales bacterium OX=2026796 GN=CMO22_08425 PE=4 SV=1
  misc_feature (30)..(30): Xaa can be any naturally occurring amino acid
  misc_feature (33)..(33): Xaa can be any naturally occurring amino acid
  misc_feature (42)..(42): Xaa can be any naturally occurring amino acid
  misc_feature (177)..(177): Xaa can be any naturally occurring amino acid

SEQ ID NO: 88052 - protein, 526 aa, Novosphingobium sp.
  misc_feature (1)..(526): tr|A0A4R3TAX9|A0A4R3TAX9_9SPHN Tryptophan halogenase OS =Novosphingobium sp. PhB57 OX=2485107 GN=EDF58_104403 P E=4 SV=1
MRAEAKQVLIVGGGTAGWLTAGYLARTLGADLPGGARITLVESPEIGIIGVGEGTFPTIRRTLARIGVPEKELLRRCEATFKQGVKFVDWLHPAGQGTQANYLHGFQEADDRKGGPEYLPYWLLGEAGDTPWDEASTPQKRTVDALRGPKLASHPEYAGVMNYAFHFDAGALAELLRDQSVANGVRHISDTVVDVFCTEEGAISGVLTQNHGVQEADLYIDCTGFRAELIGKALGQKWKSCTDVLFCDSAIAAQVPYGAPDTPIQSATLSTARDAGWIWDIGLQTRRGTGYVYSSAHCEPEEAERTLRSYLGAQGEAVTTRRLRFDAGYREVNWHKNCVAVGLSSGFFEPLEATGIVFSEIAAGAIANLFPWAGDYETSARQFNAIMLQRYERARDFLKLHYSLTRRVDSDFWIDNVRQETIPDSLLELLDRWRHRPPNEKDFNPNIDVFPATSWQCVLYGMGWKTDLSAQAGVMRLRAEAREAFEQVRRQSGFAVENLPDNRALLRQMLAEPAGSTVQAFAGAAG

SEQ ID NO: 88053 - protein, 506 aa, Massilia sp.
  misc_feature (1)..(506): tr|A0A1M5LLE2|A0A1M5LLE2_9BURK Tryptophan halogenase OS =Massilia sp. CF038 OX=1881045 GN=SAMN05428948_1482 PE= 4 SV=1
MEDKKVRKIVIVGGGTAGWMAASALSQLLPAGHSYQLIESDQISTIGVGEATIPSIRNFNLHLGIDENDFIRATQGTFKLGIEFVNWGKKGDNYIHGFGSVGRDQPTANFYQYWLKMNQMGHAPTMEPFSINTVAARMGRFSRGRPDLPNSPLSDLSYAFHFDAGLYARYLRTYSEARGVQRIEGKIVGTVLREGDGFIEAVVMENGQRIEADFFIDCSGLVGLLIEQALHTGYEDWSHWLPCDRAIAVPCETAGSMQALTRSTAHSAGWQWRIPLQHRTGNGHVFSSRFMEPAEAEKILMNNLEGKPLAEPRLLKFVTGKRKQTWNKNCVAIGLSGGFMEPLESTSIHMVKTALMRLITFFPDCGFDQVDIDTFNRLCDNEYAQIRDFLICHYKVNARDDSDFWRYVQEMEVPAALQRKLDLFASHGRILRENEELFPEDSWLQVMHGQGMRPRSYNPVVDQRSPEEIADFLHNTAAVIRKCVDAMPGHLDFIRANCQAPVKKAA

SEQ ID NO: 88054 - protein, 510 aa, Alteromonas sp.
  misc_feature (1)..(510): tr|A0A3A9UN47|A0A3A9UN47_9ALTE Tryptophan 7-halogenase OS=Alteromonas sp. BL110 OX=1714845 GN=D7031_02515 PE=4 SV=1
MNHSSYRSQKQRLVIVGGGTAGWLTAAIVAAKHKVAMGECGLDITLVESSDIPTVGVGEGTWPTMRNTLKDIGLSEKEVFRRCSAAFKQGGKFVNWVNGDGDFYYHPFTVPLGYGRVEMAPYVGDIANFANATNFQQHVCERNMAPRTLSEQEYSSAQSNYAYHLDAGAFADMLRDFSKTELGVKHIVATVESVAATSNEHIESVTLNNGMVLHADLFVDCSGFRSLLLGETLGESVVSTDDVLFNNSALALHVPHEEDFEIKPYTQATAQEAGWIWDIGLSSRRGVGHVYSTDFTTDERAEEVLRQYVGDEQGDLKARTIRFNSGYKKRIWKGNCIGVGLSAGFVEPLEATALMLIEISARYIAEQMPLPATAMPIVSQRFNKQMNYRWQRIIDFLKLHYIFNQRSEPYWVANRDASSIPDSLKEDLEIWKYRGPQIADFSAAIELFPAASYQYVLYGMGFSPDFSLQSHFYNERDLADKVIQQNQLITQQKLSSLPNHRDYIEQWLAS

SEQ ID NO: 88055 - protein, 507 aa, Croceicoccus sp.
  misc_feature (1)..(507): tr|A0A2D6EIT7|A0A2D6EIT7_9SPHN Tryptophan halogenase OS =Croceicoccus sp. OX=1927144 GN=CL820_00600 PE=4 SV=1
MSNSSLRPVRVVVLGGGTAGWMAAAALARLLPGRASVDLVESEDIGIVGVGEATLPHIRGFVERLGIDEAAFIKATHATYKLGIDFRDFGQIGESYIHPFGSFGEPAADVGFHHWWLELQRQGLAGELGDYSLAVRAAQANRFRPPSHDDSLSSTYGYAYQFDATLFGPFMRDFAVGLGVTRHEGLVTSVERDGESGDVRALVLKDGRRIEGDLFIDCSGFRSLLLGGELGAEWEDWTHWLPCDRAAAMPCTHETTQLRPYTTATAMPAGWRWAIPLQHRMGNGYVFSSAHLSEDEACEAIRAAADGKPLDDPRILRFRPGRRRQSWSHNVVAIGLASGFLEPLESTSIYLAQMAITNLVELFPQGGQIDPRDRSEFNRQVDIEYDRIRDFLILHYNATRRDDSEFWNHVRTMTVPDSLAGKMELWRRTGQVESYADGLFFDQSWIAVYLGQGYFPEKHDTRVAQVDPAKVKMALDRLRQAIDAEVATMPAHDEYLRRESARLADAA

SEQ ID NO: 88056 - protein, 517 aa, Novosphingobium sp.
  misc_feature (1)..(517): tr|A0A4R3T2R1|A0A4R3T2R1_9SPHN Tryptophan halogenase OS =Novosphingobium sp. PhB57 OX=2485107 GN=EDF58_10750 PE =4 SV=1
MTTDYPSSGRVVILGGGTAGWLAAAYLSRTLKLPNVTLVESSEIGIIGVGEGTFPTIRTTLAGLGISEAEFLVRADATFKQGVLFDGWATGTDSYFHPFNLPVGGEDEALLPHWIADDSGQRLPWADAVTVQEQVIRAGRGPKRVEDPDFSGPMNYAYHFDAARFADYLRDISVAAGVDRIEGTVATVERADDGDIAALVLADGRRVEGDFFLDCSGFRSLLIGQTLGAGFTSCAGSLFNDRALAMQVPYAEPGAPVRPYTLATAHEAGWTWDIGLSERRGIGYVYSSRHCSDEEAEATLRRYVGNEGDSLTPRQLRFETGYRETQWIGNCVAVGLSAGFFEPLESTGIMLIEAALKMIGEFLVPGGRAARDAAARSFNRLMAARFERIVHFLKLHYCITRRTDTAYWRDNADPASIPEALQDMLAQWRHRPPSRFDFVVDLETFLPPSYHYILYGMGFETSLSGGAARYPGGAAARDVFSRVRSAHAGARGALPDHRALLDHYHARSAPQPIKVFR

SEQ ID NO: 88057 - protein, 478 aa, Croceicoccus sp.
  misc_feature (1)..(478): tr|A0A2D8D151|A0A2D8D151_9SPHN Tryptophan halogenase OS =Croceicoccus sp. OX=1927144 GN=CL820_00610 PE=4 SV=1
MALARQLGRLVDVTLVESDEIATVGVGEATIPTARTFHEFLRVDERAFVEATGATFKLGIQFEGWARPDDSYFHSFGTFPLRNWVADFQHFWLEGQEEGIDAPIGSYCLEHEAALAGRFATGGAPPLSYAYHLDAGRYAAFLRAVAERDGARRIEGKIAQVRRDPQTGDITALQLEDGRSVEGDLFIDCTGFRALLIGQALESGYDDWSEWLPTDGAWAVQTDLQDPPPPFTRAIAHEAGWQWRIPLQHRGGNGIVFAGDFLDPDNARETLEATITGTPRGEPRLIRYKTGKRREMWRANCIALGLSSGFVEPLESTSIHLIMIGVTRLIQMFPFAGSTPALRDRWNEMADDELERVRDFIILHYKLTERTDSAFWRHCRDMAIPDSLQHRIDSFAADAQAWQAPGDLFRAESWLQVMLGQRLMPSSWHRIGALMSHERLKDELARQREAIAARVASLPSHGRFLDRLLARQDTGAGA

SEQ ID NO: 88058 - protein, 502 aa, Alteromonas sp.
  misc_feature (1)..(502): tr|A0A3A9UZK4|A0A3A9UZK4_9ALTE Tryptophan 7-halogenase OS=Alteromonas sp. BL110 OX=1714845 GN=D7031_01780 PE=4 SV=1
MRKPDNAIKKVIIVGGGTAGWMSASALANSLKKNSVDITLVESDQIGTIGVGEASIPHIKTFNRHVGITEKDFMSRTQATFKLGIEFVDWKQKGHQYFHPFGPYGVDMDGVSFHAFWQRLQTCGHSDTLDQYNIMAMAAKQHRFRHPVQQKNTPLSEIGYAYHFDSALYASYLRGIAENKGVRRIEGKVVNTTLRNDNGFLKSITLENGQTLEADLFIDCSGFYGLLIDKVFKVPFVDWSHYLPNNSAWAVGSEKLTSQPPFTRSTAVEAGWQWRIPLQSRTGNGIVYSNVHTDDQSAQDTLLQNIEGKLVGEPRKISFKTGHRAQFWVKNCVAIGLSSGFLEPLESTSIHLIQSGISRLIRLFPDLDFEQIDIDHFNEQSVTEFQQIRDFLICHYKVTERTDSSYWQFCKNMEIPDSLSRKLSLFESRGRIFRENEELFNRYSWLAVMVGQGLTSRGYDANADIYSEQELKKRMSDIKHIIDVNAKSMPEHGAYVENYCKM

SEQ ID NO: 88059 - protein, 501 aa, Caulobacter sp.
  misc_feature (1)..(501): tr|A0A0Q7W6Z9|A0A0Q7W6Z9_9CAUL Tryptophan halogenase OS =Caulobacter sp. Root1472 OX=1736470 GN=ASD47_18970 PE= 4 SV=1
MSDRSIRSIAIVGGGTAGWMAACLLSQTLRGTGCAITLVESPDIGTVGVGEATIPPIFDFLKLIEVDLDAFIPAAQATFKLGIKFDDWRAIGDSYWHPFGTFGVSIDRRPFHHVFHKARVQGLDPTVSQFSLAAALGDAGRLAHPDPRVPGPLAGLRQALHFDAVLVARFLRDHAERRGVRRLEREVAEAKLRDDGFIEALALKGGGELAADLYIDCSGFRGLLIEQALGAGYEDWTRWLPCDRALAAPTAHAGPPPPYTQAVAMDAGWRWRIPLQHRVGNGYVYSSAFIDDGAAQDELLSAIGQPLAEPRKLSFTAGRRKTMWSRNCVALGLASGFLEPLESTSIHLVCSGLYKLLDHFPDRDFASVNIAAYNRALADEYETYRDFILLHYCVTARDDTAFWRDRTAAPLPDRLAERLELYRACGRVDAKPGELFTDLSWFYIFEGMGVTPKAYDPLVDASNFQQVRAVLPELTARIAAVVAQSPTHEAALAAIVRRSAA

SEQ ID NO: 88060 - protein, 517 aa, Novosphingobium sp.
  misc_feature (1)..(517): tr|A0A4R3TA70|A0A4R3TA70_9SPHN Tryptophan halogenase OS =Novosphingobium sp. PhB57 OX=2485107 GN=EDF58_103287 P E=4 SV=1
MTDNAIRSILIVGGGTAGWMTANLLATRLRRLPVQITLVESPDIRTVGVGEATVPAIRDYFRAIGVNEFDVMRATHGTVKLGIEFRDWSRPGTNFFHPFGRYGVDAFSVPFHQFWLKRRIAGDDTPLSAYCLATEAAMRNLVVLPPEQPANDLGVFDWAIHFDAGLFARFLSQRAREELGVAHVEGTIAGVHRGGDDGRIASVTLTGGDTLEADLFIDCSGFRSLLLGQALEVPYDDWTHLLPCDRAVAVPCTHGDALTPYTRSTALSAGWQWRIPLQHRVGNGYVYSSRHISDDEATATLLSRLEGEQLAEPNMLRFRTGHRTRVWEKNCVAIGLAAGFLEPLESTSITLIQSGVERLLAHFPDRDFEPSLADEFNRITSLEYARIRDFLLLHYWGNRRHGEPMWDACRALELPETLASRVRAFAGGGKLPRYEWDSFQPPSWLSMYAGLDILPPRHDPLADQLSAEELGASFAKMREAIGRATALGIPHDEFIAEHCAMQTDIARSAQPAPVSII

SEQ ID NO: 88061 - protein, 206 aa, Chitinophagaceae bacterium
  misc_feature (1)..(206): tr|A0A4Q3TX83|A0A4Q3TX83_9BACT Tryptophan halogenase (F ragment) OS=Chitinophagaceae bacterium OX=1869212 GN=EO O07_10335 PE=4 SV=1
VGKQIDQLDVRHIKYTPGHREKFWIKNCVAVGLAAGFVEPLEASSILLVEIAAYWIAEKLPHQKSGFAKCEKQFNETFSYRWDTIIEFLKLHYCISKRTDTDFWRDNTHPNSIPASLLEKLELWKEQCPSVVDFLSRADVFPFESYCYILYGMNFKTATYAVGDAHLNMLEKKIANQQRNMAALVNSLPKNRQLINKILEHGLQKI

SEQ ID NO: 88062 - protein, 497 aa, Sphingomonas sp.; identical to SEQ ID NO: 83469
  misc_feature (1)..(497): tr|A0A0Q4K329|A0A0Q4K329_9SPHN Tryptophan halogenase OS =Sphingomonas sp. Leaf32 OX=1736214 GN=ASE83_16465 PE=4 SV=1

SEQ ID NO: 88063 - protein, 513 aa, Sphingomonas sp.
  misc_feature (1)..(513): tr|A0A0W1QMD6|A0A0W1QMD6_9SPHN Tryptophan halogenase OS =Sphingomonas sp. WG OX=1592629 GN=ATB93_08090 PE=4 SV= 1
MKRVRNIVIVGGGTAGWLAAGVIAARHQSRMPGGFTVTLVESPNTPIIGVGEGTWPTLRTTLAKIGVSETDFFRECDAAFKQGALFARWTTGAEDDAYYHPLMLPQGFHQLSLVPHWIANAQGRSFCDTVTPQGRICDAGLAPKTIATPEYDGQANYAYHLDAGKFAPFLTRHCTTKLGVRHVLADVRSVEQAENGDIVAIDTEQAGRIEGDLFVDCTGFRSLLLGQTMGVPFKDCGDVLFCDAALAAQVPYPEENAPIATHTLSTAQDSGWIWDIGLPTRRGTGYVYSTRHTSDDQAEATLRAYLGPAGADASVRRIPIRSGHREIFWKNNVVAVGLAAGFLEPLEASAIVLIELSAKLIAEQMPAVREVMDVVAKRFNATTLYRWGRIIDFLKLHYVLTQRTDSAFWRDNLLPETIPERLQELLTLWRYQPPWFHDEFDRVEEVFPPASYQYVLYGMGFRSEVEPESLSSDQRLAERAMRENAAQTERLCAGLPRHRDLIRKIHKHGLQSV

SEQ ID NO: 88064 - protein, 502 aa, Rhodanobacter sp.; identical to SEQ ID NO: 85749
  misc_feature (1)..(502): tr|A0A1E4NN85|A0A1E4NN85_9GAMM Tryptophan halogenase OS =Rhodanobacter sp. SCN 66-43 OX=1660135 GN=ABT18_03790 PE=4 SV=1

SEQ ID NO: 88065 - protein, 511 aa, Massilia sp.
  misc_feature (1)..(511): tr|A0A0Q6WGJ8|A0A0Q6WGJ8_9BURK Tryptophan halogenase OS =Massilia sp. Root351 OX=1736522 GN=ASD15_23270 PE=4 SV =1
MNDRHGRAIRKIVIAGGGTAGWMTAAPLALRLGKACEIVLVESPEIGTVGVGEATLPTIAYYNRALGLDVADFARMTMATFKLGIDFKDWGHLGNRFFHGFGDFGPAIEKRSPYLYWLRLAREFKDMPSYEDWSVATVMGRANRFMEPYGDQPAVTNAFSYAYHFDAGLYAAYLRDYAVQRGVTRIEGMITAVEQHPGTGFITAVKLRDGSRVEGDLFIDCSGFRGLLIEGVYQAGYDDWSAMLPCNSAQAVPCARVEPLTPYTRSTAQSAGWTWRIPLQHRTGNGHVYCNGFTSDEDASRVLLAGLDGRALDDPRQLRFTTGRRLKSWIKNCVAIGLSSGFLEPLESTSINIIENSVGWLLQHFPDRDFRPALADEFNRLVSQRYEFVRDFIVMHYKITKRDDSEFWRYCANMPVPDTLRHQIELFRETGRVAIYDPEGFQVSSHISIMAGLGITPKTHDPLIDLMDLQALRTHFDRVRETIVRAVQAMPDHGAYVSRLAGTPAVPPLAA

SEQ ID NO: 88066 - protein, 529 aa, Sphingomonas elodea
  misc_feature (1)..(529): tr|A0A495EZR1|A0A495EZR1_SPHEL Tryptophan halogenase OS =Sphingomonas elodea OX=179878 GN=C8E52_0923 PE=4 SV=1
MSVSSGIPFFFHGSARVKRVQNIVIVGGGTAGWLTAGVIAARHQSRMPGGFTVTLVESPNTPIIGVGEGTWPTLRTTLAKIGVSETDFFRECDAAFKQGALFARWTTGAEDDAYYHPLMLPQGFHQLSLVPHWITDSKGRSFCDTVTPQGRICDAGLAPKTIATPEYDGQANYAYHLDAGKFAPFLTRHCTTKLGVRHVLADVRSVELAENGDIAAIDTEQAGRIEGDLFVDCTGFRSLLLGEAMGVKFKDCGDVLFCDAALAAQVPYAEENAPIATHTLSTAQDAGWIWDIGLPTRRGTGYVYSTAHTSDDQAEATLRAYLGRAGADVAVRRIPIRSGHREIFWKNNVVAVGLAAGFLEPLEASAIVLIELSAKLIAEQMPAVREVMDVVAKRFNATTLYRWGRIIDFLKLHYVLTKRTDTAFWRDNLLPETIPERLQELLTLWRYQPPWFHDEFDRVEEVFPPASYQYVLYGMGFRSEVEPEALSGDQRLAERAMRENAAQTERLCAGLPRHRDLIRKIHEHGLQPV

SEQ ID NO: 88067 - protein, 502 aa, Sphingomonas sp.; identical to SEQ ID NO: 84313
  misc_feature (1)..(502): tr|A0A0Q4KGA9|A0A0Q4KGA9_9SPHN Tryptophan halogenase OS =Sphingomonas sp. Leaf32 OX=1736214 GN=ASE83_02880 PE=4 SV=1

SEQ ID NO: 88068 - protein, 516 aa, Pseudoalteromonas espejiana
  misc_feature (1)..(516): tr|A0A510XSB6|A0A510XSB6_9GAMM Tryptophan halogenase OS =Pseudoalteromonas espejiana OX=28107 GN=PES01_07400 PE =4 SV=1
MTKPIKKIVILGGGTAGWLSAGLLAAEHPHLSVTLIESANVPILGVGEGTWPSMRNTLQRIGIKEIDFITQCDASFKQGSKFINWRNLNEGENYYHPFMNPQGYEHTNLHASWQRIAPTQKFADVVNMQSFVCQAALAPKQLQTPEYAAVTNYGYHLDAGKFAEFLKKHCVKHLNVTHITNDVTEVINDDKDYIASLKTNNNGNITGDLFLDCSGSRARLIGEHFKSEFIAQDHILFNNSAIAAQSPNSHPTQNIASATLSTAQSNGWIWDIALPTRRGTGYVFSSKYQSDESATDTLKSYIAKSTSEQQAEQLNYRVLKFSPGYRQKFWIKNCVAVGMSAGFLEPLEASALAMVELSISMISEQLPQNRTHMSQLETRFNDRFSTRWERVVEFLKLHYVLSERDDTPYWQNIRDLTTTPERLQNLLKLWQFQPPSRFDFIENEEVFSSSSYQYVLYGMGFNTQTPQAQNAFTSAQAGDYFYQQNREKIAQYLKGLPSNRELLNYLLSNNRQPHND

SEQ ID NO: 88069 - protein, 498 aa, Streptomyces uncialis
  misc_feature (1)..(498): tr|A0A1Q4V953|A0A1Q4V953_9ACTN Tryptophan halogenase OS =Streptomyces uncialis OX=1048205 GN=AB852_16710 PE=4 S V=1
MTASYLSAAFGERISVTVVESARVGTIGVGEATFSTVRHFFEYLGLSEETWMPACNATYKLGIRFENWRAPGHHFYHPFERQRVVDGFTLPDWWLADGGATERFDKECFLVGTLCDTMRSPRHMDGALFEGDLTDRPAGRSTLAEQGTQFPYAYHFDAALLADFLRDYAVARGVLHVVDDVVHVARDERGWISHVATRGSGDLAGDLFVDCTGFRGLLINDALDEPFESYQDTLPNDSAVALRVPVDMEREGLRPCTTSTAQAAGWIWTIPLFGRVGTGYVYARDYCTPEEAERTLRRFVGPAADDLEANHIRMRIGRSRRSWVNNCVAVGLSSGFVEPLESTGIFFIQHAIEQLVKHFPDADWDPALRSAYNTLVNRCMDGVREFLVLHYYGAARADNEYWRDTKTRKIPDSLAERVEQWRTKLPHPESVYPHYHGFEAYSYVCMVLGLGGIPLKPSPALRMLDPSAAQREFRLLATQAEDLRRTLPSQYAYFAQFR

SEQ ID NO: 88070 - protein, 496 aa, Sphingomonas elodea
  misc_feature (1)..(496): tr|A0A495ER10|A0A495ER10_SPHEL Tryptophan halogenase OS =Sphingomonas elodea OX=179878 GN=C8E52_4295 PE=4 SV=1
MDGQKFRVVIAGGGTAGWVAAAALVRHLGQNLDITLVESDAISTVGVGESTIPTAWTFHKLLGINEQVFLRETNATFKLGISFENWLRDSDRYFHPFGSVGRAMPLCDFQHFWLEARRRGFGGDLGDYSLETQAALAEKFATGDPMPLAYAYHLDATAYAAFLRGLAEPAGVRRVEGRIIEVEQAQDGDIAALVLEGGLRIEGDLFIDCTGFRALLIEETLKTGFDDWSHWLPTNRAFAVQSETTEAPVPYTRAIAHGAGWRWRIPLQHRMGNGFVYASDYLSDDEAKAQLLAAVPGRALFDPRLIRFTTGMRKKAWNRNCIALGLSSGFIEPLESTSIHLVMIAVTRLLQNFPFRRDMAALSARFNAQSRAESEHIRDFIILHYKCNDRPEPFWRDHAARAVPDSLAARIALFEEGASTYQEGTDLFRIDSWNAVMLGQGVRPRDHHHMPAQIPSEDLERALGDLRAGIAAQLAKLPGHAEFIARYAAAKVPAAA

SEQ ID NO: 88071 - protein, 506 aa, Brevundimonas sp.
  misc_feature (1)..(506): tr|A0A0P0DK51|A0A0P0DK51_9CAUL Tryptophan halogenase OS =Brevundimonas sp. DS20 OX=1532555 GN=JL11_06745 PE=4 S V=1
MDDPRIRSVVIVGGGTAGWMTAAALVQHFRSTPLKITVVESSDIGTIGVGEATIPTIRRFYGQLGLHDEDVMRATQATCKLGIRFIDWSGPGSDFIHPFGLYGQDVKGIGFHHYWLKQKRAGDPAPLAAYSLGASLAAGGKFIQPSPNPPSQLSVFDWALHLDAGLFAQHLRAYAEAGGCARIDARIRSVELRPEDGFVRALTLDDGREVEGDLFVDCSGFKGLVIGEALGVGFEDWSRWLPCDAAYAVQSQNRPDDAPAPFTCVTARSAGWQWGIPLRHRAGNGLVFSSAHLSDDQALAELMPHLLGDALTEPRRIPFRPGRRSQAWAKNCVAIGLSSGFLEPLESTSIALIETGIERLKALFPDRRFAQPILDEFNDQTAREMERVRDFIILHYKLNRRTDTDFWRDCREMAVPETLERKLALWTARGQFVRYRWEMFHPASWLAIYDGFGLYPDHYDPAVDAMDPAYLARSLSEMRTNIADFVARTPDHAQFLAGLDPAASAA

SEQ ID NO: 88072 - protein, 502 aa, Pseudoalteromonas rubra
  misc_feature (1)..(502): tr|A0A4Q7EJ07|A0A4Q7EJ07_9GAMM Tryptophan halogenase OS =Pseudoalteromonas rubra OX=43658 GN=C3B51_07255 PE=4 S V=1
MKKKRIVILGGGTAGWMAANLMAKSWQDQPIEIALVESPDIGIIGVGEGSTPQFKGFMDFMGISEAQWMPACNATYKNGIRFIDWSTRPGFSSYFHPFPSQPDDYSAPAFFHNSFVRRKAIDVAGHPDPFFLTTYLAEQAKAPIAAHHFPFEINYGYHFDAGKLGLFLAQTARDLGVEHIQANVSDVRKHPDGDIAALICEAGMEVTGDVFIDCSGFRSLLMQQHLKVGFDSFANNLFNDAAVVLPTEQGEVISSETQSIARKFGWSWHIPLTNRIGNGYVYSRRYCDADKAETELRTALGLLDSEVEARHLTMKVGQVKKHWHKNCLAIGLSQGFIEPLEATALHIVQETVQSFIECYQEGEFTDKLKARHNQSLDARYQAIRDYIVAHYRVNSRTDTQYWRDNANNNQLSRSLYDVLQTWVSGKNLSDELHRQDIDKYYPSVSWHCLLAGYGIYPEQSQLIAGNEEANKYDLSQVQDYIARCGLNFEDHRAQLERLARMR

SEQ ID NO: 88073 - protein, 508 aa, Colwellia marinimaniae
  misc_feature (1)..(508): tr|A0A1Z5I1H1|A0A1Z5I1H1_9GAMM Tryptophan halogenase OS =Colwellia marinimaniae OX=1513592 GN=MTCD1_01023 PE=4 SV=1
MQQEQAKQQNKINNIVIVGGGTAGWMTAATLAKILGKNYCAIRLIESDQIGSVSVGEATIPQISLFNKILGIDENDFVKKTSATFKLGIEFIDWTKNGGAYMHPFGEHGTNMDAIQFHHYWLKMHQQGKSPDLEEYSLAAVAARQGKFIRPQNMGNSPLSKINYAFHFDATLYADYLRDYAIERGVNRTEAKVVDVSLRDSDGFIDSLLLEDGERVTADLFIDCSGFKALLIEGALKTGFDDWSDVLPCNRAVAIPCLAKETEVLHPFTQAKAQKAGWIWRIPLQHRVGNGYVYPSKFVSDEAAVKILIAQMEGEPIGEPNFLRWTTGVRKKAWHKNCIAIGLSAGFVEPLESTGLHLIQSSIAKLMALFPHQGFNQIDIDTFNAQSKTELEYIRDFIVLHYKATDRDDSEFWRDCQKLQVSERLQAKMALYQANGRIYRQDNELFNETSWLAVMHGQGLTPSGYHPLVDALPEDEIERRLKHIHSVIQKSVATMPMQKDFIAKYCKA

SEQ ID NO: 88074 - protein, 519 aa, Escarpia laminata
  misc_feature (1)..(519): tr|A0A497THG1|A0A497THG1_9BACT Tryptophan 7-halogenase OS=bacterium endosymbiont of Escarpia laminata OX=12216 01 GN=DJ031_13870 PE=4 SV=1
MLNKSGDREMNERIDDITIVGGGAAGWLMGLFLTTMLNKGESKVKVTLIESPNIPTIGVGEGTVTGFPRMLQQLGIKESEFLRKSDATFKCAGKFVGWNLDAQGKPITFYNPFNVGGYVGGFETGYYYQKYGNAPGASSFVDSIMPTQMVVENRLGPKLIGAKDYESPVPYTYHLHAHDFSKQIANIAKKRGVVHILDEMVDAEQDENGYITALNLKEKGRVPVKLVIDCTGFSGRILQQVLKEPYNEFGNHLLCDRAIPIPHPHEDPKRLTPCTTATAMKAGWTFDVPLYSRMGTGYVYSSRFISDDEALDELIRHIGDESLRERTPPVIKMRVGRVRNTWVKNVIATGLSAGFVEPLEASAIYTIEMTARMLLTYYPEQGIEQKTVDRFNEVMNRMYNEILSFIVMTYYTSNRTEPFWVAAREDIDLPDRLRENLEMWQSFMPSPHDVEGKFLFSHWNYIYVLLGKGYFEGRHFPAERFLVKSDWTRFSNHIAEVKRQLKQKLPSHYDLLKAIRSGR

SEQ ID NO: 88075 - protein, 508 aa, Colwellia marinimaniae
  misc_feature (1)..(508): tr|A0A1Z5I1F1|A0A1Z5I1F1_9GAMM Tryptophan halogenase OS =Colwellia marinimaniae OX=1513592 GN=MTCD1_01209 PE=4 SV=1
MSSTDKINNIVIVGGGSAGWMTAAMLSKQLECNAKGSKVNITLVESDNIGTVGVGEATIPPIKTFNRMLGIDENDFLKHCNGSIKLGISFENWPKKNHQYFHPFGRFAVDFDYIPFSYFWNKHRASGDNKPLHDYASAWHLAKNNKFSPPSPDKKSLFSGFDYAYHFDASLYANYLRSYSEKRGVKRQEGKITKVDTHESNGFISSVTLASGQNIAGDFFIDCSGTTALLINKTLGIKFIDWSENLLCNRAIAVQTCHTKVISPYTRSIAKQSGWQWRIPLQTRMGNGSVHCSEFIDEQSAMDELISDIDGEILSEPRVIHFNVGRREKFWHKNCVAIGLSAGFLEPLESTSLHLIQRAVMRLIAHFPNKKCDEVNTKQFNNLTVTEYEHIRNFIILHYKATKRDDSEFWRYCQHMDIPDSLQHQIDLFSSHGHLNVDANDLFKQDNWLAVLTGQNIHPTTVAPIMAYKQKIDLPRTMNSFYDIMTKTVQKLPNHEDYLKEKCPFLIK

SEQ ID NO: 88076 - protein, 501 aa, Brevundimonas sp.
  misc_feature (1)..(501): tr|A0A0P0CZL0|A0A0P0CZL0_9CAUL Tryptophan halogenase OS =Brevundimonas sp. DS20 OX=1532555 GN=JL11_08895 PE=4 S V=1
MRQLKKILIVGGGSAGWMAAALFSRLFRGLYDITLIESEAIGTVGVGEATIPAIKTFNALIGLDEVDFMRRTQASFKLGIQFIDWDRIGSSYIHGFGVIGRDLEWLRCHQYWLKMRAAGRASDFAAYSINTAAALQNRFMRADPQRNGSPLGHIAHAFHFDAGLYAKYLRGLSEAAGVRRREGKIASVQLRPDDGFVQSVTMEDGAVEAADLFIDCSGFRGLIIEEAMKTGYEDWTHWLPCDRALAVPCARTEPFTPYTRATARPAGWQWRIPLQHRTGNGHVYSSRYMDEAEAERILLSNLDGDQLAEPNRIRFVAGKRRQVWNKNCVAAGLASGFLEPLESTSLHLIQSVLTRLVRLMPDGGFDPTTIAEFNRQMDFEYERIRDFVILHYKATYRDDTPFWRDCRDMAVPDTLQRKMDLFRANGRVFREDDELFTEESWIQVFLGQGVIPAGYDPLVDVTPEAEIERFLNDVETVIGKCVAVMPSHADYVARVCSAVAA

SEQ ID NO: 88077 - protein, 524 aa, Verrucomicrobiales bacterium
  misc_feature (1)..(524): tr|A0A2D5MRW3|A0A2D5MRW3_9BACT Uncharacterized protein OS=Verrucomicrobiales bacterium OX=2026801 GN=CMO44_121 15 PE=4 SV=1
MKIKSIMVVGGGSSGWMTAAALSKKFGKDIKISVLEGENSNPVGVGESTITKFNAYLNLLELEDKEWMPHCNATYKTSIRFTNFRDGKGEVFEYPFAGAHTEESFGKWSIVRAKYKLGPDSFCEFLNDAYWLAKHNRMTDGSNFDMSFSLKNDTAYHFDASLFGKFLKTKFCKKANHYIDDVVTVKKDDDGYITSLVGNSGTEYSADLYVDCTGFKSLLLEKEMGSEFISFKPWLDNNRAIATHLSYKDKTTEISNVTNCTALSSGWSWNIPLWNRMGSGYVYSSDFISDDDAEKEFKQHVGNEDIEIRKINIRHGVRKRGWVKNVVGVGLAFGFIEPLESTGLVSTHEMIDQLVETLDRRECNITGFDRDSYNYTCQLLVSGYMHFVSLHYKLSQRSDTPYWKYQTELKDWFELSDPRLFSDKKMHCSYENGSTSFYENVHQMHSLAHRWDPEKHGIAYIMAGMGHVPYADHLYDYLRNGSEDNFEHDIDKIYQEYQKYAKLMEENILKLPTSYEFLKENIYS

SEQ ID NO: 88078 - protein, 511 aa, Sphingomonas elodea
  misc_feature (1)..(511): tr|A0A495F818|A0A495F818_SPHEL Flavin-dependent dehydro genase OS=Sphingomonas elodea OX=179878 GN=C8E52_3978 P E=4 SV=1
MSRHIQSVCIVGGGSAGWLTAALIAARHGPDLQVTLVESVRLGIIGVGEGTWPTMRNTLRKIGISETDFLRTCKASFKQGAKFAGWRTGAADDFYYHPLVLPEGFPTVDLAPFWNAQAADAGTPSFSDAVCFQEFLCEHHLAPKQITSPEYGGVANYAYHLDAVRLGEMLREHCVGKLGVRHVDDDIVEVEQAENGDVTAVIGQRHGGIAADLFVDCSGFSSLLLGQTLGVPFIDCSDVLFIDRALAVQVPYETDDAPIVSHTVSTAQDHGWIWDIGLQNRRGVGYVYSSRHAGADRVAEALAAYVGPAFADLTPREITIRSGHRETFWKNNVVAVGLAAGFLEPLEASALVLIELSADYIASAMPATRSAMDIVARRFNDMTRYRWDRIIEFLKLHYMLSEREDTAFWRDNRDPATIPQPLQDLLELWRHTPPGEHDFASAHEMFPAASYQYVLYGMGFRTAPRAHALAARHAAEDAFERVAAMKQRLGAAMPTNRALLDKLAQYRFQPV

SEQ ID NO: 88079 - protein, 519 aa, Colwellia marinimaniae
  misc_feature (1)..(519): tr|A0A1Z5I1P5|A0A1Z5I1P5_9GAMM Tryptophan halogenase OS =Colwellia marinimaniae OX=1513592 GN=MTCD1_01032 PE=4 SV=1
MSKVIKNIVIVGGGTAGWLTAGVIAAEHNSKSASGLQVTLIESPEVNTVGVGEGTWPTMRETLDKIGISETELFRECEASFKQGAKFSKWVTGAEDDYYYHPLVLPQGYTKTDLVFPWQKHRGEISFADAVSYQGYLCEQGRAPKLISTPEYAGIANYAYHLNAVKLAQLLQKHCIEKLGVKHVVDHVTAINSADNGDIASVATKEHGDIAGDLFIDCSGFSSILLGKHFDVPFISKKHILFNDTALAVQVPYPDENSAIASHTISTAQSSGWIWDIGLPSRRGVGYVYSSEHTNDKDAESELRAYIESSIGKAETDKLKVRKISFNPGHREKFWHKNCVAIGMASGFLEPLEASALVLVELAAAKISREMPATRETMDIVAKRYNKQFLYRWQRIIEFLKLHYILTKRTDSAYWRDNCNAETIPESLQELLTLWKHQPPGPQDFHHVEEVFPSSSWQYVLYGMGFETQENEVSRKFVNEEMAHQFFSENVQLTKKYLSALPSNRELIDKIKQYGLQKI

SEQ ID NO: 88080 - protein, 606 aa, Nostoc sp.
  misc_feature (1)..(606): tr|A0A235HTP2|A0A235HTP2_9NOSO Tryptophan halogenase OS =Nostoc sp. 'Peltigera membranacea cyanobiont' 213 OX=2 014530 GN=CDG77_19810 PE=4 SV=1
MSVNNTTQSQAYDVVIMGAGIAGVCQARHLLLNIPNIKIALIDPRPEERTEKDLKIGESTVEVSTLFFGKELGLYDYLIENHPPKFGLNYHWPKDPKNTQTIDDYYHVWSIKQPPLASVLMNRAKFERDVLKMNKEMGVDFYNGRVVNVDLGSGDIPNNVKVKVGNDYLELTTKHLIDAAGRKFIIGQKTDNLLFGPEKLAGLNNGSAWVRVKNVDRTIFHSGYDPTGATCSHYYATNHMMGHGHWIWVIPTDTQTMELSVGVSHHHEVIPAQSVNTKEKFYAFLESNHNILYQLVKSGEDIDFHYLPRVAHKSKTLFSPDNWYVIGDAAAIFDPFYSLGMVMMTFQMESVTEIIRAKLAGEPDAEKKRAVYNAYNLGYVESCNHLLHDHAKQLGHASIMSWRVYLENMWWFGMIVPLYVGKWHLDLKFLRRFSQQSRQVIRTLMSHVYEQFNELIEKDANIGMMYVHRGQQLPFGYYMTQEFDSYLQNTKYEAQRCNVFAYMKNIYFFVALWYLKFLWKGFGLKGVLSPRNLKHVFALLNASAQSSWDDLIYRRKTKGMAANSEIARVTEEFKSYRHQPELEPWIKSKSAESQKLQEQELVTSEL

SEQ ID NO: 88081 - protein, 506 aa, Caulobacter sp.
  misc_feature (1)..(506): tr|A0A258ILB9|A0A258ILB9_9CAUL Tryptophan halogenase OS =Caulobacter sp. 32-67-35 OX=1970330 GN=B7Y81_14210 PE= 4 SV=1
MDKRDLAIRRIVIVGGGTAGWMTAAGLSAVLGDSAVSIELVESAEIGTVGVGEATVPHIRNFNAKLGLDEADFMRKTQATYKLGIEFRDWGKKGESYIHPFGAFGQAIGGVAFHQHWLRARARGQADDIQAYSLPIVAARLNRFAPPSSDQRSLGSTFSYAYQFDAGLYAQYLRAYSEARGVTRTEGKIQDVALRGEDGFVEAVTLESGQRIEADLFIDCSGFRGLLIEQALKTGYEDWTQWLPCDRAAAVPCDSIEPPTPYTRATSDEAGWRWRIPLQHRVGNGYVYCSSYISDDEAARVLVSKLDGKAQADPRFLRFTTGRRKKQWNRNVVAIGLASGFLEPLESTSIHLIQVAITTLLELFPERGCAGADQDEYNRVMDLEFERIRDFLVLHYHATQRDDSPFWRDKAAAPIPDSLAYKMELFRDRGMVVKYRDGFFLEPSWLAVYLGQNILPRGYDPMADSIDPDEAARKLAELKAAVRRTAEAMPGHQAFIERFCGARGAA

SEQ ID NO: 88082 - protein, 501 aa, Alteromonas australica; identical to SEQ ID NO: 83450
  misc_feature (1)..(501): tr|A0A350NYN7|A0A350NYN7_9ALTE Tryptophan halogenase OS =Alteromonas australica OX=589873 GN=DCW74_00280 PE=4 S V=1

SEQ ID NO: 88083 - protein, 537 aa, Streptomyces puniciscabiei
  misc_feature (1)..(537): tr|A0A542UCI3|A0A542UCI3_9ACTN Tryptophan halogenase OS =Streptomyces puniciscabiei OX=164348 GN=FB563_1741 PE= 4 SV=1
MGEPIRNIVIIGGGTAGWMAASYLGKALSGQAGITVVEAPAIPRIGVGEATVPNLQRVFFDYLGLPEEEWMTKCNASFKMAVKFINWRTPGQGEPTSRHDGTWSDHFYHPFGLLPSPDGVPLSHYWTRKHLAGTAGEPFDYASFVEPPVMDAKLSPRFLDGTRSTNYAWHFDAALVAGFLRDFATSKQGVRHIEGTVSNVRVDPRGHIESVTLESGQAVEGDLFVDCSGLRGLLINKALGEPFIDMNDHLLNNSAVATQVPHDDEANGIEPYTSSIAMPAGWTWKIPMLGRFGTGYVYCDTFASKDQATLDFCRLWGLDPEKVPLNHIKFRVGRNRRAWVGNCVSIGLSSCFVEPLESTGIYFITASLYQLVKHFPERDVDPVLRDRFNREIVDMFDDTRDFLQAHYSLSPRTDTPFWQATKELTLADQIKEKIEMFRSGVPINPPATDERTYYGNFEAEFRNFWTNGSYYSVFAGLGVRPRNALPILSYRPDSVASAEQTFADVKARQRRLVSELPSTYAYLRQLHREESSQDTAA

SEQ ID NO: 88084 - protein, 510 aa, Sphingomonas elodea
  misc_feature (1)..(510): tr|A0A495EQT5|A0A495EQT5_SPHEL Tryptophan halogenase OS =Sphingomonas elodea OX=179878 GN=C8E52_4338 PE=4 SV=1
MRDDQIRRIVIVGGGTAGWMAAAALGKLLGALPGLQIELVESDAIGTVGVGEATIPHINLFNRMLGIDEAAFVRETSATYKLGIEFVDWQRIGTRYVHPFGVYGIDMLGVEFHHFWLKARALGHTTPLDTYSIGIAAARRGRFAHPTPGQPNSPLARLGYAFQFDAGLYAGFLRRLAEGLGVRRSEGRIVEVRRDGETGHVTAVGLESGAQIAGDLFVDCSGFRGLLIEQTMGARFCDWTHWLPCDRAVAVPCAPGGDRLPLTRATARAAGWQWRIPLQHRTGNGYVYAGDHLSDDEATATLLTNLDGPALSEPRALRFRAGHRDRAWIGNVVALGLAGGFLEPLESTSIHLIQSGIGRLMALFPSRGFDAPEIDRFNRETAQEYADIRDFLILHYKATERDDTAFWRRCRDMTPPDSLAERIALFRRNGRILREQHELFQDASWLAVMNGQGIVPAGYHPVADLLSDAETLERLNHIAQVIDETANAMPLQDDYLRRIGCALPPLRQAS

SEQ ID NO: 88085 - protein, 487 aa, Caulobacter sp.
  misc_feature (1)..(487): tr|A0A258IWD4|A0A258IWD4_9CAUL Tryptophan halogenase OS =Caulobacter sp. 32-67-35 OX=1970330 GN=B7Y81_03255 PE= 4 SV=1
MAAASLQRHFQGSPLKITLIESSEIGTIGVGEATIPTIRNFYQNLGLSDLDVMRATGATCKLGIRFNDWLKPGSSFLHPFGLFGQDLRGVPFHHYWLRLKALGDESEIGEYSLGASLAKGGKFTQPSRNPPSSLSVFDWALHLDASLFAKLMRQVAENAGVKRIDARITRVNLRPEDGFIASVDLDTGATVEGELFIDCSGFRGLLIEEALHTGYEDWSPWLLCDRALAVQSEGSGEPPPYTDVSAQTAGWRWRIPLQHRYGNGYVYSSRHISDDDAMAELKGAVPDPLLHEPRQIRFTPGRRLKAWNKNCVALGLAAGFLEPLESTSIALIETGIEKIKQLFPDRTFNQGVLDEFNDMSKLEMERVRDFIILHYKANQRNDTAFWRDCQAVEIPDTLKHKIELFRERGHFIRYRWEMFQPASWLAIYTGFDILPRTWDPSIEGLDIESLRRGMTEMRKAVKAAVDAAPTHGDFLDKYARPAPLAAQ

SEQ ID NO: 88086 - protein, 497 aa, Sphingomonas sp.
  misc_feature (1)..(497): tr|A0A0W1QHL0|A0A0W1QHL0_9SPHN Tryptophan halogenase OS =Sphingomonas sp. WG OX=1592629 GN=ATB93_15425 PE=4 SV= 1
MAEQNKFRVVIAGGGTAGWVAAAALVRHLGARIDITLVESDAIGTVGVGESTIPTARSFHALLGIREPVFMRETNASFKLGISFEHWLREGVRYFHPFGTIGRSLPLADFQHFWLEARARGFGGDYGDYSLETQAALSNRFATGDPAPLGYAYHLDATAYAAFLRGLAEPAGVRRVEGQITRIDRDGESGNIAALLLESGERVAGDLFIDCTGFRALLIEGALETGYDDWRHWLPTDRAFAVQSETTEPPVPYTRAIAHGAGWRWRIPLQHRMGNGFVYASDYLDDDSAREQLLAAVPGRALFDPRLIRFTTGMRKKSWNRNCVALGLASGFIEPLESTSIHLVMIAVTRLLQNFPLRHDMTAAAQRFNAQARAEAEHIRDFIILHYKLNDRPEPFWRDHAARAIPDSLAARIALFEEGANAYQGSEDLFRVDSWNAVMLGQGVVPRAHHPMPGEIPTADLERALADLRAGIAAQFAKLPAHGAFLHQYCGREKVAA

SEQ ID NO: 88087 - protein, 418 aa, Chitinophagaceae bacterium
  misc_feature (1)..(418): tr|A0A4Q3T1C9|A0A4Q3T1C9_9BACT Tryptophan halogenase (F ragment) OS=Chitinophagaceae bacterium OX=1869212 GN=EO O07_29980 PE=4 SV=1
DFYYHPLMLPQGFNKVDLAPYWQHTNSGNSFSDSVCFQERICENNLAPKLITTPEFASVANYAYHLNAGKFADFLKNHCVKKLGVTHILADVTQVNAAENGDIKSVTTAQNGDIFGDLFIDCTGFSSLLLGKHFEIPFVDRSDVLFIDTAIAVQVPYESEDAPIASHTISTAQEAGWIWDIGLVQRRGIGYVYSSNHTSHDNAEKVLRDYVGPAIDNLSVRKIPITSGHRKLFWKNNCVAVGLSAGFLEPLEASAIVLVELSAEMIAEQLPACRDVMDITAKRFNETFLYRWDRIIDFLKLHYILSKRTDNSFWTDNRNPDTIPESLQDLMKLWRYRSPGNSDFTSNNEVFPAASYQYVLYGMGFKMDSSFIQHTLVDHQLANEQFNQNINAIKKAIGMLPTNRELVKKIHEYGLSTI

SEQ ID NO: 88088 - protein, 503 aa, Sphingomonas sp.
  misc_feature (1)..(503): tr|A0A0W1QN91|A0A0W1QN91_9SPHN Tryptophan halogenase OS =Sphingomonas sp. WG OX=1592629 GN=ATB93_07585 PE=4 SV= 1
MQDKPVTSVVIAGGGTAGWMAAATLSRNFGPDALKVTLVESAEIGTVGVGEATIPPILQLNAQLGIDEDDLLRRTQGTYKLGIEFVDWGRQGSRYFHPFGSYGADLGGVAFHHHWLRTREGALADYSLNTGAALAGKFDRPTEDPRSVLSKLSYALHFDATLYAALLRERSLEQGVEAVEGRIARVVLDQLSGHVDRLDLADGRTLRADLYIDCTGFRGLLIEQALNTGYEDWSHWLPMDRALAVPTAPAGPPLPYTRSTADAAGWRWRIPLQHRVGNGHVYSSAFTDEAAATEALVAGLDGQMLAAPRALSFTTGRRRKMWNRNVVALGLAGGFVEPLESTSIHLIQRGVVTLMSLFPAGGFVQAEIDCYNRLMQAEMEEVRDFVILHYKQSLRDDTPFWRAVQAMSVPDSLAERMAIFAHCGRLLLGPGELFREPSWVAVMLGQGLVPQGYDPLANGIPESDLRPALQRMRAVIGRGVEALPSHAAFLRERSSAEPGERAG

SEQ ID NO: 88089 - protein, 518 aa, Unknown
  misc_feature (1)..(518): tr|B7RZT2|B7RZT2_9GAMM Tryptophan halogenase superfamil y protein OS=marine gamma proteobacterium HTCC2148 OX=2 47634 GN=GPB2148_2742 PE=4 SV=1
MVNRIEKVVVVGGGSAGWLTAATLAAEFKSGPGGISVTLIESAETKSIGVGEGTWPSMRTTLQKIGISETEFFRECDASFKQGSKFTSWLDGGNESYYHPFSLPEGYQEINLADFWAPHRDKVSFANAVCPQLRVCESHKAPKQISAPDYAGSLNYGYHLDAIKFARLLRKHAVEKLGVTHVIDHVEKIHSAPNGDIASLQGKAHGQINGDLFIDCTGFASLLIGRHYSIPLIGKKDVLFNDRAIAVQVPYADESAPIASATLSTARSAGWIWDIGLPSRRGTGYVFSSKYIDEQQAVDELKAYVGNSAGIPFEELAPRTIDINPGYRQKFWHKNCVAIGLSAGFVEPLEASALVLIELSARMIAEQMPADRQVMDIVAEKFNDKFATRWQQIIGFLKLHYVLSRRNDSQYWLDNRSAESIPSDLAAQLKLWRTRSPWYCDETHVDQMFPSASYQYVLYGMEYPSQPMTARKRSGDSDQQRARQIFASNDSMAGKLLTNLPTNRDLTDQVKHQGFGHI

SEQ ID NO: 88090 - protein, 510 aa, Ideonella sp.
  misc_feature (1)..(510): tr|A0A523Q8X3|A0A523Q8X3_9BURK Tryptophan halogenase OS =Ideonella sp. MAG2 OX=2083017 GN=C4K60_06005 PE=4 SV=1
MTLPTAHAPLAAGPAAPKPIRKVVIAGGGTAGWMAAAALSKTLGKRLDICLIESDEIGTVGVGEATIPTLLTFHQLLGIPEQSFMAATQATFKLGIQFESWRQRDEDYIHSFGLTGKDHWTAGFQHFWHKGRERGLASDYGDYCLELRAAQENKFAHLPNAGMNYAFHLDATRYARFLRSFSEGFGVKRREGKIQAVLQHPGSDHIAALRLADGTLIEGDLFIDCTGFRGLLIGETLGVPCEDWSQWLFCDRALAVQTSSVGEPVPYTRSMAHSAGWQWRIPLQHRVGNGLVWSSRFMSDEQAQQTLLSRISGEVLTPLRPISFKPCQREKTWVGNCVALGLASGFLEPLESTSIHLIQRGIVRLMQMFPSAGINPSDVAEYNAQARDEIEHIRDFIILHYKVTQRDDTPFWQACRDMSVPASLQHRMDLFQETGRVFRKGNELFAENSWIQVMLGQGIWPQQHHPSADLMGDEELQHFLQSIRHNVEGTLAQLPTHQAYVKRYCPAMAP

SEQ ID NO: 88091 - protein, 506 aa, Alteromonas australica
  misc_feature (1)..(506): tr|A0A358E0A7|A0A358E0A7_9ALTE Tryptophan 7-halogenase OS=Alteromonas australica OX=589873 GN=DEB45_11860 PE=4 SV=1
MNKLPQEIVIVGGGTAGWMTACYLARTAELMANNNNVPAPAPKITLLESAVISTVGVGEGSTPYLRHFFEFLGINESEWMLKCSATYKMGISFERWTTTAESKTTRPAFTDSDSYFHPFFSSLDIPTADMYFSAVNEYRKGASHDINPSHYFTAAHMVEKSITPDAICSSANIDYAYHFDAGLLGDFLKEYALNKGVSHQIGTVANVESHEHTINSLKLDDGNTLSADFFIDCSGFRGLLGKQALLRKFTSYADTLFNDAAVAIASDATASPETALQTRSIALSHGWQWHIPLTSRTGNGYVYSSQFCTEAQAEEELRLALEPDQSHQQARHLKMTVGRLEEHWKGNCLCIGLSQGFIEPLEATALMLVQYALHHFIDCWQSNNPRREVRYNSEINRMFDGIRDYIAAHYYLNTRDDSAYWVACREDLKVPDTLSYLLNAWDKGASFEQALNEVDNKLVYLRPSWYCIFAGMKRFSNNSTPLAQPNTLARRTMQQSVDGAYRAKQP

SEQ ID NO: 88092 - protein, 493 aa, Massilia sp.
  misc_feature (1)..(493): tr|A0A0Q6WGH4|A0A0Q6WGH4_9BURK Uncharacterized protein OS=Massilia sp. Root351 OX=1736522 GN=ASD15_23245 PE=4 SV=1
METAYKRIVVVGGGAAGWMAATALASALPGSTVELVESEEIGIIGVGEATFPSIRAFHKILGIDEAEFLRATNGTYKLGIEFRDWRVQGEGYFHTFGDFGALAGPQALWGQLRRVGEAGLGTLGEQCLPSVMASQGRFQAPPEREEYFNYAYHFDAVLYAGFLRTLALQRGVRRTEGRIVEVLRRACGAVDRIKLADGRAVAGDLFIDCSGFASLLLGRALDEPFVDFSHWLPVDRAWACPSERSGTELAPYTRATALEAGWAWRIPLRNRTGHGHVFASRYIDEDRAREQLMRQMDGPALAAPRLLRFATGHRERFWVHNVVALGLSSGFLEPLESTSIFLVQSGLGRLIEQLLPGAEPSAEAVAGYNSAMVRQFARVRDFIILHYRLTARRDSELWRAMASMALPETLAFKIHAWRQTGALHQYGDEGFDATSWLAIHAGMGHWPERPDPALADLAPGLALQALRQRRDSIAAAVAAMPSHDSYLRSVLAR

SEQ ID NO: 88093 - protein, 508 aa, Colwellia marinimaniae
  misc_feature (1)..(508): tr|A0A1Z5I6J5|A0A1Z5I6J5_9GAMM Tryptophan halogenase OS =Colwellia marinimaniae OX=1513592 GN=MTCD1_03001 PE=4 SV=1
MKIKRIAIVGAGTSGWLAANHLGCELSADAEIEITVIESKDVPTIGVGEGTVPYIMKGLKRFGISEAELLNSCDATFKQGVKFVNWLDPIKHGENYYYHSFDDPYPNGFNVTPYWNSYEGSKSFDDIGVQARISELGLSPKMKNSGEYEGELSYAYHFNAAKFANLLASNAQKRFKVKHQFATIEGIKRCNEGNISHLITADGDELAFDFYIDCSGFSAVLIGKGLAVPFESKAKELLVDTALVQPMPLKSDEDINPYTTATAHKAGWIWDIPLTTRRGTGFVYSSKYMSESEALALYAEYLGVNEKDLSPKKLPMAVGYRKEFWCKNCVPLGLAQGFLEPLEATSILLSDFSAELLAKNFPRDSTNIETIAPYFNKVVTYVWERTVDFIKLHYCLSDRTDSDFWLDNQDETFLSAELKERLQKFKLCPPQQSDFFSRFDLFNEKNFLYVLYGMKFETQKTILSDKEIEMSRTILKNNDRLVEQADQHLLKHKDWLMGLKSAMEKSKS

SEQ ID NO: 88094 - protein, 476 aa, Unknown
  misc_feature (1)..(476): tr|B7RZT5|B7RZT5_9GAMM Tryptophan halogenase superfamil y protein OS=marine gamma proteobacterium HTCC2148 OX=2 47634 GN=GPB2148_2659 PE=4 SV=1
MAAAALSKLIGKQLDIALVESDDIPTVGVGEATIPTILTINRLLQIPEPEFLQATQGTFKLGIEFENWRKQGHRYIHSFGDTGQGCWAAGFHHFWLKGMEQGISSDYGEYCPELKAAEQSKFAIQSQKKLNYAYHLDAGLYGRFLRKIAEQHGVRRIEGKISDVQCNTDDGYIQSLRLESGQVVEGDLFIDCTGFRALLIEQALESGFDDWSHWLPCDSALAVQTESVGEAVPYTRSIARCSGWQWRIPLQHRVGNGFVYSSKYLSDDKAEQILLDNVEGAPITKPRPIKFRTGQRKQYWNKNCIALGLSSGFIEPLESTSIHLIQNGIMWLLLMFPFQGITKSVVNEYNEKLRREADCIRDFIILHYHVTERDDTDFWNYCREMSIPDSLQHRIDLFRETGRVFKPQDDVFAENSWVQVMMGQGITPEQYHPIVDMMSDVELKSFLQTIENNAKSLVSQLPSHADFVAHYCKAVG

SEQ ID NO: 88095 - protein, 498 aa, Sphingomonas sp.
  misc_feature (1)..(498): tr|A0A0W1QJ07|A0A0W1QJ07_9SPHN Tryptophan halogenase OS =Sphingomonas sp. WG OX=1592629 GN=ATB93_13555 PE=4 SV= 1
MPQHIIIAGGGSAGWMAAALFARLRPAPLTRITLVESDAIGTIGVGEATVPILQDFNRLLGVHEPEFVAATQGSFKLGIEFVDWGHLGNRHFHGFGDFGAPIEGTAPHHHWHRLRTAGREQDPIDAWSMPAILARQDRFAPPEASRGEAAEYRYAYHFDAGLYACLLRSYAQSRGVAHMEGRIVDVERDPHSGDVAALRLDGDRRLDGDIFIDCTGFASRLLGAELGVALVDWSGWLPANRAIAQGSARAGRFTPFTRSTALTAGWQWRIPLQHRTGNGLVYSSRYLSDDEAAHILTSNLDGDAIGEPRLLRFTTGRREQFWAHNVIAIGLAAGFMEPLESTSLQLVQTGLARLAELLPHGRVAPPIRTEYNRETIAEYERIRDFLIAHYCISQRPEPFWRDSANMALPDTLTHKLALWDAMGRVPMYDLESHAEPSWAAILLGQGRIPQGHDPAADRMSLESMAALVAARRDTLQAAAARLPQHDHFVRRTCHAQAA

SEQ ID NO: 88096 - protein, 505 aa, Sphingomonas elodea
  misc_feature (1)..(505): tr|A0A495EQW0|A0A495EQW0_SPHEL Tryptophan halogenase OS =Sphingomonas elodea OX=179878 GN=C8E52_4245 PE=4 SV=1
MRRILILGGGTAGWLTSAYLARYLDIAHQQRFAITLLESPALGIVGVGEGGFPTIRETLQFLGIDERSFVRRASATFKQGIRFDDWLYAPRSDGTRHRFLHPFEAPFHTEGAGLVPYWLLQPEAKRAPFAEAMTIQNRVAAQGRAPKRAEEAGFGGPLTYAYHFDAVRLAQLLRDRAIELGVTHLEGEVFSAHTDAEGAIDRIETREHGSLTADLYIDCSGFEAALIGKALRTPFTSVRHQLFTDRALACKLPYADPEAPIATTTVAAAHEGGWTWDIGLQHARGLGCVYSSAHLSDERAAEILDKHLAGALHEARLIRFEPGYRRTPWVKNCVAVGLSGGFLEPLEATGVVLIEAAAAMIAELFPHAGPVDAPAARFNALMTARYERIVDFLKLHYCLSRREEPFWRDNRDPASIPETLQALLAQWRHRPPSRFDFLLDVESFAFFNYQYILYGMDFRTDLSGAREGFPHAEAAARHFARIRGFGEQAVADLPAHRELIRQLAG

SEQ ID NO: 88097 - protein, 508 aa, Sphingomonas sp.
  misc_feature (1)..(508): tr|A0A0W1QPX5|A0A0W1QPX5_9SPHN Tryptophan halogenase OS =Sphingomonas sp. WG OX=1592629 GN=ATB93_04495 PE=4 SV= 1
MQGKRRILIVGGGTAGWLTAAYLARYLDLAQQAAFEITVLESPELGIIGVGEGAFPTLRATLAFIGIEERDFVRATSATFKQGIRFDDWLHAPLPDGTRHHFLHPFEAPLDAEGPGLVPYWLLQPEATRPAFAAAMTIQNRVVEQGRAPKRAEEDAFGGPLPYAYHFDATRLAVLLQARAIELGVGHLEGRLIGVEPDGKGGIAHVLTREHGALEADLYVDCSGFDAALIGRALGSPFRSARDVLFTDRALACKIAADAPEGPVQPVTIAAAHGAGWTWDIGLQATRGIGCVYSSAHMSDEAAAAVLRAHIGHDRYTARLIPFEPGFRPAQWAGNCVAVGLSAGFLEPLEATGVLLIETAVAMIAELFPFAGPMDLAAHRFNARMTARYERIVDFLKLHYCLSRREEPFWRDNADPASIPASLAGLLDAWRHRPPSRFDFVIDHESFAYFNYQYILYGMDFVTDLSPARGAFPNDAVAMRRFAQIRRFGEQAVADLPGHRELIGQLRG

SEQ ID NO: 88098 - protein, 501 aa, Alteromonas australica
  misc_feature (1)..(501): tr|A0A075PB88|A0A075PB88_9ALTE Tryptophan halogenase OS =Alteromonas australica OX=589873 GN=EP13_19055 PE=4 SV =1
MSTFDSAALPPVKNVVIAGGGTAGWMAAIALVKLLGKSLNITLVESKDIGIIGVGEATIPPIRTFHKLLNIDEKAFMKATQATFKLGIEFEGWCEENHSYIHSFGVTGRECWAGEFHHFWLRAQKLGLGGEFGDYCPELQAAKANKFFTNESMPLNFAYHFDAVAYGRFLRTLATEAGVHHIVGNITNVSKCSQTGNITSLEVDESQEVNGDFFIDCTGFQGLLIEQALHTGYDNWSHYLPCDSAVAMQTETVAAPVPYTKSSAHKAGWRWQIPLQHRVGNGLVYCSKYMNDDEAKSTLVQQVEGEPVNDARFIKFTPGKRRLGWNKNCVALGLASGFIEPLESTSIHLIMTGIVRLMRLFPFDGITQSAIDEYNTKYDSEMAAILDFIVMHYKVTNREDSPFWQHCKNMPIPPSLTHKLNLFKDTGRVFLDDGDIFRVDSWTQVMLGQGLTPNQYHKVADEMSEAELERFMMGLKQQVDNQVSRLPSHEAFLDKYLAVNS

SEQ ID NO: 88099 - protein, 94 aa, Comamonadaceae bacterium
  misc_feature (1)..(94): tr|A0A4Q3N540|A0A4Q3N540_9BURK Tryptophan halogenase (F ragment) OS=Comamonadaceae bacterium OX=1871071 GN=EOO2 7_50405 PE=4 SV=1
PESLAQKIELFRETGRVFRKNEELFAENSWVQVMMGQGIMPRAHHPVADKLSDAELDRLLSSIRENVAQTAKGLPTHEAYLQGYCPAPKPAYAV

SEQ ID NO: 88100 - protein, 390 aa, Corallococcus exiguus
  misc_feature (1)..(390): tr|A0A5C5DYJ1|A0A5C5DYJ1_9DELT Tryptophan halogenase OS =Corallococcus exiguus OX=83462 GN=FH620_12385 PE=4 SV= 1
MSEDSCDVAVIGGGPAGAAMAVALRRKAPSLSVTLVERTTYDAPRLGETLPPDVRLSLSRLGVWESFLRDGHLASRGTASCWGRAEPGFNDTMMSPWGSAWHLDRTRFDERLSVEAARQGARVLRATTLVDSESLGRHGYRLRLSHGGADPSTLRARFVVDATGGKATFASARGARRLVSDRCFAVYGAFQLQGGAAFPTHALVESCPEGWWYSALLPRGRVVVALVGDGDSLRGLRWATPEPWMNLLKQAPVTWARLDACDFAGEALIAVPVLVGQLDRPRGEQWLAVGDAACTYDPLSSQGITKALDSALLAADALERCLSGDADALQAYESTLNARFQDHQRTRGVYYRQEQRWPQAAFWMNRWEALPAPAASPAQFRRSHSTEVNP

SEQ ID NO: 88101 - protein, 509 aa, Alteromonas australica
  misc_feature (1)..(509): tr|A0A075NWB8|A0A075NWB8_9ALTE Tryptophan halogenase OS =Alteromonas australica OX=589873 GN=EP13_09590 PE=4 SV =1
MQNPKKNPIKRVVIAGGGTAGWLTASLMKKVLGEAVNITLVESEVIGTVGVGEATIPPIRLVNQVLGIDEAQFLYETKATIKLAIKFENWKTKGQSYYHTFGAPGKAMAFCHFHHYWLKGQQLGKTQDLWDYDLNYHAAEAGKFAPINAKDPVLELPFAYHFDASLYAKYLRKLSESMGVVRIEGKISSVERDNVNGYIKALRLDNKNRIEGDLFIDCTGFKGLLIQETLGTGYDDWSHLLPCDSAIAVPSERHESTRPFTRSIAHDAGWQWRIPLQHRNGNGHVFCSRYVSEDHALDTLMGNLDTKPLADPKLIKFTTGRRRKQWNKNVVSVGLSSGFLEPLESTSIHLIQSAIVRLIQLFPHNGITPSLEAEYNKQSALEFEQIRDFLILHYSVNERTDSAFFNDMRNLDLPDTLRHKIALFKENGSLFRDQNDLFLESSWLQVMYGQGITPNDYHGLVNTFSDEKLKEMLTRLLKIKREPLSQLPSHDEYLNGMVKRAKQDMSANA

SEQ ID NO: 88102 - protein, 476 aa, Sphingomonas elodea
  misc_feature (1)..(476): tr|A0A495EQD7|A0A495EQD7_SPHEL Tryptophan halogenase OS =Sphingomonas elodea OX=179878 GN=C8E52_4340 PE=4 SV=1
MSIAQVLVVGGGLTGWSTAAALKRRVPALAVSILPLAPPGDALADRIATTLPSILGFHADLGIGLGDGVVRTGSIYRLGTLYRDWVEGLPDYVHAHGPHGEPVDGVSFHHLWARAARGDVVAPFDAFSAAAAMAREGRFVLPAEGGILGEHSFGLALDVPRYLGMLQAFARHVGVRTLDGGLAEVERAADGSIAGVVLTDGLRVTADLYCDCSGPAARVHGVTGSARESWQRWLPCDRLLLEEPTPAEDAAPMECVTATARGWRWTSATQQGAVYSAAHSHHEDAAIRFEAGATLEPWRHNVVAIGDAAVTIEPLEWGNLHLAHSAIDRLISMLPAGSPHPLEAAEYNRQALAEARRVRDFVLLHYVTARRAGAFWHDVTSTEPPDSLAHTLRLFRERGRLPFYEEETFDRDGWLAVLFGQGVLPRRIDPLADAVPPARAADAMARHRDRIAQAVRPLPTLAAYRAAQSRHLHERA

SEQ ID NO: 88103 - protein, 509 aa, Caulobacter sp.
  misc_feature (1)..(509): tr|A0A258IW80|A0A258IW80_9CAUL Tryptophan halogenase OS =Caulobacter sp. 32-67-35 OX=1970330 GN=B7Y81_03260 PE= 4 SV=1
MQDANQNGIRKIVIVGGGSAGWICAAMASHYFHKSGVEVELIESEEIGTIGVGESTIPPFLQLIRSLGIDEQDFIQKTQASFKLAIRFENWRKKGETYYHPFGQIGGPIGRHEFYQCWLRAKANGHPSNLQDFAPATVMADQWKFTPPFRAQKTLLSGASYALHIDAKLVAQYLRDFAETRGVKRTEGIVTDVVSRPDGFVEKVIMQNGSEVSGDIFIDCSGFRALLIGKTLDEEYLDWSDVLMCDRAVVAQTENVKDPHPYTLSQAQDAGWRWRIPLQHRAGNGYVFCSKYISEDEATATLLSQIEGDVLLGPNIIPFKTGMRKRLFRNNVVAIGLAGGFIEPLESTALHLIYRGMDFLLRYFPDKDFDPGLAAEYNRRMAMDYEEIRDFIVLHYYTTQRDDTPFWRDYQKVAPPESLRERVELFKSSAVLRDGVDDMFRAPSWQSVMEGMGIRPGRYQQLVDAAPYSVIQQTLDQSAPILKAQVAGLPSHGEFLAQHCPAAPFRRSA

SEQ ID NO: 88104 - protein, 506 aa, Thalassotalea sp.
  misc_feature (1)..(506): tr|A0A516HEL0|A0A516HEL0_9GAMM Tryptophan 7-halogenase OS=Thalassotalea sp. PS06 OX=2594005 GN=FNC98_12865 PE= 4 SV=1
MEKAHLIVLGGGTAGWMSALLMAKKLGVHANITLVESPDIPVIGVGEGTTPYIKQFFKQLDIAEQDWMPACQATYKCGIRFPDWSTKNQYQSYFHPFFSPLDKQVGEAFFHNANCRRAGIDVDANPNHYFVTSYLAKQGLSPHCQQPLPFELDYAYHFDAGLLGTFLQSIGTKMGVTHQQCNIIDVERHLNGDIAAIISDQGERLTADYFIDCSGFRGQLIEQTLDVPFYSYASSLKNNAAVAIQVEHQQPSKLPDKLPTETRSSALANGWMWNIPLTQRWGNGYVYSRDYLNQEQAERELRTALGISDEISARHLSMKVGRRQEHWRNNVFAIGLSQGFVEPLEATALMLVQYTIEHACEAIAGQLGGEVARLNDSKQKFNDTINDMFDGVRDYILVHYLTNSRNDSQYWLDSRNELYVPDAVQHLLEVWQSDADIDKELEHYFQTSMYSRASWYCLLAGMGVFPKVKQRSVQVSAQIAPLQPVVKYNQNCTQHFRAQQDVLAGY

SEQ ID NO: 88105 - protein, 445 aa, Alteromonas australica
  misc_feature (1)..(445): tr|A0A358DUM4|A0A358DUM4_9ALTE Tryptophan halogenase (F ragment) OS=Alteromonas australica OX=589873 GN=DEB45_0 1500 PE=4 SV=1
MSTFDSATLPPVKNVVIAGGGTAGWMAAIALVKLLGKSLNITLVESKDIGIIGVGEATIPPIRTFHKLLNIDEKAFMKATQATFKLGIEFEGWREENHSYIHSFGVTGRECWAGEFHHFWLRAQKLGLGGEFGDYCPELQAAKANKFFTNESMPLNFAYHFDAVAYGRYLRTLATEAGVHHIVGNITNVSKCSQTGNITSLEVDESQEVNGDFFIDCTGFKGLLIEQALHTGYDNWSHYLPCDSAVAMQTETVAAPVPYTKSSAHKAGWRWQIPLQHRVGNGLVYCSKYMSDDEAKSTLVQQVEGEPVNDARFIKFTPGKRRLGWNKNCVALGLASGFIEPLESTSIHLIMTGIVRLMRLFPFDGVTQSAIDEYNTKYDSEMAAILDFIVMHYKVTNREDSPFWQHCKNMPIPPSLTHKLNLFKDTGRVFLDDGDIFRVDSWTQV

SEQ ID NO: 88106 - protein, 493 aa, Sphingomonas elodea
  misc_feature (1)..(493): tr|A0A495F2L4|A0A495F2L4_SPHEL Tryptophan halogenase OS =Sphingomonas elodea OX=179878 GN=C8E52_1986 PE=4 SV=1
MTDNRIRRIVILGGGTAGWMSAAALSRVLAGQRVAITLVESDTIGTIGVGEATIPTIHWFNQIIGLDERQFLAETKATVKLGIEFVGWNGEGSRYFHPFGTFGPPGDGAMFLHRLIRGRADGDTAPTEAYSLTAQAARSGRFARPVPDRRSLLSTLGYAYHFDAGLYARYLRGLAEQAGVTRIEGRVGSVQRDGESGFVRSLMLDDGRIVEGDLFLDCSGMRGLLIEETLGVGYDDWSHWLPCDRAWAAPSAAEAHLTPFTRATAAEAGWRWRIPLQHRVGNGYVFASRFQDEAAARASLLAAMEGPPLSDPRLIRFMPGMRREAWRANVVAIGLSSGFLEPLESTSIHLIQSGIAKLLSLFPAADCSPLLARQFNRIFGQEMLDIRDFLIFHYHATAGREEPMWRERQAMAIPETLTERLAHFRSSGRIVLSSDELFRDASWFAVLDGQGARPGDYNPLIEGIDVHDNLRQLAALRSNIACAAEALPALCRP

SEQ ID NO: 88107 - protein, 576 aa, Metarhizium majus
  misc_feature (1)..(576): tr|A0A0B4HMZ6|A0A0B4HMZ6_METMF Tryptophan halogenase (F ragment) OS=Metarhizium majus (strain ARSEF 297) OX=127 6143 GN=MAJ_10282 PE=4 SV=1
MAVPPSCTVLVIGGGPAGSYAAAALAREGIETVVLEADKFPRYHIGESTLPSLRHFFKFIDFYDTFDAYGFYHKNGAVFRLAQAQPDACKSPSPAYTDFLEAGGPNGYAWNLIRSEFDDLLFKHAGICGAQIFSETRVDTIQFEPVANGLKPDLNRNLEDNLNPGRPASATWVRKDGTSGSITYKYLVDASGRHGILSTKYLKNRKFNNNFKNAAIWAYWKSDNVYGPGTHMEGSPYFEALDDGSGWAWFMPLHDGTRSVGIVQDQKMATEKKHELGRPPTLDFYKQCLEMAPRISKLLSQAELIPHVRAASDWSYTASTYHLPNARICGDAGSFIDPLFSSGVHLAITGGLSAAATISASIRGDCNEAAAGSWHSKKTVESYTRFFLAVSSATKQIRTQHEPIIKDMDEEGFQRAFDLFRPSTADADAAGKVSQLEISKILQFCFKAFTYVPPEKKDALFDKLRKLDSKALQDDAKQTPTLDAIEKHLTADELQILEILRSRRMIREDPFEMDSFTLDTIDGMAPKLVRGSLGLVNYEQAKIDKAHFYSQDFLDGNYPGIREGSVHLPASRVQLG

SEQ ID NO: 88108 - protein, 542 aa, Metarhizium robertsii
  misc_feature (1)..(542): tr|A0A014MW34|A0A014MW34_9HYPO Tryptophan halogenase do main protein OS=Metarhizium robertsii OX=568076 GN=X797 _011455 PE=4 SV=1
MAVPPSCTVLVIGGGPAGSYAAAALAREGIETVVLEADKFPRYHIGESTLPSLRHFFKFIDFYDTVDAYGFYHKNGAVFRLAQAQPDACKSPSPAYTDFLEAGGPNGYAWNLIRSEFDDLLFKHAGTCGAQIFSETKVDTIQFEPVANGLKPDMNRNLEDNLNPGRNRKFNNNFKNAAIWAYWKSDNVYGPGTHMEGSPYFEALDDASGWAWFMPLHDGTRSVGIVQDQKMATEKKHELGRPSTLDFYKQCLDMAPGIRELLSEAELIPHVRAACDWSYTASTYHLPNARICGDAGSFIDPLFSSGVHLAITGGLSAAATISASIRGDCSEAAAGSWHSKKTVESYTRFFLAVSSATKQIRTQHEPIIKDMDEEGFQRAFDLFRPIIQGTADADAAGKVSQLEISKILQFCFKAFTYVPPEKKDALFDKLRKLDSKALQDDAKQGQTLDGIEKHLTADELQILEILRSRRMIREDPFEMDSFTLDTIDGMAPRLVRGSLGLVNYEQAKIDKAHFYSQDFLDGNYPGIREGSVHLPTSRVQLG

SEQ ID NO: 88109 - protein, 404 aa, Tolypocladium ophioglossoides
  misc_feature (1)..(404): tr|A0A0L0N8A0|A0A0L0N8A0_9HYPO Tryptophan 2-halogenase (Fragment) OS=Tolypocladium ophioglossoides CBS 100239 OX=1163406 GN=TOPH_05395 PE=4 SV=1
HPLESAVVAIDNTPSPQRPTLLQLVAKTATLGRLSHRKLMSCFSNTSATAASKTFGATKVREIQFVPDKTPHGASDPPSPGRPVSATWCHKDGSTRAIRFEYLVDESGSSGLVSTKYLKNRRYNQGLNIANWGYWKGSDVYGVGTFSEGRPCFEALKGKATNDDWVWFIPLHDVTHYAGIVQMRDMAVAKRQSDSPSSKEFCTQSLNLVPGIKNLLSNAEPVSDVKSASDWSYSTSSHAFPYMHIAGDAGASIDPFFSSDDDHLAFAGGLSPAVTIATGIRGEYAEATAASWHNKKTPESYTPFLLVFVSALKQIRSQDKPVPSDVDEESFDRAFDLFRPGRDLQNRRALFPWLRSGFLGTEGGAHPKLKKRGLDADANNEHTQKPSQSFNRVLLRKNAKFWTP

SEQ ID NO: 88110 - protein, 520 aa, Talaromyces islandicus
  misc_feature (1)..(520): tr|A0A0U1LSX1|A0A0U1LSX1_TALIS Tryptophan 2-halogenase OS=Talaromyces islandicus OX=28573 GN=PISL3812_03494 PE =4 SV=1
MEIPEKCTVLVIGGGPGGSFAASALAREGIDTVLLEGDKFPRYHIGESMLASMRHLLRIVDLDSVFDNYGFTKKVGAAFKLNPKKRPGYTDFLAAGGPENYAWNVIRSEADNLMFKHAADSGAKTFDGVQIKAIKFDDIPYKGSVELPHEYPGRPVSATWTRKEDGTSGEIKFDFVVDASGRVGLLSTKYLKNRRYNQGLKNVANWGYWKGCGTYAAGTPRANSPFFEALQDESGWAWAIPLHNGTTSVGIVMNQQMSTDRKVQSGSPDSKTFYLDCLKQLAPDITELLGEGELTSNIKSASDYSYSASGYAIPGARIVGDAGCFIDPYFSSGVHLALVGGLSAATTISASIKGQCTEEAAADWHSKKIADSYTRFLLVVLSAYKQIRSQNAPVLSDFDEDNFDRAFAFFRPVIQGTADVSNKLTQEELNETLEFCSNAFTPVTPEDRNSALEKMGKDITSKEFQVDLSPQEQKVVGHIRARQMMRTEDTINIASFGTDSINGMVPSLQRGSLGLVKSTA

SEQ ID NO: 88111 - protein, 654 aa, Grifola frondosa
  misc_feature (1)..(654): tr|A0A1C7LYE4|A0A1C7LYE4_GRIFR Tryptophan 2-halogenase OS=Grifola frondosa OX=5627 GN=cmdE_0 PE=4 SV=1
MPSVNPPNHTQVLVIGGGPAGSYAAAALAREGISVVLLEMAKFPRYHIGESLIPSVRHYLRFIGAEEKVIAHGFARKVVVFSDILQTVFLDADVCHLSSLVLRSNSINICVKATAIYHFPEEPPAHPPHLFADTDFVALGAENAAWNVVRSEFDQLLLQHAASCGARVFDQTRVTALSFSYDGPRPSSEMRPTLGRRQSMVEFAGDALGEGEELGRPISAAYETAFGGKGDIKFDYLIDASGRAGIMSTKYMKNRKFNESLKNVAVWGYWRGTGMYGKGTDRQNAPFFEALSDESGWAWFIPLHNGLTSVGVVMGQKQLGIRSRASSSAGGSPTLPTFAARRPSLSTRVSSTLAERYLSFLPLAPGVVSLIGEGELVTVKTDEGEEPPVARSASDYSYSASDYAGPGFRFGDAGAFIDPFFSSGVHLAMTSALSAAATVCASTRGDCTEMEAAQWHSGRVALSYTRFLVVVLSAYKQIRAQSSNVLADIEEDNFDKAFAFLRPVIQGGADMGKRLSEDEVQRALTSVKLEIISGLPALPSEDETAEAENDNKPNQEHQEALQLMDVRAPVVDPAKLEKLLRRQLRIQTATTSQTPSHTLDEQAEVKMVLEKVNARRVIHAEHGNGLSSLEEEAFGGLVMRLHRGSLGLHRAEEA

SEQ ID NO: 88112 - protein, 345 aa, Grifola frondosa
  misc_feature (1)..(345): tr|A0A1C7LQJ0|A0A1C7LQJ0_GRIFR Tryptophan 2-halogenase OS=Grifola frondosa OX=5627 GN=cmdE_2 PE=4 SV=1
MPSIPTCVQILVIGGGPSGSYAASALAREGFSVVLLEADKFPRYHIGESLLPSVRPFLKFIDAENLVATHGFTTKPGAAVKLNQYKHEGYTDFIALDSNNNSWNVIRSEFDELLLQHACKSGALVFEETKVINIEFGAKPGSQERPVAATWKTSTGEEGCIRFDYLVDASGRNGIMSTKYLNNRRHNKSLKNIACWGYWEGTDKYMPGTTRENAIWVEALQDESGWAWFIPLHDGSTSVGVVMDQDTSIAKKKAVRQCVDGDIDTLKKHYLEELDRAPGLIRLLGDAKLRTSYGTDTIKSASDYSYSATKYAGDHYRLIGDAAAFIDPFFSSGVHLALTGVYRLH

SEQ ID NO: 88113 - protein, 534 aa, Penicillium patulum
  misc_feature (1)..(534): tr|A0A135LM30|A0A135LM30_PENPA Tryptophan halogenase OS =Penicillium patulum OX=5078 GN=PGRI_059860 PE=4 SV=1
MAIPQSCTVLVAGGGPGGSYTAAALAREGVDVVLFEADSHPRYHIGESLLPSMRYLLRFIDLEDTFEQHGFQKKLGAFFKLNAKSAGYTDFIRANGPNGYSWNVVRSESDEILFRHATKSGAKTFENVSLKSVNFESYENDMFTSQHKLANPGRPVSAEWKTKDGCSGTISFDYLVDATGRVGILSTKYLKNRKFNESFRNIAMWGYFKGNIPPSPGTDRENQPISEGMRDGSGWVWMLPLHNGTVSIGAVVRRDIFLAKKKALPEGTTEAQALASLVALCPTISSYLEPAELASGIRQATDYSYSASAYAGPNFRIVGDAGCFIDPFFSSGHHLALSSALAAATSINACIRGDCNELDASRWYAKKVDEGYTLFLVVVMAALKQIRMQEEPILSDLDEEGFDRAFAVLRPVIQGAADKETAPKAKGESITETINLCLNALNDLHDTELQKKLTNIVEAKGTPEQDQLLGKLSPDEMAALQRLRAMHSILPMGELKDFENSNIDGLKARLEHGSLGLSRDHAGFCRDGEGDLEV

SEQ ID NO: 88114 - protein, 518 aa, Pseudoalteromonas marina
  misc_feature (1)..(518): tr|U1K0D7|U1K0D7_9GAMM Tryptophan halogenase OS=Pseudoa lteromonas marina DSM 17587 OX=1117316 GN=PMAN_08982 PE =4 SV=1
MNQQNKKIKTVVVVGGGIAGWLTAGRLAAHHKSNTPDGLNVVLVESPNVPIIGVGEGTWPTMRSTLIALGISETDFIRECEASFKQGAKFAKWVDGSNDDFYYHPLVLPQGFSKTDMAGHWLNNAAESTSFSNAVCYQEAICEQGLAPKTIHTPEYAAIANYAYHLDSAKFAVFLQKHCTQQLGVKHILADVTQVNSADNGDIASVITKQQGEISGDLFVDCTGFSSLLLGEHYKVPFKPCDDVLFIDTALAVQVPYENEDERIASHTISTAQEAGWIWDIGLQHRRGVGYVYSSKYSSEAEAREKLNAYVGDKIESLTIRKIPIKSGHRSHFWQNNCVAVGLSAGFLEPLEASALVLVEMSAQMISEQLPQTRDIMDITAKRFNETFTYRWEKIIDFLKLHYILSNRDDNAFWRDNRDPKTIPQSLLDLMKLWQYRAPADHDFTSNNEVFPAASYQYVLYGMGFKSDYSTTAYMLKDTVFAKSQFDKNKSMINQAVTNLPSNRELLNKIKHHGFSAI

SEQ ID NO: 88115 - protein, 521 aa, Sphingopyxis macrogoltabida
  misc_feature (1)..(521): tr|A0A0P0D4J2|A0A0P0D4J2_SPHMC Tryptophan halogenase OS =Sphingopyxis macrogoltabida OX=33050 GN=LH19_14990 PE= 4 SV=1
MNDLVERVVIVGGGTAGWLAASLIANSRRAKAAPLSITLVEAPDVPIVGVGEGTWPTMRTTLATIGLDESEFLAACDGAFKQASRFDGWRDGSAGDSYLHPFTTPPALPTGELLAAWQEASPDQPFAAAMSAQAAVCNLHLAPRQRSMPDYQGATNYAYHFATEKFGALLARHAKQSPLITHILDHVTGVRHADNGDIAALTTRSGREIAGDLFIDCSGFKGLLIGDALGVDWIDRSDHAFNDRAIASQVPVPPGSPIASQTIATAHEAGWIWDIGLPSRRGIGCVYSSRFMDAERAETVLRDYIARELPGAVPETKAFGVPFKHISFRTGHRARFWEKNCLSIGLAAGFIEPLEASAIVLIELSLRALTDNFPADRAAMDIHAGRFNKLFRYRWDRIVEFLKLHYVLSRRDEPYWRAHRDPAHIPPHLAEMLELWRSQPPSAWDFPYVDEIFSAQSHQYILYGMGFPAPAGWPASDRALAALAEMRQRARTLAAGLPTNRLYLDALADDRAAAEQKEAAE

SEQ ID NO: 88116 - protein, 503 aa, Massilia sp.
  misc_feature (1)..(503): tr|A0A098UE18|A0A098UE18_9BURK Tryptophan halogenase OS =Massilia sp. JS1662 OX=1519190 GN=IA69_03440 PE=4 SV=1
MENNNQHDRGRPIRRVVIAGGGTAGWMAAAALSRTLGKVLDIKLVESDDIGTVGVGEATIPSLVHFHRLLDIGEQEFMAATQATFKLGISFEGWRARGEDYIHSFGMTGTDHWTAGFQHFWLKGRDRGLASDYGDYCLELVASQEKRFGHLPNQGINYAYHLDATRYARYLRRFSEHFGAQRIEAKIAGVDTDPATGHITALVLDSGTRIEGDLFIDCTGFRSLLLGQTMGVEYEDWSQWLFNDCAIAVQTESTGPAVPLTRSMAHDWGWQWRIPLQHRTGNGIVFSSRHTDEATARATLLGNIEGKVLTEPRVIRFTPGQRKKVWAGNCIGLGLASGFLEPIESTSIHLIQRGIVRLLQIFPSHGIQQSDVDEFNAQAEEDIRTIRDFIILHYKVTNRRDTPYWHDAATMQVPDSLQHRIDLFRDGARVFREGNELFAENSWVQVMLGQGLTPERWHPSADLMGDDELRGFLDGIRNGVRRTVSQLPPHQQYVERYCPAGKP

SEQ ID NO: 88117 - protein, 501 aa, Pseudoalteromonas marina
  misc_feature (1)..(501): tr|U1L1P9|U1L1P9_9GAMM Tryptophan halogenase OS=Pseudoa lteromonas marina DSM 17587 OX=1117316 GN=PMAN_10991 PE =4 SV=1
MNDSNNIKSIVIVGGGSAGWMTASALAKVIGCDNCQITLVESADIGTVSVGEATIPQIQLFNTILDIDEAEFIRFTNATFKLGIEFIDWKEKGHRYFHPFGNYGTNMEALPFHHFWLKMQNDPEFSDLSSYSLASVGAYANKFMHPSTQQNSALAGINYAYHFDATLYAKFLRNYATSRGVCRIEGKVDEVNLNPVSGEIESLVLNDNTVLDGDLFIDCSGFKGLLIEQALKTGYEDWTHLLPCNKAIATPCLSKKALNPYTQSTAQSAGWTWRIPLQNRVGNGYVYSSEFMSDDKAQALLLNTIESEALADINQLQWVTGMRKKSWNKNCIAIGLSAGFVEPLESTGLHLIQSAIAKLMTLFPSKDFTQCDIDLFNQQTETEYHRIRDFIILHYKLTNRDDSEFWRYCKNIEMPDSLKQKIEMFSENGRIFRHDNELFNETSWLAVMHGQGIKPKSYHPLVDRLSRDEIKRRLKNIESVISRSADVMPDHEAYILKNYTR

SEQ ID NO: 88118 - protein, 468 aa, Brevundimonas sp.
  misc_feature (1)..(468): tr|A0A1H1GK52|A0A1H1GK52_9CAUL Tryptophan halogenase OS =Brevundimonas sp. 374 OX=1150400 GN=SAMN02787020_2743 PE=4 SV=1
MSGTEKIWVIQGAGLAAWAAAALLARHLPSGNSVLIEDAVSPALGEESEVVVAEPDGVLVQLSDGADLLAHGHGGFFLGSLLRNWCDGRDIAVVEQEPLPGIDGVALTDVVLRAARQSPAAPDYAALMAPLQFQARVMAAGRYAHPSPDRQSPRSLLRPRLMLDARVLTARLRDIALRAGVRETPDDVREVEAFMTLETRANGVFSGDGDWTGRLGYDRCLTMRYVGGDHPPRLDMANLVEGLVSSSPLPGGGFASLAYAADRTTVDVAKAALAAWLGDVDVATQSDVVLAPGLNTHPWSGRRLALGPAAARFGDALSLDSAALERQLTQLVASLPGTSEQISACAEAYNEAVVRDIAHRADQLHLILLNGSQGERLAPAGDDLARRIAQFTSRNAGVGLDGDPYDAQHWIMLMASLGLMPRRYDIQADRLDIKAAMASLGRMVIAFDQTLAALPAHSQFIDRLREGG

SEQ ID NO: 88119 - protein, 503 aa, Brevundimonas sp.
  misc_feature (1)..(503): tr|A0A1H1CJE7|A0A1H1CJE7_9CAUL Tryptophan halogenase OS =Brevundimonas sp. 374 OX=1150400 GN=SAMN02787020_1518 PE=4 SV=1
MSEQPEPVRHIAIVGGGTAGWMAAAALGRAFTRAQGLALMITLLESESIGTVGVGEATIPPIRQCVQTIGLSEEDFIRSTAATAKLGIAFKDWTAPGSEYFHGFGDYGPIVAGQAWRQYLFRLKAAGRIDSLDPWSMPTAMARAGKFAPPVEDSRSVLSHYSYAYQFDAGLFARRLRTLAETMGVVRREGRITGVDRNGETGLVRAVTLEDGGEVEADLFIDCSGFRGLLIEQTMRAGYEEWTHWLPCNRAVAVPCSSTLAPEPITTARAREAGWQWRIPLQHRVGNGYVYSSDHVDDQTALDDLLDQIESEPLAEPNRLRFVTGRRREAWKGNVVSLGLASGFVEPLESTSINLIQTGIGRLLEMFPDRSFDPALIREYNRRSAQEFERIRDFIILHYHLAGRAGAMWDRCRETAPPDTLMEKIELFHARGEVGLLEDESFREDSWAAVFTGLGTWPKQPSPLVCIDDLETVDRQARQFAQLIARAAAALPDHSTTFTGYAR

SEQ ID NO: 88120 - protein, 508 aa, Brevundimonas sp.
  misc_feature (1)..(508): tr|A0A1H1GK22|A0A1H1GK22_9CAUL Tryptophan halogenase OS =Brevundimonas sp. 374 OX=1150400 GN=SAMN02787020_2742 PE=4 SV=1
MMTQNDAGPIRKIVILGGGTAGWMTAAALSHRLAGSPVSIELVESAEIGIVGVGEATLPHIRAFNTAMGIDEQTLIDQTQATFKLGIQFVDWGRPGDSYIHPFGAYGEPIEGIDFHHVWAARRAMGDAADISDYSYPVRAAEANRFQRPVSDPGSMLSTFSYAFQFDASLYAAFLRQVSCGRGVVRTEGKVVDHVLNGATGDVDAIVLSDGRRIAGDLFIDCSGFRGRLINQALETTFEDWSHWLPCDSAFAVPCQTAAPVGPYTRATARAAGWQWRIPLQHRTGNGHVFSSAHISDEDAVATLMSNLEGPALAEPRRLSFRTGRRHKLWNRNVVAIGLSGGFLEPLESTSIYLIQLGITTLLDLFPDRVGMEADAEEYNRIMALEFDRIRDFLVLHYVANQRDEPFWREMRTMAWPDSLSAKVEAFKSRGLLPDYDIGVFLPPSWLAVLVGQNIVPNGWDPRVDRLEPHVLSDKLAALRDDVRSTVDRTPDHMTFISDAAARAGSLR

SEQ ID NO: 88121 - protein, 603 aa, Streptomyces sp.
  misc_feature (1)..(603): tr|A0A2N0IV36|A0A2N0IV36_9ACTN Tryptophan halogenase OS =Streptomyces sp. 69 OX=1827605 GN=CLW08_3371 PE=4 SV=1
MIAGGGVAGSMAAAYLTAAFGDRISVTLIDSPVDGPAHEATLGDIGRFFEFLGLAEEDWMPACGATYKLAVRLQDWNRPGHHFYLPFEPVREAHGFPLTAWWLQQGQGRRFDRDCFVSAWLCDAGRGPRQVAGAPSAAAEPAVPYGYHLQAGRLAALLTGYAQERGVRRLTGRVTDVRLDARGWVESLVTEDHGEIHGDLFVDCTGERSLLLRRALRVPQVSYRDTLPNDRVVTLEVPADMEARGMPPYTTVTARGAGWMWTVPLFDRIGAGYAYATEYCTPEEAEEALREYVGPEAAGVPAGHAGLSGGRSTVGWKHNCVAVGDAAGRVEPLGGPGVASFAHHALELLVRHFPGADWDARLRDGYNAGVARALDEARDFLALHYQGSGRDDSQYWRDVKTRTLPEGVAARLRQWGCGLRTARGRWAGRGSGRGSGCRGMCVRRCSSARLPCRRARLPRWRCWTAPPRGGSSWGFGSGGGSWWVCCRRRMRCWWGWRGEGAREGAGGLWVGTRPSAGFGFPPAPPVTVSSSGAGGPGGRIRRRRVRVGLVGPCRRWWVRVALVGRIRRRRVRVAWWGRRRWVLVGGRYVGSVPLGRGPVQAGV

SEQ ID NO: 88122 - protein, 368 aa, Sphingomonas sp.
  misc_feature (1)..(368): tr|A0A518RGP0|A0A518RGP0_9SPHN Tryptophan 7-halogenase OS=Sphingomonas sp. XS-10 OX=2599297 GN=FPZ54_11715 PE= 4 SV=1
MSAVARVAVLGSGVIALSAAIAFRRALPAARITLVERPVSPNALLDRIGAATLTIDGFHRAIGLDQALFIRRTGAVAIRRVELDGVQLAPPGAIPHVDGVALHQLWLRSERERTGRTMPWPTLAARDAEPFGVRFDMAAYSALLAEMAAALDIARASDVPEADLLLDCAAPGDDWTDWSAHLPSLVAQPISSGAPEGETIATGAGAVEWRSPPWGWRLSRGAGLPPGRHPAPRAGNRIALGEATLVAEPFDGHALSAAHGDILRAIEFMPHAEPSPREAAEYNRRTAIAHGRLLDWATERWNGLATPDLANLRTGFAARGRMPYRDWDPVTPGEWIGWWLAQGVRPERIDPTARAVAETKIIRMMEGI

SEQ ID NO: 88123 - protein, 491 aa, Massilia sp.
  misc_feature (1)..(491): tr|A0A098UFQ1|A0A098UFQ1_9BURK Uncharacterized protein OS=Massilia sp. JS1662 OX=1519190 GN=IA69_00235 PE=4 SV =1
MTYERIVVLGGGTAGWMAATALATGLKGTTVELVESEDIGTVGVGEATFPSIRNYHQILGIPEADFLRATNGTYKLGIRFRDWRVKGEDYYHTFGDFGMLNGPESLWGQYRRHPRASLSTFGEQCLPTVMAMNDRFCAPGKDAANFNYAYHFDAILYARFLRDIALKRGVRRTEGKVVDVARRPDGGVASLKLDDGRTVSADLFVDCSGFSSLLLGRTLGEPFVDFSHWLPVDRAWAVPSARVGDNLTPYTRATALDAGWAWRIPLQDRTGNGHVFSTRFIDEDKAREQLLQQLDGEALAEPRLLRFTTGHRAKFWSHNVVGIGLATGFLEPLESTSIYLVQVGVGRLMTLLQRGGPVAPDLVDAYNLGLTRQFERIRDFILMHYCLTARRDTPFWQYMAAADLPETLAYKLHAWRETGVLHQYDEEGFDGHSWLAIHAGMQNWPARSDPTLKLIPEEQSLEWVRERASQLAAAVATVPTHQEYLARVLGR

SEQ ID NO: 88124 - protein, 521 aa, Xanthomonas prunicola
  misc_feature (1)..(521): tr|A0A2N3RG45|A0A2N3RG45_9XANT Tryptophan halogenase OS =Xanthomonas prunicola OX=2053930 GN=XpruCFBP8353_18255 PE=4 SV=1
MPDTMPSDPQQRPVRRVVIAGGGTAGWMAAAALSKLLGRHLQITLVESDEIGTVGVGEATIPSLVTFHRLLEIDEAAFMVATQATIKLGIAFEHWRDVDRHYIHSFGHAGTDHWSAGFQHFWLKGRQRGVARDFGDYCLELRAAQEGRFAHLPNGGMNYAYHLDAGLYARFLRRFSEGFGVTRIEGRIGQVETDAESGFLTALTLQDGTRVEGDLFLDCTGFAGLLIGKTLGVGRDDWSHWLFADSALAVQTESVGPPVTYTRSRADQAGWMWRIPLQHRVGNGIVYSSRYMDQDSARAVLERNLTGRALTEPRPLRFTPNQRHRVWEKNCVALGLASGFLEPLESTNIHLIQRGIIRLLQTFPQVINAVDSAEYNRQAAQEITHIRDFVILHYHATDRRDTPFWRDCAAMDIPDSLRHRVELFRQSGRVFHQANELFAENSWVQVMLGQGVVPHQHHPVADLMGDAELSRFLETIRTRVEGALVRLPAHADFLHRYCPAPPPPEPAARVPAPTVMATPAE

SEQ ID NO: 88125 - protein, 513 aa, Streptomyces sp.
  misc_feature (1)..(513): tr|A0A1V2RV65|A0A1V2RV65_9ACTN Flavin-dependent tryptop han halogenase RebH OS=Streptomyces sp. MP131-18 OX=185 7892 GN=STBA_70250 PE=4 SV=1
MIRKVAIVGGGTAGWMTAAYLKAAFADRLDVTLVESESVGRIGVGEATFSTVRHFFDYLGLDESEWLPKCEGGYKLAIRFENWAKKGHHFYHPFERLRKVDGFSLAEWWLKLGDHTQPFDRQCFVTSALCEAKRSPRMLDGSLFASGLDGTLGRSSLSEQRAQFPYAYHFDADKVAAFLAAYGKERGVRHVVDDVVHSALDDRGWISHLQTRGGLRLDADLFVDCTGFRGALINQLLGEPFESFQDVLPNNRAVATRVSRQDITEMKPYTTATAMDAGWMWTIPLFHRDGVGYVYSDEFATPDEAERTLRERVGDAKAELDVNHITMRVGRCRDSWVRNCVAIGLSSAFVEPLESTGIFFIQNGIEQLVKHFPDERWDPELTRNYNARIAQAVDGVKEFLVLHYRGAARNDNEYWRAAKTRKVPGRLAERMEQALPHLIDEEAIYPYYHGFEPYSWNTMLLGLGNQPARARPALDHMDPGRARAEFDLLRAEANAVIEKLPSCYEYLERIHTP

SEQ ID NO: 88126 - protein, 513 aa, Novosphingobium sp.
  misc_feature (1)..(513): tr|F6ICQ6|F6ICQ6_9SPHN Tryptophan halogenase OS=Novosph ingobium sp. PP1Y OX=702113 GN=PP1Y_Mpl911 PE=4 SV=1
MQRPTKKIVIVGGGTAGWLTAGVIAARHLSRMPGGFSVTLVESPNTPIIGVGEGTWPTLRTTLAKIGVSETDFFRECDAAFKQGAKFARWTTGAHDDAYYHPLMLPQSFAQLNLAPHWLANGESSFCDAVCPQGRICDDGLAPKTIATPEFEALANYAYHLDAGKFAPFLQRHCTQKLDVRHVLADVQRVEMTEDGDIKSVVTEQAGEIEGDLFIDCTGFKALLIGEALGVPFKDCSDVLFCDTALAVQLPYESETSAIASHTISTAQSAGWIWDIGLPTRRGIGYVYSSDHTSGDDAERELRTYLGAAGKDLPIRKIPIRSGHRETFWKRNCVAVGLAAGFLEPLEASAIVLIELSAKLIAEQMPACREVMDPIARRFNATTDYRWGRIIDFLKLHYVLTQRRDSAFWQDNLRPESIPERLQELLLLWKYQGPWFHDEFDRVEEVFPPASYQYVLYGMGFRTEVEHEALAGDAGLAARAMRENAAQTQRLRAGLPRHRDLIRKIVDHGLQPV

SEQ ID NO: 88127 - protein, 503 aa, Planctomycetes bacterium
  misc_feature (1)..(503): tr|A0A517Z4G3|A0A517Z4G3_9BACT Tryptophan halogenase OS =Planctomycetes bacterium Mal4 OX=2528026 GN=Mal4_16350 PE=4 SV=1
MTRLEADVAVLGAGFGGSITSLLLQRSGLRPVLIDRSRHPRFAIGESSTPIADFILKDLAARYDLPALAPLAKFGTWREQRPELVCGLKRGFSYFRHRPGEPFRVDPGHSNELLVAASFDDRRADTHWLRADVDRFFAEQVQAEGIPYFDETDVSIETVDGGWRLDGNRNGEPVGIDAAFLIDATGGAESVLRALGISSTAEGMATCSRAIYGHFEKVAVWQESLAGAGADLSDHPFPCDAAAVHHLLEEGWMWQLRFINGITSAGFVLTGEQAADAGLTAEDEWETLLRRYPSLGEQFAEARLVAPESGLVRTGRMQRRAGQSAGENWAALPNTAGFVGPMHSTGIGHTLCGIERLVPMLAEHWRKPSLGRELQRYQQTLAQELRLIDRLVWGCERTVDQFELFTAYAMLYFAAATTYEDRRLNGRLAPGAAFLCADDERFVTVVERCRIRLLELLAAGPVTAERAAAYFDFVAEAIRSFNIAGLCDRGVRNMYRYTAVPAD

SEQ ID NO: 88128 - protein, 516 aa, Sphingomonas sp.
  misc_feature (1)..(516): tr|A0A518RGR1|A0A518RGR1_9SPHN Tryptophan 7-halogenase OS=Sphingomonas sp. XS-10 OX=2599297 GN=FPZ54_11795 PE= 4 SV=1
MLLQHEEGERRVAERVRSIVIAGGGTAGWMTAAALARVLGRDYATITLVESDAIGTVGVGEATIPQIGTFNRLLGIDENDFLRRTKGSFKLGIEFVDWGGLGRRYFHPFGKYGIDMEGVSFHAYWQRLAGDPQFAPEFGDVDTFSLMASAARANRFMPPIDAGNSPLSSIAYAYHFDAGLYALYLREIAEAMGVNRVEGRIVDVERNGESGHIDAVALDSGQRIEGELFVDCSGFIGLLIGKTLGVPYIDWSAHLPCNRAVAVPCASAPGPLTPYTRSTAHRAGWQWRIPLQHRTGNGMVYCSDYISDDEAAATLLANLDGEALADPRFLRFTTGHRQRFWEANCVSIGLSSGFMEPLESTSIWMIQTGIARLLSNFPDSSFAEADRARYNRLMIEESELIRDFLILHYHLTDRTDSPFWDYCRTMEIPERLAEKMRVFATSGRCFREHEELFNDTSWFAVMVGQGMRWARHDPVAELLSLAETRDRLAHIAGAVRASVDYMPDHADYIRQNCAAA

SEQ ID NO: 88129 - protein, 415 aa, Burkholderia ambifaria
  misc_feature (1)..(415): tr|B1FKN0|B1FKN0_9BURK Tryptophan halogenase OS=Burkhol deria ambifaria IOP40-10 OX=396596 GN=BamIOP4010DRAFT_4 591 PE=4 SV=1
MSEMKSNSVDVAIIGAGPSGAVAAALLRRAGRSVLVLERQHFPRFSIGESLLPQSMQYLEEAGMLQAVVEAGFQFKNGAYFVYRDRMSSFDFREKFSDGWGTAYQVERAAFDDLLIRCAAEQGADVRFGHTVQAFHPGDTQRLDVVDEAGCEYFVHASFVLDASGFGRVLPRLLDLEAPTGMPTRAAIFSHVEDSLPAGSTDRDKICIAVHPERRDVWFWMIPLTNGRSSVGCVADAGFLDVPQAQQESLLRELMQSEPTLSRLVGSKPFVMPVRRIAGYASNVEHLHGRGYALLGNAGEFLDPIFSSGVTIAMRSAQLAVAVLERQLRGETVDWTRDYDIALRKGIDTFRAFVERWYSGALQDIVFHEDKASDVKRMVCSILAGYAWDESNPFVREPARGLDVLAEFCRAGGLG

SEQ ID NO: 88130 - protein, 512 aa, Sphingomonas sp.
  misc_feature (1)..(512): tr|A0A518RAW4|A0A518RAW4_9SPHN Tryptophan 7-halogenase OS=Sphingomonas sp. XS-10 OX=2599297 GN=FPZ54_00195 PE= 4 SV=1
MKQVQNIVIVGGGTAGWLTAGVIAARHQGRRNHGFSVTLVESPNVPIIGVGEGTWPTLRTTLRKIGVSETEFFRQCDGAFKQGARFNRWTTGAADDGYYHPLMLPQGFARVNLAPHWLAEGEGSFCDAVTPQGQLCDAGLAPKTIATPEYEALANYAYHLDAGKFSAFLQRHCCETLGVNHVLADVTQARMADNGDVAALETAQGPVVEGDLFIDCTGFRALLIEGAMGVPFRSCADVLFCDTALAVQVPYDDPADTVACHTISTAQSAGWVWDIGLPTRRGVGHVYSSSHISDDQAERELRAYIGPAADGLSVRKIPIRAGHRDTFWKGNVVAVGLAAGFLEPLEASAIVLIELSAKMIAEQLPPNRAVMDVLARRYNATTQYRWGRIIDFLKLHYALTKRTDTGFWRDNCRAETIPDRLRDLMELWKYQAPWLHDEFDRAEEVFPAASYQYVLYGMGHRTHAPPGEGDAEVELARRAWRENRVQTARMMEGLPRHRDLLEKIVQHGMQPV

SEQ ID NO: 88131 - protein, 502 aa, Thalassomonas actiniarum
  misc_feature (1)..(502): tr|A0A0D8CQ87|A0A0D8CQ87_9GAMM Tryptophan halogenase OS =Thalassomonas actiniarum OX=485447 GN=SG35_24580 PE=4 SV=1
MQTTSQEDNKNKKIQRVVIAGGGSAGWMTAASLSKLLGKSLDITLIESEEIGRIGVGEATIPPLRTFNELLGINEQHFMKTVRGTFKLGIEFKNWGRQNDSYIHSFGDTGRICWAGEFQHFYLAGLKKGIKDEFGAYCPEHAAAKAGKFLGSRDGNLDYAYHLDAGLYADYLKQLALGKGVKRLEGKIEDVSIQAETGYIQALTLDNGTRVEGDLFIDCTGFAARLIEGALNTGFESYSHLIPCDSAVAVQTEKAGEPRPYTQAIAHNWGWQWRIPLQHRVGNGLVFCSRYTSDEEAIATLMDNLESPAITEPKVFRYNTGRRVKGWNKNCIAIGLASGFVEPVESTAIHLIMASILRLMKLFPHNEISQANIDEYNNQTREEMERIRDFIILHYKATERDDSPFWRYCQNMEVPQTLAHRMELFKKTARVCITQSELFRLDSWTQVMMGQGIMPENYHQIVDQMSDAELAKFLKGIKGQVDARVADMPGHQEFINYYCKAL

SEQ ID NO: 88132 - protein, 500 aa, Sphingomonas sp.
  misc_feature (1)..(500): tr|A0A518RII7|A0A518RII7_9SPHN Tryptophan 7-halogenase OS=Sphingomonas sp. XS-10 OX=2599297 GN=FPZ54_15595 PE= 4 SV=1
MEFNIVIVGGGTAGWMTAALLSKLFFRGHSVTLVESEEIGTIGVGEATIPGIKDYNRLAGIDLTEMIRATQATFKLGIEFVDWRAPGSSYIHGFGKIGTDLMWLHPHQLWLKLKAMGKARHFDDYALNCLAARQNKFCFPDPRNPGSPIGHIDYAYHFDASLYARFLRSRAEAQGVARIEGRIVAVKQRPEDGFVDHVVLADGRTIAGDLFVDCSGMRALLLGQTLGVGYEDWSRWLLCDRALAVPCERVAPLTPYTRSTAHDAGWQWRIPLQHRTGNGHVYASALIDDDTAARTLIDNLDGRPLGDPRPVSFRPGKRHKAWEKNVVGIGLSSGFLEPLESTSIHLIQTAILRLVALFPGRGFDDADIAEYNRQHHFEFDDVRDFIIAHYKVTQRSGTPFWDHVRTMDVPDSLAERLELFRASARFFVHGKAELFREESWVQVLLGQGMDMTYDPMVDMFPEEDVVEFMNDIAETNAEVAAAMPTHEAFIERHCRAPSLA

SEQ ID NO: 88133 - protein, 516 aa, Pseudoalteromonas marina
  misc_feature (1)..(516): tr|U1KXM3|U1KXM3_9GAMM Tryptophan halogenase OS=Pseudoa lteromonas marina DSM 17587 OX=1117316 GN=PMAN_14154 PE =4 SV=1
MTKPIKKIVILGGGTAGWLSAGLLAAEHPHLSVTLIESANVPILGVGEGTWPSMRNTLQRIGIKEIDFITQCDATFKQGSKFINWRNLNKGENYYHPFMDPQGYEQTNLHANWQRIAPNQKFADVVNMQSFVCQAALAPKQLQTPEYAAVTNYGYHLEAGKFAEFLKNHGVKNLNVTHITDDVTHVINDEHGYIASLKTNKNGDITGDLFIDCSGSRARLIGEHFNSEFIAQDHILFNNSAVAAQVPNAHINQPIASATLSTAQSNGWIWDIALPTRRGTGYVFSSQYQSDESATDTLKSYIAKSTSEQQTEQLNYRVLKFSPGYRQKFWIKNCVAVGMSAGFLEPLEASALAMVELSISMLSEQLPQNRTHMSQLANRFNDRFSTRWQRVVEFLRLHYVLSERDDTPYWQNIRDLTTAPERLQNLLKLWQFQPPSRFDFIENEEVFSSSSYQYILYGMGFNTQTPQAHNAFTSAQAGDYFYQQNREKIAQYLKGLPSNRALLNDLLSNNRQPHND

SEQ ID NO: 88134 - protein, 494 aa, Sphingomonas sp.
  misc_feature (1)..(494): tr|A0A518RGP8|A0A518RGP8_9SPHN Tryptophan 7-halogenase OS=Sphingomonas sp. XS-10 OX=2599297 GN=FPZ54_11705 PE= 4 SV=1
MNAPVASIVIVGGGTAGWMAAAAAARFLNDGRRTVTLIESDAIGTVGVGEATIPPIREFNHRLGIGERDFIRETGATIKLGIEFVNWARQGDHYLHPFGDVGHDFEGVAFHQFWLKHRIGALEDYWMSAQMARRDRFTHPAADPRSPLGGLAYAYHFDAGLYAAFLRRRAEAGGVRRVEGRIASVERDGESGHVTAVVLDDGRCVAGDFFIDCSGFRSLLLGDALGVGYCDWSHWLPCDRAIAVPCERVDPLTPLTRSTAHGFGWQWRIPLQHRTGNGIVYASAFGSEDDTRETLLANLDAPATDAPRSLSFTAGVRERQWEGNVVSLGLSAGFIEPLESTSIHLIQTGIAKLMWLFPDRDMGPRGRDEYNRLMHEAYEYVRDFIVLHYKATERRDTAFWRHVGEMAIPDSLAGKLELWRERGRVRRFDHDLFGVPSWVAVLLGQRIEPQGHDPLVDSMDDGRVTSAMRHIAATYAEVAGELPGHADQIAAMIR

SEQ ID NO: 88135 - protein, 516 aa, Pseudoalteromonas sp.
  misc_feature (1)..(516): tr|A0A2N5LQS9|A0A2N5LQS9_9GAMM Tryptophan halogenase OS =Pseudoalteromonas sp. MelDa3 OX=888435 GN=CXF89_15645 PE=4 SV=1
MTKPITKIVVLGGGTAGWLSAGLLAAEHPHLNVTLVESANVPILGVGEGTWPSMRNTLQRIGIKESDFITQCDASFKQGSKFINWRNLSEGENYYHPFMNPQGYEHTNLHASWQRIAPNQKFADVVNMQSFVSQAALAPKQLQTPEYAAVTNYGYHLDAGKFAEFLKNHCVKNLNVTHIIDDVTEVINDDHGYIASLKTNNNGDITGDLFIDCSGSCARLIGEHFNSQFIAQDHILFNNSAVAAQIPNAHADQPVASATLSTAQSNGWIWDIALPTRRGTGYVFSSKYQSDESATNTLKSYIAKSTSEQQAEQLTYRVLKFSPGYRQQFWIKNCVAVGMSAGFLEPLEASALAMVELSISMISEQLPQNRTHMSQLKTRFNDRFSTRWQRVIEFLKLHYVLSERDDTPYWQDISNLNTAPERLQNLLKLWQFQPPSRFDFIENEEVFSSSSYQYVLYGMGFNTQTVSAQNTFNDPRAGDYYYQQNREKIAQCLNGLPSNRALLNHLLLNNGQPHND

SEQ ID NO: 88136 - protein, 508 aa, Pseudoalteromonas sp.
  misc_feature (1)..(508): tr|A0A2N5LXI9|A0A2N5LXI9_9GAMM Tryptophan halogenase OS =Pseudoalteromonas sp. MelDa3 OX=888435 GN=CXF89_03465 PE=4 SV=1
MNKAIKTVAVVGGGTAGWLSAAIIASYHQGQNGDGLKVMLVESSDIPTIGVGEGTWPTMKNTLQQIGLREVDVFKACNATFKQGGKFVNWTHGNNDFYYHPFTVPLGYGRIDLAPYLDNVEDFAQQTNFQHDICEASLAPRVIAQGEYQGNCNYAYHLDAGAFAEMLKQHCKSKLGVEHIIGTVDQVKLDDDGAINVLTLKDQTRTINADLFIDCTGFSSLLLGQALNVPFKKMDHVLFNDSALAMQVPYDENDTSLASHTIATAQNAGWIWDIGLTHRRGVGHVYSSKFLSDDEAEQNLRDYLGDAANGLTARKISFESGYREKFWHKNCVAIGMSAGFVEPLEATAIMLVEISARFVAEHMPADTQVMPIVAKRFNEQMDYRWQRIIDFLKLHYMLTKRPEPYWQAHVQPNTIPQTLQEDLLLWGSRGPLIQDFHGALELFPAASYQYVLYGMGFKPDFTKQAYLYSQHVQAKQIIERNSQLTQQMLQTLPPHRAFIEQWLAANPV

SEQ ID NO: 88137 - protein, 501 aa, Sphingomonas sp.
  misc_feature (1)..(501): tr|A0A518RJA9|A0A518RJA9_9SPHN Tryptophan 7-halogenase OS=Sphingomonas sp. XS-10 OX=2599297 GN=FPZ54_17065 PE= 4 SV=1
MSGRLDIVIVGGGTAGWMCAAACAAKLDPRRYRVRLLESEEIGTVGVGEATLPQMKDFNDFLGLDEREFMAATQASFKLGIEFVNWGRQGDRYIHPFGTFGRPVGEADFFSYWARANIAGTAAPLFDYCFPIVMAKADRFMLPNGNPDDVRNAFSYAYHLDAFLYARFLRRWAEARGIERVEGRIVDVERDGEDGRIAAVTMASGARVAGDLFIDCSGFRSLLLGQTLDVGLEDWSHWLPCDSAVAVPSARSDAFTPYTRATRRSAGWQWRIPLQHRTGNGYVYASRHISDDAAAAALLANLDGEALADPRVLRFKAGKRHQGWSHNCIAMGLAGGFLEPLESTSIYLVQVAIMHMLTLLPAEPAIDPALPAEFNRVLDIEYDRIRDFLILHYVANAADAPLWEQVTSMKLPDTLRDRIDRFRHRGHVPAYRDGLFGPTSWQAVFVGQGIVPQAADRLADILPDAVLAERLDALSATIAYGVQSARDHAAFVSDYCPAPAP

SEQ ID NO: 88138 - protein, 494 aa, Sphingomonas sp.
  misc_feature (1)..(494): tr|A0A518RJB1|A0A518RJB1_9SPHN Tryptophan 7-halogenase OS=Sphingomonas sp. XS-10 OX=2599297 GN=FPZ54_17075 PE= 4 SV=1
MSARTRPIRRIVILGGGSAGWMTAAALGRALGGQRHSITLVESEAIGTVGVGEATVPPIHEFNRYLRIDPAEFLRATSGTIKLGIQFDGWGGPANAYFHPFGYLGVEMGGIHFHHYWLRHLAQGGDPDHAPYNLETLAARAERFAPATRMGPVHHAVHFDATGYARFLRGHAETSGVVRVEGKVAEVRLDPEDGFIDSLLLDDGRVIEGDLFVDCSGFRGVLVEGALKTGYVDWRQWLPCDSAVAMPAAREGDPPPFTRSIAREAGWQWRIPLQHRDGNGYVYSSAHLEHDAAARLLTERLPGAPLAEPNRLRFAAGHRKLIWNRNCVAIGLAGGFLEPLESTSIHLIQTAIVRLLAMLPRDGFDPGVAARFNRDTIREVENIRDFVIAHYALAGRDDTPFWRDVAAAGIPDSLAERIDVFRATGNILFEPGDLFGPTNWYCVLAGQGVRPASWHPIADGLSPEELARRLATLRGRVAEQLAELPPHTEFLRAL

SEQ ID NO: 88139 - protein, 503 aa, Duganella sp.
  misc_feature (1)..(503): tr|A0A1E7WXF4|A0A1E7WXF4_9BURK Flavin-dependent tryptop han halogenase PrnA OS=Duganella sp. HH101 OX=1781066 G N=prnA_1 PE=4 SV=1
MSLGLVKNIVIVGGGTAGWMTAAAMSALISNGCKIRLVESDEISTIGVGEATIPVIRGFNQLIGVDENEFLRQTQGTFKLGIEFVNWSKQGESYIHGFGVIGRDQLLAKFYQYWLKLYQAGKAPGVEHYSINTMAASMNKFMRAASDSGDSPLSDISHAFHFDAGLYAKYLRGLSEGRGVRRTEGRIVDTVLRADDGFVEAIVMESGERIEGDLFVDCSGFRGLLIEGALKTGYEDWSHWLPCDRAIAVPCESVSPLLPYTRATAHDAGWQWRIPLQHRIGNGHVYSSKFMEPEQAESILMNNLDGKPLAQPRHLKFTTGKRKRAWNKNVVAIGLAGGFMEPLESTSIHLVQTGITRLLMMFPHLGYDQADIDSFNEATDNEYAAIRDFLILHYKLNAREGKPFWDYCRNMEIPATLQRRMDLYRSNGRIVRASDELFTETSWLQVMHGQGLRAKGYHPLVDQRSEADIAAFLANVKDVVLRCAEHMPTHEEYIASCCAAPKM

SEQ ID NO: 88140 - protein, 510 aa, Massilia sp.
  misc_feature (1)..(510): tr|A0A098UII9|A0A098UII9_9BURK Tryptophan halogenase OS =Massilia sp. JS1662 OX=1519190 GN=IA69_03455 PE=4 SV=1
MSKPIEHVVLVGGGSAGWLAAAVLAAEHPRLAVTLVESPGVPPIGVGEGTWPSMRETLQRIGVSEAAFFRECDAAFKQGSRFDRWVDGSDGDTYFHPFSLPQGYGEANLVAAWQRTHRDVPFADLVSYQPHLCVQGRAPKQPQTPEFAGVANYGYHLDAGKFGVFLQKHCVEKLRVRHVLAHVVDILSTDDGDIAALRTREAGLVEGDLFIDCTGMASLLLGGHYGVPLVSQRNVLFNDRALAVQVPYPADDTPIASQTTSTAQSHGWTWDIGLPTRRGVGYVYSSAHVDDDAAETTLRAYLASTGIAGDITPPRKIAFDPGYRARFWEKNVVAIGLSAGFIEPLEASALALVELSAAWLADDMPATRAQMDTISARFNEAFTYRWERIIDFLKLHYVLSKRTDTAYWLDHRAPRTQSPRLRELLALWRTRAPSRRDFPRIEEIFPSASWQYILYGMGFRPELTERASDLPARADQYFRESARLTARMLPQLPANREMLHHIRQFGMPPG

SEQ ID NO: 88141 - protein, 521 aa, Sphingopyxis macrogoltabida
  misc_feature (1)..(521): tr|A0A0N9U6D4|A0A0N9U6D4_SPHMC Tryptophan halogenase OS =Sphingopyxis macrogoltabida OX=33050 GN=AN936_10615 PE =4 SV=1
MSDLVERVVIVGGGTAGWLAAALIAGSRRAKAAPLSITLVEAPDVPIVGVGEGTWPTIRTTLATIGLDESEFLAACDGAFKQASRFDGWVDGSAGDSYLHPFTTPPALPTGELLAAWQVSASDQPFAAAMSAQAAVCNLHLAPRQRSMPDYQGATNYAYHFATEKFGALLARHAKQSPLITHILDHVTGVRHSDNGDIAALTTRSGREIAGDLFIDCSGFKGLLIGDALGVDWIDRSDHAFNDRAIASQVPVPPGSPIASQTIATAHEAGWIWDIGLPSRRGIGCVYSSRFMDAERAEAVLRDYIARELPGAVPETKAFGVPFKHISFRTGHRARFWERNCLSIGLAAGFIEPLEASAIVLIELSLRALTDNFPADRAAMDIHAGRFNKLFRYRWDRIVEFLKLHYVLSRRDEPYWRAHRDPAHIPPHLAELLELWRGQPPSAWDFPYVDEIFSAQSHQYILYGMGFPAPAGWPASDRALAALAEMRQRARTLAAGLPTNRLYLDTLADDRAAAEQKEAAE

SEQ ID NO: 88142 - protein, 513 aa, Massilia sp.
  misc_feature (1)..(513): tr|A0A4Y9SHR2|A0A4Y9SHR2_9BURK Tryptophan 7-halogenase OS=Massilia sp. MC02 OX=2561931 GN=E4L96_09210 PE=4 SV= 1
MTAVRSVLIVGGGTAGWLTACFLAKRLGAHAADGVRITLVESPEVGPIGVGEGTFPSIKGTLAAIGIDEAHFIRECSATFKQGVSFRHWVREPGQPGADHYFHPFSHPSQRDGLPELLPYWLRGAAGEGVAFAQAVTLQKAIADASRGPKRLGDRDFVGPMNYAYHFDAGQFAQLLATHGKSLGVEHVLGHVERVDTDGQDMIAAVHTREHGVLKADLYVDCTGFRSRLIGEALGSPWRSLSDVLFVDRALAVQVPYAAADTPIPSYTISTAHEAGWTWDIGLQQRRGIGYVYSSRHTSDARAEEVLRRYVGSAMDGKEPRQLVLNVGYRDTQWVGNCVAVGLSSGFLEPLESSGIGLIETAAYLLGYLFPFGGEFAPAARLFNDLMRQRYERIVNFIKLHYCLTQRGSAFWRDNADPGSIPLPLQDQLAMWRSRPPTRLDFVTDLEMYPPSSWQYVLYGMEFATRLHPSAAPLDQWDDVRREFATLAQVARRAVADLPDHRRLVEHYLSRSS

SEQ ID NO: 88143 - protein, 517 aa, Sphingomonas sp.
  misc_feature (1)..(517): tr|A0A518RK26|A0A518RK26_9SPHN Tryptophan 7-halogenase OS=Sphingomonas sp. XS-10 OX=2599297 GN=FPZ54_18510 PE= 4 SV=1
MTGVGETVQRIVIVGGGTAGWLSACLIAAQANRSAERPLSVTLIESPDIPTIGVGEGTWPTMRRTLRRIGIAESEFLTSCDAAFKQGSRFIGWANGSPGDAYYHPFGAPVDGSAREIVGAWRDAAGNQPFAAAVSPQPGVCALHLAPRQRAMPDYGGALNYAYHLDAAKLAALLARHGVERLGVRRVRGHVTGVDAREDGDIAAVRVREGGAVEGDLFIDCTGHGSMLIGGHFGVPFVDRSDVLFNDRALAVQVPVEPDSPIASQTDATAHEAGWIWDIGLPTRRGVGCVYSSAHIDDDGAAAALGAYLGRDPADLGARKLAFRSGHRERFWERNCLAIGLSAGFLEPLEASAIVLIELSLDALIGDFPVTRDTMDIHARRFNALFRYRWDRIVEFLKLHYVLSARTEPYWRAHRDPTTIPERLAELLALWRHQPPSASDFPAMDEIFPAASHQYVLYGMGYPPPPSGPIATDTQAAARAMAQTVQRGRTLTASLPTNRAYLDALRAAAPRSALETL

SEQ ID NO: 88144 - protein, 522 aa, Massilia sp.
  misc_feature (1)..(522): tr|A0A4Y9SFZ3|A0A4Y9SFZ3_9BURK Tryptophan 7-halogenase OS=Massilia sp. MC02 OX=2561931 GN=E4L96_10370 PE=4 SV= 1
MVDRSDQTIRHIVIVGGGSAGWLTAGVLAADHRAAAPDGLRITLIESPDVPPIGVGEGTWPSMRDTLRRIGVSESAFFRSCDAAFKQGSLFRGWRDGSAQDYYFHPFSLPQGFGDAPLAERWLQRFTDTPFADLASHQPHLCAQGRAPKQMATPEFASVANYGYHLDAGKFGLFLRQHCVERLGVRWVPDHVVGIEAHDNGDVRAVRTREHGAIEADLFVDCTGMQSLLLGKHYEVPFVSQKQVLFNDSALAVQVPYAHEDAPIASQTTSTAQGSGWIWDIGLPARRGIGHVYSSAHTTDDKAEHELRAYVHASGGPAPDDQPRPRKLTFQPGYRERFWHRNVVAIGLSSGFIEPLEASALAMVELSAAMLSDNMPATRADMDIVARRFNDAFRYRWERVIDFLKLHYVLSDRTDSAYWQDNRAEASVPERVRELLALWRHRPPSRLDFHRLDEVFPAASYQYVLYGMGFRTAPTTHAAWRDAETADEHFRQAAALTTRMLGALPGNRDLINHICRHGLTRI

SEQ ID NO: 88145 - protein, 505 aa, Massilia sp.
  misc_feature (1)..(505): tr|A0A4Y9SHY4|A0A4Y9SHY4_9BURK Tryptophan 7-halogenase OS=Massilia sp. MC02 OX=2561931 GN=E4L96_06035 PE=4 SV= 1
MDSQRISSITVIGGGSAGWMAAAAIATYLGRSCTVRLVESEEIGIVGVGEASVPHIRLFNGQWLGIDEAEFVKRTQATVKLGIQFNDWSRIGDSYIHGFGAIGRSLGPLPFHQFWLKLFLSGRAGPIGAYSPQTVMAPLGKFAPRDRNAAPGTPLADIAYAYHFDATLYARYLRELGEQRGVQRIEGKIVSVQQRADDGFIESVTLESGQVIGGELFIDCSGFRGLLIEQTLKTGYHDWSHWLPCDRAMAVPSARVDPITPYTQSSARPAGWQWRIPLQHRVGNGYVYSSQHISDDEAAATLLSHLDGEALAEPRALRFTTGVRRKCWNKNVVALGLASGFLEPLESTSIYLAQSGVTRLLSLFPGRDFNPLLVDRFNRESEFEYERIRDFLILHYHATERDDTPFWDYCRTMSIPDSLRETMDLFRADGRYFRNGEDFFALPSWVQVMLGQRIVPRGYHPIVDEMPEERLVEHVEGMRRSLADAVATMPSHQEWIDRYWKAPAP

SEQ ID NO: 88146 - protein, 506 aa, Massilia sp.
  misc_feature (1)..(506): tr|A0A4Y9S6S9|A0A4Y9S6S9_9BURK Tryptophan 7-halogenase OS=Massilia sp. MC02 OX=2561931 GN=E4L96_17685 PE=4 SV= 1
MSPSALPKRILIVGGGSAGWMTALMYGDALIKKGVEITVVESPNVGTIGVGEGSTALLKRYFDELGIVESEWMPECHATYKAGISFPNWSTRPGYESYMHPFWSMLDHVTLPAYIQNVHARQRGVDIDANPDRYFIASKLARQGLAPLPPESFPFHPGYGYHFDAGLLGKYLQKKAMACGVRHKSCHVTEANLDVAGRVASISTMEGETLEADFFIDCSGFSALLIEKALKTPFVSYADVLFNDSAVALPTPIGETIPTVTVSAALSHGWGWKIPLTDRFGNGYVYSSSFISSDAAERELREHAGVGDADVQARHLKMKLGRVAQHWNRNVLAVGLSQGFLEPLEATALYLTQTTAGLFLVYLEKGELGEQAQAAYNREVNGYFDGHRDYIVAHYKTNTRTDTDYWRANAMGLDKISDSLKRIFQTWIEGKDLGAEIRHQGIEHYYPVGSWYALLAGMGTFPQLGADARQPAESLAQIDDFTRRCVLNFRDHRTVLNEQVRMREAA

SEQ ID NO: 88147 - protein, 500 aa, Alteromonas sp.
  misc_feature (1)..(500): tr|A0A136I1F2|A0A136I1F2_9ALTE Tryptophan halogenase OS =Alteromonas sp. Nap_26 OX=1795869 GN=AXW14_08755 PE=4 SV=1
MTQPLRIVIAGGGTAGWMAANLFANSWKNSPVEISLIESEDIGTIGVGEGSTPTLKRFFQTLSIAEHEWMPQCQATYKVNIKFNGWNGDVHASYSHPFISQLDVFSERAFHINALTRRLGLNVETRPEKFLMAGYLAKKQLAPIPSHNFPFAIEYGYHFDSMKLGQFLRNFGKKLGVKHIIGNIESVETHANDEISALTCTDGGRIEGDLFVDCTGFNSLLLQKTLGVKFNAFSKNLFNDAAVVLPTATLQSMPVETESTAMSNGWCWQIPLRNRTGNGYVYSQQYQSKEDAERELRQRLHLLDCDIEAKHLKMRVGQCEKHWYKNCLALGLAQGFIEPLEATALHLVQVSIEMFIDTFTKGQFSAQYQDTYNKDISERFERIRDYIVCHYKLNGRRDSQYWVDNRDNMHLSESLLSLLDVWYRKGDIVEEIKRQGIGKHFSTTSWHCLLAGYGVFPPIALQQPDSLKEKGDLFEENKLASFFSRCSLNFEKQKLLFQIA

SEQ ID NO: 88148 - protein, 527 aa, Streptomyces sp.
  misc_feature (1)..(527): tr|A0A285QCR5|A0A285QCR5_9ACTN Tryptophan halogenase OS =Streptomyces sp. 1331.2 OX=1938835 GN=SAMN06272789_058 5 PE=4 SV=1
MANSVVIVGGGTSGWMTATYLKVAFGDRVDVTLVESKNVPAIGVGEATFSTIRHFFNYLGLDEREWMPECHATYKLAVRFEDWREPGHVFYHPFERNRVVDGFALTDWWVQKQPTGRFDRDSFLIANMCDTERSPRYYDGSLFDSTFERGEEYRTTLTEQNTQFPYAYHFDATLLSKFLTRFGTERGVKHVLDDVVDVALNDRGEIDHVRTREQGDLHGDLFVDCTGFRSLLVAQALKEPFISFQNHLPNDSAVALRVPVDMAEYGLRPATTATAKDAGWIWTIPLFERLGTGYVYASEYSTPEEAERTLREFVGPAAENATANHIKMRIGRSERAWVKNCVAIGLSNGFVEPLESTGIFIIQNGIEQLVKNFPVGNEDTDQHLRNAYNRQAANIMDGLREFMVLHWYASKRTDNQYWKDTKTREIPDGLAERLEQWKVKLPDQESIYPHYHGFESYSYRAIILGLGGLPVQPLPVLSKLDSTAADREFQLVAEQTAALHEKLPSQYEYFAHLHGLPPAQRKAGSAR

SEQ ID NO: 88149 - protein, 522 aa, Alteromonas marina
  misc_feature (1)..(522): tr|A0A0B3Y5E7|A0A0B3Y5E7_9ALTE Tryptophan halogenase OS =Alteromonas marina OX=203795 GN=RJ41_13235 PE=4 SV=1
MTTATPITHIVVVGGGSAGWLTAGRIAAQHQCAIRKDIKVTLVESPNVPIIGVGEGTWPTMRSTLIALGISETTFIKECDATFKQGAKFAKWTTGEEHDFYYHPLMLPQGFSQTNLGPYWQSVAPELNESFSHAVCVQEAICEAGCAPKSIRHAEFAGTANYAYHLDAGKFTAFLTKHCTEKLGVHHVLADVNRVESSDNGDIKALHTEQGVIVEGDLFVDCTGFKSMLLGEHYKVPFIPCDDVLFIDRALAVHVPYDTPQSPIASHTISTAQDAGWIWDIGLQSRRGVGHVYSSRHQSKDEAYARLDSYVRQTSTLNGIDGINVKDITIQSGHRQHFWQNNCVAVGLAAGFLEPLEASALVLVELSASMIAEQLPANRAVMDIVAKRFNDTFSYRWQRIIDFLKLHYMLSKREDSAFWRDNRDSHSIPDSLKELLALWQYHPPSDKDFTSNNEVFPAASYQYVLYGMGFTSDLATHQQWVNADFAKQQLMQNRKARAMAVEKLPKHRELINKIHQFGLQAV

SEQ ID NO: 88150 - protein, 380 aa, Gammaproteobacteria bacterium
  misc_feature (1)..(380): tr|A0A424NGW3|A0A424NGW3_9GAMM Tryptophan 7-halogenase (Fragment) OS=Gammaproteobacteria bacterium TMED182 OX= 1986741 GN=CBD42_004380 PE=4 SV=1
LKGQQLQISKAYGDYSPELVAAKAGKFGFPKPQALNYAYHIDAARYAKYLRTLAQQNGVHRVEGKVEAVKQTLSGDIESVQLASGQSISGDLFIDCSGFTGLLIDKTLHSPFEDWSQWLPCDRAVAVQTSSTEPPIPYTRSIAQDFGWQWRIPLQSRTGNGFVFSSQHASDDEATHTLLSNVSGDVLIEPRVIPFQTGQRSAQWKNNCIALGLAAGFLEPLESTSIHLIQRGIIRLMQMFPYGGVTQADQDEFNAQMNQEYHFIRDFIIMHYHLTERTDTEFWKHCQTMRIPESLKHRLDLFKETGRVFQAEGDVFGENSWTQVMLGQGLKPRSYHPIVDMMDEEELAQFLAHQENKVTHLVGQLHNHEDFLARYCPMKP

SEQ ID NO: 88151 - protein, 505 aa, Sphingomonas sp.
  misc_feature (1)..(505): tr|A0A518RC44|A0A518RC44_9SPHN Tryptophan 7-halogenase OS=Sphingomonas sp. XS-10 OX=2599297 GN=FPZ54_02590 PE= 4 SV=1
MSSQAPRDDRPRTRVVIVGGGTAGWMAAAALIRRLPHACSVRLVESEDIGIVGVGEATLPHLRAFVSMLGIDEAEFMRVTQATYKLGIEFRDFGRIGDSYLHPFGTFGMPLNGVPFHHLWLRMQAEGRHDTLFDYSVCNRMAAQGRFAPPTHEAGSLRSTYGYAYQFDATLFAPYLRDYAVARGVERTEGRVVDVTLDPLSGDVAALTLASGERVEGDLFIDCSGFRALLIGEAIGSPWEDWSHWLPCDRAVAAPCASPEGPIEPFTRAIAMAAGWRWRIPLRHRVGNGYVFSAAHLDEEAATAALIEAFENPPLADPRVLRFRAGRRARSWDRNVVSVGLASGFLEPLESTSIYLAQGAVEQLIALFPIDGRIADADRDEFNRTVDLEYDRIRDFLILHYHATTRDDSPFWNDMRTMRIPDSLAEKMELFRQSGRVVRYSQGLFFEPSWLAVYLGQGIVPRHWDQRADAFDPAHLGPALDKLRAQIAATVGAMPSHDAALGIGA

SEQ ID NO: 88152 - protein, 492 aa, Streptomyces globisporus
  misc_feature (1)..(492): tr|A0A0U2TBQ3|A0A0U2TBQ3_STRGL Tryptophan halogenase OS =Streptomyces globisporus C-1027 OX=1172567 GN=WQO_3376 0 PE=4 SV=1
MSAQYDVIVVGGGPAGSTVSTLVRKRGHRVLQLEKETFPRYQIGESLLPSTVHGIAHLLGVSDELKKAAFTIKHGGTFKWGANPEPWTFDFAVSRRMPGATGYAYQVERMKFDQILLDNARRHGVEVRENSDVLDVLKAEDGRVRGVRYRDSEGREHEVGSRFVVDASGNTGGLYKKSGAKREYSPFFRNLALFGYFNGGKRLPKPNSGNIFTCTFEHGWFWYIPLSPELTSVGAVVNRDSASLVQGDPEKAMESFIAACPLIAEKLSEATRVTEGPYGELRVRKDWSYSNTKFWAPGMALVGDAACFVDPVFSSGVHLATYSGLLAARSLNSCLDGSVDETSAFEEFEARYRLEYGRFYEFLVGFYDMHHSEDSYFWQARKISNTADSDLQSFVELIGGVSSDEFADTARARQRFSEASDEMAGMTHTAAGDADGPHGAVPGKVVGRLMEQSAALQARALLGDEAGAERPVRQGGLAASTDGLGWVPGARS

SEQ ID NO: 88153 - protein, 508 aa, Duganella sp.
  misc_feature (1)..(508): tr|A0A1E7WN01|A0A1E7WN01_9BURK Flavin-dependent tryptop han halogenase RebH OS=Duganella sp. HH101 OX=1781066 G N=rebH_3 PE=4 SV=1
MNPGTRDPNNRRPVRRVVIAGGGTAGWMAAAGIAKVLGKRLDIKLIESDEIGTVGVGEATIPTLMNFHHLLEINEQEFMAETQATFKLGISFESWRNVRQDYIHSFGVTGTDHWTAGFQHFWHKGVERGLAGDYGDYCLELKASLENRFAHLPDNGMNYAYHLDASRYAKYLRRLSEPRGVQRIEGKIVRYTTHEDNGDVRSVVLESGQEIEGDLFIDCTGFRGLLIGDAMQEPMEDWSQWLFCDRAIAVQTESVGDAVPLTRSMAHQAGWQWRIPLQHRVGNGIVFSSRHLDEDAAMRQLMGNVEGKALIAPRVIKFKPCQRKHTWKGNVVAIGLSSGFLEPIESTSIHLIQRSVVRLMQTFPTDGISQADIDEYNNQCNSEIEHIRDFVILHYHVNNRTDSPFWVEAREMSIPASLQHRIALFRETGRVFRVPNELFAENSWIQVMLGQGIMPRSHHQSADLMGDEELRHFLGGIKSRVDRIVVQLPSHQAYVERYCGRAESAKAA

SEQ ID NO: 88154 - protein, 499 aa, Sphingopyxis macrogoltabida
  misc_feature (1)..(499): tr|A0A0N9UBX3|A0A0N9UBX3_SPHMC Tryptophan halogenase OS =Sphingopyxis macrogoltabida OX=33050 GN=AN936_10600 PE =4 SV=1
MNEDKPVRRIVIAGGGTAGWMMAAAIARTMGPTVDLTLVESEAIGTIGVGESTIPPLVNFNRILGIPEPEFMRAAQATFKLGILFDNWKHDGHSYFHSFGLSGKDHWSAGFQHFWLHGKARGHEQSYDDYCVELVAGLQGKFAHLPEERMNYAYHVDATLYGRFLRKLAEADGARRVEGKIARVELDSESGDIAALLLDGDRRIEGDMFVDCTGFRGLLIDGALHAGFEDWGHWLPNDSAIAVQSDHLGPPMPYTQAIAHDAGWQWRIPLQHRMGAGIVYSSGYLSRDAAYERLMSSVGTPRIEPFDIKFRGGVRRKQWFRNCVAVGLAGGFVEPLEATTVHLIQRAVLRFIRMMPNGRVSERDAAEFNDQQRLDIEQIRDFVILHYKATNRRDSPFWRHVANMPIPASLEQKIELFRETGRVFRKNEELFAENSWVQVMMGQGIEPQSYHPIAEKLRDDELDRLLRMLRENVTNTVATLPEHHAYVARYCGAEAPATE

SEQ ID NO: 88155 - protein, 513 aa, Pseudoalteromonas marina
  misc_feature (1)..(513): tr|U1L1D2|U1L1D2_9GAMM Tryptophan halogenase OS=Pseudoa lteromonas marina DSM 17587 OX=1117316 GN=PMAN_07157 PE =4 SV=1
MSGVINRIIVLGGGTAGWITAGILAKKHASNLSNQGIKVTLIESPEISVVGVGEGTWPTMRKTLSQLGISETQFMRECGATFKQASKFVNWVNAKDDVYYHPFTEPQGFNKVDPAPYWQSVVEPTCSFSEAVSFQQYLCEQGLAPKTIANKEYEVIANYGYHLDAAKFIALLRKHCISELGVEHISDTVDRIEQAPCGDISCLQTKEHGAQLADLFVDCSGMRSLLLGETLKVPFIPCNDVFLADTAIATQVPYINENDPIACHTISTAQEAGWIWDIGLQERRGVGYVYSSKHCSEEQARKTLANYIGLEEVKTAKKINFKPGHRKIFWKNNCVAVGLAAGFLEPLEASALMLIEASANYIADQLPPNKELMPITAKRFNAIMLKKWRGVIDFLKLHYALSERTEPFWLEHRDTQSIPNSLQELLSIWRYSSPSEYDFTDNVEAFSAASYQYILYGVGFKSDFSQMKHIYNQGELAKKQLQMTKIRIDQLKYNLPTHRDLINKVNSLGFAKL

SEQ ID NO: 88156 - protein, 512 aa, Altererythrobacter dongtanensis
  misc_feature (1)..(512): tr|A0A1B2AGR8|A0A1B2AGR8_9SPHN Flavin-dependent tryptop han halogenase RebH OS=Altererythrobacter dongtanensis OX=692370 GN=rebH PE=4 SV=1
MIDGLTRDILIVGGGTSGWLCAAYMANTLGTVRQGGPRIRLMEASDIPTIGVGESTIPPIRSVIAGTGIDEVDFLRETNATFKMAIRFDGWRKPVAGCEHGFFHAFGPHGRIGSEPLAPYWLVSGAYKRTSFVDYSMNNGPAIAAGKAPKRMSDQPFKGPLDYAYHFDAGLLAELLKKRATSLDVEHIVATIDKAEVSGEEITAVVTADGRRLTADLFVDCTGFSARLIEQALGEPFVSASDTLFCDRAVACQVPYRDPECPIPPFTRSSARPNGWIWDVPLMHRRGTGFVYSSAHISDEDARDHLISYLGDDGAGAEPRLLRFRVGHRDRPWRGNCVAIGLSAGFIEPLESTGIYFSDIAIRWLTDFCLDRRQFPTAAKAFNERMQACYADVLDFIKLHYVLSDRDDTAFWVDNRAAETVPASLREKLEMWAYRMPSEYEFGQLPAVFGYSNYVQLLLSLGHHPELVMLKARYREVDRAARIANAIEQVAASGLAALPGHRDLLSRLARGA

SEQ ID NO: 88157 - protein, 505 aa, Massilia sp.
  misc_feature (1)..(505): tr|A0A098UJK9|A0A098UJK9_9BURK Tryptophan halogenase OS =Massilia sp. JS1662 OX=1519190 GN=IA69_02915 PE=4 SV=1
MQQNNPENIGRKPVRRVVIAGGGTAGWMAAAVISRILGKTLDITLVESDEIGTVGVGEATIPSLIQFHQLLELNEADVMRATQATFKLGISFENWRAPGEDYIHSFGLTGVDHWTAGFQHFWHKGRQRGLASDFGDYCLELRSAQLGRFAHLPNDVMNYAYHLDATLYARFLRKYSEGFGAKRVEGKIDQVMLDAASGYVTGLKLGNGALIEGDLFIDCTGFRSLLLGQTMGVEYDDWSQWLFNDTAIAVQTELMGEPVPMTRAIARGAGWQWRIPLQHRVGNGHVFSSKYMDGEEAMQILLDNLQGEPLTQPRMIKFKPGQRKQSWKGNVVAIGLSSGFLEPIESTSIHLIQRNLIRLMQMFPADGICRSDIDEFNTQVQREIAHIRDFIILHYKVTSRADTPYWEAARNMEVPASLQHRIDLFRETGRVFRTEGELFTESSWLQVMLGQGMMPEQHHQSADLMGDAELSQFLGSIRQKIERTVQQLPSHQAYVQRFCRAERPS

SEQ ID NO: 88158 - protein, 502 aa, Massilia sp.
  misc_feature (1)..(502): tr|A0A4Y9SC04|A0A4Y9SC04_9BURK Tryptophan 7-halogenase OS=Massilia sp. MC02 OX=2561931 GN=E4L96_13835 PE=4 SV= 1
MQQAIKDIVIVGGGTAGWMSAAALATILNGRYNIRVVESDDIGIVGVGEATIPMIQRFNTVVGIDENEFMRETMGTFKLGVEFVNWGRQGDRYMHGFGRLGQDLATVPFDQYWQKMRQLGKAAPLEQYSITRMAAKANKFMPPNFEVRNSPLGDIVYAYHFDASLYARYLRKLCEQRGVVRTEGKIVQVQQREGDGYVEAVVLENGTRIAGDLFIDCSGFRGLLIEQTLKTGFEDWSHWLPSDRALAVPCESVTPLTPYTRATSHKAGWQWRIPLQHRIGNGHVFCSKYISEDEAASVLLANLDGKPLADPRLIKFTTGRRKQAWNRNVVAVGLASGFLEPIESTSIHLIQSAIQRLIDFFPDRGFNEVDIAEYNRQSQFEYERIRDFIILHYHLNQRTDSEFWKACAAMEIPETLKHKLDLYRAHGRVVRIDNELFSEVGWIQVLEGQNAPIEGYHPLVDVQSEGDIHEYLESVRDVIGKCVEVIPDHAAYVAKHCMAPKR

SEQ ID NO: 88159 - protein, 415 aa, Pseudomonas fluorescens
  misc_feature (1)..(415): tr|I4L136|I4L136_PSEFL Putative tryptophan halogenase O S=Pseudomonas fluorescens Q8r1-96 OX=1038923 GN=PflQ8_0 465 PE=4 SV=1
MPTVEMERRQVVIIGAGPSGAIAAALLKRKGHDVLVIERQHFPRFSIGESLLSHCLDFVEEAGMLDAVNAAGFQRKNGAAFAWGERYSAFDFGDTFSNGKPTTFQVQRADFDKLLADQAALQGVEIRYGQAITSADFSLAKPRLGVQREDGSEYCVEADFVLDASGYGRVLPRLLDLEAPSNFPVRQAVFTHIEDRIDAPAFDREKILITTHPSKRDVWFWTIPFSGGRCSVGVVAAAEHFAGRTDDLDACLRSFIDETPSLAGVLQNAVWDTPARTIGGYSANVKTLHGQGFALLGNAAEFLDPVFSSGVTIAMRSASMAAAVLHRQLQGESVDWQSEFAEPLKRGVDTFRCYVEGWYAGTFQDVIFYTEGSDDIRRMISSILAGYAWDQRNPFVSEPKRRLRMLSEICASPAP

SEQ ID NO: 88160 - protein, 507 aa, Massilia sp.
  misc_feature (1)..(507): tr|A0A098U4S3|A0A098U4S3_9BURK Tryptophan halogenase OS =Massilia sp. JS1662 OX=1519190 GN=IA69_22530 PE=4 SV=1
MQQNPIRKIVIVGGGTAGWMTAAPLALRLGQRCEIVLVESPDIGTIGVGEATLPTIRFYNAALQLDHADFIRKTQASFKLGIEFKDWGHLGNRFFHGFGDFGPPINGIQPHHYWLRLARTFDHMPAMENWSMASVMARENKFTMPNDAQPGATDAFSFGYHFDAGLYAAFLRDYAMARGAKRVEGTITTIDQHPETGFVTAVRLADGRTLDGDLFIDCSGFRGLLIEGALKAGYDDWSEHLPCNSALAVPCARVEPLTPYTRSTAKGAGWLWRIPLQHRTGNGHVYSNAFTTDDKARQDLLDGLDGAALDEPRQLRFVTGKRKKSWVKNVVAIGLSAGFVEPLESTSISLIETAVGTLIEQFPDRDFRPELADEFNRIIGSRYESIRDFIVMHYKLTKRDDTEFWRYCANMAIPDSLAHQIELFRETGRVAILDRDSFLLPSFVSMLVGLGVEPKRYDPFADDVDMRQLHGHFAGLRDLIAQTVAKMPGHGAYLEKNAKAPPVGKAA

SEQ ID NO: 88161 - protein, 517 aa, Thalassomonas actiniarum
  misc_feature (1)..(517): tr|A0A0D8CT05|A0A0D8CT05_9GAMM Tryptophan halogenase OS =Thalassomonas actiniarum OX=485447 GN=SG35_24550 PE=4 SV=1
MVENKTDDIRDLVIVGGGTAGWLMASRLAAKYQTSPDCPVKITLVESPSVKPVGVGEGTWPGMRSTLKAIGLSESDFMRECDASFKQGSKFNGWRSGNMDDSYYHPFTLPLGYDDLDMMHFVQHSPRQGSFAKAVCPQVEICQQGLAPKQITTPEYAGVVNYGYHLNAGKFAALLKRHCLEKFNVSHVLDEVVKVNGAANGDIASVSTENHGDICGDFFIDCTGFACLLLGGFYQVPFIGQRHILFADTALAVQIPYPAADSPIACVTQSTATAAGWIWDIGLTNRRGIGHVYSSDYCSEVQAEQELAAYLGHDFKGVEIKKIPIKPGYRSHAWEKNCLAVGLSAGFLEPLEASAIVQVELAADWLCLQLPANRSGMDVIAKRYNQEFSYRWQRIIDFLKLHYVLSQRRDTDFWLDNRHRDSIPDSLQELLSLWSCHYPTKNEFPRHHEIFSLYSYQYILAGMDYRSEAAYALTALEEDVARQHIMKGEQLKAQYLQHLPGHRELLEKIARYGFKGV

SEQ ID NO: 88162 - protein, 500 aa, Alteromonas marina
  misc_feature (1)..(500): tr|A0A0B3YHR4|A0A0B3YHR4_9ALTE Tryptophan halogenase OS =Alteromonas marina OX=203795 GN=RJ41_06220 PE=4 SV=1
MTTPHRIVIAGGGTAGWMAANLLAHRWANQAVTITLIESEDIGTIGVGEGSTPTLKRFFQTLNIPEYDWMEECQATYKVNIKFTGWSGNNSHSYSHPFISQLDIFSERAFHVNALTRRLGLDVETQPDKFLLAGYLAKKKLAPLPSHNFPFDIEYGYHFDSLKLGRFLRERAKSKGVSHVIGNIESVHTTSSGDISHLVCQDGQKFAGDLFIDCTGFSGLLLQKTLGVPFRDFSDNLFNDSAVVLPTPACANLPVETESVAMSNGWRWQIPLRNRTGNGYVYSKQYQEKDAAECELRRALGMENTNVEAKHLSMRVGQCERHWEKNCLALGLSQGFIEPLEATALHLVQTSIELFADNYSFGATSAQQRQIFNQEVSERFERVRDYIVCHYKLNGRNDSDYWRDNRANMKLSESLLSLLDVWYRKGDIVEEIKRQGIGQHFSTTSWHCLLSGYGIYPPPALNQPASLKESGDLFEEKKLAAFFNRCSLNFDKQSTLFRAG

SEQ ID NO: 88163 - protein, 506 aa, Massilia sp.
  misc_feature (1)..(506): tr|A0A098UC18|A0A098UC18_9BURK Tryptophan halogenase OS =Massilia sp. JS1662 OX=1519190 GN=IA69_08420 PE=4 SV=1
MVKNRWIHKVVILGGGTAGWMTAAALSHTFGHAVEIVLVESDAIGTVGVGEATIPPIRAFHQMIGVDEAEFMRATGATFKLGIEFRGWRNESSTYFHPFGVYGVERDIGYFFQYWLRLKEKGQVADFSEFSLCTLAARSNLFAPASERPGDPLQHLQSAYHFDAGRYAKYLKGVCIARGVSHKIGDMLTAEHDSENGHITGLKLKSGELVTGDLFIDCSGMRAMLLGQALGVDYEDWSHWLPMNRACAVPCEQKLALTPYTISTARPFGWQWRIPLQHRVGNGVVYSNEFATDEAAERCLLDGLEGEPLAPINRIRFTAGRRKTPWHKNVVAIGLASGFLEPLESTSIQFIQSSIQRLIRYFPEAGFAPVCAQAFNREATREIENVRDFLILHYHATERDDSELWRYVKTMQIPDSLQERIELFRERGQLNLANEELFQSTSWHAVLLGQGIRPRTYMPTMALQDDAMLANAYSNLERNFKKIVSRLPDHAAYIKEHKLTSTMENR

SEQ ID NO: 88164 - protein, 517 aa, Thalassomonas actiniarum
  misc_feature (1)..(517): tr|A0A0D8D2B9|A0A0D8D2B9_9GAMM Tryptophan halogenase OS =Thalassomonas actiniarum OX=485447 GN=SG35_08535 PE=4 SV=1
MDKPTKTVVIVGGGNAGWLTAGRLAAKHKSNKAQGLEVILVESPSIPAIGVGEGTWPTMRATLMALGISESDFIRECDASFKQGAKFAKWVDGSEDDFYYHPLVLPQGFGKGDLAGHWLAQQAGEKRESFSQAVCFQEAICENSLAPKTIRTPEFADIANYAYHLDSGKFSRFLQKHCIEKLGVKHIVDDVTGVDSATNGDIAAVKTQNNGEITGDLFVDCSGFSSLLLGKHYQVPFKSCSDVLFIDTALAVQVPYEHEQEEIASHTISTAQEAGWIWDLGLQHRRGVGYVYSSKHSSEAQARAVLKQYVGDKFDELTVRKIPIVSGHRETFWKNNCVAVGLSAGFLEPLEASALVLVELSAQMISEQLPQTRAVMDIVAQRFNETFHYRWQKIIDFLKLHYILSKRSDNAFWCDNRDPSTIPESLQQVLALWKYRAPADHDFTSNNEVFPAASYQYILYGMGFESDYSLSLYALDDIDFAQSQFAQNKKKIAQVMANLPGNRELLNKIKRFGLGRI

SEQ ID NO: 88165 - protein, 495 aa, Pseudoalteromonas marina
  misc_feature (1)..(495): tr|U1JYU0|U1JYU0_9GAMM Tryptophan halogenase OS=Pseudoa lteromonas marina DSM 17587 OX=1117316 GN=PMAN_14159 PE =4 SV=1
MTKTNAVKNVVIAGGGTAGWMAAAALAKLIGENIHVTLVESDDIGTVGVGEATIPPIRTFHKLLGINEQAFMKATQASFKLGISFENWGDENTRYIHSFGATGKECWAGEFHHFWLQGKTLGINNPFGDYCYELQAAKAGKFAFNQQNPINYAYHMDATRYAQFLREFSEPLGVKRVEGKIQKVVKNAKTGHIESLLLNSGEQINGDFFIDCTGFRGLLIEQALHTGYEDWSHLLPCNSAIAVQTKSTSDTVLPLTRSIAHKSGWQWRIPLQSRVGNGLVYCSQYMDDEQAKALLLNNIEGEALTEPRVIKFKTGRRLKGWNKNCLALGLASGFVEPLESTSIHLIMSGIIRFMRLFPFNGITNHAIDEYNKQLKSEIENIRDFIVLHYKVTNRDDSEFWLHCSAMEVPKTLKHKIDLFKQTGRVFLDDGDIFRVDSWVQVMLGQGIVPEQHHLIASMMSDEELARFLHGIKQQIEQRVSQLPPHHEFLKHYCPA

SEQ ID NO: 88166 - protein, 483 aa, Nocardia sp.
  misc_feature (1)..(483): tr|A0A4P7HCQ2|A0A4P7HCQ2_9NOCA Tryptophan halogenase OS =Nocardia sp. CS682 OX=1047172 GN=DMB37_37155 PE=4 SV=1
MTTTDWDVIVVGGGPAGSTASTVIALDGHRVLLLERDRLPRYQIGESLLPSTIHGILPLLGVHEEVEAAGFVRKNGGTFRWGASSEPWTFAFAASPDMIELGAYGYQVERMKFDGILLLNAQRKGVDVRQNHGVNGVLEDDGRVSGVTFTDDSGQRRTATAKFVIDASGNGSRIHRAVGGDREYSPFFRNLAVFSYFEGGERLPEPNSGNILSAAFDDGWFWYIPLSDKLTSVGAVVGADKAGPIQADPDAALRSYIAQCPLVDRYLRDAVRSTTAPYDTVRVRKDYSYDRPVLWRPGMAVVGDAAMFIDPVFSSGVHLSTYGALLAARAINTHLAGSADEATCFGEFEDRYRREFAIFRDFLVAFYKMNLTEESYYWEAKRAAHHDGSVLQAFLDVVGGMMARDIIPPGGLPPEARTMPIPPAMIGGFAKGMEMGIRDMRGAVDPGAPTPAGASKFVPSADGRRWQVRADQVEPEARHAVGR

SEQ ID NO: 88167 - protein, 503 aa, Brevundimonas sp.
  misc_feature (1)..(503): tr|A0A1H1CJS5|A0A1H1CJS5_9CAUL Tryptophan halogenase OS =Brevundimonas sp. 374 OX=1150400 GN=SAMN02787020_1519 PE=4 SV=1
MIPAPLKRILIVGGGTAGWMAAAALAHVTRGTVKVELVESEVIGTVGVGEATIPPILLFNQLLGIDENEFVRATQATYKLGIQFNDWFQKGRSYFHPFGTYGTRIDAASFHQYWLRLNKAGLDDDLDAYSVTTMAARMSRFTRPDADPRGAGSQMTYAFHFDAGLYARFLRRRAESQGVVRHEGKIADVRLRDGDGFIQSVRLDDGRELEADFFIDCSGFRGLLIEGALKTGYEDWTHWLPADRAVAMPCTRVGDPTPYTQSTALEAGWRWRIPLQHRTGNGYVYCSPFISDDEAQARLRASLDGEAMAEPNFLRFTTGRRKKTWNKNCLALGLASGFLEPLESTSIHLVQSGISKLLLHFPDTGFAQADIDNYNRMMRLETERIRDFIILHYHATARDDSPLWRHVRAMPIPETLKQKMDQFRSRGRIFRYEDELFQETSWIAVLLGQGVIPERHDPITETIPLEQVQQWLQKMKAMIQQGVARMPTHDAFITANCKAPPLR

SEQ ID NO: 88168 - protein, 487 aa, Altererythrobacter dongtanensis
  misc_feature (1)..(487): tr|A0A1B2AH03|A0A1B2AH03_9SPHN Flavin-dependent tryptop han halogenase PrnA OS=Altererythrobacter dongtanensis OX=692370 GN=prnA PE=4 SV=1
MAAAALSRLREGNALDITLIESEEIGTVGVGEATIPPFVEFNQLLEIDEREMMAATQASFKLGIQFVNWGKQGDSYIHPFGNYGLPINGVGFHQHWRRARVEGDRRPIQAFNLETMAAYFGKFARTPDYNRSGDYPPVNYAYHIDATRYARFLRGYAEKRGVVRSEGKVVDVTLDGESGFVTSVTKADGSVIEGDLFIDCSGFRGLLIEQALETGYEDWRHLLPCDRAVALPCQREDGSPPPPFTRATAHSAGWQWCVPLQHRNGNGHVYCSQFMSDDEAHDILVNNLAGKPQADPNFLRFVTGRRKKFWNRNVVALGLAAGFMEPLESTSIHLINTGVNKLIALLSLQGITQAQEDAFNRFTTKEYVRIRDFLVLHYNATARDDSEFWNYVRTMDVPDSLTEKVALFRLNGQIFREEDELFTETSWAAVMMGQGIAMEGHNPMADRISSPDLKTELDGIERSVRHVVDRMPGHHDYLKRYCPAPAA

SEQ ID NO: 88169 - protein, 506 aa, Xanthomonas prunicola
  misc_feature (1)..(506): tr|A0A2N3RDV9|A0A2N3RDV9_9XANT Tryptophan halogenase OS =Xanthomonas prunicola OX=2053930 GN=XpruCFBP8353_22170 PE=4 SV=1
MIPAPLRNIVIVGGGTAGWMAAAAFARVLGPTFKVQLIESEQLGTIGVGEATVPHIKAFNNLLGIDEAEFVRQTHGSFKLGIEFVDWQRPGSAYMHGFGTQIGHPLGLLPFHQYWLKQHARGRAQPLGAYTLNTVAATRGKFMTSAGDVPANSPLANIAYAYHFDATQYAHFLRRYSEQRGVTRIEGLVEQVQLHPESGHVQSLQLASGQVVHGDLFIDCSGFRGLLIEEALHTGYHDFTHWLPCDRALAVPCESAGPPTPYTRSTARAAGWQWRIPLQHRTGNGYVYCSAHISDDEAAATLLANLDGKPLADPRPLRFTTGRRKQCWNRNVVALGLASGFLEPLESTSIHLIQSGISKLLELFPREGISPVLVQRYNDRSAFEFDRIRDFLLLHYHATERDDSAFWRHCRSMPITPELQTTLDLFRDSGRFYRNAEEMFAEISWVQVMVGQGILPQGYHPLVDQVPDRDAEGFLASVAQTISHCVDVMPTHQQFIDRYCRAAALP

SEQ ID NO: 88170 - protein, 507 aa, Novosphingobium sp.
  misc_feature (1)..(507): tr|F6INE9|F6INE9_9SPHN Tryptophan halogenase, putative OS=Novosphingobium sp. PP1Y OX=702113 GN=PP1Y_AT20776 P E=4 SV=1
MTQTRFSIVIVGGGTAGWMSAAALARFAPPGYAVTLVESEAIGTVGVGEATIPAIRLFNKALGIDEAQFLRETSASYKLGIAFDGWLGEGHSYMHAFGTVGRPLGLLPFRHYWARAKAAGIAKPLAHYAANELAARTGRMATGVSGPGIPELPWAYHFDAGLYAAFLRRLAQSMGVTRHEGRIARVIRKDEGDIAAVQTEGGQTLAADFFIDCSGFKGLLIEEELQTGYEDWRHWLPCDRAVAAPCEAAGPFTPYTRSIARSAGWQWRIPLQHRIGNGLVYCSEYLSDDAATGLLLSHLEAPAQADPRLLRFTTGRRRKAWNRNVLAVGLASGFMEPLESTSIHLIQSTIMRFLTVLPCGPASPAIVSAFNRRTAEEFESIRDFLILHYKANARAGEPFWDRCRDMAVPDTLAARIAEFEEACQIQPAGDELFQEAAWLQVMAGQGIEPNGWNPIADALSEEDLAGFLGAVEQACLQTVGPMPRHMDFLAATCASALSSSPELETLP

SEQ ID NO: 88171 - protein, 506 aa, Pseudoalteromonas luteoviolacea
  misc_feature (1)..(506): tr|A0A0F6AI07|A0A0F6AI07_9GAMM Uncharacterized protein OS=Pseudoalteromonas luteoviolacea S4054 OX=1129367 GN= N479_00255 PE=4 SV=1
MIKKIVIVGGGTAGWLAANHLGKRFFGSETEVKLIESANIPTIGVGEGTVPMMRQTLEYFGIDEGEFIKECNVAFKQGISFENWMAPSNGNIHQYYHPFDFFSSELGLVKAWLNQQSKTNFADFVGFQSTLCDHNLSPKLITQPQYDGAASYAYHLDAGAFSELLKNHALSQLGVFHQYSDLEEVVMCDDGEVAHLVTDAGIEKADLYIDCTGFKSLLLGKAMKVPFVPKGDVLFADKALAVQVPYGENEQIPSYTRSTAQSAGWIWDIGLYNRKGIGHVYSSHHTTQEQAYAELESYIGTDLDKLNVRTIDMHVGYRSKAWSKNCVALGLSQGFVEPLEATGLLVFDVTAKMLAETLPTSKVAFDVVSPHFNDTVTNMWNKVIDFIKLHYCISDREDSAFWLDNRNPDSIPDSLKEKLQLWLYKAPTHYDFSGKFDVFDVDNYLYVLYGMSYPTNVESNRISPAETQRMSDVISTIKYQQKQAMELACDNKTLLEKIRQFGVAKQ

SEQ ID NO: 88172 - protein, 503 aa, Brevundimonas sp.
  misc_feature (1)..(503): tr|A0A1H1GKE4|A0A1H1GKE4_9CAUL Tryptophan halogenase OS =Brevundimonas sp. 374 OX=1150400 GN=SAMN02787020_2745 PE=4 SV=1
MADSSLIIDRIVIVGGGTAGWMAAAALAQAFEGAGKTVTLVESEAIGVIGVGEATIPEILKFNARLGIDEADFLRETKATFKLGIEFDGWRREGERYFHPFGAFGLDMEGIAFHHFWLKASAEGESEPLETYSMAWQAARRGRFVHPQGGPQSPLSSLGYAYHFDAALYAGFLRRLAEGLGVVRHEGRVVEVQQAADGDIAGVRLDDGRIVEGDFFIDCTGFVGLLIEQALKSGYEDWSSWLPCDSAVAVPCERKESLSPYTRSTAREAGWQWRIPLQHRVGNGYVYSSAHLSHQAAEDALMSRLEGTALAEPRRLRFATGRRKDCWKRNCVAVGLSSGFLEPLESTSIHLIQSAITKLITLFPSHKDSEGLRREFNALMEEEFVTVRDFLILHYKVTQREGAFWQQVRDMPIPDRLAAKIALFEETGRIVRRDHDIFSESSWLAVAAGQGLTPHGRHPISDVISHDANLGRLSAIRDSIWRTADALPTHEDVLATTMNRKAF

SEQ ID NO: 88173 - protein, 497 aa, Pseudoalteromonas marina
  misc_feature (1)..(497): tr|U1K4X7|U1K4X7_9GAMM Uncharacterized protein OS=Pseud oalteromonas marina DSM 17587 OX=1117316 GN=PMAN_03465 PE=4 SV=1
MKPIKNVVIAGGGTAGWIAAALLNKVLGKVINITLIESRSIGTIGVGEATIPPIIQLNNALGINEQDFINATNASIKLGIEFENWKTPSHSYMHAFGSFGKDFPFCDFYNFWVKGQISGSEDSLWDFSLNYQAAKKHKFAPLSAIPNTQLPGISYAFHFDATLYAEYLKKLAVSRGVKHIDAKIERVTQCPNTGQINSLTLDNNSQIEGDLFIDCTGQRALLIEQTLNTGFVDWSHYLPCDSAVAVQSTGSDELRPYTRSIAHNAGWQWQIPLQNRTGNGLVYCSRYLSDEGATALLLNNLPGEPTTDPRLIKFKTGRRLKQWHKNVVAVGLSSGFLEPLESTSIHLIQSAVIRLIKLFPHNGISDALVTEFNKQSVTEIEHIRDFIILHYKLTERVDSPFWRQCKQMDIPQSLAHKIDLFRQTGKVVRENDELFAEVAWQQVCIGQGLIPEDYNNIVDSLSSEQLNDLFSTLKTLITSTVDQLPTHKDFLAKIKKA

SEQ ID NO: 88174 - protein, 509 aa, Caulobacter sp.
  misc_feature (1)..(509): tr|A0A3R8M9F0|A0A3R8M9F0_9CAUL Tryptophan 7-halogenase OS=Caulobacter sp. 602-1 OX=2492472 GN=EIK80_09035 PE=4 SV=1
MQPLKKILIAGGGSAGWMTAALCSRLFQGLYEIVLIESEQIGTVGVGEATIPAIKKFNELLGLDEDDFLRKTQGSFKLGIEFRNWFRKGESYLHGFGVLGQDLGWLRVHQYWLRMRELGQAPDFNALSINNAMALQDKFMRARADMAESPIGHIAHAFHFDAGLYAKHLSTYAQARGVQRREGKIVDVTLRPEDGFVQSVTMDDGEVIAADLFVDCSGFRGLIIEQALKTGYEDWTRWLPADRAIAVPTERSAHFTPYTRSTAHDAGWQWRIPLQHRTGNGHVYSSQYIDDDEAERVLLANLDGAQRADPLRIRFTTGKRKKIWNKNCVSIGLASGFMEPLESTSLHLIQSAVIRMVRLLPDGGFDQANVDEFNRQSDFEYERIRDFIILHYKATERDDTPFWRHCRDMEVPATLQRKMDLFRANGRVFREDDELFTEESWIQVFLGQGVIPRGYDPLVRVHSDEAIATHLGNIQTVIGKCLNVMPSHAEFVARACQAPPLPATPVPVP

SEQ ID NO: 88175 - protein, 498 aa, Pseudoalteromonas luteoviolacea
  misc_feature (1)..(498): tr|A0A0F6A5A2|A0A0F6A5A2_9GAMM Uncharacterized protein OS=Pseudoalteromonas luteoviolacea S4054 OX=1129367 GN= N479_22740 PE=4 SV=1
MAKRIQNVLIVGGGTAGWLSASLLKRVLKDQVNITLIESDDIGTVGVGEASIPPMVNFNAALGLDERTFIEQTQATYKLGIEFEGWGYQGSRHMHAFGEVGKSFPFCDFFQVWLKAKQQGLTDCLAEYSLNTQAAKVNRFAHLQHIPSTQLQGLTYAYHFDAGLYAKLLSKHSQNQGVRRVEGKITEVKTDPNTGHIAAVLLANGERYSADLYLDCSGLKALLIDQTMNVGFEDWSHWLPCDSAWAVPSEQLGGDIKPYTRSIAKHAGWQWQIPLQHRVGNGYVFSSKFISEQDAKEALLHSLPSRPMAEPKLIKFKTGMRRKQWQGNVFAVGLASGFLEPLESTSIHLIQTSILRLIRHFPFDAIKDSAIENVNMEFANEMAQVRDFIILHYKLTERDDSRFWQWCKNMSIPESLRSKITLFEETGHCAAKTDDLFQNVAWQQVMVGQGLVPKTYHPLAEQFDDEHLKSLLDSLKVLLQTTVNKLPSHQAFIDKMTK

SEQ ID NO: 88176 - protein, 505 aa, Xanthomonas prunicola
  misc_feature (1)..(505): tr|A0A2N3RN27|A0A2N3RN27_9XANT Tryptophan halogenase OS =Xanthomonas prunicola OX=2053930 GN=XpruCFBP8353_01880 PE=4 SV=1
MTQAQIRKVVIAGGGTAGWIAACALSHQFRDLLDITLVESEQIGTVGVGESTVPPIRTFHRFLQIDEQEFLRAVAGTFKLSISFEHWRRQGERYIHPFGITGQSTLVCAFHHLWLESQRRGMPGSFGDYCLETVASRVDRFALHGEPAVNYAYHLDAALYAKFLRARSEACGVKRMEGKIQQVTVQPHSGDVASLVLEDGQVIEGDLFIDCSGFRGLLIEQTLHTGYEDWSHWLPCDRAVAVQTEAVGPPVPYTRAIAHEAGWRWHIPLQHRVGNGLVFSSKHLSDDQAHAKLLRDVAAPAVKDPWMVPFRTGRRLKAWNKNVVSLGLASGFIEPLESTSIHLTISAVVRLLALFPAEGIAPSQVQLFNDVSRAEMEHVRDFVTLHYHATQRDEPLWQQCRQMELPESLALRLRAWRERAHAWQGADELFRVDSWTHVLMGQGIAPEQHHPLTRAFSDHDLRRLLDGIAQPIQHAVQRMPSQQAFIERYCKAGAQVWGMRSPVPA

SEQ ID NO: 88177 - protein, 513 aa, Devosia insulae
  misc_feature (1)..(513): tr|A0A1E5XQ35|A0A1E5XQ35_9RHIZ Uncharacterized protein OS=Devosia insulae DS-56 OX=1116389 GN=VW23_020345 PE=4 SV=1
MAEQPHFVIVGGGTAGWIAAFIIQDSIKRLKLDAKLSVVESSKIPTVGVGEATTAAFHVFLTHFGIDIFEFFRKTEATYKLGIRHEDWRRKGFTYYGPIDDPHAVVRPPPGAPSDYLNVYAVSVNEPVQDMHLFGPLLKQKKAPWAQKADGSLIPLGPFLPAYHFDQSLVGKFLKEESEGVEIVDNVLTGVERNGETGDVTALVFEDGQKLEGDFFIDATGFRKRLIVGEMQATWISYQHELPVNRALPFWLPVEPGEEIANYTRAWAQEAGWMWQIPTQYRYGCGYVYSDEFRTPDEAHAEVERVLGRKIEVRGDIQFKIGRLEKAWINNVVAVGLSSSFLEPLESTSIHGTIVQMMMFAGQYLRDPAKMGQPLRDDYNRRVGRQVDDFRTFVNTHYMTERDDTPFWREVREHRIHPETKQRLERWKTEMPRREHFADYLFGLPHVETQLHYPVLDGLGLLDPAVAKAEMARDPKLRKFARETHAGLVKEYKQAASKALGHAEFLELVRGMG

SEQ ID NO: 88178 - protein, 497 aa, Pararheinheimera tangshanensis
  misc_feature (1)..(497): tr|A0A5C8LXA9|A0A5C8LXA9_9GAMM Tryptophan 7-halogenase OS=Pararheinheimera tangshanensis OX=400153 GN=FU839_12 060 PE=4 SV=1
MNNQHNRIKKVVIAGGGTAGWMTAAGLTKLLGKNLEVVLVESDDIGTVGVGEATIPTMHIFHRLLNIKESEVMAATNATFKLGIQFENWKNLGEDYIHSFGFLGKDCWACGFQHFWVKAKQKGIATEIGDYCVEHLGARQGRFAVLPNQDLNHAYHMDASLYAKFLRRMSEQHGIRRIEGKIREVQQHMDGNISALLLESGELLEGDLFIDCTGFRALLIEQTLNTGFEDWSHWLPCDSAYAVQTKTTQEPVAYTRAIARQAGWQWKIPLQSRVGNGLVFCSKFITEAEAKQTLVDNLEGEMMFEPRLIKFKTGTRRQHWNKNCVAIGLSSGFLEPLESTSIHLIQRSIIRLLQMFPSNGINSADVAEFNRQTKIEMDNIRDFIILHYKATERTDTKFWRYCKDMEIPDSLAHRMELFKQSGKVYKFAQELFGESSWLQVLIGQGLMPEQYHPIVDLMPDSELNDFLMSIKQNVKRTVSQFPTHHEFIQHYCKSSLV

SEQ ID NO: 88179 - protein, 522 aa, Alteromonas sp.
  misc_feature (1)..(522): tr|A0A136HZQ9|A0A136HZQ9_9ALTE Tryptophan halogenase OS =Alteromonas sp. Nap_26 OX=1795869 GN=AXW14_10195 PE=4 SV=1
MQQANSSIRRIVVVGGGAAGWLTASIIAVTHKHDDNISITLVESPDISILGVGEGTWPTMRSTLLKIGISEEVFLTQCNASFKQGTSFYNWQSDKGENQYYHPFSLPFRYFESDIAAWWQGHAAEQDFAHAVCSQAALCDNHLAPKQRQTPPYAGIANYGYHLDANKFATLLQQHATTKLGVQHIVDHVDDVVGSPSTPITSIVGRQYGAIEGDLFIDCTGFAARLIGQHYGVPLTPCSHVLANDSAVAIQAPYVDSSVDIASTTHSTAQDNGWIWDIGLPSRKGVGYVYSSAHCSEDEARATLDNYLKHDKKTTDVDVSEARKITFTPGYRKTLWVENCVAIGTSAGFLEPLEASALVMIELSATHIAKQLPRTLCECKAAGRQFNNAFEKKWERIVDFLKLHYVLSEREASAYWRDMRDQRGCSTQLQDWLTLWKSRSPISSDFELREELFPAASYLFVLYGMGFRSHYNDTYQANLHTAEQRQAYAKHVQSIQQQLNGLPTNRQFLNQLAQSNCTQMHF

SEQ ID NO: 88180 - protein, 507 aa, Alteromonas sp.
  misc_feature (1)..(507): tr|A0A136I056|A0A136I056_9ALTE Tryptophan halogenase (F ragment) OS=Alteromonas sp. Nap_26 OX=1795869 GN=AXW14_ 10160 PE=4 SV=1
GSAGWLTAGRIAAQHQCATRKDIKVTLVESPNVPIIGVGEGTWPTMRSTLIALGISETTFIKECDATFKQGAKFAKWTTGGEDDFYYHPLMLPQGFSQGNLGPYWQTVAPDLNESFSQAICVQEAICEAGLAPKSIRHAEFAGTANYAYHLDAGKFTTFLTRHCTENLGVNHVLADVSQVQSADNGDIEALHTQQGVVIEGDLFVDCTGFKSLLLGEHYKVPFIPCDDVLFIDRALAVHVPYENAQSPIASHTISTAQDAGWVWDIGLQSRRGVGHVYSSRHQSKDDAYTRLDTYVRQTSALDGIDDLNVKDITIQSGHRQRFWQNNCVAVGLAAGFLEPLEASALVLVELSASMIAEQLPANRAVMDIVAKRFNDTFSYRWARIIDFLKLHYMLSKRDDSAFWRDNRDSQTIPDSLKELLALWQYHPPSDKDFTSNNEVFPAASYQYVLYGMGFTSELGAHQQWVNADFARQQLTQNRKARAMAVEKLPQHRELINKIHQFGLQAV

SEQ ID NO: 88181 - protein, 557 aa, Alteromonas sp.
  misc_feature (1)..(557): tr|A0A2V3V3T2|A0A2V3V3T2_9ALTE Glycine/D-amino acid oxi dase-like deaminating enzyme OS=Alteromonas sp. I10 OX= 1938740 GN=BZA03_11277 PE=4 SV=1
MSDNESHSSMHRVVIVGGGTAGWLAAGILAAKLSANHTVTLIESPNIPSLGVGEGSWPSLRDTLLDIGISETEFLTLCHGAFKQGSSFVNWRKGGHCYYHPFTVPTGYNELDIYTCWKSIAPNTSYEDVFSLQAAMCAAGKAPKQIATPDYAHVLNYGYHFDATKLAELLKNHCVDKLNVAHVVGHVDSVHSHQNGDIESVSTKDGEKIVGDLFIDCSGSRGLLIKEHFTIPWVPVKRTMLNDRAVALQVPYSNEDAEIKSTTVATAQTCGWTWDIALQHRRGVGLVYSSQFTDEDQAKQVLIDYVRERYPSAQDAELSFRTLSFEPGYRSQFWVKNCLSLGMSSGFVEPLEASAIAMVELGLRMLCEAFPQNKAHMEIVSKRYNSRFAYRWQRVIDFLKLHYALSDREEPYWLAQRDKASIPDSLAELLELWKYQSPSRLDLIENEEIFPSASYQYVLYGMGFSSSTSPLRLNEEHKRKAVHIRETLQQTKNAYLQGLPSNRVLLNDIAKRYNNEKQHVPSLVQREKNKHASASSCNDIKNTSDKKDASYDRIGFR

SEQ ID NO: 88182 - protein, 495 aa, Enterobacter sp.
  misc_feature (1)..(495): tr|A0A4V3YXJ4|A0A4V3YXJ4_9ENTR Tryptophan 7-halogenase OS=Enterobacter sp. Z1 OX=2561927 GN=E4M14_05745 PE=4 S V=1
MINLRGMNRVVVVGGGTAGWFAALQLRQLFSPSVEVMVISAPEVPIVGVGEGGVLNLLTVLHDLNIDLKTFIDKTGSTLKLGFRYERWRTGKEDDYYYHLFPLPTPDFAWNEFGFNPYLSGLFNHGIDISRYMASYQFSEDRKPFHEVLQILLDGKNNFGASLHFDTFRVGQYLKEIALARGIIHVEQRIHDFVLNPQTEYVTAIQLLDQKIQCDFVVDASGFSRLLIGKKYKSGWHSFADTLPMNRALPFHLQHQDKIELVTRATAMSSGWVWQIPLQERIGAGYVYHDQFITDEQAQQEVEQWLGAKISPTHPIAFEAGFYKKVWMKNVVAIGLASGFIEPLEATSIGQMLSQLQLMISFIQENHGVISQQNIDFYNRQNSQYWQGICDFIRMHYDTGRKDTPFWQYMLTVPQSQSYQELKKCWEHRTPRDIDFVEHSMGGMSMFSAASWFAVGAGVGVIKPEATSAELYALSTEKKQKLAKYLQQIKQQLFL

SEQ ID NO: 88183 - protein, 514 aa, Novosphingobium taihuense
  misc_feature (1)..(514): tr|A0A562JG26|A0A562JG26_9SPHN Tryptophan halogenase OS =Novosphingobium taihuense OX=260085 GN=IQ25_03448 PE=4 SV=1
MGQPIRNITIVGGGTTGWLAALFLVTRLQGAVRRGELDIHLIESERIPIIGVGESLSPSMATTLEQLGIPEDDFIRDTDATFKVAGYFVGWDAADDGRPLSWVNPFVGFMTAGWEFERYELTGGAYGDGPDYARVVSPCREAIELRKSPKMRGQKPFEHVLRYAYHTNAAAFAPFLRKHAEARGVRRTGADVIGATRDERGHISTITLEGAREVPVELVIDASGFSSVLHHKVMGVPLVDYSHILLNDRAVVTQLAHANPDEPLEPATRATALPHGWAFRVPLYHRTGNGFIYSSKHCSDEAAANEFAGYLGSGARVDDMRVIPMRVGRTQHSWEGNCIALGLAAGFVEPLEASAIFTVETSVKWLLHYFPDSDWEPALRDRYNSRVTDLYDEVADYIALHYRLSRREDTSYWRAQRHEMKVSDRLEQNLSIWRHTLPVRADFASTNYFDENTYIAALFGKGFYRGRELQPMREVDARNWAGLKQNITSAHARALGMLPDHRAVLTEIRTRASG

SEQ ID NO: 88184 - protein, 378 aa, Caulobacter segnis
  misc_feature (1)..(378): tr|A0A2W5UWY7|A0A2W5UWY7_9CAUL Tryptophan 7-halogenase OS=Caulobacter segnis OX=88688 GN=DI526_19495 PE=4 SV=1
MGSVLVVGSGVDAWMTAAALATATRGVTIAVAETAPPKPGRIAALPSLRGLHTRLGLSEEMVAKVCRASPTLGSRYGEAVAPYGETGAMLEGVPFHHYWLRAAEGAPLGAWSLAAQAAARGRFAPASRDPRSPLSTLDHGLTLDGAAYAELLKATALRAGVALLEAQARPEADLLVDATGTEARLIGDEPWIDWSAWLPTGLTMSAEENGLTPLFTPGAPLRAGRRERAMAGKVVAVGAAHGAIGAADGGELHLLHGAISRLVALFPTGPAAVAEYNRLSEAALERARDMAILRWGALDAPPEPLAWKIAQFESRGRVVMYDEEIWSESAWIHAFLARGVVPRRWDPLAERMPLDRARAVLERMRAVIAQTAEAMPHV

SEQ ID NO: 88185 - protein, 501 aa, Alteromonas sp.
  misc_feature (1)..(501): tr|A0A2V3URL1|A0A2V3URL1_9ALTE Tryptophan halogenase OS =Alteromonas sp. I10 OX=1938740 GN=BZA03_11276 PE=4 SV= 1
MTVSGLDSSKNQTPVKNVVIAGGGTAGWMAATALSRLLGKSINVTLVESKDIGIVGVGEATIPPIRTFHKLLGIDEKAFMRATQATFKLGIEFENWREQGHSYIHSFGITGRECWAGEFHHFWLRAKEYGFGGEFGDYCPELIAAKQSKFATSEAMPLNFAYHFDAVAYGRFLKSLACDAGVTHKEGDIEEVVVCPQSGNIQSLRLASDEVIDGDFFIDCTGFKGLLIEQALHTGYDDWRHYLFCDSAVAMQTELTAPPVPYTKSVAHQAGWRWQIPLQERMGNGLVFCSRFMSDEDAINTLKSQVTGAPINEPRVIRFTPGKRRRGWNKNCVALGLSSGFIEPLESTSIHLIMTGLIRLMRLFPFDGITQSAIDEYNNKFDSEMSAILDFIVMHYKVTQREDSPFWQQCQRMDIPSSLKHKLDLFAESGRVFLDDGDIFRVDSWTQVLMGQGMTPSQYHRVADEMSEQSLKQFMAGLKQQVDNHVAKLPSHEAFLTQYLK

SEQ ID NO: 88186 - protein, 499 aa, Caulobacter segnis
  misc_feature (1)..(499): tr|A0A2W5X2L3|A0A2W5X2L3_9CAUL Tryptophan halogenase OS =Caulobacter segnis OX=88688 GN=DI526_09160 PE=4 SV=1
MTQQMIRKVVIAGGGTAGWTAAAALARQLGPLLDITLVESEDIGTVGVGESTIPTARTFNALLGIDEAEFMRATQSTFKLGISFENWGEIGDRYIHSFGVVGKSTWMGGFHHFWMQAKAQGFGGDLGDYCLELKAAEGERFYTGENGPLNYAYHLDAGLYGQFLRRIAEADGVKRVEGKIASVRQSATDGSVEALVMESGEAVEGDLFIDCTGFRGLLIEQTLKAGYEDWNHWLPTNSALAVQTRSTEPAKPYTRAIAHRAGWRWKIPLQHRVGNGLVYCNEFMSDDEALALLQSEIDGETLIPPRLIRYRTGRRRKTWDKNVVALGLSSGFVEPLESTSIHLIMIGMTRLMQLFPFGGISQAVIDRYNRLADDELEKIRDFIILHYKATERTDSPFWDRVREMDIPDSLAQRIALFRESAQVYQAPGELFQVDSWLQVLLGQRVQPQSFHAMGRLMPPQQLKQALDDLKRNIAGTVSRLPQHQAFLDAYCAPPVSKSA

SEQ ID NO: 88187 - protein, 520 aa, Novosphingobium taihuense
  misc_feature (1)..(520): tr|A0A562JNT3|A0A562JNT3_9SPHN Tryptophan halogenase OS =Novosphingobium taihuense OX=260085 GN=IQ25_02400 PE=4 SV=1
MVRAVRDVVIVGGGTAGWLTAAIIAAKHKARIGHDFSVTLVESPNVPIIGVGEGTWPTLRSTLKSVGISETDFFRECDAAFKQGALFAKWTTGAEDDAYYHPLVLPQRFGQLNLAPHWLAGTLNEGGDNGETFCDAVCPQGRLCDENLAPKSMVNAEYEGQANYAYHLDAGKFAPFMQRHCTGKLGVRHVLADMREVLQDESGDIRAISTEQAGEISGDLFIDCTGMRSLLLGQTLGVGFKDCNDVLFCDTALAMQVPYPAPDAPVATHTISTAQSAGWIWDIGLPTRRGVGHVYSSRHVSREDAEAELRAYVGPAAEGLSVRKIDIRSGHRETFWKNNCVAVGLAAGFLEPLEASAIVLIELSAKMIADQMPPVREVMDVVARRYNEKTLYRWGRIIDFLKLHYVLSKRRDTAFWRDNMDPASIPERLQELMALWQYQGPYMHEEFDRVDEVFPSASYQYVLYGMGFRTEVSALTLEPEVREARRARAENADMTSRMLGSLPKHRDLIDRIVKYGLQPV

SEQ ID NO: 88188 - protein, 439 aa, Bacillus mycoides
  misc_feature (1)..(439): tr|A0A090YYB5|A0A090YYB5_BACMY Tryptophan halogenase fa mily protein OS=Bacillus mycoides OX=1405 GN=DJ93_5050 PE=4 SV=1
MFSKAIVIGGSIAGKLAAKALSHTVEEVIILEAGESWDGKGPRKRVPQINHPHVLLKGGEEALEELFPNITSELKAAGSIINNFTRDLKWHQFGLWKHPFKGEINMIQQSRPLLESHIQKRIEQVSNVFTKYEMMVEELLVNEKLNKVCGVKAKCLKTGMKEEFDADIVVDASGFGSKNIDWLREYNIEVKEEKVRIDLFYATRMFRLKENEQLDCCNMLMSPSFPENPYGVLIQTIEDDRYFVTFSGYANEKAPQTDDEFYAFAEKLSISDVTDFLNSAEPITDIKIYKIPYQIRRRFDLIKNLPEGFLVIGDAHCRFDPVFGQGVSVAAMEALELQLYFKQNNNLERKLTRGFYKRVSKIIETPWEMTTTEIFRHPKLKRKMSLKQLFQQWYTKQIYQLSASNSDIYIRLVRVMNLIRSPFHLFHPKVLLAVLLNRK

SEQ ID NO: 88189 - protein, 494 aa, Shewanella sp.
  misc_feature (1)..(494): tr|A0A4Q5MF99|A0A4Q5MF99_9GAMM Tryptophan halogenase OS =Shewanella sp. OPT22 OX=2054186 GN=SOPP22_00590 PE=4 S V=1
MKKITSVAILGGGSAGWMSAAMLSKLMPNIEITLVESKDIGTIGVGEASIPPLTLFNQTLGINETEFMRETQASIKLGIQFENWNQQGDSYMHAFGALGKDLGFTQFHHYWLKSQQKAETFWDYSFNYQAAKSGKYNLVNQIPNTNLPGLEHAYHFDAGLYANYLSNLAIRAGVTRVEGLVKAATLVKDSGNVKSIQLSDGSEIETDLFIDCSGQHAFLIEKVLGTGYEDWSHFLPCDRALAVPSEKLDSTLPYTKSIAHDTGWQWQIPLQHRIGNGLVYSSRYLADEDAKALLLESLPSKPVAEPKLIKFKVGRRLKQWNKNCISIGLSSGFLEPLESTSIHLIQSAIMRLIKLFPQTDAFEFARKEFNKQSAYEFNHIRDFIILHYYLNNKSAPFWKHCRQMDIPENLKDKIELFKETAEVSRNPEDLFAHTAWQQVMIGQGTVPNKYHPIADNLTKQQLSDFLNDLSSIYQKCSKALPTHDEFLQHYCSKG

SEQ ID NO: 88190 - protein, 506 aa, Alteromonas sp.
  misc_feature (1)..(506): tr|A0A2V3UPM3|A0A2V3UPM3_9ALTE Tryptophan halogenase OS =Alteromonas sp. I10 OX=1938740 GN=BZA03_1134 PE=4 SV=1
MQDPHNKPIKHVVIAGGGTAGWLAASLMKKVLGKAVDITLVESEAIGTVGVGEATIPPIRLVNQVLGIDEAQFLHDTKATIKLAIRFENWKTKGESYYHTFGAPGKSMAFCHFHHYWVKARQQGLKDDLWDFDLNYHAAEAGRFAQINAKDPVVELPFAYHFDASLYAQYLRKLSENMGVVRKEGKISRVQRFTDSGFIQALHLESGDVVEGDLFVDCTGFKGLLIEEALGAGYDDWSHLLPCDSAIAVPSERHEKTAPYTRSIAHDAGWQWRIPLQHRNGNGHVYSSRYISDDQACDTLLSNLDTKPLGDPKLIKFTTGRRRKQWYKNVVAVGLSSGFLEPLESTSIHLIQSAIVRLIQLFPHNGFAPSLETEYNKQSELEFEQIRDFLVLHYTVNERTDSAFFNDMRNITLPDSLAHKIALFKESGNLLREQNDLFLESSWLQVLYGQGITPKDYHGLVNSVPEVQLNQMLTRLLEIKKEPIAKLPTHDEYINGMVAKYKRAMS

SEQ ID NO: 88191 - protein, 527 aa, Luteimonas aestuarii
  misc_feature (1)..(527): tr|A0A4R5U0N8|A0A4R5U0N8_9GAMM Tryptophan 7-halogenase OS=Luteimonas aestuarii OX=453837 GN=E2F46_02645 PE=4 S V=1
MAEGRIQKVVIAGGGTAGWVAACALAHQFRDLIQITLVESEQIGTVGVGESTIPTIRTFHRLLQIDEREFLRAVAGTFKLSISFENWKREGDRYIHPFGLTGLGTWSCEFHHFWLESLRRGMHSELGDFCLETLASREDKFALTEAQTGGGAQWSTRWTGQSLVPENPEVSYAYHFDAALYAAFMRRKSEGFGLRRVEGKIREVRQHPETGFVTALVMEDGREVEGDLFIDCTGFRGLLIEQTLKTGYEDWNQWLPCDRAVALQTESVGPPVPYTRAIAHQAGWRWHIPLQHRVGCGLIFTNRFMSDDEAAAKLARDAGAPAIRDPWLVPFRTGRRLKAWNKNVVSLGLASGFIEPLESTSIHLALSSVARLLHLFPADGIQPAMVERYNDVSRAEMEHVRDFIILHYHLNQRSEPLWRECREMSLPHSLAERIAQFRERAHAWQGDDELFRLDSWTHCMLGQGVVPSQHHPVTRAIKDQDLRQLFEVIRRPLTRTVAAMPSQQAFIDRYCKADPGVWDLRNRSTVG

SEQ ID NO: 88192 - protein, 517 aa, Caulobacter segnis
  misc_feature (1)..(517): tr|A0A2W5V8A5|A0A2W5V8A5_9CAUL Tryptophan halogenase OS =Caulobacter segnis OX=88688 GN=DI526_19490 PE=4 SV=1
MSEASRARTADPIRKILIVGGGTAGWMTAAALAKSLKARDVAITLVESEQIGTVGVGEATIPPITTFNQLLGLDEAAFMRATQASFKLAIEFVDWMGPGHRYLHPFGGFGLDIEALKFHQIWLRALHEGWAPPIDAFNLSARASHLGRFALPSRDPRQVMSSLKYAFHFDAGLYAKHLRAYAEQRGVARIEGKVAHVAQHGETGFLTSVTLDGGPTLEADLFIDCSGFRGLLIEQTLKAGYDDWSHWLPNDRAVAMPCETGGDGLTPYTRATADAAGWRWRIPLQHRTGNGYVYASADISDDEAVARLRATLDGPALAEPNFLRFQAGRRRQAWVKNVVAIGLSSGFLEPLESTSIHLIQAGITKLLALFPDKGFDPVEIAEYNRLTAQQVELIRDFIILHFKTNGRTEPYWVRAREMAIPETLARKIALFAASGRLFQSDYDLFAEPSWIAVLLGQGVIPHRHDPLVDALDDAMVRGQLSRLATLIRRTAEALPTHEAFIARYCAASPTPAARVPA

SEQ ID NO: 88193 - protein, 508 aa, Pseudoalteromonas distincta
  misc_feature (1)..(508): tr|F3BGN9|F3BGN9_9GAMM Putative tryptophan halogenase O S=Pseudoalteromonas distincta OX=77608 GN=PH505_ai00170 PE=4 SV=1
MNKTIKTIAVIGGGTAGWLSAAIIASYHQGKNGDGLKVMLVESSDIPTIGVGEGTWPTMKNTLQQIGLREVDVFKACNATFKQGGKFVNWTHGNNDFYYHPFTVPLGYGRIDLAPYLDNVEDFAQQTNFQHDICEASLAPRGIAQGEYQGNCNYAYHLDAGAFAEMLKQHCKSKLGVEHIIGTVDQVKLDDDGEINELTLKDQTRIISADLFIDCTGFSSLLLGQALNVPFKKMDHVLFNDSALAMQVPYDENDDSLASHTIATAQNAGWIWDIGLTHRRGVGHVYSSKFLSDDEAEQNLRNYLGDAANGLTARKISFESGYREKFWHKNCVAVGMSAGFVEPLEATAIMLVEISARFVAEHMPADTQVMPIVAKRFNEQMDYRWQRIIDFLKLHYMLTKRPEPYWQAHVHPDTIPQTLQEDLLLWGSRGPLIQDFHGALELFPAASYQYVLYGMGFKPDFTKQAYLYSQDAQAKQIIERNSQLTQQMLQTLPPHRAYIEQWLAANPV

SEQ ID NO: 88194 - protein, 496 aa, Pseudoalteromonas distincta
  misc_feature (1)..(496): tr|F3BJ32|F3BJ32_9GAMM Tryptophan halogenase OS=Pseudoa lteromonas distincta OX=77608 GN=PH505_ar00440 PE=4 SV= 1
MKPIKHVVIAGGGTAGWITAALLNKVLGKVIKITLIESSTIGTIGVGEATIPPIIQLNNALAINEQEFINATNASIKLGIEFENWKTTSHSYMHAFGSFGKDFPFCDFYNFWVKGKITGCEDSLWDFSLNYQAAKRHKFAPLNTIPNTQLPGLSYAYHFDATRYAEYLKKLATSRGVLHIDAKIEQVNQCPHSGNITSLTLDDTQINGDLFIDCTGQRALLIEQTLNTGFVDWSHYLPCDSAVAVQSQGTDSLKPYTRSIAHSAGWQWQIPLQSRIGNGLVYCSRYLSDDAATQLLLKNLPAEPITAPRVIKFKTGRRLKQWHKNVVSVGLASGFLEPLESTSIHLIQSAVTRLIKLFPHHGISETLVTEFNKQSVIEIEHIRDFIILHYKLTAREDSAFWRQCKQMDIPHSLAHKLKLFKETGKVVRENDELFAEVAWQQVFIGQGLIPDDYNSIVDSLSSEQLNDLFSTLKTLITSTVDQLPTHKDFLAKIKKA

SEQ ID NO: 88195 - protein, 518 aa, Pseudoalteromonas distincta; identical to SEQ ID NO: 84619
  misc_feature (1)..(518): tr|F3BF65|F3BF65_9GAMM Putative tryptophan halogenase O S=Pseudoalteromonas distincta OX=77608 GN=PH505_ad00390 PE=4 SV=1

SEQ ID NO: 88196 - protein, 522 aa, Xanthomonas sp.
  misc_feature (1)..(522): tr|A0A3A5EEH5|A0A3A5EEH5_9XANT Tryptophan halogenase OS =Xanthomonas sp. CFBP 7698 OX=2082399 GN=XnspCFBP7698_1 7745 PE=4 SV=1
MAHTTSPDPAQRPVRRVVIAGGGTAGWMAAAALSKLLGRQLQITLVESDEIGTVGVGEATIPSLVTFHRLLEIDEAAFMAATQATFKLGIAFEHWRDVDRHYIHSFGHTGTDHWSAGFHHFWLKGRQRGVARDFGDYCLELRATQEGRFAHLPNGGMNYAYHLDAGLYARFLRRFSEGFGVQRIEGRIGQVETDPHSGFLTALTLDNGSRVEGDLFIDCTGFAALLIGKTLGVDSDDWSRWLFADSALAVQTESVGPPVTYTRARADQAGWMWRIPLQHRVGNGIVYSSRYTDQDSARAVLERNLQGRALTEPRALRFTPNQRQRVWEKNCVALGLASGFLEPIESTNIHLIQRGIVRLLQTFPQVINAVDIAEYNRQAADEIAHIRDFVILHYHATDRRDTPFWRDCAAMDIPDSLRHRVELFRQSGRVFHQGNELFAENSWVQVMLGQGIVPQQHHPVADLMGDAELSHFLESIRQRVDATVASLPPHAQFLRHHCPAVPLPDPAACTPADVAAMAAPAG

SEQ ID NO: 88197 - protein, 506 aa, Alteromonas sp.
  misc_feature (1)..(506): tr|A0A2V3V1Q5|A0A2V3V1Q5_9ALTE Tryptophan halogenase OS =Alteromonas sp. I10 OX=1938740 GN=BZA03_102366 PE=4 SV =1
MNKLPQEIVIVGGGTAGWMTASYLARTAELMANKSNVPACAPKITLLESAVISTVGVGEGSTPYLRHFFEFLGINESEWMLKCSATYKMGISFERWTTTAESKTTRPAFTDSDSYFHPFFSSLDIPTADMYFSAVNEYRKGASHDINPSHYFTAAHMVEKGITPDAICSSANIDYAYHFDAGLLGDFLKEYALNKGVSHQIGTVANVECHEHTINSLKLDDGNTLSADFFIDCSGFRGLLGKQALSRRFTSYADTLFNDAAVAIASDATASPETALQTRSIALGHGWQWHIPLTSRTGNGYVYSSQFCTEAQAEEELRLALEPDQFHQQARHLKMTVGRLEEHWKGNCLCIGLSQGFIEPLEATALMLVQYALHHFIDCWQSNNPRREVRYNSEINRMFDGIRDYIAAHYYLNTRDDSAYWVACREDLKVPDTLSYLLNAWDKGASFEQALNEVDNKLVYLRPSWYCIFAGMKRFTQNTTPLAHPNTLALRTMQQSVEGAHRVRQP

SEQ ID NO: 88198 - protein, 501 aa, Phycosocius bacilliformis
  misc_feature (1)..(501): tr|A0A2P2EA44|A0A2P2EA44_9PROT Flavin-dependent tryptop han halogenase PrnA OS=Candidatus Phycosocius bacillifo rmis OX=1445552 GN=prnA_1 PE=4 SV=1
MSIETIVILGGGTAGWMAAAALSRLRAGRPVNVVVIESEQIGTVGVGEATIPPFLDFNRLLEIDERDMLSAVQGSFKLGIQFVNWGKIGDSYIHPFGNYGYQLDGVSFHHIWHKFKQAGDKRPIQIFNIETMAAHFGRFARTEDYQREDLPPINYAYHLDAGRYAKYLRAYAEARGAVRIEGKVQHVALDGQTGFVTELTMDNGNIVKGDLFVDCSGFRGILIEQALQTGYEDWSNYLPCNRAVALPCKREDGSPPPPYTRATAHKAGWQWQVPLQHRNGNGHVYCSEFMGDDEALDILVNNIAGKPQAEPNFLRFVTGRRKKFWNKNVVALGLAAGFMEPLESTSIHLINTGINKLIALLSLDGITQAQEDAFNRLTGKEYARIRDFLILHYNATTRDDSPFWNYCRNMAVPESLTEKTDLFRLNGQIFREDDELFTETSWAAVMMGQGITMQGHNAMADTLIEPKTSDELRGIEQSIQFVVQHMPTHGDYLKHYCPAAM

SEQ ID NO: 88199 - protein, 510 aa, Sphingomonas sp.
  misc_feature (1)..(510): tr|A0A1R1Z225|A0A1R1Z225_9SPHN Tryptophan halogenase OS =Sphingomonas sp. Sph1(2015) OX=1628084 GN=BSZ14_03970 PE=4 SV=1
MSDPYRPTRVVIAGGGTAGWLAATALARQLGPLVDVTLVESDEIGTVGVGESTIPTARSFHAFLGLDEAEFMRATQATFKLGIAFENWGPDGARYFHPFGTVGRSVAIADFQHFWLEARRHGFGGAYTDYSLETRAAEAGRFGRDEAGTLAYAYHLDATAYARFLRGIAEPAGVCRVEGRIARVERHGERGDIAALHLASGNRIEGDLFLDCTGFRALLIEGALETGFEDWSEWLACDRALAVQTEAVSPPVPYTRAIAHRAGWRWRIPLQTRVGNGLVYSSADMSDDEASATLLGGIEGKPLFEPRALQFRAGMRRRAWSANCVALGLAAGFIEPLESTSIHLVMIAVMRLIQGFPFQGQDCAALRTRFNAQSRHEWEHIRDFIILHYAQTGRTDSMFWQRCSTMSVPDTLAQRMALFVESAGAWQGQDDLFKIDSWISVMLGQGMVPKAHHRISGMLSPHALRDSFDGLDQQLSRQVQQIPDHLAFINGYCATQARPDLRIDPGDAAH

SEQ ID NO: 88200 - protein, 497 aa, Pseudoalteromonas sp.
  misc_feature (1)..(497): tr|A0A0M9UHN8|A0A0M9UHN8_9GAMM Tryptophan halogenase OS =Pseudoalteromonas sp. SW0106-04 OX=1702169 GN=W04_1552 PE=4 SV=1
MANINRVVILGGGTAGWLSAALLAKMLGKQLSITLVESTDIGTVGVGEATIPPIVAFNNALGIDEKTLIQRTGATIKLGIQFENWGRQGDSYMHAFGHLGKALPFCDFHHLFHHAKEQGLGHSLWDYSLNFQAEKAGRFAPLRHLPNTQLAGTEHAYHFDASLYAQLLRERAEHFGVQRIDAKVDKVEQSDNGDVQALMLQSGERVEGDLFIDCSGQRALLIAQTLGVGFEDWSHWLPCDRAIAVQSHHGDDKGLLPYTRSIAHDSGWQWQIPLQHRVGNGLVYCSRYLDDDQAKAQLLANLPGEALHEPRVIPFRTGARRQQWHKNVVAIGLSSGFLEPLESTSIHLIQTAVIRLLKHFPHQGIAPDSVRAFNRLFSTEMAQIRDFIILHYALNQRQDSRFWRYCADMELPPSLGERIAQFQQSGQVHRYQDELFAEVAWQQVLIGQNCWPQQHHLLAEQLSNEQLDELLQSLRTLINQAVQNMPSHQQFIQRNLS

SEQ ID NO: 88201 - protein, 507 aa, Shewanella sp.
  misc_feature (1)..(507): tr|A0A501X6W1|A0A501X6W1_9GAMM Tryptophan 7-halogenase OS=Shewanella sp. LC6 OX=2589790 GN=FJD32_22990 PE=4 SV =1
MTIRKIAIIGGGTSGWLAANHLGRALKGRSGLSISVIESPDIPIIGVGEGTVPSIKKSLQSFGISESEFIRTCDVTFKQSIKFVNWLDKSRHGKHNFYHHLFDIINLHQGDAVSTWLAEQSGHFADFVSPQHLACEAAKAPKLITTPEYAGVLGYAYHLNAAKFAKLLAKNAIEKFNVEHILTTVHDVCLGVDGAIESLQTEQGNLSFDFYIDCSGFESILLAKALKVPFISKALQLFIDTALVAQIPTQPADVIPPYTKATAHQAGWIWDIALTQRRGTGFVYSSAHMNQTEAEQKFDRYLGGKLADIPHRKIPMTVGYRQQFWVKNCVALGLAQGFLEPIEATSILLTDFSARFLAERFPANKDEVDYLSMRFNRTVNHAWERVVEFAKLHYCLSDRNDSAFWLDNQREETIPEPLKERLNMWKSFSPIAEDFPSKFEVFNLDNYLYVLYGMKYPTQPHDRGLVAKANLNAYMSNMSNVKRQMFEGLPEHRELIDKICTYGLQAI

SEQ ID NO: 88202 - protein, 576 aa, Phaeomarinobacter ectocarpi
  misc_feature (1)..(576): tr|X5MMV5|X5MMV5_9RHIZ Tryptophan halogenase OS=Candida tus Phaeomarinobacter ectocarpi OX=1458461 GN=BN1012_Ph ect1362 PE=4 SV=1
MADPIKHITIVGGGTAGWFTANMLSVFFGMQKNHPANRMRITLIESPNIPTVGVGEATVPSMSLSLQQTGISETDFFKTCNASFKLGVDFAGWNVDAKGKPFSYINPFNTGHRVGGIDPGYYYGRFGGSGASFVQTISPAQDLGMMRKGPRPLGSKPFTEPVNYAYHLDAGLFAKMMQGISVGRGVEHVLDDMVDVERAEDGSIAAINLKEAGRHEVELVIDCTGFKGLLINGALDEPFISYDKYLANDRAMAVQIPHPEQTANGPKFIEPVTRSTALGAGWSWRVPLYNRIGTGYVYSSAHRSDDEARDEFLKHLGDAGKDAEPRVIPMRVGRTRNSWVKNCIAIGLSGGFIEPLESTAIYMIEMAVRWLIAYFPDNSYPDSLRNRYNDVASGLYDEVRDFICLHYALGNRTDSQYWIDAREELEVPDSLAENMEVWKHAMPVMTDLKSQHLFSPEVYTAVLQGKRIYQMRDDWNAGLSLNLNRDMWRKHVSGQRHKISQFVKAMPDHVALLRQIRGETAQQDAPSPLMGNMQGLPGQQAPLPQGSVPLPGLGTRRTPVIKTPIAPADAGDGNLL

SEQ ID NO: 88203 - protein, 505 aa, Caulobacter segnis
  misc_feature (1)..(505): tr|A0A2W5X8C9|A0A2W5X8C9_9CAUL Tryptophan halogenase OS =Caulobacter segnis OX=88688 GN=DI526_00010 PE=4 SV=1
MDAKPYRKFVIVGGGTSGWIAAATLIQALKGHLGEVELIESDEIGTVGVGEATIPPIQFLNGLLGIDEYDFVRKTQATFKLGIQFRNWGRQGQEYFHPFGAYGEPIDGVGFHHYWLRLRANGEGGSLDSYALSTVAAKAGKFATPPKDLPPGVPGLGYAYHFDAGLYAQYLRAYAEARGVKRTEGRIAKVEQRLEDGFVSGLVLADGRRVEGDFFVDCSGFRGLLIEQALEAGFEDWSHWLPCDRALAVPCENAYPLTPYTRSTAREAGWQWRIPLQHRTGNGYVYCSDHISDDEAAATLLANLDGKALADPRPLRFKAGRRRKAWSKNVVALGLAGGFMEPLESTSIHLVQTGAMRLLALLPLGGYDPAAEHEYNRLTQIEYEQIRDFIILHYCATERDDAPLWTYCRTMAIPDSLAHRIELFRSRAKIARYDDQLFAEPSWLAVFLGQGVAPRDYDRLADAAAYDEVVARVRRIGQANAGLVSRLPTHDAFIAAACKADPLAA

SEQ ID NO: 88204 - protein, 527 aa, Unknown
  misc_feature (1)..(527): tr|A0A520MIH3|A0A520MIH3_9GAMM Tryptophan 7-halogenase OS=SAR92 clade bacterium OX=2315479 GN=EVB03_01735 PE=4 SV=1
MTSSENLKSIVIVGGGTAGWLTAGIIAAEHSSNGSESDGLIDIKVTLVESPDISTIGVGEGTWPSMRSTLQKMGISETDLIRGCDASFKQGTLFKSWKTGGSDAYTHPFTPPHSYASTNLAPQWQKFSNEVSFAEAVSSQNALMFKGLAPKQISTPEYAFHTNYGYHLDAGKFAELLRKHCVDKLGVTHLKANVVSVNSSADGDIASLKTDSHGDISGDLFVDCSGSRALLLGEHFGVPFCSKGQFLFNDTALASQIPYVNADDPIASSTLSTAQTAGWIWDIGLPTRRGIGHVYSSGHTTEDRAAQELLAYIAAIVSPEAAASASIRKVPFSPGHRAKFWHKNCVAVGMSAGFIEPLEASALVLVELSAAMIAEQLPANRQIMDVVAKRFNDKFLYRWDRIIDFLKLHYILSQRQDSDYWKDNISSSSVPDNLSELVKLWRWQAPWHRDTGHIDEMFPSASYQYVLYGMGFLTQDSTTARRSDREAQSVAEGLFRENAERTKKLLASMPTNRELIEKITNYGLQKI

SEQ ID NO: 88205 - protein, 430 aa, Chthoniobacter flavus
  misc_feature (1)..(430): tr|B4D801|B4D801_9BACT Tryptophan halogenase OS=Chthoni obacter flavus Ellin428 OX=497964 GN=CfE428DRAFT_5041 P E=4 SV=1
MPSEFSLAMNMSNQYEVIIIGAGPAGTTTAALLAEKGRRVLVLEKEKFPRYHVGESLMPYCWFTLNRLGLVEEMNHIAYTKKYSVQFVTQDGRQSAPFYFFQHYDHPSSTTWQVERADFDLMLLKNARAKGAEVRELTPVTRLLKDESGKVIGVEARDENGATHEFYAPMTVDCSGREQISIARDGWRVKDAKLNKIAIWTYFRGAKRDPGIDEGNTTVAYVEGRGWFWYIPLKNDTVSVGIVAEKDYLFSESKDPAKIMQREIERNAWIKEHLSMGEQFGEYFVTSEFSYRSKYCAADGLLLAGDAFAFLDPVFSSGVFLALKSGEMAADAVDAALTTGDFSGSQFVEYGETLCRGMENMRKLVYAFYDPNFSFGRMLKAYPEHRGLLTDSLIGHLFDPDFSQLYASMQEFVTLPEPLSHGRAPENAAA

SEQ ID NO: 88206 - protein, 515 aa, Stenotrophomonas maltophilia
  misc_feature (1)..(515): tr|A0A0U5IBU2|A0A0U5IBU2_STEMA Tryptophan halogenase OS =Stenotrophomonas maltophilia OX=40324 GN=prnA PE=4 SV= 1
MREGTALDTESTPAGRIRKVVIAGGGTAGWLAGCALAHQFRDQLQITLVESEHIGTVGVGESTVPPIRTFHRFLQIDEQEFLRAVAGTFKLSISFENWRLPGDRFFHPFGTIGHGTWAAPFHHFWLDSLRRGMPSDLGDFCLESIASRGDRFSLHTQPQASYAYHFDASLYARFLRGRAEANGLRRIEGRIAQVRQHAHDGSVQALVLDDGQVIEGDLFIDCTGFRGLLIEQALGTGYEDWHEWLPCDRAVAVQTEAVAPPVPYTRAIAHEAGWRWHIALQHRVGCGLVYDSRHLSDDEAAAKLLRDAGAPPLRDPWNVPFRSGRRLKAWNGNVVSLGLASGFIEPLESTSIHLTISAVVRLIQLFPFDGISASLVQLYNDVSRQEMEHVRDFIILHYHATQRTEPMWKACREMSVPGSLQQRLQAWRERAHAWQDPGELFRVESWTSVLLGQGIPPGPPHPLARAVSDADLRTLLKGIQQPVQQAAAQMPTQAEFIAQYCRSGVDVWRSTAANA

SEQ ID NO: 88207 - protein, 522 aa, Alteromonas sp.
  misc_feature (1)..(522): tr|A0A2V3UZP7|A0A2V3UZP7_9ALTE Tryptophan halogenase OS =Alteromonas sp. I10 OX=1938740 GN=BZA03_103361 PE=4 SV =1
MHQANSPLRRIVVVGGGAAGWLTASIIAVTHKHDDNISVTLVESPDVSILGVGEGTWPTMRSTLLNIGISEETFLAQCNASFKQGTSFHNWRSDNVEHQYYHPFSLPFRYFESDVAAWWQSYAAEQDFAHAVCSQAALCDHHLAPKQRQTPAYAGIANYGYHLDANKFAALLQKHATTVLGVQHIVDHVDDVVGSSSEPISAIVGREHGNITGDLFIDCTGFAARLIGQHYGVPLTSCSNVLANDSAIAIQAPYVDSSVDIASTTHSTAQDSGWIWDIGLPSRKGVGYVYSSAHCSEDEARATLETYLKHDKKTADVDVSKARKITFSPGYRKTLWVENCVAIGTSAGFLEPLEASALVMIELSATHIAKQLPRTYKECQAAGRQFNQAFEKKWERIVDFLKLHYVLSEREASAYWRDMRNQESCSTQLQDWLTLWKSRSPISSDFELREELFPAASYLFVLYGMGFRSQYNDVYQANLHTPEQRQAYAKHVQSIQQQLSGLPTNRQFLNQVAQSQGLSMHY

SEQ ID NO: 88208 - protein, 514 aa, Stenotrophomonas maltophilia
  misc_feature (1)..(514): tr|A0A2J0TFH6|A0A2J0TFH6_STEMA Tryptophan halogenase OS =Stenotrophomonas maltophilia OX=40324 GN=B9Y66_19440 P E=4 SV=1
MGSIALNAADTTQGRIRRVVIAGGGTAGWLAGCALAHQFRQQLDITLVESEQIGTVGVGESTVPPIRTFHRFLQIDEQEFMRAVAGTFKLSISFENWRRPGERFIHPFGTIGQGTWATPFHHFWLDSLRRGMPSELGDFCLESVASRADRFSLQTQPQVNYAYHFDAGLYARFLRGKAEANGLRRVEGKIREVRQHADDGSVASLLLEDGQVIEGDLFIDCTGFRGLLTEQTLHTGYEDWNEWLPSDRAVAVQTDAATPPVPYTRAIAHEAGWRWHIALQHRVGCGLVFSSRHMSDDEAQAKLLRDVDGRPLRDPWLVPFRSGRRLQAWNRNVVALGLASGFIEPLESTSIHLTISAVVRLIQLFPSEGITPSLVALYNDVSRQEMEHVRDFIILHYHANQRDEPMWKACREMALPESLQVRLRAWRERAHAWQDPGELFRVDSWTSVLMGQGILPGPPHPLARAIGDADLRTLLHRLRQPVQEAVAKMPSQADFIERYCKAAPGAWQTGRAVA

SEQ ID NO: 88209 - protein, 538 aa, Burkholderia ubonensis
  misc_feature (1)..(538): tr|A0A124U6C6|A0A124U6C6_9BURK Tryptophan halogenase OS =Burkholderia ubonensis OX=101571 GN=WJ58_27895 PE=4 SV =1
MSNPIKNIVIVGGGTAGWMAASYLVRALQQQTNITLIESAAIPRIGVGEATIPSLQKVFFDFLGIPEREWMPQVNGAFKAAIKFVNWRKPPERSRDDHFYHLFGSVPNCDGVPLTHYWLRKRELGFQQPMEYACYPQPGALDGKLAPCLPDGTRQMSHAWHFDAHLVADFLKRWAIERGVKQVVDEVVEVRLNDRGYISSLSTKEGRTLEADLFIDCSGMRGLLINQALKEPFIDMSDYLLCDSAVASAVPNADARVGIEPYTSAIAMNSGWTWKIPMLGRFGSGYVFSSKFTSRDQATADFLDLWGLPDNQPLNQIKFRVGRNGRAWVNNCVAIGLSSCFLEPLESTGIYFIYAALYQLVKHFPDTSFDPRLTNAFNAEIVHMFDDCRDFVQAHYFASSRDDTPFWLANRHDLRLSDAIKEKVERYKAGLPLTTTSFDDATYYETFDYEFKNFWLNGNYYCIFAGLGLLPDRSLPLLRHRPESIDKAEAMFARIRREAERLRASLPTNYDYLRSLREGDAGLSRSQPGPTLAAPEIL

SEQ ID NO: 88210 - protein, 538 aa, Burkholderia ubonensis
  misc_feature (1)..(538): tr|A0A119J6H6|A0A119J6H6_9BURK Tryptophan halogenase OS =Burkholderia ubonensis OX=101571 GN=WJ87_13450 PE=4 SV =1
MSNPIKNIVIVGGGTAGWMAASYLVRALQQQTNITLIESAAIPRIGVGEATIPSLQKVFFDFLGIPEREWMPQVNGAFKAAIKFVNWRKSPERSRDDHFYHLFGSVPNCDGVPLTHYWLRKRELGFQQPMEYACYPQPGALDGKLAPCLSDGTRQMPHAWHFDAHLVADFLKRWAIERGVKQVVDEVVEVRLNDRGYISSLSTKEGRTLEADLFIDCSGMRGLLINQALKEPFIDMSDYLLCDSAVASAVPNADARVGIEPYTSAIAMNSGWTWKIPMLGRFGSGYVFSSKFTSRDQATADFLDLWGLPDNQPLNQIKFRVGRNARAWVNNCVAIGLSSCFLEPLESTGIYFIYAALYQLVKHFPDTSFDPRLTNAFNAEIVHMFDDCRDFVQAHYFASSRDDTPFWLANRHDLRLSDAIKEKVERYKAGLPLTTTSFDDATYYETFDYEFKNFWLNGNYYCIFAGLGLLPDRSLPLLRHRPESIDKAEAMFARIRREAERLRTSLPTNYDYLRSLREGDAGLSRSQPGPTLAAPEIL

SEQ ID NO: 88211 - protein, 510 aa, Stenotrophomonas maltophilia
  misc_feature (1)..(510): tr|A0A270NMI1|A0A270NMI1_STEMA Tryptophan halogenase OS =Stenotrophomonas maltophilia OX=40324 GN=CEK00_06455 P E=4 SV=1
MLDTQSTPSGRIRKVVIAGGGTAGWLAGCALAHQFRDQLQITLVESEQIGTVGVGESTVPPIRTFHRFLQIDEQEFLRAVAGTFKLSISFENWRLPGDRFFHPFGTIGHGTWAAPFHHFWLDSLRRGMPSDLGDFCLESIASRGDRFSLHTQPQASYAYHFDAGLYARFLRGRAEAHGLRRIEGRIAQVRQHAHDGSVQALVLDDGQVIEGDLFIDCTGFRGLLIEQALCTGYEDWHEWLPCDRAVAVQTEAVAPPAPYTRAIAHEAGWRWHIALQHRVGCGLVYDSRHLSDDEAAAKLLRDAGAPPLRDPWKVPFRSGRRLKAWNRNVVSLGLASGFIEPLESTSIHLTISAVVRLIQLFPFDGISASLVQLYNDVSRQEMEHVRDFIILHYHATQRSEPMWKACREMRVPESLQHRLQAWRERAHAWQDPGELFRVESWTSVLLGQGIAPGPAHPLARAVSDVDLRTLLKGIQRPVQQAAAQMPAQAEFIAQYCRSGVDVWRSTEASA

SEQ ID NO: 88212 - protein, 554 aa, Nostoc sp.
  misc_feature (1)..(554): tr|A0A2D0HLS1|A0A2D0HLS1_9NOSO Tryptophan halogenase OS =Nostoc sp. 'Peltigera malacea cyanobiont' DB3992 OX=12 06980 GN=CK516_08650 PE=4 SV=1
MSQHVQNIVIVGGGSAGWMTAAYLSKALKKNIQITLVESSNITKIGVGEATFSSIKSFFDFLGLQEYEWMPKCNATYKMGIKFVDWNSDRRHFYHPFERFDFIDGFSISEWWLKLKSANEPFDYSCFMAPTLCDHQRSPRYLNGKIFDDRVEHLFSEKHFSEKNLITLADAEGQYPYAYHFDANLIARFLKDYSRQRGVKQIVDDVVNVNLTEDGSIDSLNTKEHGIVSGDLFIDCTGFRGLLINQALGEPFISYSESLLCDRAIAMQIPTDIQKNGINPYTTATALSSGWVWNIPLYGRNGTGYVYSSAFISAEEAEQEFRQHLGNVADNCKASHIQMRIGRNRNSWVKNCVAIGLSSGFVEPLESTGIFFIQHGIEELVNHFPGKSFNEELIRNYNRAIANCLDGVRDFLVLHYRASDRADTKFWQATKQEIKVPAELQEKLKLWRSRLPNKKNINPYFHGFETYSYSVMLLGLNHKPEGSLPLLEHLDDEKALAKFQAIKEKANYLSKNLPSQYEYLTYVIKSQEQSEYLSDNHLATSSVGDSAYQIPVPI

SEQ ID NO: 88213 - protein, 514 aa, Novosphingobium pentaromativorans
  misc_feature (1)..(514): tr|A0A2W5P461|A0A2W5P461_9SPHN Tryptophan halogenase OS =Novosphingobium pentaromativorans OX=205844 GN=DI555_0 1565 PE=4 SV=1
MQGSPIRSILIVGGGTAGWMAANLLATRLRRLPIEITLVESPDIRTVGVGEATVPAIRDYFKAIGVTEAEVMQASQGTVKLGIEFRDWRAPGTRFFHPFGRYGVDAFSVPFHQYWLKRRMAGDQTPLSQYCLPTQAAMRNLMLLPPEQPVNDLGVFDWAIHFDAGLFARFLAQRARDLLGVRHLEGTISGATRDAENGRIASVTLTDGRMLEADLFVDCSGFRSLLLGQTLEVPYEDWTHLLPCDRAVAMPCAHGDALTPYTRSTALAAGWQWRIPLQHRIGNGYVYSSRHISDDEATATLIASLEGEALAEPNMLRFRTGHRTNVWEKNCVALGLAAGFLEPLESTSIVLIQSGIERLLAHFPDRDFDPSLADEFNRITALEYARIRDFLLLHYWGGQRPEKMWQECRALDLPETLARRIRAYKGAGKLPRFEWDSFQSPSWLSMFAGFEIWPSRYDPLADQFTTEELGDTFEQMRAAVARAVSLAGTHEQFIAETCAAPAQNAAPQFTLNSA

SEQ ID NO: 88214 - protein, 515 aa, Novosphingobium taihuense
  misc_feature (1)..(515): tr|A0A562JYX4|A0A562JYX4_9SPHN 2-polyprenyl-6-methoxyph enol hydroxylase-like FAD-dependent oxidoreductase OS=N ovosphingobium taihuense OX=260085 GN=IQ25_00445 PE=4 S V=1
MSGSVQQVVIVGGGTAGWLSACLLAARRPELSITLVEAPDIPTIGVGEGTWPTMRETLATIGIAEAEFIAQCDASFKQGSRFDGWVDGGERDSYLHPFTPPPSGDMAGMLAAWQAEAPLQPFASAMTPQAVACAESLAPRQRAMPDYAGALNYGYHLDAGKFAALLKRHATTRLGVTHMAAQVTAVASDASGNIAHLHLHDGSELAGDFFIDCSGLAAVLIGGHCGVPWVDRSDVSFNDSALALQVPVKPGSPIASQTIGTAHEAGWIWDIALPTRRGIGCVFSSRFMDDARAEEVLRAYVAAKVPGADLSSLRPRKLTFSTGHRERFWQGNCLAVGLSAGFIEPLEASAIVTIELSIKALAENFPRRAETMGLLADRFNELFRYRWDRIVEFLKLHYVLSRRPEPYWLAQRDPATIPARLAECLELWRDQPPSAWDFPRMDELFCAASQQYVLYGMGFAAPAGTFDPATLERLAEVRQRSRALAAALPSNRTYLDALRPVAATDPIAMHGAAVK

SEQ ID NO: 88215 - protein, 495 aa, Unknown
  misc_feature (1)..(495): tr|A0A520MID9|A0A520MID9_9GAMM Tryptophan 7-halogenase OS=SAR92 clade bacterium OX=2315479 GN=EVB03_01745 PE=4 SV=1
MAQQKIKKVIIVGGGTAGWMAAASLSKLIGRDLDISLIESDQIGTVGVGEATIPTFFALHQLLKINEAEFLSEVQGTIKLGISFENWKNNGEDYIHAFGYTGQSCWAAGFQHFWLKGKTLGISEEYSCYSPELMAAKANKFGLLKQNALNYAYHIDASLYAKFLRRLAEKNNVTRIEGKIITVNQADDGNIKSVQLESGLTIDGDLFIDCSGFAALLIDKTLGTEYEDWSHWLPCDRAVAVQTKSVSPPIPYTRSIARECGWQWRIPLQSRVGNGLVFSSEHMSEDEATSTLLNNVEGETLTTPRVIKFRTGQRTVQWNKNCVALGLSGGFLEPLESTSIHLIQRGIIRLMQMFPLSGITEADRDEFNRQMSDEYNFIRDFIIMHYHVTERTDTEFWRQCKNMDIPDSLDHRLRLFKDSGRVFQGEGDVFGENSWTQVMLGQGLMPEQYHPIVNMMSDNELERFLKGNRASVDNTLKQLPTHQQFIAQYCPAKPI

SEQ ID NO: 88216 - protein, 496 aa, Shewanella sp.
  misc_feature (1)..(496): tr|A0A501XY89|A0A501XY89_9GAMM Tryptophan 7-halogenase OS=Shewanella sp. LC6 OX=2589790 GN=FJD32_09095 PE=4 SV =1
MSQIKDIVIVGGGTSGWMTAALLAKLFKHTLSITLVESEDIGTIGVGEATIPPLQLFNSVLGIPENEFIKATHATFKLGIQFEHWGKQGDSYMHAFGNIGKDIGYTQFHQYWLSTQPEMMASFWDYSLNYQAALNNKFQSLEQIPHSPLSCLTHAYHFDAARYALLLRQYSEKSGVKRIEGKIEAVNCLDNGHIANLTLVSGKSVHGDFFIDCSGFAALLIGKTLNVGYESYQDWLLCDSAYAVPSEKACEIKPYTRAIAHEAGWQWRIPLQHRTGNGIVYSSRYMKDEEAKAKLLSTLEGKPLAEPKKISFIPGRRLKQWQHNCVAIGLSSGFLEPLESTSIHLVQSAIIRLTKLFPHQGVVQATVDEFNRQSQLEFEQIRDFIILHYCLNQRSDSDTDTLWSACQQMQIPESLQQKISLFSETGAIFRHKDELFTEAAWVQVMLGQGIIPTDYNPLANTVAPEALTEFLSNIKVIIKNTVSNMPTHEKYLAQLV

SEQ ID NO: 88217 - protein, 507 aa, Nocardioides bacterium
  misc_feature (1)..(507): tr|A0A4S4ZPN6|A0A4S4ZPN6_9ACTN Tryptophan 7-halogenase OS=Nocardioides bacterium OX=1565122 GN=E7Z54_19205 PE= 4 SV=1
MLQTDFWTDELVASAGIPIIDVPFVTVGSGIGSFVTTDYLRIAGVPTSQIRVLGTLDRPWQTYEYLTRVSQVPRPERLRSDSASRPDNIWGFPSYGFAEGVRHGRLKVLWQLFSEPIFSDYYTPKAGEVFQQLEREANRIGYNEMHVKGLVRIVRRRYGGGYFTILTPPEGASATKRVAFRSQYVHLAVGYPGLKFLPELQRYRTEHNDYRHIVNAYEAHEHVYERLMQVPSTVIVRGGGIVASRVLQRLMDDRLLHGAQTNIVHLFRTYINGPNDGYGNETDPRPGGGKPRLTMRRRGGDGWAYQGFNYPKSVWGGQLKAQVRKLEGEQRAEIYKRMGGTNTPWRKLWQKQMNQGRREGWYTCVVGSVEDMQPHGDRIVNHVRTAQGTVPIEADFVIDCTGLEADIAEHRLLKDLLEHGGASRNPVGRLNVDRSFELIGTRSGIGVMYASGATTLGGYFPGVDTFLGLQVAAQEIYQDLAKRGFGKRIGPVRSTIQWWKWLAGSAP

SEQ ID NO: 88218 - protein, 514 aa, Caulobacter segnis
  misc_feature (1)..(514): tr|A0A2W5VDE5|A0A2W5VDE5_9CAUL Tryptophan halogenase OS =Caulobacter segnis OX=88688 GN=DI526_05425 PE=4 SV=1
MQPLKKILIAGGGSAGWMTAALCARLFQGLYEIVLVESEQIGTIGVGEATIPAIKKFNELLGLDEDDFLRKTQGSFKLGIQFRNWWRRGESYLHGFGVIGQDLGWLRAHQYWLRMRELGQAPPFDNLAINNAMALSDKFMRARGDMSESPIGHIAHAFHFDAGLYAKHLSTYAQARGVKRREGKIVDVALRPDDGFVQSVTLDDGETIEADFFIDCSGFRGLIIEQALKTGYEDWTHWLPCDRAIAVPSERSENFTPYTRSTAHDAGWQWRIPLQHRTGNGHVYCSRFIDDDDAERVLLSNLDGAQRADPLRIRFATGKRRKIWNKNCVAVGLAAGFMEPLESTSLHLIQSSVIRMVRLLPDAGFDQATIDEFNRQTDFEYERVRDFIILHYKATERDDTAFWRHCRDMVVPATLQRKMDLFRANGRVFREDDELFTEESWIQVFLGQGVIPRGYDPLVRVQSDEAIAQYLRNIETVIGKCLAVMPSHAEFVARTCEAPSPAALQAATLLVPTP

SEQ ID NO: 88219 - protein, 516 aa, Caulobacter segnis
  misc_feature (1)..(516): tr|A0A2W5VCH3|A0A2W5VCH3_9CAUL Tryptophan halogenase OS =Caulobacter segnis OX=88688 GN=DI526_00085 PE=4 SV=1
MSQATATSAAAASARHGPLDRIVIVGGGAAGWMAAAALSRVLGPRGPAITLIESEDIGIVGVGEATIPPIRAFNALIGLDEATFVRETQGTFKLGIAFVDWTRLGDRYFHPFGVYGHDFGVAPFEAVWRAARRAGQAQPLDAYSVCARAAAQGRFAPLPQSANGPPPMGYAFHFDAALYARLLRAHAEAAGVVRREGKVVDVALRGADGFVEAVTLESGERIAGDLFIDCSGFRSLLLGQALGARFEDWSRWLPNDRALAVPSANVGPPPPFTRSTAREAGWQWRIPLQHRTGNGYVFSSAHVSVDEAHDTLLSGLEGQPLAEPRLLTFQAGCREACWVKNVVALGLASGFLEPLESTSIHLIQAGVARLLEMLPTKAFEPADARRYNRLMAADFENVRDFLVLHFHVTQREDTAYWRDLRAMAPPDSLAERLAIHRATGRIFREADELFTKTSWLAVLEGQQAPVMGEDPLALAVPPEVAATRLARIAELAREAADSMPGHAEFIAARCQARASA

SEQ ID NO: 88220 - protein, 511 aa, Caulobacter segnis
  misc_feature (1)..(511): tr|A0A2W5V4A0|A0A2W5V4A0_9CAUL Tryptophan halogenase OS =Caulobacter segnis OX=88688 GN=DI526_11140 PE=4 SV=1
MADNRIRKLVIVGGGTAGWMAAAALRRRFQGGPLEITLVESAEIGTIGVGEATIPTIRGFYQQLGLNDLEVMRATQATCKLGIRFDGWLREGHAFIHPFGLFGQDLRGVPFHHYWRKLAQGGEPTNIQDYSLGASLAAAGKFMAPPRNPSNSLSIFDWALHLDAGLFAQLMRRVAEDNGVRRIDAKIIKVNLRPEDGFVASLDLDTGATVEGDLFIDCSGFRGLLIEEALGTGYESWSDLLLCDRAFAVQSEGVGDPAPYTEVKAHTAGWRWRIPLQHRYGNGYVFSSRHSSDEAALAELKAAVPDRLLHEPRLIRFTPGRRKQAWNRNVIALGLSSGFLEPLESTSIALIETGIEKIKALFPDKDFAPELVDEFNDWSRREMERVRDFIILHYWANQRAKSGGGGTAFWRDCNAVTLPESLRRKVELFRQRGHFVRYRWEMFQPASWMAIYAGFELLPETIDPALDGIDAQALSAPLAEMRKAIAEVVASAPPHAAFLDQYCRPAPVAAQ

SEQ ID NO: 88221 - protein, 515 aa, Pseudoalteromonas sp.
  misc_feature (1)..(515): tr|A0A0M8KLK9|A0A0M8KLK9_9GAMM Tryptophan halogenase OS =Pseudoalteromonas sp. SW0106-04 OX=1702169 GN=W04_3133 PE=4 SV=1
MKDLSRVIVVGGGTSGWLSAAYLASSFKRTGRDIKVSIIESDTIPTIGVGEGTFPTIVNTLYEIGLSEKEFITACDASFKQGALFKNWLYNPSDKPHAYYHPFDPPAKPKGLDLSAYWVSRKHQGTMQQDFAHATSVQSFLCDENLAPKTPETGEYAWLAKYAYHLDAAKLGQLLKKHAMNKLQVEHIVADIEQVELDEQGFIAHLVDKQQRQHDADFFVDCTGFSSLLLAKALNVPFVDKSHYLTVDTAVVLPVEYADAETPITTHTVSTAQDAGWIWDIALQNRRGTGYVYNSHYCSKEQAEKTLCDYHGIAHDSEKRYRHISFKTGYREKSWAKNCCAIGFSSGFVEPLEATAIAMVEAGVRSLAARFPATREAMLEREKQYNRIFTSRWDNIIDFIKLHYCLTKRDDTPFWREQKNPKTIPASLQEKLKAWQHYGITDGDLPYKYDLFTLASWQYILYGLEFLPDYVEKAPINEEIIDKAFASIAAQKRSAASKLLSNRALLEAFSASCKS

SEQ ID NO: 88222 - protein, 445 aa, Caballeronia pedi
  misc_feature (1)..(445): tr|A0A157ZQL7|A0A157ZQL7_9BURK Tryptophan halogenase OS =Caballeronia pedi OX=1777141 GN=AWB80_01145 PE=4 SV=1
MVKALQMQQDWDVVVIGGGPAGSTAATLLADRGYRVRVLEKARHPRFHIGESLLPANLRLFERLGVADEVRAIGMVKLAAEFVSPQHGDRTQRFLFADAWDKSMPSAYQVRRSELDEILLRNASKHGAHVSEACRARDVVFAPDGSSATIGAEHDDGRIEQVRARFVVDASGRDTLLANHFKTKRRNERHNSSALYGHFRNARRNAGENEGNITVFWFEHGWFWFIPLADGATSIGAVVWPAYLKRRPKGTSVEAYFRDTIALCAPLAERLNDAELISEVHATGNYSYTGDMTHGRNFLLLGDAFAFIDPVFSSGVMLAMQSAFAGAEAIDTALAHPARARAALAKFDRDVRHGPREFSWFIYRMTSPTMRNLFMGPKNPLRMKEALLSLLAGDIFGTTPIWHSLRAFKGIYYIAAALDWRNSLRAYRQRRRNLSDAERAELSAN

SEQ ID NO: 88223 - protein, 516 aa, Caulobacter segnis
  misc_feature (1)..(516): tr|A0A2W5V8C0|A0A2W5V8C0_9CAUL Tryptophan halogenase OS =Caulobacter segnis OX=88688 GN=DI526_11145 PE=4 SV=1
MTHTHPNAIRKIVIVGGGSAGWITAAMLSHYFQAGGCAVELVESEEIGTIGVGESTIPPFLRLLASLGIDERDFIQSTQASFKLGIRFEDWKSLGDRYMHPFGVIGGPFGPHEFYQCWLRAKAAGHPSGLHDFAPGAVMAEQGKFMLPFKAERTLIGGANYALHVDARLVARYLRDYAEARGVKRSEGIVSDVVTHTDGSVAKVRIKDGREIEGDLFIDCTGFRSLLIGKTLETPFEDWSDMLLCDRAVVVQTENVGAPHPYTLSKAEAGGWRWRIPLQHRAGNGYVFSSRHISDDEARATLLGGLEGRALMEPMFIPFKTGVRQRLWEKNVVAVGLSGGFIEPLESTALHLIYRGVDFLLRFFPDRDFDPALRAEYNRRMVADYEEIRDFIVLHYCKTQRDDTPFWRAVREAPIPDSLKERMALFERSGVLREGVDDMFRNPSWQSVMEGMGVRPQRYQQLVDTIPYEVISQTLDQSAPMLAAQVAGLPSHGEFLAKHCPAPPPEAAVAPFKTVA

SEQ ID NO: 88224 - protein, 505 aa, Xanthomonas sp.
  misc_feature (1)..(505): tr|A0A3A5EP08|A0A3A5EP08_9XANT Tryptophan halogenase OS =Xanthomonas sp. CFBP 7698 OX=2082399 GN=XnspCFBP7698_0 5395 PE=4 SV=1
MTQAQIRKVVIAGGGTAGWIAACALSHQFRNLLDITLIESEQIGTVGVGESTVPPIRTFHRFLQIDEQEFLREVAGTFKLSISFEHWLRQGERYIHPFGITGQSTLVCAFHHLWLESQRRGMRGSFGDYCLETVASREDRFALPREPAVNYAYHLDAALYARFLRTRSEACGVQRIEGRIQQVTQHPDSGDVASLVLEDGQAIAGDLFIDCSGFRGLLIEQTLHTGYEDWSHWLPCDRAVAVQTEALGPPVPYTRAIAHEAGWRWHIPLQHRVGNGLVFSSRHLSDDEAHAKLLRDVAAPAVKDPWMVPFRTGRRLKAWNKNVVSLGLASGFIEPLESTSIHLTISAVVRLLTLFPAEGIAPSQVQLFNDVSRAEMEHVRDFVTLHYHATRRDEPLWQQCREMELPESLALRLRAWRERAHAWQAADELFRVDSWTHVLMGQGLMPEQHHPLTRAFSDRDLQGLLNGIAQPIRHAVDQFPSQQAFIERYCQARPEVWGARKPAIA

SEQ ID NO: 88225 - protein, 508 aa, Porphyrobacter dokdonensis
  misc_feature (1)..(508): tr|A0A1A7BD32|A0A1A7BD32_9SPHN Tryptophan halogenase OS =Porphyrobacter dokdonensis DSW-74 OX=1300349 GN=I603_2 361 PE=4 SV=1
MTGEGSVQKLVIVGGGTAGWITAAAFARLLGGRLDIELVESETIGTVGVGEATIPQIIRLNAILGIDENEFLKATSGTFKLGIEFVDWGQKGSRYLHTFGDTGMNLGNVAFHHYWRRSMGAGGNPKGLWNYSLHQRAADEARFGKLDRVGNTAMTGLAYAYHFDASRYALFLRAYAEGRGVTRTEGIVERVERDGESGDITAIVLKGGERVAGDFFIDCTGFRSLLLGGELGVGYQDWSKWLPCDRALAVPSERLETLVPYTRATAKDAGWQWRIPLQHRTGNGHVYSSGFTTDAAAADTLLDGLDTKALGDPRPIRFTTGRREAFWAHNCAAIGLSSGFLEPLESTSIHLIQSHVSRLIQLFPRSANAAAMRAEYNRRCAAEFAQIRDFLILHYHRTDREDTEFWRYCKHMSVPDSLTHKLELFAASGRVGRDTDDLFRDASWVQVMLGQGIMPADYDPMADQIDDAQLTGFLESLRAIIERSVAGLPRHEDYLARHCPAEKLNAAA

SEQ ID NO: 88226 - protein, 505 aa, Actinokineospora bangkokensis
  misc_feature (1)..(505): tr|A0A1Q9LIZ9|A0A1Q9LIZ9_9PSEU Tryptophan halogenase OS =Actinokineospora bangkokensis OX=1193682 GN=BJP25_2425 5 PE=4 SV=1
MTASYLKAAFGDRVEVTLVESGVVGTIGVGEATFSDIRHFFEFLGLEEEEWMPACNATYKLAVRFQDWRAPGHHFYHPFEQMPSVNGLPLADWWLGGHGGSDRFDLDCFVMASVCENERSPRHLDGSMFEREAAKRRKGESYGLTMSEHQGKTQFPYAYHFEAALLADYLAEYAKSRGVRHVVDHVTHVPLDGRGWIAGVRTKEHGTLTGDVYVDCTGFRSLLLGGALEEPFESYQDTLPNNRAVALQVPLDMEQRGIRPCTTATARDAGWIWTIPLFGRIGTGYVYAEDYLEPEEAERTLREFVGPAAANASANHIRMRIGRSRNSWVNNCVAIGLSSGFVEPLESTGIFFIHHAIEQLVKHFPGPDWNPVHRERYNAAVGNVMDGVREFLVLHYQAAARNDTPYWKDAKLREVPDGLAARIEGWQSELPDSESIHPYYHGLPPYSYMCILLGMGGIPLRSSQAVALGDADAARRAFGKVRSTAQSIVRDLPTQYEYFAHMRGA

SEQ ID NO: 88227 - protein, 508 aa, Parvularcula sp.
  misc_feature (1)..(508): tr|A0A371RFT6|A0A371RFT6_9PROT Tryptophan 7-halogenase OS=Parvularcula sp. SM1705 OX=2292771 GN=DX908_02825 PE =4 SV=1
MDQAATAIKQITIVGGGTAGWMTAAALSRLIRPLGVRITLIESDAIGTVGVGEATLPHIRFFNERLGIDEAEFMKATQATIKLGIEFRNWGRIGDSYIHPFGDFGRNVGGVDFHQFWLRAHQAGKAGRIDDYSLPIVMSEAARFGPPSHDPRSVMSAFSYAYQMDATLYAKYLRGFSEANGVVRQEGRIVDVHRDGESGDISEVELESGDRIGGDLFFDCSGFRGLLIEGALEAGYDDWSDILPCNRAVALPCETIEPPIPYTRATAHQAGWQWRIPLQHRVGNGHVYCSDYISDDEAASVLLENIDGPACGDPRFLKFLTGKRRKQWDRNVVAVGLSAGFLEPLESTSIYLIQAAITNLVELFPHSGIRDADRDEFNTVMDLEYERVRDFLVLHYHATERDDSPFWNYVRTMPIPDSLKYKMDLFRDRGVVVKYKDGLFLDASWIAVYLGQRVVPQNFAPLAGAIPEDRLGPFMDDLRGLIRRTVDALPSHDAYLKQHCPAGPDLMA

SEQ ID NO: 88228 - protein, 510 aa, Undibacterium pigrum
  misc_feature (1)..(510): tr|A0A318J986|A0A318J986_9BURK Tryptophan halogenase OS =Undibacterium pigrum OX=401470 GN=DFR42_104342 PE=4 SV =1
MRVKNIAIIGGGTAGWLAANHLAVELRAETDITITVIESPEIGIIGVGEGTVPHIKKSLLKFGIPEAELLATCDTTFKKGIKFVDWMAPSASNPENSYYHPFSSAYPGGADVTSWYLKNSASMEFADVTEAPSLAEAMKSPKRISSAPYEGVVNYAYHFNAVKFGQLLAKNAKEKLGVLHKPATIVNAQLNEHGEVDYLITKEGEQLQYDFFVDCSGFHSLIMGKLFNIPFVDKSSQLLTDTALAVQIPTEANSQIPPYTLAKAHSAGWMWDIPLTNRRGVGFVYSSAHMTEDVAVEHLSRHLQLNTDQFSPRKIPMRMGYREKFWCKNVVALGLAQGFVEPLEATSIFVTDFSAELFARNFSVEKESMSVAADYCNKAVAYTWERVIDFVQLHYCISDRQDSAFWRATTQEVKRSDILQERLDMWAVNSPKKLDIFSRFDLFDVENFLFVLYGMKYKTRAKNMTVYEEDYFRQEIEKVNMYRKKLSGELLDHRLWLDKFATAYQQTSGK

SEQ ID NO: 88229 - protein, 496 aa, Alteromonas sp.
  misc_feature (1)..(496): tr|A0A136HV16|A0A136HV16_9ALTE Tryptophan halogenase OS =Alteromonas sp. Nap_26 OX=1795869 GN=AXW14_15495 PE=4 SV=1
MYDKAVKKVVVVGGGTAGWISAAVIKRLIGTDLTVTLVESEDIGTVGVGEATIPPIITLNNVLGIDEKEFLRETNATMKLAIKFENWRVKGEDYFHTFGAPGKSYAFCHFHHYFKRAQKLGLTDSIWEYDLNYLACKAGKFAHIKSPDPIIEMPFAYHFDASLYARFLRKKCEAMGVTRKEGIIHDVKQDSESGFITGVTLKDGEHIEGDLFIDCSGFKGLLTQQTLNTGYEDWSHWLPCDRAVAMPSERLEKTLPYTRSIAHSAGWQWRIPLQHRNGNGLVYSSNYYTDEQALDILSNNLDTKPLADPNFIRFKTGRRRKQWNKNVIAVGLSSGFLEPLESTSIHLIQSAVVRLIHLFPHEGFKQRQIDEYNKQSKTEYEQIRDFIILHYHVNERTDSHFWKDLREMDVPDSLTHKIELFRESGNLFREQNDLFLESSWLQVLMGQGIVQGDYHPLANALSEQKLQELMQNIKRIKNEPIGKIATHDDFLKQFCG

SEQ ID NO: 88230 - protein, 447 aa, Streptomyces sp.
  misc_feature (1)..(447): tr|A0A1S2Q9N8|A0A1S2Q9N8_9ACTN Tryptophan halogenase OS =Streptomyces sp. MUSC 1 OX=1678012 GN=BIV23_24595 PE=4 SV=1
MAKETADVVVIGAGPAGAVSAYVLAKQGHSVLLLEKELDPRFHIGESLLPYMMGLFERIGLREVVEGQGFVRKFGGEFIDPTEKKFFEGVFRADFTKQGTGRHDNAFQVERRRFDRMLAEQAQAAGAKLVFGANVNELLMEGDRMVGVRYERDGESHEVRSAYVIDASGRAGKIAHRFGLRKTLEKLRMVAVFRHYSGLDESHNLGVEGDIQVGAHDDGWVWAIPLTKDTISVGTVMPRDVLRASTPEEVFEEHVARVPRIVARLTGTRPSMDLKIETDYCYHADTVTGPGWLLVGDAGCFGDPMFSGGVLVATATAVRAAETLGEALADRSAEERLLERYSNYFKTGYDTYIRLIHAYYDGELVAMAADAARSTDRETLEKYLVRLIGGDFWSEHNSVAQEMRRRKEWDTFEPFQRVYGCPSYPHLDEIDRKERSESRVRRVTAGR

SEQ ID NO: 88231 - protein, 504 aa, Rhodanobacter sp.
  misc_feature (1)..(504): tr|A0A1Q3VHF1|A0A1Q3VHF1_9GAMM Tryptophan halogenase OS =Rhodanobacter sp. 67-28 OX=1895822 GN=BGO50_03245 PE=4 SV=1
MTDPRIRNIVIVGGGTAGWMAAAAFAKVLGPDYAIRLIESEEIGTVGVGEATVPHLKLFNNLLEIDEIEFIRQVQGTFKLGIQFNDWGRIGDTYIHGFGTIGHDVSLLPFHQFWIKANQLGIAEDIGAYSLNTVAAPLGKFMPSATDVPAGSPLADIAYAYHFDAGRYARYLRGYAERRGVRRTEGKISQTLLRAHDGFVEAVVLESGERIDGELFIDCSGFRGLLIEQALHTGYLDFTHWLPCDRAVAVACEKVGPPTSYTRSTARDAGWQWRIPLQHRTGNGYAYSSSHVSDDEAAATLLAHLDAPAVGEPRPLRFTTGVRKKFWNRNVVALGLSSGFLEPLESTSIYMIQSGIARLLNLFPQRDFSEVVINRYNAQAVFEYERIRDFLILHYHATRRDDTPFWRQCRTMSIPDQLRENIALFRDSGRFFRNAEEMFALVSWVQVMIGQGIIPRGYHPLVDQMPERDLRKFIAGVGQVVASCVDSMPMQQAFIDRYCTAGAA

SEQ ID NO: 88232 - protein, 390 aa, Corallococcus sp.
  misc_feature (1)..(390): tr|A0A3A8UI74|A0A3A8UI74_9DELT Tryptophan halogenase OS =Corallococcus sp. AB030 OX=2316716 GN=D7Y15_07460 PE=4 SV=1
MSEDSCDVAVIGGGPAGAAMAVALRRKAPSLSVTLVERTTYDAPRLGETLPPDVRLSLSRLGVWESFLRDGHLASRGTASCWGRAEPGFNDTMMSPWGSAWHLDRTRFDERLSVEAARQGARVLRATTLVDSESLGRNGYRLRLSHGAADPSTLRARFVVDATGGKATFASARGARRLVSDRCFAVYGSFQLQGGAVFPTHALVESCPEGWWYSALLPRGRVVVALVGDGDSLRGLRWATPEPWMNLLKQAPVTWARLDACDFVGEALIAVPVLVGQLDRPRGEQWLAVGDAACTYDPLSSQGITKALGSALLAADALERCLSGDADALQDYESMLNARFQDHQRTRGVYYRQEQRWPQAPFWMNRWEALPAPAASPAQSRRSHSTEVNP

SEQ ID NO: 88233 - protein, 533 aa, Streptomyces sp.; identical to SEQ ID NO: 82569
  misc_feature (1)..(533): tr|A0A0F0H0D7|A0A0F0H0D7_9ACTN Tryptophan halogenase OS =Streptomyces sp. NRRL F-4428 OX=1609137 GN=UK14_16280 PE=4 SV=1

SEQ ID NO: 88234 - protein, 538 aa, Pseudomonas chlororaphis
  misc_feature (1)..(538): tr|J2FAV3|J2FAV3_9PSED Tryptophan halogenase PrnA OS=Ps eudomonas chlororaphis subsp. aureofaciens 30-84 OX=103 8921 GN=prnA PE=4 SV=1
MNKPIKNIVIVGGGTAGWMAASYLVRALQQQANITLIESEAIPRIGVGEATIPSLQKVFFDFLGIPEREWMPQVNGAFKAAIKFVNWRKSPGSSRDDHFYHLFGNVPNCDGVPLTHYWLRKREQGFQQPMEYACYPQAGALDGKLAPCLPDGTRQMSHAWHFDAHLVADFLKRWAVERGVKRVVDEVVDVHLNERGYISSLFTKEGRTLEADLFIDCSGMRGLLINQALKEPFIDMSDYLLCDSAVASAVPNDDAREGVEPYTSAIAMNSGWTWKIPMLGRFGSGYVFSSKFTSRDQATADFLNLWGLSDNQPLNQIKFRVGRNKRAWVNNCVSIGLSSCFLEPLESTGIYFIYAALYQLVKHFPDTSFDPRLSDAFNAEIVYMFDDCRDFVQAHYFTASREDTPFWLANRHDLRLSDAIKEKVQRYKAGLPLTTTSFDDSTYYETFDYEFKNFWLNGNYYCIFAGLGMLPDRSLPLLQHRPESIEKAEAMFASIRRETERLRTSLPTNYDYLRSLRDGDAGLSPSQRGPTLATQETL

SEQ ID NO: 88235 - protein, 519 aa, Altererythrobacter sp.
  misc_feature (1)..(519): tr|A0A411ZDU9|A0A411ZDU9_9SPHN Tryptophan 7-halogenase OS=Altererythrobacter sp. BPTF-M16 OX=2169535 GN=BPTFM1 6_01538 PE=4 SV=1
MRVAADKLRARIPRVTETYSPLKKIVIVGGGSAGWMTAAALADTLGSQCEITLVESEMIGTVGVGEATIPPIRHFNQRLGIDEATFIKETSGSYKLGIQFVDWTRLGHSYFHPFGQYGAEFDKVPFYHFWMREYLAGRVDGPIDDFSMCWAMAKAGKFSRPVPDRRQIQSTFDYAYHFDATLYAAYLRRYAEARGAKRVEGRVTDVALRGEDGFIESMVLESGATLEAEFFIDCSGFRGILIEDALKAGYDNWQHWLPCDRAVAVPCAKGDEIAPYTRSTAKSAGWQWRIPLQHRTGNGYVHCSEYITEVEATEELMSSLDGKALADPRTLRFVTGKRRKFWDKNCVAIGLSAGFMEPLESTSLHLIQYGILRLLALFPDAQMSPLLAREYNEQTTAEYERIRDFLILHYKATERGDAELWRYCAAMDIPESLQYKMDHFRSHGMIVSDERELFKNPSWIAVYLGQGVVPDRAPAMANMRQHVPVKERLSAISQAMESAVDAMPSHGEFLAQHCASPHA

SEQ ID NO: 88236 - protein, 512 aa, Thalassotalea sp.
  misc_feature (1)..(512): tr|A0A4P7JTA7|A0A4P7JTA7_9GAMM Tryptophan 7-halogenase OS=Thalassotalea sp. HSM 43 OX=2552945 GN=E2K93_13975 P E=4 SV=1
MNESVQSITIVGGGSSGWMTALYLNQLYNHKQQRVAIRVIESKDIGILGVGEATVHSIRFFFAAMGIDENELIQATNATLKTGIMFRNWMKPKQGNSHEYFHPFEHQALGSITDISSAWILSSRQLFERYDQGVSVSAHLMKNNLTPKMAQSKPYQGVVPYGYHLDATMMARFLRDKAKQRGVEHVEATVTDVITVGNNIERVITEQGEFSADLFIDCSGFKGLLIERLKDNNWQSFKKELPCTKAVAMQLKFADKQIPRSYTTATALTNGWVWEIDLNNRRGTGYVYDGDRISAEQAEQELKQFLQQSGDIEVVKTLHLDMKVGCRKEFWVGNCISIGLSGGFIEPLESTGLHIINIGAKLLATHLNEKHTQQSTRDSYNRLMNGVYDDLKRFIVLHYCLTDRDDSEFWRYAQTTAQYSDDLQRQLQIWRHKTCEFMDLSGGFATTFTDENYRFILYGMDYLPQLHMPFDEQECQQMFARLQMMATRAQSVVYSNYDWLQMMHGERTVSAN

SEQ ID NO: 88237 - protein, 497 aa, Parvularcula sp.
  misc_feature (1)..(497): tr|A0A371RHK2|A0A371RHK2_9PROT Tryptophan 7-halogenase OS=Parvularcula sp. SM1705 OX=2292771 GN=DX908_06290 PE =4 SV=1
MSGAIRKIVIAGGGTAGWMTAAAIGKVLGANLDITLIESDQIGTVGVGEATIPTLLTYNRLLGIDEAKFMSAVGGTFKLGIAFENWTDVDHRYIHSFGITGKDHWTAGFQQFWRKGRELGVAKEFGDYCLELVAAEKRRFAHLPKLGLNYAYHLDSSAYAQFLRKMAEDNGVVRREGKIGEVRKNEAGDISSLILDDGTVIEGDFFVDCTGFRALLIGEALGVGYEDWTHWLPCDRAIAVQTKSVGPPLPYTRSIAHSAGWRWQIPLQHRTGNGIVFSSQYMDEEEGRAFLLSQIEGEVLAEPRVIPFRTGTRSAHWERNCVAIGLSSGFIEPLESTSIHLIQRSVMRMLQMFPQGSVANADIDEFNKQTFFELEHIRDFIILHYHLTKREDTPFWRYCRGMDIPDTLRHRMQLFRETGRTFRANDELFAENSWTQVMLGQGIMPKSHHPVADVMSEGEVRNFLSHIDENVRRTVETLPSHEDYLKSYCPSSQSIPD

SEQ ID NO: 88238 - protein, 503 aa, Massilia aurea
  misc_feature (1)..(503): tr|A0A422QLP5|A0A422QLP5_9BURK Tryptophan halogenase OS =Massilia aurea OX=373040 GN=NM04_10170 PE=4 SV=1
MEHQAIKDIVIVGGGTAGWMTAAALSSMLNGRYNIRLVESDEIGIVGVGEATIPMIQRFNRVVGIDEAQFMRETMGTFKLGVEFVNWGKLGERYMHGFGRMGQDLATVPFEQYWHKMRALGKAAPLEEYSITRMAAKAGKFMPARTDVPNSPLGDIAYAYHFDASLYAKYLRALCEARGVTRIEGKISRAIQREPDGFIEAVELEGGQRIEGELFVDCSGFRGLLIEQTLETGYEDWNHWLPADRALAVPCESVPAMTPFTRATAHKSGWQWRIPLQHRTGNGHVYCSRFISDDEATATLLSNLDGRALAEPRMIKFRTGMRKQAWNRNVVAIGLAGGFLEPIESTSIHLIQSAIARLVEFFPDRRFSETDRIEFNRQSRFEYERVRDFIILHYHLNQRTDSAYWTECANMAIPETLRQKMDLYRSRGKIVRVDNELFSEVGWLQVFEGQNMPIDGYHPLADTQSEADIADYMGSVRDVIRKCVDVMPSHEEYIAKHCAARKS

SEQ ID NO: 88239 - protein, 515 aa, Sphingomonas sp.
  misc_feature (1)..(515): tr|A0A1P8PV72|A0A1P8PV72_9SPHN Tryptophan halogenase OS =Sphingomonas sp. LK11 OX=1390395 GN=AV944_11935 PE=4 S V=1
MVQPVQNIVIVGGGTAGWLTAGVIAARHQGRRPHGFTVTLVESPNVPIIGVGEGTWPTLRTTLRKMGVSETAFFRECDASFKQGARFNRWTTGADDDGYYHPLMLPQSFAQVNLAPHWLTADGEQVSFCDAVTPQGRICDAGLAPKTIATPEYEAIANYAYHLDAGKFADFLRRHCCEQLGVRHVLADVEEVLLTESGDIRAVRMAQAGEVTGDLFVDCTGFRSLLLGEAMGVPFKPLNDVLFCDTALAIQVPYDDPEAPIASHTISTAQSSGWIWDIGLPTRRGVGHVFSSSHIDRDGAERELRAYLGEAGRDLPVRELKIRAGHRTRFWERNCVGVGLAAGFLEPLEASAIVLIELSAKLIAEQMPACREVMDTVAKRFNDTTLYRWGRIVDFLKLHYSLTQRTDSDFWRDNCRPETMPDRLQELMELWRYQAPWMHDEFDRVEEVFPSASYQYVLYGMGQSTDIAPGSLIAETIVAQRARRENDVQTGRLLAGLPKHRDLIRKIVEQGLPTI

SEQ ID NO: 88240 - protein, 508 aa, Sphingomonas sp.
  misc_feature (1)..(508): tr|A0A1P8PVP6|A0A1P8PVP6_9SPHN Tryptophan halogenase OS =Sphingomonas sp. LK11 OX=1390395 GN=AV944_13075 PE=4 S V=1
MDAAPSADHIAQRVVIVGGGTAGWMAAAALARFAPASTRITLIESDAIGTVGVGEATIPGIRLFNQMLGLDEAEFLRATNGSFKLGIRFEGWSGEGSGYLHAFGSIGRGLGLVPFHHYWLRGGGAANPASLWGHMPGAQAAMAGRFAPDPGRPDLPSGLAWAYHFDASLYAALLRCHAEGAGVVRVEGRIASVARDAGGRIDHVVLDGGQVHTGDLFIDCTGFRALLIGETLAEPFDDWSELLPCDRALAVAGERTSPLPPYTRAIAHGAGWRWRIPLQHRTGNGLVYDSRHLSEDEAADRLLTALNGKAMGEPRCLRFSTGRRRRAWVGNCVALGLAAGFLEPLESTSIHLIQSGIARLLDYWPGTIPPAVEIDAYNRETAAEWLAIRDFLILHYHANARPEPFWTERRAVPLPDSLAARIALFRANGRFRREGEELFAEPAWVQVMIGQGIIPAGHHALADALSADELDDFLGLTRRHAAQVAARLPTHDAFLAAHCAAPVPKVFA

SEQ ID NO: 88241 - protein, 167 aa, Caulobacteraceae bacterium
  misc_feature (1)..(167): tr|A0A4Q3TF05|A0A4Q3TF05_9CAUL Tryptophan halogenase (F ragment) OS=Caulobacteraceae bacterium OX=1978230 GN=EO N96_17075 PE=4 SV=1
AGFLEPLESTSIHMIQTAITRLLALFPDRSFDPTLVDEYNRLSRREAERIRDFVILHYHQTTRDDAPLWRQVRTMEVPETLRRKLELFRSRGRYFREDDDLFVEANWLAVMLGQGVVPRTIDPVADALDVERTAARMAKFRDAVAHAAAEMPTQQAFIDRNCKAPSV

SEQ ID NO: 88242 - protein, 415 aa, Pseudomonas chlororaphis
  misc_feature (1)..(415): tr|J2Y1K7|J2Y1K7_9PSED Putative tryptophan halogenase O S=Pseudomonas chlororaphis subsp. aureofaciens 30-84 OX =1038921 GN=Pchl3084_0467 PE=4 SV=1
MPTVEMERRQIVVIGAGPSGAIAAALLKGKGHDVLIVERQHFPRFSIGESLLSHCLDFVEEAGMLEAVKAAGFQLKNGAAFAWGERYSAFDFGDTFSEGKPTTFQVQRADFDKLLADQAALQGVEVRYGEAIVSADFNLARPQLQVLREDGSEYRVEADFVLDASGYGRVLPRLLDLEAPSNFPVRQAVFTHVEDRIDSPAFEREKILITTHPSKRDVWFWTIPFSNGRCSVGVVAAKEHFDGRGDDLDQCLRGFIEETPSLAKVLHNAVWDTPARAIGGYSANVKTLHGPGFALLGNAAEFLDPVFSSGVTIAMRSASMAAAVLHRQLQGESVDWESEFAIPLKRGVDTFRCYVEGWYAGTFQDVIYHPGSSPEIRRMISSILAGYAWDERNPFVSEPKRRLRMLSEICAMEAP

SEQ ID NO: 88243 - protein, 520 aa, Acinetobacter sp.
  misc_feature (1)..(520): tr|A0A143G2T7|A0A143G2T7_9GAMM Tryptophan halogenase OS =Acinetobacter sp. TGL-Y2 OX=1407071 GN=AMD27_06210 PE= 4 SV=1
MSSQLIKNVLIVGGGSAGWMTASYLAKAFGNKVNISLVESPEIPKIGVGEATIPNLQKVFFDFLGLKEEDWMPECNASFKAAIKFVNWNDPNDKNDYFYHMFGQVKNIEDIPLTHYWNYFRENKTTNLPMAYDCYDKAKLLDAKLSPKTLNHESVMSHAWHFDAHLVAKFLKKLSISWGVKHFEDEVKNVNLDANGYVKSVTTTKNGDLEADLFIDCSGFKGLIINKALNEPFLNMSDQLFCNSAVAASIKHDDEENGIEPYTSAIAMKNGWTWKIPMLGRFGSGYVYSDNFTTKDQATDEFLKLWNVKEDNISLNHIKFRTGRNKRAWVKNCVAIGLSSCFLEPLESTGLYFIYVAIYQLVKHFPTKEMDEKLINSFNDKIEVMFDDSRDFLQTHYFTTSRIDTDFWKANKHDLKLSDSLKAKLDMYKAGLVVCPPITTNEKDYYGNFDIEFSNFWTNSNYYCMFTGFKWYPDSVYPKVLYDEKFEQAQQYMKDLKERENMLLQSLPTTYEYLKFIHHK

SEQ ID NO: 88244 - protein, 510 aa, Pacificibacter maritimus
  misc_feature (1)..(510): tr|A0A3N4UMW0|A0A3N4UMW0_9RHOB Tryptophan halogenase OS =Pacificibacter maritimus OX=762213 GN=EDD53_0475 PE=4 SV=1
MDKNAKHIAIVGGGTAGWLAALVLKRAAEKAGQTIRFSVIEAPDIPTVGVGEGSTSVFRQVLLDLGIDESEFLRETGATFKFGIHHKGWRAGGKHFFGPIDDPNALGPVPAGLPANWLHHARIASGKSLADAHLFTALMRARKSPFARSATGDPIALSPFHHAYHFDQARLGAFLARKAKNIDHIRAQVAGLKRASSTGNITDLIMTDGAALPVDFVIDCTGFRRAIIGELQAGWTSYGKFLPLNRAMPFWMEHDPNKDIAPYTTAQAVDAGWIWAIPVQDRMGCGYVFSDAHITPDAAQAEIETKLGKPIEPRGVLSIEPGRLNHAWVNNCVAIGLAQSFLEPLEATSIHGSLVQTLILTRLSFDTLLGPKAAQARIKYNMTVARQVNDFAQFINLHYAGGRTDTAFWTDMTHSGLTGQTQAQLRHWQAHPVTRADFQPFAGNLPHVEEQLYAPVLAGLGKLPAACAKQVFANHPRLKAQARKTLMQLDREFKSAALRALGHRAYLTQL

SEQ ID NO: 88245 - protein, 501 aa, Thalassotalea sp.
  misc_feature (1)..(501): tr|A0A4P7JMX5|A0A4P7JMX5_9GAMM Tryptophan 7-halogenase OS=Thalassotalea sp. HSM 43 OX=2552945 GN=E2K93_07985 P E=4 SV=1
MSNDKAFDIVIVGGGTAGWMTATLMAKKWQHLPVRITLVESPDVNIIGVGEGSTPTLKRFFEIIGVAESEWMAKCNATYKVNIRFADWSPASGIDSYCHPFPAQVDSFSSRAFLVNGRTRRLGLDVETQPEKFLLNGLLAEQGKGPLTPDNFPFKIEYGYHFDSSLLGQYLRSVAESLGVRYQQCHIDQVQQQPNGNISRLCTKQGETIDGDFFVDCTGFASLLMQKTLGVKFKSFKDNLFNDSAVVMPTPITEQIPSETLSTALSAGWCWKIPLTNRFGNGYVFSSDFINQDQAETEFRRHIGMLDSEQECHHLKMRVGQVEKHWHKNVLAIGLSQGFIEPLEATALHLVQIAVEMFIIDMEKGQFTNQQQDSYNQKVSERFERVRDYIVAHYKLNTRNDSDYWRANRDNNHLSDSLLGVLKTWYNREDLAAEIERQNISPHFDSMSWNCLLAGYGAFPKLAPNQPGQGDLYHEKNIQSFVQGCALNFQSHQHNLKSISK

SEQ ID NO: 88246 - protein, 488 aa, Streptomyces sp.
  misc_feature (1)..(488): tr|A0A2V1NY33|A0A2V1NY33_9ACTN Tryptophan halogenase OS =Streptomyces sp. V2 OX=1424099 GN=DF268_07215 PE=4 SV= 1
MGTTTPSGLFNDIDVVVIGGGPAGSTFASLVAKRGHRVALLEKETFPRYQIGESLLPSTVHGICRITGVADDVARAGFVRKRGGTLKWGASPEPWTLAFADSPIMGEAAGYSYQVERMKFDQILLDGAARNGAQVHHRCTVTGVVEDDTRVTGVRFLDENRVEHTVRARYVVDASGNTSRTHRHVGGTRTYSDFFRNLALFGYFEGGKRLPEPNSGNVFTVAFTNGWFWYIPLSDTLTSVGAVVRPELAPRIQENRQEALTGFVQECPTIRDYLAHAHRVTTGPYGQIRVRKDYSYWNTKFWRPGMVLIGDAACFVDPVLSSGVHLAGYSGLLAARSVNSVLENSVTEEEAFTEFEQRYRHEYGIFYEFLSVFYNSHAERDSYYWSAKQITNSASGEFEAFINLAAGMGSPQAAETVTDRLRHHSSEVVEALARLEPDSPRNAALLGRTTVASRTAPVEEELLHGTERTDFAGALRASPDGLSWIRQD

SEQ ID NO: 88247 - protein, 504 aa, Alteromonas sp.
  misc_feature (1)..(504): tr|A0A136I1U5|A0A136I1U5_9ALTE Tryptophan halogenase OS =Alteromonas sp. Nap_26 OX=1795869 GN=AXW14_07800 PE=4 SV=1
MHNPLTTPIKRVVIAGGGTAGWLAAALMKKVLNSAVEITLVESEAIGTVGVGEATIPPIRLVNQVLGIDEAQFLHDTKATIKLAIRFENWKTKGQSYYHTFGAPGKSMAFCHFHHYWLKGKSLGHTADLWEYDFNYHAAEAGKFAQINAKDPVLELPFAYHFDATLYAKYLRKLSENMGVSRIEGKIAHVERYQDSGYIKSLRLDNGQEIEGDLFVDCTGFKGLLIGEALGAGYDDWSHLLPCDSAIAVPSERHEKTAPFTRSIAHDAGWQWRIPLQHRNGNGHVYCSRYISDQQAQDTLMENLDTKPLGDPKLIKFTTGRRRKQWYKNVVAVGLSSGFLEPLESTSIHLIQSAIVRLIQLFPHNGFTPSLQAEYNKQSELEFEQIRDFLVLHYQVNERSDSAFFNDMRNIELPDSLKHKIELFRENGNLFREQNDLFLESSWLQVMYGQGITPNDYHGLVNSVPNDQLNTMLTKLREIKKEPVSKLPTHDEYINGMIARVSNR

SEQ ID NO: 88248 - protein, 532 aa, Caulobacter sp.
  misc_feature (1)..(532): tr|B0T4D4|B0T4D4_CAUSK Tryptophan halogenase OS=Cauloba cter sp. (strain K31) OX=366602 GN=Caul_0297 PE=4 SV=1
MSDEPTIDRILIVGGGTAGWMTAAYLARRLGAMRPDGVQITLIESSEIGIIGVGEGTFPTIQNTMRTIGVDEARFMREAGAAFKQGIKFVDWKTAPKDGVHSHYYHPFAPPRLLNGGMDLAPYWLMGEAGNIPFSDAVTLQDKVCDAMRGPKRRDDPQYGGPMAYAYHFDAGKLANLLRDVGKATGVKHLLGNVQAVNKTEDGSIASVTIREHGDLTADLYIDCTGFAGALIGEAMGSAWIDKNDVLFVDRALALQVPYDRPDAPVASTTLSTAHEAGWTWDIGLPDRRGTGYVYSSRHTTDDRAEQILLGYVGKAGEGLNPRLLKLKVGHRAQHWVKNCVAVGLSGGFLEPLESTGIVLIEAAAYMLARNLPRRGGMAAAARQFNTAMTDRYLRAIDFIKLHYCLSQRADNSFWTDNADPASIPQTLQDHLAMWKHRPPNVFDFPNLHESFKSFNYQYILYGMGYETKVDPAAHVHGDLARADFARVREAGVRAAASLPDHRALLTEVYAHGFKTKTPDAASAEAAEGLRR

SEQ ID NO: 88249 - protein, 501 aa, Mitsuaria sp.
  misc_feature (1)..(501): tr|A0A1I6JNM6|A0A1I6JNM6_9BURK Tryptophan halogenase OS =Mitsuaria sp. PDC51 OX=1881035 GN=SAMN05428960_2065 PE =4 SV=1
MVQRIVIVGGGAAGWMTAAALASSRQGRWSVTLVESEEIGIIGVGEATFPSIRAFNERIGIDEAEFLHATHGSYKLGIEFRDWHSIGDRYFHTFGNFGSLLGPYMLWGQYRRAADASLGELGEQCLPTAMAMQGRFVVPDEDGGAPYKYAYHFDAMLYAAFLREWSMRRGARRIEGRIVEVLRREDGDVERLRLADGREVEGDLFIDCSGFASLLLGRALKEPFVDFSHWLPVDGAWACPCERVGEALTPYTRATALEGGWAWRIPLQSRTGHGHVFSSRYIDPDAARAQLMAQLDGKPLAEPRLLRFSTGHRERFWVRNVVALGLSSGFLEPLESTSIFLIQTNLAHLMTLLEAKAPIDEAAIDAFNARGTREFRRIRDFILLHYCLTARRDSALWRDMATMELPDTLAYKIELWRHHGVLHQQQDEGFDETSWLAIHAGMRHWPQRTDPVLEELPLDHARDILRQRREAIARAVAPLPPHHAYLARLMNLAQGAGRSPR

SEQ ID NO: 88250 - protein, 508 aa, Porphyrobacter sp.
  misc_feature (1)..(508): tr|A0A3M9YYZ7|A0A3M9YYZ7_9SPHN Tryptophan 7-halogenase OS=Porphyrobacter sp. IPPAS B-1204 OX=2483793 GN=EDM03_ 04660 PE=4 SV=1
MMSDSPQPVRVVVLGGGTAGWMTAAGIAKLLPGLASVQLVESEEIGIVGVGEATLPHIRGFVEKLGIDEAAFMKATHATFKLGIDFRDFGRIGESYIHPFGSFGEEVAGVGFHHYWLELARHGKARDLGDYSLAVAAAKANRFRPPTQDDSLGSTYGYAYQFDATLFGPFMRKFGLGLGIERYEGRVVTVERDGASGDVTALILADGRRVAGDLFIDCSGFRSILLGQELGVAWEDWTHWLPCDRAAAMPCTHATDDLRPYTTATAMPAGWRWQIPLQHRMGNGYVFSSAHISEDEACEAIRASAEGTPLADPRILKFRPGRRTQSWCHNVIGVGLASGFLEPLESTSIYLAQMAITYLIELFPAAAGQIDARDRAEFNRLVDMEYDRVRDFLILHYNATTRDDSEFWNHVRTMKVPDSLADKLELWRRAGRIEKYSDGLFYDASWIAVYVGQGMLPEAHDPRAAMIAPDALARATERLRMAVTGEVAAMPGHRDYLRAEAARLAEAA

SEQ ID NO: 88251 - protein, 375 aa, Caulobacteraceae bacterium
  misc_feature (1)..(375): tr|A0A4Q3T9W9|A0A4Q3T9W9_9CAUL Tryptophan 7-halogenase (Fragment) OS=Caulobacteraceae bacterium OX=1978230 GN= EON96_19105 PE=4 SV=1
FHPFGTIGAPVDLADFYQLWLKAKLNGYKGALQDFAPAAVMAREGRFILPFKAARTPIGGASYALHVDAKRVAGFLRTFAEARGVTRTEGVVDDVVLRTDGFVEALVLRDGRRVEADLFIDCSGFRSLLIGKAMKVGYHDWSHWLLCDRAIAVQTENVGSPAPYTVAQAQDFGWRWRIPLQHRTGNGYVFCSRYLSDDEATASLMSQVEGAPVRPPMVVPFKTGVRERLWDKNVVALGLAGGFIEPLESTAIHLIYRGMDFLFRLLPDRDCDAALATEYNRRMIADYEEIRDFIILHYCLTQRDDTSFWRACRDMELPPGLQRKLDLFRVNGSLAEGLDELFRAVSWQSVMEGMGVRPRAYHPLVDRIPFAGVTD

SEQ ID NO: 88252 - protein, 518 aa, Parvularcula sp.
  misc_feature (1)..(518): tr|A0A371RHK9|A0A371RHK9_9PROT Tryptophan 7-halogenase OS=Parvularcula sp. SM1705 OX=2292771 GN=DX908_06305 PE =4 SV=1
MTGAIREIVIVGGGTAGWLTAGILAADHRAASSDGLRVTLIESPDIPTLGVGEGTWPSLRDTLRRIGISETDFLRHCDASFKQGSRFDGWVNGKTDDIYYHPFDAPPPTDDIDPLALASAAPAGTPFAEAVSTQAILCQMGRAPKQAMTPEYAAVANYAYHLDAPAFAAMLREHCQTRLGVTLIIDTVDGIERDETGNISSLQAREHGNITGDLFVDCTGGRALLIGEAMRAELTDVSDLLFNDRALAIQIPNGESNSQIASQTTATAMPSGWVWDIALQSRRGIGHVFSSSHQDEETARNQLSDYIARTAPWSDLNGGDARLIKFRSAYRKTPWVGNVVAIGMSQGFVEPLEASAIVMIELSATMLSDTLPPRRELLEGSARRFNDRFSYRWERIVEFLKLHYVLSERPEPYWAAHRDPANSTGRLNDLLDRWRFEVPSREDFPQAQEIFPATSFIYILYGMGKYPADRPLRRRKDDKERAERFFAEIVTKTRKFAEGLPSNRELLDHLKSHGFPRI

SEQ ID NO: 88253 - protein, 517 aa, Duganella sp.
  misc_feature (1)..(517): tr|A0A1H7NHH1|A0A1H7NHH1_9BURK Tryptophan halogenase OS =Duganella sp. CF402 OX=1855289 GN=SAMN05216319_1320 PE =4 SV=1
MNNETHGGGIRRIVIVGGGTAGWMTAAPLAQRLARHPTQPCEITLIESPEIGTIGVGEATLPTIRVYNKALGLDGADFVAKTQASFKLGIEFKDWGHLGNRFFHQFGDFGPPLAGISAHHHWLRLAKEFNQMPEIENWSLASVMARENKFVPPNEDTPGMTDAYSYGFHFDASLYAHYLRDYAVARGVNRIEGMIVDVEQHPENGFVRAVKLRDGRRVEGDLFVDCSGFRGLLIEGALKAGYEDWSNYLPCNSALAVPCASAPQLTPFTRSTAQEAGWTWRIPLQHRTGNGYVYSNNFTSDARARDVLLGALDGEALDEPRQIRFVTGRRRKSWDKNVVAIGLSAGFVEPLESTSINLIETAVGKLLELFPDRDCSPHLADEFNRFMGIRYESVRDFIVLHYKLTRRDDTEFWRHCAHMAIPDSLQHQIELFRATGRVAILDRAGFAEPSFVAMMMGLGVTPKRYDPLADRVDIRAVHGHFAELRDMIAKAAARMPDHGVFVANQAAAAKAASRAAA

SEQ ID NO: 88254 - protein, 496 aa, Thalassotalea sp.
  misc_feature (1)..(496): tr|A0A4V1BRY9|A0A4V1BRY9_9GAMM Tryptophan 7-halogenase OS=Thalassotalea sp. HSM 43 OX=2552945 GN=E2K93_07980 P E=4 SV=1
MNKAINKVVILGGGTAGWISASLLQKLIGPQLQVELIESNEIGTVGVGEATIPPIQNLNQVLGLNEAEFLRETKATIKLAIKFENWKEQGHSYYHTFGAAGKSLAFCHFHHLLKRAGQLNDDSHLWQYDLNALCAEQGKFAHIKAKDPILDLPYAYHFDAGLYAQYLRKVSEKMGVKRTEGTVVDVKQCQQSGYIEELTLKDGRKVQGDLFIDCSGFAALLIEQKLSTGYEDWSHWLRCDRAVAVASERFEHTLPYTRSIAHKGGWQWRIPLQHRNGNGLVFQSNQYSEQEAIDLLMNNLDSKPLTDPKVLKFKTGRRYQQWNKNVIAVGLSSGFLEPLESTSIHLIQSAIVRLVHLFPHAGIADTDVSEYNKQSKLEFEQIRDFIILHYHVNERNDSLFWKDMRNMQVPESLTHKIELFRQTGRLFREQNDLFHDSSWLQVMLGQGIIPQDYHPIANTLSDEMLKTNLQRIKAIKNEPIAQLPSHDQFLKNYCGM

SEQ ID NO: 88255 - protein, 78 aa, Tenacibaculum sp.
  misc_feature (1)..(78): tr|A0A2G1BPG7|A0A2G1BPG7_9FLAO Tryptophan halogenase (F ragment) OS=Tenacibaculum sp. 4G03 OX=2045443 GN=CSC81_ 17690 PE=4 SV=1
LFKATGKIIREDDELFAQIAWQQVMIGQGLEANDYSALASALSDDQLSELFSSFKTLINGTVEQLPSHSDFLLRMKNN

SEQ ID NO: 88256 - protein, 523 aa, Duganella sp.
  misc_feature (1)..(523): tr|A0A1H8BE02|A0A1H8BE02_9BURK Tryptophan halogenase OS =Duganella sp. CF402 OX=1855289 GN=SAMN05216319_4790 PE =4 SV=1
MSELRHIVIVGGGSAGWLTAGVIAAEHAAHPGARVRVTLLESPDVAPIGVGEGTWPSMRDTLARIGVSESDFFRECDAAFKQGSRFNRWVTGGDDDFYFHPFVVPQGYGEANLAARWRQTRPDVAFADLASFQPQLCLHGRAPKQAATPEYAAVSNYGYHLDAGKFGVFLRRHCIERLQVRHIVDHVAGVQSHDHGDIAALQTRHHGAIAADLFIDCSGAQSLLLGQHYGVPLRSQRHILFNDSALALQLPYPDEHSPIASQTNSTAQAAGWIWDIGLPTRRGIGYVYSSAHTSDEQAEKALQAYVRQTSGAQEAPMPRKLSFQPGYREHFWHRNCVAIGQSAGFIEPLEASALAMVELGAATLADVLPDNRAGMEIAAQRYNDAFRYRWERVIDFLKLHYLLSKRDDSAYWRDNRQASSVPPRLQELLALWRYQPPSHYDLPRIEEVFPAASYQYILYGMGFATDYGDARRRSDLPQLADAYFAEAQTLTRKMLAGLPTNRELINHIKRHGLPRPGHPIHDQ

SEQ ID NO: 88257 - protein, 506 aa, Altererythrobacter sp.
  misc_feature (1)..(506): tr|A0A411ZG04|A0A411ZG04_9SPHN Tryptophan 7-halogenase OS=Altererythrobacter sp. BPTF-M16 OX=2169535 GN=BPTFM1 6_02272 PE=4 SV=1
MGYGRPIDRIVIVGGGTAGWMAAAVLSRLKKGRDLQITLVESEAIGTVGVGEATIPPFVEFNQMLEIDERELLSKVQGSFKLGIQFENWGEVGDSYIHPFGAYGYHMGGISFHQVWRRMREAGEKRPIQAFNLETMAAYFGKFARTQDFAQDDLPPMNYAYHLDAGRYAAFLREYAEQRGVVRQEGRIEDVTLDQESGFVTSVTLDNGTAISGDLFIDCSGFRGLLIEQAMETGYEEWTHWLPCNRAVALPSNRDDGSPPPPFTKATAHSAGWQWQVPLQHRNGNGHVFCDAYMTADEAHDILVNNIAGKPTAEPNHLRFVTGHRKKFWNKNVVALGLSAGFMEPLESTSIHLINTGVNKLVALLSLEGISPTQVEAFNRLTLKEYTRIRDFLILHYNATERTDSEFWNYCRTMSVPDTLTEKVELFKMNGQIFREEDELFTETSWAAVMMGQRIAMGGHNPVADTFELSATKSELDEMEKSIRFVVQRMPGHEDYLKQYCPAPAI

SEQ ID NO: 88258 - protein, 520 aa, Porphyrobacter sp.
  misc_feature (1)..(520): tr|A0A3M9YWV5|A0A3M9YWV5_9SPHN Tryptophan 7-halogenase OS=Porphyrobacter sp. IPPAS B-1204 OX=2483793 GN=EDM03_ 04635 PE=4 SV=1
MFGSNGIGNANRLARVVIVGGGTAGWMAAAALSRFFNDGRRTVTLIESDAIGTVGVGEATIPPIRSFNAMLDIPEAEFLRETRGTCKLGIEFVNWGRQGDRYFHPFGTYGQDLHGIAFHQLWLREHARSGAGAGDIGDYSMSTAAARLGRFARPTAGAQSAVKEIAYAYHFDAGLYAAYLRRMAERQGVIRIEGQITHANRNGETGDVESVTLENGTAVAGDLFIDCSGFRGLLIEEALDTGYEDWSHWLPMDRALAVPSRSPGPPDPFTRATAHSAGWQWRIPLQHRTGNGHVYSSAFMDDDTAREILLDHLESAPLAQPRGLRFLTGMRRKAWNHNVVAIGLSSGFIEPLESTSIHLIQNGIARLFALFPDLPFSPIERDEYNRGMRELFEDVRDFVILHYKATQRDDSEFWRYIQHMSIPDSLARKMALWQHRGRVFRENAELFSAPSWIAVMLGQNIWPQAHDPIADTLDEDKVAAAMAQMRAAYADVAGRLPAHGDFLRQSGSWHDTPTAQAISA

SEQ ID NO: 88259 - protein, 534 aa, Caulobacter sp.
  misc_feature (1)..(534): tr|A0A1I3WA87|A0A1I3WA87_9CAUL Dehydrogenase (Flavoprot ein) OS=Caulobacter sp. UNC279MFTsu5.1 OX=1502775 GN=SA MN02799626_03249 PE=4 SV=1
MDKRPSEWDVAGGETNMAKQILIVGGGTAGWLTACYLARMIGGREAQGARITLVESEDIGIIGVGEGTFPSIRKTLKRIELDEAALIRDANATFKQGIRFDNWRHAPSVEPTDRYYHPFQTADQHTDLDLLPYWLLGAAGDAPWSRVGTVQQAVIDAHRAPKLIEHPDYAGPLAYAYHFDAVAFGQLLRRHALERGVTRIADTIDAVRLAPDGAIESLTARASGRLEADLYIDCTGFRAQLIGQALGSPFTSYRNQLFCDRALAVQLPYARPDVPIASCTISTAQESGWTWDIGLQERRGVGYVFSSAHTSETRAAEVLSAYAGVPVDRLEPRLLKFEAGFRHVQWRKNCVAIGLSAGFIEPLEATGIGFAEIAALILVNLFPWAGEYDQAAAQFNAQMRRRYDHVIDFIKLHYCLSKREDTDFWRDNRASASISDSLKTKLDIWRWRPPSFLDVDLSHDIFIAPNWQYVLYGMGFRTDISGRAGALRYHDAAREEFANIREQSRNALRIMPDHRALVEEVRRAGFRRPMAGAR

SEQ ID NO: 88260 - protein, 378 aa, Corallococcus sp.
  misc_feature (1)..(378): tr|A0A3A8T654|A0A3A8T654_9DELT Tryptophan halogenase OS =Corallococcus sp. AB030 OX=2316716 GN=D7Y15_36905 PE=4 SV=1
MDTIRYDVAVLGGGPAGAALALALCRHSGLRVVLFERSTYAQPHLGETLPPDSRRLLARLGVWEAFARQGHLRSMGSCSRWGDSALGDNDHLRSPWGTGWHLDRSRFDRMLADEALRFGVDVRIGSVVTDWTPLENGGHRLFVPTEGDAPRDFVDARFVVDATGRSAVFATSQGARRHTVDRTLGLCGTFALQPGRTVDALTLVESCEDGWWYSARMPGDQIVFGLMGDKDSLQGLMPEDAEAWRARMERAPETRRRLEACDFTGEPLLAVSANVACLDRLHGEDWLAVGDAACMLDPLSSQGTSQALRTANQAADVVSRYLRGDSAALRLHEVRTRHEFQEHLRIREGYYRLERRWPGAPYWRNRQQSCAPVLSSPP

SEQ ID NO: 88261 - protein, 515 aa, Sphingomonas sp.
  misc_feature (1)..(515): tr|A0A1P8PQ27|A0A1P8PQ27_9SPHN Tryptophan halogenase OS =Sphingomonas sp. LK11 OX=1390395 GN=AV944_00760 PE=4 S V=1
MGETEVRRVVVVGGGSAGWIAACRLAAQAHRIGSGVQVTLVESRHVPTVGVGEGTWPTMRNTLMKIGITETDFIRSCDAAFKQGARFVGWTDGTPQDGYYHPLNPPAGATEIDLAPHWLHGAAKNASFADWVDYQAMLCDAGLGPKTIVMPEYAGHANYAYHLDAGKFATLLREHGVGTLGIDHVLGDVVRPQMSDHGDIMHLELADGRTVAGDLFIDCTGFAARLIGGVYQVPFRRCGDVLFADRAMALQLPYADQDAPITCHTVSTAQDAGWIWDIGLWTRRGVGHVYSSAHTSDDAAEAALRAYVGPAAEGLSARRITIDAGHRTRFWQNNCVAVGLSAGFIEPLEASALMLIEASMDAIADRLPRTRAAMDVMARQFNATFTHHWMRIIEFLKLHYVLTRRTDTDFWRDNVAASSIPDSLAERLELWRHHSPGPQDFDHAREVFSWPSYQYVLHGMGFDSRQPRIDAAAPDTALAQRFVTRMARARDDLRARAPRHRDLLRAIREHGLQRV

SEQ ID NO: 88262 - protein, 506 aa, Thalassotalea sp.
  misc_feature (1)..(506): tr|A0A4P7JJY3|A0A4P7JJY3_9GAMM Tryptophan 7-halogenase OS=Thalassotalea sp. HSM 43 OX=2552945 GN=E2K93_02210 P E=4 SV=1
MNNKPVKNVVIAGGGTAGWMAAASMAKLLGKAINITLVESDQIPTVGVGEATIPTLHLLHNLLGINEAEFMAATNATFKLGISFENWRDVGKDYIHSFGHLGHDCWACGFQHFWLKGLQKGLVSEIGDYCPEHLGSREGRFAVMAKQDLNHAYHLDAGLYAKFLQKIAYQHGCQRVEGKIDKVNLCSESGNITSLDLDNGKHVEGDLFIDCTGFRGLLIEDALHTGYDDWSHMLPCDSAVAVQTKTVGRPVAYTRSIARESGWQWRIPLQNRTGNGLVFCSKYMSDEDAIQTLLDNIEGEPINQPRVIKYKTGTRRKHWNKNCIAIGLSAGFIEPLESTGIHLFQRAVVRLMQIFPHTGINQADVDEFNQQTSDEMLDIRDFIILHYHLTDRRDTPFWRYCADMDITDSLRHRMELFRQSGRVFKKAEELFGESSWVQVMMGQGLTPEQYHPIVDMMGDEELKGFLDKIKQHTANKVANWPDHWDFINHYCPSKSADDDDKMVKTG

SEQ ID NO: 88263 - protein, 530 aa, Rhodanobacter sp.
  misc_feature (1)..(530): tr|A0A1Q3V8H8|A0A1Q3V8H8_9GAMM Tryptophan halogenase OS =Rhodanobacter sp. 67-28 OX=1895822 GN=BGO50_13765 PE=4 SV=1
MPRLKKVLVVGGGTAGWLAACYLAKAMNSTAPESVQVELVESPNIRLLGVGEATFPSIRGTLAAIGLDERRFLVGATATFKQGIQYVNWVRPPGMPGADRFFHPFNTPSRRPGSPELLPYWLLGAAPEGTPFAEAVTMQSRLVDHGRAPKHASDADYQAPMNHAYHFDAAAFAATLAEHGQGLGVKRHLATVERTELDERGNIARVVTTELGALSADLYVDCTGLRGSLIGGAMRSAFRSRRDVLFVDRAVALQVPYPAPDTPILPYTRATAQPAGWVWDIGLQKRRGIGHVYSSRHMDATQAEEIARRYVGAAADALEAQHLQFETGYRPEHWRGNCVAVGLAGGFVEPLESTGIALVELAVCMLTHLFPADHDDMERTARRFNEMMVARYERIIDFIKMHYCLSQRRDSAFWIDNANPASIPQTLRDRLQLWRCRPPHRLDFVTDLEMFMPASWQYVLYGMEFRTDLEHARSAYPQMDEARREFAMIQQVAGRALQDLPDHRALVEQLCRQHAQRNPVRTGEPVAVGG

SEQ ID NO: 88264 - protein, 291 aa, Caulobacteraceae bacterium
  misc_feature (1)..(291): tr|A0A4Q3U7N9|A0A4Q3U7N9_9CAUL Tryptophan 7-halogenase (Fragment) OS=Caulobacteraceae bacterium OX=1978230 GN= EON96_01570 PE=4 SV=1
DLFIDCSGFRGLLIEQEMQAGYEDWTQWLPANRAVAVPCDRVEDPVPYTRSTARESGWQWRIPLQHRTGNGYVFSDAFISEDQATADLMSRLDGAPQAEPRVLRFVTGRRRKGWIGNVVAIGLSSGFLEPLESTSIHLIQTAISKLLALFPRARRDYAMADQFNREMDQQYEGVRDFIIAHYKVSTRDDTPFWRHCRDMAVPDSLAAKLELFRARGEVMVENHELFRETNWFPILYGQGLTPEGYHPLADVLSDDDLRLRLSQIRTAIKARVDGLPSHESYLRQCVAGTAR

SEQ ID NO: 88265 - protein, 503 aa, Erythrobacter gangjinensis
  misc_feature (1)..(503): tr|A0A0G9MVM3|A0A0G9MVM3_9SPHN Tryptophan halogenase OS =Erythrobacter gangjinensis OX=502682 GN=AAW01_05165 PE =4 SV=1
MDTVPHTFVIAGGGTAGWMAAAALSRFTPPGTRIVLVESDAIGTVGVGEATIPQIHNFNRALGFDEREFLRATRGTFKLGIEFDGWLRAGERYMHAFGPIGRAHGLLPFQHYWIRARQLGFAKPLSAYSLNETAARQMRMQKGRTSVGIELPYAYHFDAGLYAAFLRDFAEARGVRRVEGVIASVERDGESGDITALALNDGERIEGTFFIDCTGFRALLIGEAMEARFDDWSAYLPCNRAITVPCEGVAEITPYTRATARKAGWQWRIPLQHRIGNGLVYCADFMSDDEAAETLLANLDGEVQADPRPIRFTTGARRQHWVGNCLAVGLSAGFMEPMESTSIHLIQSAISRFLSVVPGGRADPATIDWFNAQSRFEWERIRDFLVLHYTANQREGEPFWDHVRTMDLPDTLSAKIAQWKATGFIHREHEELFTEVGWFQVLAGQGVKAQSYNPLADALPESDLRAMLEGVEGALDAAVQPMTNHTEFLQSYTGGMVRTEIPA

SEQ ID NO: 88266 - protein, 145 aa, Caulobacteraceae bacterium
  misc_feature (1)..(145): tr|A0A4Q3TES5|A0A4Q3TES5_9CAUL Tryptophan 7-halogenase (Fragment) OS=Caulobacteraceae bacterium OX=1978230 GN= EON96_16015 PE=4 SV=1
TGLSNLIGLFPTEAAAMPEAEAYNRAMTSHVGNLRDFMLTHYALNQRFDEPVWDRARDANLPERLKTRLRVFAARGRVPLYDDESFQQQNWAQILIGHGLIPSSYDPMVDGVPVEEQMGKVRGLLGKIAEEVALMPSLDAEFGAA

SEQ ID NO: 88267 - protein, 473 aa, Gammaproteobacteria bacterium; identical to SEQ ID NO: 83930
  misc_feature (1)..(473): tr|A0A2N2A7N5|A0A2N2A7N5_9GAMM Tryptophan halogenase (F ragment) OS=Gammaproteobacteria bacterium HGW-Gammaprot eobacteria-1 OX=2013791 GN=CVV05_20265 PE=4 SV=1

SEQ ID NO: 88268 - protein, 511 aa, Duganella sp.
  misc_feature (1)..(511): tr|A0A1H8ANU4|A0A1H8ANU4_9BURK Tryptophan halogenase OS =Duganella sp. CF402 OX=1855289 GN=SAMN05216319_4540 PE =4 SV=1
MLRRIVIVGGGSAGWMTAGLIAAEHRAAGGLQVTLIESPDVPAIGVGEGTWPSMRDTLHRIGVSESDFFRECDASFKQGSRFNRWIDGGDNDYYFHPFVLPQGYGEVNLPAQWQARHPQIPFADLVSFQPHLCTQGRAPKQAQTPEYAAVANYGYHLDAGKFGLFLRKHCLEKLGVHYVPDHVVGINSHQNGDIASLQTQKHGALEGDLFIDCTGMQSLLLGQHYGIPLIPQQHVLYNDSALAVQIPYPADEHPIASQTSSTAQSAGWIWDIGLPTRRGIGHVYASGYISDDQAEAELRAYIVQTGGPQDIPQPRKLTFDPGYREKFWHRNCVAIGLSAGFIEPLEASALAIVEMSAAMLSDDLPATREAMDIVARRFNEAFTYRWERVIDFLKLHYVLSKRRDTPYWRDNTDPAQTPERLRELLTLWQHRAPSRSDFYRIEEVFPSASYQYILYGMGFRSNFSRASKPQEAGMADGYFQEAAGLTRKMLGALPDNRTLINHIKRHGLQKI

SEQ ID NO: 88269 - protein, 515 aa, Porphyrobacter sp.
  misc_feature (1)..(515): tr|A0A3M9YUN6|A0A3M9YUN6_9SPHN Tryptophan 7-halogenase OS=Porphyrobacter sp. IPPAS B-1204 OX=2483793 GN=EDM03_ 02995 PE=4 SV=1
MARRGPTGIEEIVAIERIIIVGGGTAGWMAAAALSRIRAGRPVEITLIESESIGTVGVGEATIPPFVGFNQLLGINEAEMLAEVGGTFKLGIQFENWGNLGDSYIHPFGAYGYTMGGISFHHVWHRMMGAGDKRPIQVFNLETMAAYFGKFARTEDYARDDLPPVNYAYHLDAGRYAAFLRRFAETRGVVRQEGRIADVQLDGESGFVTGVTLDDGRAFQGDLFIDCSGFRGLLIEQALKTGYDDWSQYLPCNRAVALPCQRDDGSPPPPFTRATAHSAGWQWQVPLQHRNGNGHVYCSAYMEDQKALDILLGNIAGKPQAEPNWLRFTTGRRKKFWNKNVVALGLAAGFMEPLESTSIHLINTGIDKLISLLSLDGITKVQEDTFNRLTGREYARIRDFLILHYNATQRTDSDFWNYVRTMDVPDTLTEKVEIFRANGQIFREEDELFTETSWAAVMMGQGISMGGHNAMADAIDPATLRTEVDEMEKSIRYLVQHMPGHGDYLARYCPAPMAA

SEQ ID NO: 88270 - protein, 505 aa, Porphyrobacter sp.
  misc_feature (1)..(505): tr|A0A3M9YUY2|A0A3M9YUY2_9SPHN Tryptophan 7-halogenase OS=Porphyrobacter sp. IPPAS B-1204 OX=2483793 GN=EDM03_ 05115 PE=4 SV=1
MTQPAPLKSIVIVGGGSAGWMTAAALAHAVGRSCAITLIESEAIGTVGVGEATIPPIRHFNHRLGIDEATFVRETQGSYKLGIEFVDWGRLGHSYFHPFGQYGAEFDSVPFYHHWMREALEGRIEGPIDEFSMCWAMAKAGRFTHPSPDRRMIQSTFDYAYHFDAGLYAAYLRRFAEDRGVTRLEGRVVDVTLRGEDGFIEAVTLENGARIGGELFIDCSGFRGLLIEEALEAGYDNWQHWLPCDRAVAVPCEKGEFTPYTRSTAREAGWQWRIPLQHRTGNGYVHCSEFISEDEASTTLLANLDGKPLADPRTLRFVTGKRREFWKHNCVAIGLSAGFMEPLESTSLHLIQYGILRLIALLPDSAMSPLLAREYNAQTTLEYERIRDFLILHYKASERDDSALWRYTADMPIPDSLQYKIDHFRSHGMLVSDERELFANPSWIAVYLGQGITPNRAPALAAMREGVPVAERLVQIRAAMAEAVAAMPTHAEFVARHCAAPPLAA

SEQ ID NO: 88271 - protein, 511 aa, Caulobacter sp.
  misc_feature (1)..(511): tr|A0A1I3YZ69|A0A1I3YZ69_9CAUL Tryptophan halogenase OS =Caulobacter sp. UNC279MFTsu5.1 OX=1502775 GN=SAMN02799 626_04113 PE=4 SV=1
MLTETSRQNGPLTRIAIVGGGAAGWMAAAALARVLGPQGPAITLIESEEIGIVGVGEATIPPIRAFNAMIGLDEDVFVRETKGTFKLGIEFVDWRRRGHRYFHPFGVYGPDFGPTPFEGAWRRLRQVGQAEPLEAYSICAQAAAAGRFARPQPGAGPLSQLAYAFHFDAALYARLLRAHAEAAGVVRREGKVAAVNLRGGDGFVESVTMEDGERIAADLFLDCTGFRALLIGQALDSPFEDWSRWLPNDRAAAVPSVNAGPPAPYTRSTAREAGWQWRIPLQHRTGNGYVFSSRHISEDEAVGALLANLDGEALAEPRVLRFQAGRRQAGWVKNVVALGLASGFLEPLESTSIHLIQVGIARLLEMLPTRAFEPADARRYNRLMAAEFESVRDFLILHFHATERNDTPYWDQLRAMAVPDTLLERLRIYRATGRVFRESDELFTKTSWLAVMDGQGPKVEGGEPLAEGLPLDQARDRLARIAAATAAAVGRMPSQTDFIRAHCQAGALAAV

SEQ ID NO: 88272 - protein, 497 aa, Albimonas pacifica
  misc_feature (1)..(497): tr|A0A1I3HVD6|A0A1I3HVD6_9RHOB Tryptophan halogenase OS =Albimonas pacifica OX=1114924 GN=SAMN05216258_106188 P E=4 SV=1
MTAMSGGPDPLRVLVAGGGSAGWMAAATLDAALNRGGARAVAITVVESPDTPRIGVGEATIPTIRRTLRRLRIPEAEFLAAAEATFKQAIVFADWSGPGSGFAHPFHTRPGDGAEQAAARFLRSDGRTPFADLVTPQPALAAAFRGPRRAGDADYVGPLPYAYHMDAEAFAELLAARAVTRGVARVSAHLRPPERAPDRPLEAVEATDGRRFAADLFVDATGFRRLLIGQGGFLDQSRHLICDAAVALRAPCAPGPTRPFTVAAAREGGWTWDIPLRTRRGRGYVHATAHLAPEAAEDALRAETPGAGEARRLRFQVGRLAQPWQANVVAVGLAAGFVEPLESTGLHLADLAAGLLAENAPLAGPNPGLARAYNALLAAAHDEVVDFVNLHYAASPRRDTPFWRDAADPARRTDRVAHLLELWEARPPVAADFPSSLQAFNHRNWEFILHGLGWRPRALGPAGGPPLAPDPELAAEARRLAAELPGHDALLAALAPR

SEQ ID NO: 88273 - protein, 512 aa, Porphyrobacter sp.
  misc_feature (1)..(512): tr|A0A3M9YUC9|A0A3M9YUC9_9SPHN Tryptophan 7-halogenase OS=Porphyrobacter sp. IPPAS B-1204 OX=2483793 GN=EDM03_ 04640 PE=4 SV=1
MNAPAPVTKIVIVGGGTAGWMTAAALVRVLGALPGLSVTLVESEAIGTVGVGEATIPQIIGFNRLLGLDEMEFMRETRATYKLGIEFVDWLRPGHAYVHPFGSFGIDMLGIEFQHFWLRGQAVGDTSRIDDYSIAAMAGKAGRFAWPRPDNPKSPLSKLSYAFQFDAGRYARFLRRYAEGMGAVRVEGRITQVRQDGETGFVTAVALEDGREVAGELFIDCSGFRSLLLGQTLGVPFTDWSKWLPCDSAVAVPCELGGRTEPLTRSTARTAGWQWRIPLQHRIGNGHVFSSSHIDRTAATDLLLANLDGKPLADPNQLAFKAGHRAQMWDRNVVALGLAAGFLEPLESTSIHLVQSGIARLLALFPDTGFGAVERDRFNHETTREYRDIRDFLVLHYRASERDDSEFWRYCRNLRPPDGLAEKLELFRSSGRIIRENNELFTEDSWLSVMLGQGVRPQAYHPAARILDDAETRQRLSHIRGVIAQAVDQMPTQAEFLRAQGGAIAAEEYLTA

SEQ ID NO: 88274 - protein, 504 aa, Caulobacter sp.
  misc_feature (1)..(504): tr|A0A1I3N8X1|A0A1I3N8X1_9CAUL Tryptophan halogenase OS =Caulobacter sp. UNC279MFTsu5.1 OX=1502775 GN=SAMN02799 626_01051 PE=4 SV=1
MTDKAPSKFVVVGGGTAGWIAAATLAHAMKGRVGEICVIESDEIGTVGVGEATIPPMQFLNSMLGIDEIDFVKKTQATFKLGIEFRDWTRLGHSYFHPFGLHGMPIEAVSFHHYWMRLRQHGDTSAIGDYSLATVAAREGKFVIPPRDLPPELPQLGYAYHFDAGLYARYLRDYAEKRGVKRIEGKIVEVKQRAADGFIEALELEGGKRIEGDFFVDCSGFRGLLIEQTLKTGYEDWTHWLPCDRALALPCDSVSPRTPYTRSTARKAGWQWRIPLQHRIGNGYVYSSPFISDDEAAATLLANLDGAPRADPRPLRFTAGRRKKAWNKNVVALGLASGFMEPLESTSIHMIQTGIFRLLSLLPVGVRDEATVEEYNRLSKIEYEQIRDFIVLHYKATERDDSELWRYCKDMAIPDSLAHKIELFRARGRIARFDDQLFAEPSWLAVFLGQGVEPNHYDRLADVAPLADIERRLAGVRQTIAQIVQGLPTHDEFIARHCRAEPLG

SEQ ID NO: 88275 - protein, 499 aa, Caulobacter sp.
  misc_feature (1)..(499): tr|A0A1I3QWQ8|A0A1I3QWQ8_9CAUL Tryptophan halogenase OS =Caulobacter sp. UNC279MFTsu5.1 OX=1502775 GN=SAMN02799 626_01664 PE=4 SV=1
MDNGPQQDIVILGGGAAGWIAAALLAKQTDRRRTRITLVESEEIGIIGVGEATVPVLAQCNALLGIDEFDFVRRTQGTFKLGIEFCDWGVVGNRHFHAFSDYGHAVQGVSTHHYWLRLRQAGDERPIDDYSFAYAVAKDNRFEPSDPQNARYHHAYHFDAALYARYLRDVATELGVRRIEGKMTHVDLDGASGDIAAIHLANGVTVAGDLFLDCTGFASELLGKALGTPFVDWSRWLLCNSAIAVPSKRAGPTMPFTRSTAHAGGWRWTIPLQHRSGNGMVYSSDFWSDEAAREALLGAIDGEPLAEPRLFRFTSGHRKQFWNRNCVGIGFASNFLEPLESTGLQLIVMGVLKLLKYFPERIIDPVLRDEYNRVSTCEIERIRDFIIAHYHLSRRPEPLWAACRDIEIPDSLRHKLEVWNASGQIALGDAESYMEPSWLAILLGNGVVPARYNVLADQHPLEQIRKGMELRREEIVSSAQAVTSHQDFIDRHCKAAPAS

SEQ ID NO: 88276 - protein, 501 aa, Caulobacter sp.
  misc_feature (1)..(501): tr|B0T4P3|B0T4P3_CAUSK Tryptophan halogenase OS=Cauloba cter sp. (strain K31) OX=366602 GN=Caul_1866 PE=4 SV=1
MARTNPIRSILIVGGGTAGWMAATWLAGRLARQDIQITVVESPDIRTVGVGEATVPAIRDYFRDIGVTEAEVMAATQGTVKLGIEFRDWKRDGECFFHPFGLYGMPSRGVPFHQFWLKRRAEGDATPLAAYSLCTQLAMANQMMEPPASPPNDLGVFNWAVHFDAGLYAQFLRRKATSELGVTHVDGTVVEVSKNGENGFLTGVTLADGRIFEADLFIDCSGFRSLLLGQALGVAYEDWTHLLPCDRAVALPCERDGPLTPYTRSTALAAGWQWRIPLQHRVGNGYVYSSRHISDDEATAVLMSRLEGPALAEPNLLRFQTGHRRRFWEKNCIALGLAAGFMEPLESTSIVLIQSGVERLGALFPERGFDPALADEYNRITTLEYERIRDFLLLHYVANRRDGEAMWDHVRQLALPEPLVHKMRMFASRGTMVRYEWESFHDPSWLSMYGGFDIVPQAHDPMADYFTKPELDSALRRMREAITRAQAFAVPHETFLAAQRT

SEQ ID NO: 88277 - protein, 503 aa, Caulobacter sp.
  misc_feature (1)..(503): tr|B0SYT9|B0SYT9_CAUSK Tryptophan halogenase OS=Cauloba cter sp. (strain K31) OX=366602 GN=Caul_1290 PE=4 SV=1
MTQPPPFKFVIVGGGTAGWMAAAALAQAFKGKVAEIELVESDEIGTVGVGEATIPPIQFLNSLLGIDEIEFVKKTQATFKLGIEFRDWRRPGHSYLHPFGPIGAPIEGVGFHHYWRRLREHGDTTDICDYSMSAVAARKGKFVIAPRELPPGVPPLAYAYHFDAGLYARFLRDYAEARGVKRTEGKIVEVKQRVSDGFIEALKLEGGRRVEGDFFVDCSGFRGLLIEQTLKTGYEDWSHWLPCDRALAVPCDSVAPLTPYTRSTARTAGWQWRIPLQHRTGNGYVYSSPFISDDEAAATLMANLDGAPRAEPRLLRFTTGRRKQAWNKNVVALGLASGFMEPLESTSIHLIQTGVMRLLSLLPTRHHDPAAVEEYNRLSKIEYEQIRDFIILHYRATERDDAELWRYCRSMALPDSLTHKIELFRERGKVARYDEQLFAEPSWIAVFLGQGVEPRDHDRLADVPPLADVQRTLFNMRDKMAHIADRLITHDAFIARHCKADPI

SEQ ID NO: 88278 - protein, 507 aa, Caulobacter sp.
  misc_feature (1)..(507): tr|A0A1I3PQ52|A0A1I3PQ52_9CAUL Tryptophan halogenase OS =Caulobacter sp. UNC279MFTsu5.1 OX=1502775 GN=SAMN02799 626_01355 PE=4 SV=1
MSPSPIRKVLVLGGGTAGWMTAAALSKVLGDQVEVTLIESEQIGTVGVGEATIPPILTFNAMLGIDERDFMRATRATFKLGIEFRDWTRLGDRYIHPFGSFGLDIEAIKFHQVWRKVRDQVGPLEDFNLAAVAARQNRFTLPDPDPAKVLSSLKYAFHFDAGLYARFLRGFAEARGARRIEGKVADVGLRGEDGFIQSVTLEDGRTFEADLFIDCTGFRALLIGQALGGRHVDWSHWLPNDRAVALPCATGGDGLTPYTRATADKAGWRWRIPLQHRTGNGYVYSSAHIGDDEALAGLLAGLDGPTDAEPNFLRFQAGRRDRAWIKNCVAIGLSSGFLEPLESTSIHLIQAGITKLLALFPDKGFDPLEIDEYNRLTALQVELVRDFIILHFKATERSDTPYWDYVRTMEIPESLQRKIDLFAGRGRIFQSDYDLFAEPSWIAVLMGQGIVPRQYDALVDSLPQAALVQRLQRMSALIGQTAQAMPDHAAFIARYCAADAAAAGVPA

SEQ ID NO: 88279 - protein, 524 aa, Caulobacter sp.
  misc_feature (1)..(524): tr|B0T4D3|B0T4D3_CAUSK Tryptophan halogenase OS=Cauloba cter sp. (strain K31) OX=366602 GN=Caul_0296 PE=4 SV=1
MTKPIDEVLIVGGGTAGWITAAYLARKLGAARPDGVRITLIESSEIGIIGVGEGTIPTIQTTMREIGIDEARFMRGAGATFKQGIKFVDWTTAPVGGAHNHYYHSFSRPHTLGGLDLAPYWMLGCAGDVSFSEAVTLQDTVCEAGKGPKLIDDPQYSSPLGYAYHFDAGKLATLMRDVGKALGVRHLIGNVEGARLDESGAIAAIVTREHGELTAGLYIDCSGFSAKLIGEAMGVPFVDDSDVLFVNRAVAIQVPYDRPDAPVATTTLSTAHEAGWTWDIALPERRGVGYVYSNNHTSDDRAEEILRAYVGPAAEGLNARQLKLPIGHRQKPWVKNCVAIGLSGGFLEPLEATGIMLIEAAAWMLGRLFPRPGELEPTAALFNEAMGLRYKGVLDFIKLHYCLTQRTDNDFWIDNTRPESIPDSLHARLEMWKTRAPDPFDFGTVHDSFEVFNYQYVLYGMGFKTDLSANLSAYPHLEAARREFARLKSAAGRAAAAMPDHRTLLDEIYRGGFRSPTPQGLAAR

SEQ ID NO: 88280 - protein, 506 aa, Undibacterium pigrum
  misc_feature (1)..(506): tr|A0A318JIA0|A0A318JIA0_9BURK Tryptophan halogenase OS =Undibacterium pigrum OX=401470 GN=DFR42_101609 PE=4 SV =1
MTMNKRISKITIVGGGSAGWMAATALVTYLGKGSIIRLIESEEIGIVGVGEASVPHIRLFNGQWLGIDEAEFVKRTQGTVKLGIQFNDWGRIGDSYIHGFGAIGRSLGPLPFHQFWLKLFLSGRAAPIGDYSPQTVMAPLGKFAPGDQNAAPNSPLADIAYAYHFDATLYARYLRELAEGRGVQRIEGKIVGVNQRASDGFIESVRMENEAVVDGELFIDCSGFSALLIEQTLKTGYVDWSHCLPCDRALAVPSESVDPITPYTRATARAAGWQWRIPLQHRVGNGYVYSSQHLSDDEAAATLLANLDGKALADPRQLRFTTGMRKKFWNKNVVALGLASGFLEPLESTSIYLAQSGVTRLLSLFPKSDFNPLLAERYNRESVAEYERIRDFLVLHYHATEREDTPFWKHCRSMEIPDSLREAIELFRYDGRYFRNGEDFFALPSWVQIMLGQRITPLGYHSIVDDMPEDKLLDYVEGMRTTFMHAVAAMPTHQQWIDRYWKATAK

SEQ ID NO: 88281 - protein, 497 aa, Erythrobacter gangjinensis
  misc_feature (1)..(497): tr|A0A0G9MRG1|A0A0G9MRG1_9SPHN Tryptophan halogenase OS =Erythrobacter gangjinensis OX=502682 GN=AAW01_05145 PE =4 SV=1
MSEPMPPHVVVLGGGSAGWITACLLHKAWGEHGGKVTVVESPEIGIIGVGEGSTPQLKAMFDHLGIAEADWMAACDATYKLGIRFTGWSERPGFESYFHPFPCAVDLHSEPDFTQNCTLARRGFDVPAHPDDWFLASILADAGSGPQPADTFPFPPTYGYHFDAYKLGAFLRDWAVERGVDHRALKAEKVELSGHTDVAALLCEGGERIEGDIFVDCSGFRAMIAGDALGGEFLPFAENLFADRAVVVPTEKVAQFKPQTGAIAMSSGWRWHIPLTTRTGNGYVYSSRYISDEDAAAELLHAVGLKDDETEPRFLRMKVGRMAKSWRGNCLAAGLAQGFIEPLEATALHIVIATALDFAAAYEAGGFSPEHRDHFNRQTALRYEAIRDYIVGHYRLNQRSDAAFWRDNAANQNLSDELKAMITAWFTHKDIAATNAERYSVQAYSAASWHCLFAGYGTFPAPAKMQPLPANLKAADHGAITSMLAACARNFSPVDWS

SEQ ID NO: 88282 - protein, 537 aa, Sphingomonas sp.
  misc_feature (1)..(537): tr|A0A1P8PT01|A0A1P8PT01_9SPHN Tryptophan halogenase OS =Sphingomonas sp. LK11 OX=1390395 GN=AV944_06965 PE=4 S V=1
MTPHSDHLIRRVVIVGGGTAGWMAAAAFARLLNNGYTHVTLVESEEIGTVGVGEATIPPIITFNQMLGLDENDFLAKTAGTFKLGIEFVDWGDKGERYIHPFGRHAQDLQGVHFHQLYLRERSRRALPDIAEWSMSAVAAKAGKFGRAKPDARSPIRELFYAFHFDASLYARYLRGYAERSGVTRIEGRIDAVNLRPEDGYVEAVTLADGRRIEGDLFIDCSGFRGLLIEEALGTGYESYAQWLPCDRAVAAPCALPNPAEPDPFTRATARDAGWQWRIPLQHRMGNGLVYCSDYLDSEAAEAQLLGSLEGELLGDPRHLRFTAGRRRQSWNRNVVALGLSSGFLEPLESTSIHLVQAAIQRLVALFPDTRFDPAERDEFNRQMHDLYEDVRDFIILHYKATRRDDTPFWNRVRTMEVPESLARKMALWSGKGRLFREGYDLFSNPSWVAVCLGQGLVPQSWEPAADALDENLVAQALEQMRAGYADTAARMPSHGDFLRMTAPSPLAPAMTATRGGQDGFDFARTSGTVQAKGPLL

SEQ ID NO: 88283 - protein, 506 aa, Parvularcula sp.
  misc_feature (1)..(506): tr|A0A371RFU9|A0A371RFU9_9PROT Tryptophan 7-halogenase OS=Parvularcula sp. SM1705 OX=2292771 GN=DX908_02840 PE =4 SV=1
MSVSRIKKVLIVGGGSAGWMTAATLSKILKNDYCDITLVESEEIGTVGVGEATIPQIGTFNRTLGIEENEFVRETKGTFKLGIEFVDWGKKGDRYLHPFGPYGLDMEGLSFHAFYMKQHKDQSPQALSDYSLQAVACRDNRFMRPVNAGNSPLSKIAYAFHFDAGLYARYLRKASEGRGVTRIEGKIADVTLNSDDGFVKSVTLEDGREIEADLFIDCSGFRGLIIEGALKAGYNDWTHWLPADRAIAVPCETSRPLLPYTRSTARDSGWQWRIPLQHRMGNGYVYSSAYASDDEAVDTLMGNLEGKPLGDPRFLRFTTGHRKKFWDKNCVAIGLSAGFLEPLESTSLHLIQSGIAKLLQMFPDKEFNQADIDRYNRVTTFEFERIRDFIILHYNATTRDDTPFWDYVRTMSIPDYLEDKINLYKSYGRIFRENEELFNDTSWFAVMNGQNIKAEKYDPVADVLSDAETAHRLTHIRETIATSANYMPSHEKFILENCSSGDLEKA

SEQ ID NO: 88284 - protein, 507 aa, Aphanizomenon flosaquae
  misc_feature (1)..(507): tr|A0A1B7X8A3|A0A1B7X8A3_APHFL Uncharacterized protein OS=Aphanizomenon flos-aquae WA102 OX=1710896 GN=AN484_0 1030 PE=4 SV=1
MTKNIVVVGGGSAGWLTALTAKKKYPKLNVTVIESKDIGILGAGEGSTPYLPLFLETLDISIEDLVKNCDATIKNGIKFSNWNNDNDFYYHGFGFIDPSLGTEALSSKFLSASPMLVSSIALNNDLKDLDFTENVSEKNKVPFVLEKNKSGKTVSEYKKIGKTSFHFNATKLAERFKDIGLERGIEVFENTITKVSLDENNNVVGLDLDSGITIPSDFVFDCSGFHRLIIGKTFNSKWKSYKEFLPVDSAIPFFLDMTEKIPPYTEAIAMKYGWVWKIPLQNRFGCGYVYDSSLISQEEAIKEVEEFLGFTPYYPRKDKGGFSFSPGSFEEPWQNNCVAIGLAANFVEPLEATSLWVSMVALTEIFSSPDFLTNNSDEIRSEFNKLILNMNDDILNFIYLHYMSLRKDTEFWKKFSYEMAPDELKQKLKVWEKRMPGKRDNGNFWNSASWFVVASAQEKINKGLAQEYVDMSDEYKKAVDSYEYYKKYREYKVTECTDHRQFLEGLK

SEQ ID NO: 88285 - protein, 231 aa, Altererythrobacter sp.
  misc_feature (1)..(231): tr|A0A411ZDV9|A0A411ZDV9_9SPHN Tryptophan 7-halogenase OS=Altererythrobacter sp. BPTF-M16 OX=2169535 GN=BPTFM1 6_01540 PE=4 SV=1
MSDWTLASTDAQIGHFSDIKHILVSIPDFLKDPGAAISDASLQNFARITPQYPGIRASLSDSPKKRLTEQLSPLLSDAFEMRQGTWSIMAWYSLVTSPPSGLLPIQRLPHVDGTDPNQIAMMLYLHETDHGGTAFFRHRSTGLEALTQETYPRYRDTLQAEVEKTGMPPARYVTDGAPLFEVTHNVAGNFNEAVFYRGNILHSGVIENDVPLPSDPCKGRLTLNAFLRPPQ

SEQ ID NO: 88286 - protein, 507 aa, Streptomyces sp.
  misc_feature (1)..(507): tr|A0A0F0GPC1|A0A0F0GPC1_9ACTN Tryptophan halogenase OS =Streptomyces sp. NRRL F-4428 OX=1609137 GN=UK14_26210 PE=4 SV=1
MSACYLKATFGSNVSVTVVESKNIPSIGVGEATFSTVRHFFHYLGLQEHEWMPECSATYKLAIRFENWREPGHHFYHPFERTRVVDGFPITDWWLNQRPSERFDDDCFVIPALCEQLSSPRHLDGNIFEQREDRAGNGSEMVGRSTLTEQQTQFPYAYHFDTVLLAKFLTKYGTERGVKHVLDDVTRVALDERGWISHVDTAENGELHGDLFIDCTGWRGMLINQALDEPFISYQDSLPNDRAVALRVPVDAAKRGMRPCTTATAQDAGWIWTIPLFDRIGTGYVYAGDYITPEEAEQALRDFVGPEAEGVEANHIRMRIGRTRNAWVNNCVAIGLSAGFVEPLESTGIFFIQNAIEQLVKHFPDAAWSEGMRSSYNGHMARMLDGVREFLVLHYYAAARQDNQYWKDTKTRPLPDGLKERLEQWRVKLPDAESIYPSYHGFEPYSYHAMLLGLGGVQLQSSPALASMDGAAAEKAMQSIRDEARELVATLPSQYEYFAHMRRPSSV

SEQ ID NO: 88287 - protein, 502 aa, Sphingomonas sp.
  misc_feature (1)..(502): tr|A0A1P8PUE9|A0A1P8PUE9_9SPHN Tryptophan halogenase OS =Sphingomonas sp. LK11 OX=1390395 GN=AV944_10045 PE=4 S V=1
MSDDAPIGRIAIIGGGTAGWMAAAALARVLGPEGPAITLVESEEIGTVGVGEATIPPIQAFNALLGIDEDDFVRATQGTFKLGIEFVDWRRPGHRYFHPFGVYGIDKGAIPFEAMWQRLRLAGEALPLEAYSICAAAARSGRFMRPQPGNTPLAHIGYAFHFDAALYARFLRGHAEAAGVRREEGRVISVERGGPRDFIEAVLLADGRRIAADLFIDCSGFRGLLIEDAMGAGFEDWGHWLPNDRAVAVPTANVGPPTPFTRSTAHGAGWQWRIPLQHRTGNGLVYASRHLSDDEAATTLLAHLDGEPLSDPRPLQFRTGRRDRFWIGNCVALGLAGGFLEPLESTSIHLIQAGIARLLEMLPTRAFEPADTRRYNRLMAAEFDSVRDFLILHFHATERRDTAYWRELASMDIPETLAERLAIHARTGRVYREADELFTKTSWLAVMDGQGLVANGHDPLAQGMPMDELRARLNRIAAVTQAAAGHMPAHADFLARHCSARR

SEQ ID NO: 88288 - protein, 494 aa, Parvularcula sp.
  misc_feature (1)..(494): tr|A0A371RFR5|A0A371RFR5_9PROT Tryptophan 7-halogenase OS=Parvularcula sp. SM1705 OX=2292771 GN=DX908_02595 PE =4 SV=1
MNTSVPKRIVIAGGGTAGWVAAAALSTQLGKLAKITLVESSDIGTVGVGEATIPTITTFHHLLGIDEQAFMKATRATFKLGISFENWGAVGDSYIHSFGQIGKPTWMGEFHNIWLEAQKEGLGGPLENYCFELQAAKAEKFAISEKLRLNYAYHLDAKAYASFLRKLSEKHGVTRIEGKIAKVSQNSETGNIAALLLEEGQQVEGDLFVDCTGFRGLLIEKTLGVGYQDWSEWLPTNSALAIQTEAVRDARPYTRAVAHEAGWRWQIPLQHRVGNGLVYDNRHLSDEAAQDLLMQSIEGKPLTDPLPIRYTTGMRERVWEKNCIALGLSTGFVEPLESTSIHLFMIGITRLIQLFPFGETSEAVRKRYNDMAVNELERVRDFIILHYHATEREDSEFWRQCRNMDIPDTLKERIELFCEYGHAYQAPDDLFRVDSWVQVMFGQRLRPKAHHRMGRVMDKEQIRQVMTGLDANIRTAVERMPTHQAFLDKYCPIN

SEQ ID NO: 88289 - protein, 483 aa, Streptomyces sp.
  misc_feature (1)..(483): tr|A0A1S2QPR7|A0A1S2QPR7_9ACTN Tryptophan halogenase OS =Streptomyces sp. MUSC 1 OX=1678012 GN=BIV23_03035 PE=4 SV=1
MTSEYDLVVVGGGPAGATAATAVALRGHRVLLLERDTFPRYQIGESLLPATVHGLCRLLGVADEVARAGFTPKRGGTMRWGRDPEPWRFSFSMTPRLPEPTATAFQVERSRFDEILLRNAERVGVEVREGSPVRRVLSVGGRVRGVEYTDRDGTARTAQGRYVIDASGNTSRIHSQVGGARVYSEFFRNLAVFGYYAGGRRLPEPDSGNIFCAAFDAGWLWYIPLRDDLTSVGAVIAPEHLAAVQRDPRGAWQDMIKACPEVDRLLTDVPLATEPPYDRIRVRKDYSYGKTSLWVPGMALAGDSACFVDPVLSSGVHLATYGALLAARAVNSALDGSVPEERGFAEFEARYRREYGVFHEFLIAFYDMERGEDSYFWSAKKVTRVDLDEAAAFAELAGGLVSGDASVLAAERGAAAAELDEAVGRLADGTERGNPLLSTRIVADTFRTGNDLEEQALYGGPLDAPAAAGSLTVAADGLSWLRP

SEQ ID NO: 88290 - protein, 519 aa, Thalassotalea sp.
  misc_feature (1)..(519): tr|A0A4P7JVC4|A0A4P7JVC4_9GAMM Tryptophan 7-halogenase OS=Thalassotalea sp. HSM 43 OX=2552945 GN=E2K93_13980 P E=4 SV=1
MEHIVVVGGGTAGWLSANHLLKQLGKRNIRITLIESPDIATVGVGEGTVPMMRQTLQELGIRETEFIQRCDVTFKQGIKFIDWLDNPDDSLANADKPYYHHIFDYPLIHEFNDLTEHYLSGHAPKQTSFVDAVAFQGKVCDQHRAPKDITTPEYQGQLHYAYHLDAGKFSELLKEHAIKQGVHHVKANVTDVKLANNGDIEALETDCAGVISAQFFVDCSGFRSLLLGQALGVDFIDKSDVLFVDKAVVAQIAYPEGQPDIPSYTLSTAQKHGWIWDIGLQSRRGVGHVYSSRYCSEQEAKATLIDYINAGEHDAQTEIKLRTIDMKIGYREKFWSRNCAAIGLSQGFVEPLEATGLLVFDATAKLLASQFPANRSHMDIVAKQFNSRVNESWLRVIDFIKLHYCLSRRDDSEFWRANRDPSSCPQSLQDRLALWRHQAPSAYDFASRFEIFNLENYLYVLYGMEFDSQVPNNSDLEQNKAQAQAFFARVAEHGNTLTAQMPDHAELLNKINKFGLQTR

SEQ ID NO: 88291 - protein, 505 aa, Sphingomonas sp.
  misc_feature (1)..(505): tr|A0A1P8PT10|A0A1P8PT10_9SPHN Tryptophan halogenase OS =Sphingomonas sp. LK11 OX=1390395 GN=AV944_06975 PE=4 S V=1
MTKVTNDVVRVVIVGGGTAGWMAGAALTRLLSGQCTVRLIESEAIGVVGVGEATLPHIRSFNERLGIPEAEFMARTRATFKLGIEFRDWGRIGDSYIHPFGTFGRGAGAIDFHHYWSRLAGEGQDLPPLDQLSYACTLAREARFEHPDQGRGGLTSTFGYAYQFDALLFAPYLRSLAEEAGAVRTEGMVVDVERDGESGLIRSVTLADGERVEGDLFIDCSGFRSLLLGQTLDEPFEDWSKWLPTDRAVAMPCRTETAVTPYTSAIAMPAGWRWRIPLQHRTGNGYVYASDFISDGDAARALEEAVEGEKLAEPRLLRFKAGRRRRSWVGNCVAIGLASGFLEPLESTSIYLVQQAITALIELFPGRQMDASDRDEFNRVIDLEYDRIRDFLILHYHATSRDDSPFWDYVRTMAIPDSLGEKLELWRRRGRVVKYREGVFLDASWIAVYLGQGIVPEGWDPRADVAGTGDLVQAVQSLRSEIAAEVAVRPDHRAFLERYCPMAAA

SEQ ID NO: 88292 - protein, 377 aa, Caulobacteraceae bacterium
  misc_feature (1)..(377): tr|A0A4Q3TGU7|A0A4Q3TGU7_9CAUL Tryptophan 7-halogenase (Fragment) OS=Caulobacteraceae bacterium OX=1978230 GN= EON96_15385 PE=4 SV=1
APLGDYSLCTVAAQLNRYTAPSADPRTVLSSLKQAYHFDAGLYAAYLREFAQARGVVRTEGKVVDVGLRPADGFIETVTLEDGSVHGADLFIDCSGFRGLLIEQALGSGYEDWSHWLPCDRALAVPCAGVAPLTPYTRATADKAGWRWRIPLQHRTGNGYVYSSQHISDEDARAALLAGLDGAPLAEPRGLRFTTGRRKSQWIKNCVSLGLASGFLEPLESTSIHLIQSGISKLLALFPDRDFDPVCTAEYNRLSKLQFEQIRDFIILHYKATQRDDTAFWTQVRTMEVPDTLNRKLDLFRSGGRIFRYDDELFSDASWVSVMLGQNIVPKSHDPLVDVVDVAAMTQKMSGLRQIIRKTAEAMPLHDDFIASYCKAN

SEQ ID NO: 88293 - protein, 515 aa, Shewanella sp.
  misc_feature (1)..(515): tr|A0A411PKB3|A0A411PKB3_9GAMM Tryptophan 7-halogenase OS=Shewanella sp. D4-2 OX=2520507 GN=EXU30_15720 PE=4 S V=1
MQISKVAIIGGGTAGWLAANHLGLALAGRAIQLTLIESPDIPTIGVGEGTVPSIRQTLKRFGIRETEFIRSCDVSFKQSIKFQNWLNKQLHGEGNFYHHLFDNPFRFGDQHSKAWYQDWQSSQTDSAYAQTVSPQFAACEANLAPKQITTPEYESVCGYAYHLNAAKFAQLLGDNAKGKFNVEHVKANVLDAKLHANGAIKSLILDKHSAQPEREFDFYIDCSGFESILHAKVLKSDFVDKSSQLFVNQALVAQVPTDESQALPPYTLATAHQAGWIWDIALPSRRGCGLVFSDNHISSEQAQDKFAKYLGEAAAQASIRQIPMKVGYRKQFWQQNCVALGLTQGFLEPIEATSILLTDFSADYLAKRFPSSTEQISLLRERFNHTMTYAWERVVEFAKLHYCLSDRIDSQFWIDNRAAESIPDGLKQRLALWQTAMPITDDFFSRFEVFNLDNYLYVLNGMKFKGDFVAASSQSNKSAGKGNLAIESMANQLLAELPEHRDLINKIHQFGLQTV

SEQ ID NO: 88294 - protein, 504 aa, Caulobacteraceae bacterium
  misc_feature (1)..(504): tr|A0A4V1ULK0|A0A4V1ULK0_9CAUL Tryptophan 7-halogenase OS=Caulobacteraceae bacterium OX=1978230 GN=EON96_01095 PE=4 SV=1
MSDNRLRRIVIVGGGTSGWMAATVIAKSLTPGYCEIDLIESPEIGTVGVGEATIPPLLALNRQLGIDEDEFVRRTQATFKLGIQFRNWGHLGNEYVHPFGVYGADLEGVDFQHYWLRLREARDAASIEDYSLATAALKAGRFIRPSTDPRNVLSRMNYAFHFDASLYGGFLREIAMERGVRRHERKIVDVELNPETGFVEALKLEDGSRMEGDLFIDCSGFRGLLIEQALKTGYEDWSQWLPMDRAFAVPCEAVGAPTLYTRSTAHEAGWQWRIQLQHRTGNGHVFCSSFTDEETARQRLLDNLDGPPLAEPRMLRFLTGRRKKAWNKNVVSLGLASGFIEPLESTSIHLVQSGVTTLMSFFPDRSFDQADIDRYNAIIQEEYEHARDFVILHYHATQRDDSAFWNHVRTMDIPDSLKARVDLFRSRARISGRREDLFAFTSWVSVMLGQGITPTGHDPMADQMPLDEVEQKLTRMRAVIGNAVQAMPTHQQFIDRFCKAPALP

SEQ ID NO: 88295 - protein, 502 aa, Sphingomonas sp.
  misc_feature (1)..(502): tr|A0A258RMH5|A0A258RMH5_9SPHN Tryptophan halogenase OS =Sphingomonas sp. 28-63-12 OX=1970434 GN=B7Y47_14505 PE =4 SV=1
MIEPIRIVVLGGGTAGWMTANLLAHAWGAVKGNGRAQVAVVESPDIGIIGVGEGSTPQLKAFFDRLGMAERDWMPRCNATYKTGIAFHGWSDRAGCESYFHPFPTALDVHSEDAFFTHCAARRGGADLPAHPDRFFLPAWLALHGKGPHPAANFPFDVSYGYHFDAHLVGGMLRDHAVSLGVEHIKARVVQVHVAEDGNVAALITDQGEPIASDVFIDSSGFRGVIAQQALGVVFKPFADNLFNDSAVVMPTPHASDPINPYTRATALSAGWCWDIPLTSRTGNGYVYASGYVSPDAAETELRAHLGLLDSDVAARHLQMKVGRVADSWSANCLAVGLAQGFLEPLEATALHLVQATVEGFIAAFEQGDFTPRHRDGFNRMIAARYEGVRDYIVCHYRMNQRHDTAYWRDNAANSALSDSLKSILTCWFTGQDMVAEIARQDIGGYYSAISWHCLLAGYGSFPEDDRMRPVPIGNRMAIIDDFIARCGMNFPTHQSMLAALS

SEQ ID NO: 88296 - protein, 459 aa, Sphingomonas sp.
  misc_feature (1)..(459): tr|A0A518RC82|A0A518RC82_9SPHN Tryptophan 7-halogenase OS=Sphingomonas sp. XS-10 OX=2599297 GN=FPZ54_02585 PE= 4 SV=1
MTGRAIRSICVVGDGIVGLSAAAAFARALPNVTVTIVPAEPDPAAVAELQCATWPSIHRFHAAIGLDEQELVRAGIATHLLGTRFVDWARAGDNWVHGFGEHGLKAGTVPFHSLWHRASRAAEAAPFWHYSAAAVLGAAGKFTHPSRDPASPLGGFLYALRIDPPRYRARLAALTAPLVRHAPFAAAEHGDGGAIAAVTTADGGRVTADLYLDCSGSQAVLRHPEDRAFESWADWLPGRTMATCDVTGGAIDPLDRAERVAGGWRWHSALADHTRVIALGEDEGGVAVRFGCRTPWTANVLAIGDSATAIDPLFGTALHLAQDAILLALELLPGRDFARVEIAEYNRRSHATRARMRDLHALYHLRSGQRPLPDGLARTLEQFARRGRLPPSEAEPFETDAWIASLLGLGVTPHGVDPLSESVDLERVSHAIAALATRLTEAADRVPPYPQLLARLRAG

SEQ ID NO: 88297 - protein, 495 aa, Pseudoalteromonas sp.
  misc_feature (1)..(495): tr|A0A2N5LQN0|A0A2N5LQN0_9GAMM Tryptophan halogenase OS =Pseudoalteromonas sp. MelDa3 OX=888435 GN=CXF89_15640 PE=4 SV=1
MTKTNAVKNVVIAGGGTAGWMAAAALAKLVGNNINITLVESDDIGTVGVGEATIPPIRTFHKLLGINEQAFMKATQASFKLGISFENWGDENTHYIHSFGATGKECWAGEFHHFWLQGKTLGINNPFGDYCYELQAAKGGKFAFNQQNPINYAYHMDATRYAQFLRECSEPLGVKRIEGKIQKVVKNTKTGHIESLTLNNGEHINGDFFIDCTGFRGLLIEQALHTGYEDWSHLLPCNSAIAVQTKSTSDTVLPLTRSIAHKNGWQWRIPLQNRVGNGLVYCSQYMDDEQAKALLLNNIEGEPLTEPRIIKFKTGRRLKGWNKNCLALGLASGFVEPLESTSIHLIMSGIIRFMRLFPFNGITNHAIDEYNKQLKSEIENIRDFIVLHYKVTNRDDSEFWQHCSAMDVPKTLQHKIDLFKQTGRVFLDDGDIFRVDSWVQVMLGQGIEPNQHHLIASMMSDEELTRFLYGIKQQIEQRVSQLPPHHEFLKQYCPA

SEQ ID NO: 88298 - protein, 503 aa, Massilia sp.
  misc_feature (1)..(503): tr|A0A098UBF5|A0A098UBF5_9BURK Tryptophan halogenase OS =Massilia sp. JS1662 OX=1519190 GN=IA69_10150 PE=4 SV=1
MNAPLLNTIVIVGGGTAGWMAATALATALRGRYTIRLVESDEIGIVGVGEATIPMIQRFNTVAGIDEAEFMKATNGTFKLGIEFVNWGRQGERYMHGFGRLGQDLWMVGFDQYWHKMHGLGRARPLDEYSITRMAAKANKFMPARTDVGNSPLADIAYAYHFDASLYARHLRKLSESRGVERIEGKIVQVSQRAHDGFIDAVVLESGRRVEGDLFIDCSGFRGLLIEQTLHTGFEDWSHWLPCDRALAVPCESAAVTTPYTRATAHAAGWQWRIPLQNRIGNGHVYCSRHISDDEAAATLLVNLDGKPLADPRPIRFTTGMRKKAWVKNVVALGLASGFLEPLESTSIHMVQSGLQQLLDFFPDRGFAQVDIDAYNDLTRFHYERIRDFIILHYHANQRTDSDFWQACANMAIPGTLREKLDLYRSHGRIQRVNGELFTEVGWLQVLVGQNIHPDVYHPLVDVQSEAGIHEYMEGVADVIRQCVDFIPGHDRFIADYCKAPQM

SEQ ID NO: 88299 - protein, 505 aa, Thalassomonas actiniarum
  misc_feature (1)..(505): tr|A0A0D8D7K4|A0A0D8D7K4_9GAMM Tryptophan halogenase OS =Thalassomonas actiniarum OX=485447 GN=SG35_00350 PE=4 SV=1
MMSEHQAKSIVIVGGGTAGWMAANLMAKSWQHLGFNIRLIESPDIGIIGVGEGSTPQLKGFMDFLGIKESDWMGQCNATYKNGIEFVNWSTKPGFSRYFHPFPAQTDDYSAPGFFHNSYIRRKGISVEGHPDHFFLASYLAKHKLAPIPEFHFPFETNYGYHFDSALLGKFLAGKAEEFGVTHTRGTVAEVKLHVNGDIQSVITQAGETIAGDIFIDCTGFASLLLQQQLKVPFKSFGNNLFNDAAVVLPTEQTQQLGSQTISTALKHGWAWEIPLTNRNGNGYVYSSAYTSGDSAETELRAKLGLLDADVEARHLKMKVGRVEQHWHKNCVAVGLSQGFIEPLEATALHLVQETVQGFIDSYQKGNFSGQYQGEFNASVNARFEAVRDYIVGHYRINSRTDSQYWLDNANNNQLSASLVAILQCWMRGDNLSDELDRQKIDHYYPSISWHCLLAGYGLYPDSAQLKPGNEYANKYNIEQIADFISRCGLNFKPHRQRLAELSTG

SEQ ID NO: 88300 - protein, 499 aa, Sphingopyxis macrogoltabida
  misc_feature (1)..(499): tr|A0A0P0DZN0|A0A0P0DZN0_SPHMC Tryptophan halogenase OS =Sphingopyxis macrogoltabida OX=33050 GN=LH19_14975 PE= 4 SV=1
MNEDKPVRRIVIAGGGTAGWMMAAAIARTMGHTVDLTLVESEAIGTIGVGESTIPPLVNFNRILGIPEPEFMRAAQATFKLGILFDNWKHDGHSYFHSFGLSGKDHWSAGFQHFWLHGKARGHAQSYDDYCVELVAGLQGKFAHLPEERMNYAYHVDATLYGRFLRKLAEADGARRVEGKIARVELDSESGDIAALLLDGDRRIEGDMFVDCTGFRGLLIDGALHAGFEDWGHWLPNDSAIAVQSDHLGPPMPYTQAIAHDAGWQWRIPLQHRMGAGIVYSSGYLSRDAAYERLMSSVGTPRIEPFDIKFRGGVRRKQWFRNCVAVGLAGGFVEPLEATTVHLIQRAVLRFIRMMPNGRVSECDAAEFNDQQRLDIEQIRDFVILHYKATNRRDSPFWRHVANMPIPASLEQKIELFRETGRVFRKNEELFAENSWVQVMMGQGIEPQSYHPIAEKLRDDELDRLLQMLRDNVTSTVATLPEHHAYVARYCGAEAPATA

SEQ ID NO: 88301 - protein, 499 aa, Sphingopyxis macrogoltabida
  misc_feature (1)..(499): tr|A0A2W5L455|A0A2W5L455_SPHMC Tryptophan halogenase OS =Sphingopyxis macrogoltabida OX=33050 GN=DI569_01865 PE =4 SV=1
MNEAGQTRRVVIAGGGTAGWMMAAAIARTMGPTIDLTLVESEAIGTIGVGESTIPPLVNFNRVLGIPEPDFMRAAQATFKLGILFDNWKYDGHSYFHSFGLSGKDHWSAGFQHFWLAARAKGYPHSYDDYCLELVAAMQGKFAHLPEDRMNYAYHVDATLYGRYLRTLAEAAGATRVEGRIEQVELDGESGHIAALRLDGDRRIAGDMFVDCTGFRGLLIDGALHAGYEDWSHWLPNDSAIAVQSKHLGPPMPYTQAIAHDAGWQWRIPLQHRMGAGIVYASGYLSRDEAYDRLLSSVGEPLIEPFDIKFKGGVRRRQWYRNCVAVGLSGGFVEPLEATTVHLIQRAVLRFIRLMPNGRVSERDAIEFNEQQRQDIEQIRDFVILHYKATQRRDSPFWRHVAHMPVPDSLQQKIELFRETGRTFRKNEELFAENSWVQVMMGQGVDPATWHPIAERMTDDERDRFMAGLRESVARTAATLPDHHAYVARYCGAPEPRAA

SEQ ID NO: 88302 - protein, 473 aa, Alteromonas sp.
  misc_feature (1)..(473): tr|A0A136I1A8|A0A136I1A8_9ALTE Tryptophan halogenase OS =Alteromonas sp. Nap_26 OX=1795869 GN=AXW14_08700 PE=4 SV=1
MAATALSRLLGKSISVTLVESKDIGIVGVGEATIPPIRTFHKLLGIDEKAFMKASQATFKLGIEFQNWRECDHSYIHSFGITGRECWAGEFHHFWLRAKEYGFADDFGDYCPELIAAKQGKFATSEAMPLNFAYHFDAVAYGRFLKQLAIQAGVTHIEGDIKQVEQCPASGNITALRLTDNTHISGDFFIDCTGFKGLLIEETLHTGYDNWQHYLMCDRAVAMQTELTDAPLPYTKSVAHHAGWRWQIPLQQRMGNGLVYCSRYMSDDEAIDTLKSQVTGNPINTPRVIRFTPGKRRMGWNKNCVALGLASGFIEPLESTSIHLIMTGLVRLMRLFPFDGVTQSAIDEYNTKFASEMDAILDFIVMHYKVTNRTDSPFWQQCQRMDIPQSLTHKLRLFEETGRVFLDDGDIFRVDSWTQVLMGQGLMPKQYHKVADEMSEEALKQFMAGLKQQVTQRVNSLPSHHAFLSQYLG

SEQ ID NO: 88303 - protein, 509 aa, Duganella sp.
  misc_feature (1)..(509): tr|A0A1E7WN18|A0A1E7WN18_9BURK Flavin-dependent tryptop han halogenase RebH OS=Duganella sp. HH101 OX=1781066 G N=rebH_4 PE=4 SV=1
MIRRIVIVGGGSAGWLTAGLIAADHQGTPLHITLIESPDIAPIGVGEGTWPSMRDTLRRIGVSEADFFRECDAAFKQGSRFNHWRGDHPLGSDRDYYFHPFVLPQGYGEVNLPQQWQAQHPDTPFADLVSFQPHLCVNGRAPKQASTPEFASVANYGYHLDAGKFGVFLRKHCLEKLGVHHVPDNVVGITSHDNGDIAALRTQAHGALEAELFIDCTGMQSLLLGKHYEVPFISQKHVLYNDSALAVQIPYPAADHPIASQTSSTAQSAGWIWDIGLPTRRGVGHVYSGAHIGDDQAEAELRRYISATGGPQDIPSPRKLSFNPGYRARFWHRNCVAIGLSAGFIEPLEASALALVEMSAAMVSDELPATRAAMDIVARRFNDAFTYRWERVIDFLKLHYVLSRRRDSDYWRDNTAAVPERLNDLLTLWRHRAPSRNDFNRIEEVFPSASYQYVLYGMGFRSEYTHPQPQQAAQADHYFREAAALTRKMLGALPDNRALINHITQRHHA

SEQ ID NO: 88304 - protein, 504 aa, Duganella sp.
  misc_feature (1)..(504): tr|A0A1H8AKY2|A0A1H8AKY2_9BURK Tryptophan halogenase OS =Duganella sp. CF402 OX=1855289 GN=SAMN05216319_4543 PE =4 SV=1
MRDSNNRQPIRRVVICGGGTAGWMAAAGVSKVLGKLLDIKLIESEEIGTVGVGEATIPTLMNFHNVLEINEQEFMAETQATFKLGISFEEWRNVKEDYIHSFGVTGTDHWTAGFQHFWRKGVERGIASDYGDYCLELKASKENRFAHLPNNGMNYAYHLDAGRYAKYLRRLSEPRGVQRIEGKIVSYDKHENGDVRSVMLASGQVIEGDLFIDCTGFRALLIGDAMQEEVEDWSQWLFCDRAIAVQTSSVGDAVPLTRSMAHQAGWQWRIPLQHRVGNGIVYSSRYLDDDAARKQLLANVEGKTLIEPRVIKFKPCQRRNTWKGNVVAIGLSSGFLEPIESTSIHLIQRSVIRLMQSFPSDGIQQADIDEYNAQCNREIDHIRDFIILHYHVNNRTDSQFWIDAREMSIPDSLKHRIDLFKETGRVFRIPNELFAENSWIQVMLGQGIMPKSHHQTADLMSDEELRGFLGGIKGRIDRTVVQLPTHQAYVERYCGRPDMGAKAA

SEQ ID NO: 88305 - protein, 507 aa, Sphingomonas sp.
  misc_feature (1)..(507): tr|A0A518RGU1|A0A518RGU1_9SPHN Tryptophan 7-halogenase OS=Sphingomonas sp. XS-10 OX=2599297 GN=FPZ54_11985 PE= 4 SV=1
MSERLRSIVVAGGGTAGWMTAAALARFCGKGWRITLVESEEIGTVGVGEATIPMIRNFNQALGIDEAEFLRATQGTYKLGIEFAGWGGFDDCYMHAFGLVGRGLGLLPFHHYWLRARAAGRAAPLGQYVLNHVAAYGNRFAHVQRAADSVMPPMPYAFHFDAGLYAAYLRSYAQARGAGRVEGRIVDVERDGESGDVAALTLAGGERIAGDLFVDCSGFRGLLIEGALATGYEDWSHWLPCDRAVAVPCAGTSPWTPYTRATALKTGWQWRIPLQHRTGNGHVFSSAHISEDEATATLLANLDGAALAEPRMLRFTTGKRKRVWNRNVVAIGLSAGFIEPLESTSIHLIQTGINRLLDFLPNGPVADADRDAFNRMADFEIDRIRDFVILHYAANGRSGEPFWDMLRNMPLPELLANRIAMFRANGRIVREHDELFDVAGWVQVMVGQNILPQRWHPLADQLDDAQLDQFLTTVATAFSRDAERMPDHQSYLARFAATPQPQEVTRV

SEQ ID NO: 88306 - protein, 500 aa, Alteromonas marina
  misc_feature (1)..(500): tr|A0A0B3Z3V8|A0A0B3Z3V8_9ALTE Tryptophan halogenase OS =Alteromonas marina OX=203795 GN=RJ41_10720 PE=4 SV=1
MNRPMNIVIAGGGTAGWMAANYFVNKWPSDKVNVTLVESPDIGIIGVGEGSTPTLKRFFEELKIKERDWMPKCNATYKVSIRFNDWSPGSGVKQYRHPFISQTDTFTQRAFEVNCRTRRLGLDSHVNPEDFLLNGVLAKQNKAPLTPENFPFRMEYGYHFDSALLGNYLRDVAVERSVTHVSAVISDVALHASGDISHLVTDRGNIEGDFFVDCTGFSSTLLQQALGVKFNSYSDNLFNDSAVVLPTHAQENIQVETQSTALSNGWCWSIPLQNRTGNGYVYSASHLAKDKAEEELRRHLGLENSDVEARHLKMKVGQVEQHWHKNCLALGLSQGFIEPLEATALHLVQICIEYFSDMFEKGAFSSVERVSYNAFAKARFDRVRDYIVAHYKLNTRNDSDYWRDNRNNLVLSDSLKSIISTWFNREDLGNEIKRQNIGMHWDSVSWHCLFAGYGAFPALAQNQPGRGDLYIEQNIERFNQGCALNFEHHNAVLLAQQHGE

SEQ ID NO: 88307 - protein, 538 aa, Burkholderia ambifaria
  misc_feature (1)..(538): tr|B1FAW0|B1FAW0_9BURK Tryptophan halogenase OS=Burkhol deria ambifaria IOP40-10 OX=396596 GN=BamIOP4010DRAFT_1 169 PE=4 SV=1
MSNPIKNIVIVGGGTAGWMAASYLVRALQQQANITLIESAAIPRIGVGEATIPSLQKVFFDFLGIPEREWMPQVNGAFKAAIKFVNWRKSPDPSRDDHFYHLFGNVPNCDGVPLTHYWLRKREQGFQQPMEYACYPQPGALDGKLAPCLADGTRQMSHAWHFDAHLVADFLKRWAVERGVKRVVDEVVDVHLNERGYISSLSTKEGRTLEADLFIDCSGMRGLLINQALKEPFIDMSDHLLCDSAVASAVPNDDARDGIEPYTSAIAMNSGWTWKIPMLGRFGSGYVFSSKFTSRDQATADFLNLWGLSDNQPLNQIKFRVGRNRRAWVNNCVSIGLSSCFLEPLESTGIYFIYAALYQLVKHFPDTSFDPRLSDAFNAEIVYMFDDCRDFVQAHYFTTSREDTPFWLANRHDLRLSDAIKEKVQRYKAGLPLTTTSFDDSTYYETFDYEFKNFWLNGNYYCIFAGLGMLPDRSLPLLQHRPESIEKAEAMFASIRREAERLRTSLPTNYDYLRSLRDGDAGLSLSQRGSTLAAQEIL

SEQ ID NO: 88308 - protein, 507 aa, Alteromonas sp.
  misc_feature (1)..(507): tr|A0A136I1F1|A0A136I1F1_9ALTE Tryptophan halogenase OS =Alteromonas sp. Nap_26 OX=1795869 GN=AXW14_18095 PE=4 SV=1
MQNPQIKPIKRVVIAGGGTAGWLAASLMKKVLGKAVDITLVESEAIGTVGVGEATIPPIRLVNQVLGIDEAQFIHDTKATIKLAIRFENWKTEGQSYYHTFGAPGKSMAFCHFHHYWVKARQQGLTHDLWDFDLNFHAAEAGRFAQINAKDPVVELPFAYHFDASLYAQYLRKLSENMGVVRKEGKIARVQRCSDSGFIQSLHLESGEEIKGDLFVDCTGFKGLLIEGALGAGYDDWSHLLPCDSALAVPSERHEKTAPYTRSIAHDAGWQWRIPLQHRNGNGHVYSSRYISDDQACETLLSNLDTKPLGDPKLIKFTTGRRRKQWYKNVVAVGLSSGFLEPLESTSIHLIQSAIVRLIQLFPHNGFAPTLESEYNKQSELEFEQIRDFLVLHYNVNERTDSAFFNDMRNITLPDSLAHKIELFKESGNLLREQNDLFLESSWLQVMYGQGIMPMDYHGLVNSVPESQLNQMLTRLLDIKKEPITKLPTHDEYINGMVAKYKRSMNS

SEQ ID NO: 88309 - protein, 481 aa, Caulobacter sp.
  misc_feature (1)..(481): tr|A0A1I3PNP8|A0A1I3PNP8_9CAUL Tryptophan halogenase OS =Caulobacter sp. UNC279MFTsu5.1 OX=1502775 GN=SAMN02799 626_01354 PE=4 SV=1
MSRSPLNSVAVLGGGVAGWMTAAALARVLPGACAIRVVDTADGAPRGALSTLPALRGFHGLLGLNEPALMRAARGTFKLGARYSGWTDEDHVEGFSDAGANLDGVAFHHHWLRVRERGEAGRYEDYSLAAVAARLGRFAPPSEDPRSVLSTLSYGQHLDAAGYVAALRATAGRVEARSGEIAQVALAPDGRIAAVILADGERIAADLFVDTTPDGRLIGATPDAGWIDESTALPCDRLALREVAPRANPPPLTEFEAIAEGWLRRVPLRGGDAVALAYAGNLTSDEAAREILGGEAAIVRLRNGRRERVWTGNCVAIGPAASQLEPLNGDDAQSVQSGVGRLIALLPTADGSPLAAMEYNRLMAEEHDRARDMAVFRYVAAARSDPLWARSRQAAPSPALAYKQAQFESRGRVVLYDEETFVEGAWVAAFLGHGILPRRHDRLADRLPADQADAALARLRGLIRQAAQAMPLHADALKDRP

SEQ ID NO: 88310 - protein, 495 aa, Sphingomonas sp.
  misc_feature (1)..(495): tr|A0A518RK36|A0A518RK36_9SPHN Tryptophan 7-halogenase OS=Sphingomonas sp. XS-10 OX=2599297 GN=FPZ54_18525 PE= 4 SV=1
MKRIVVAGGGTAGWMAAAAIARTMGRTVAVTLVESDAIGTIGVGESTIPPLVTYNRLLGINEAEFMRATQATFKLGILFDNWKVDGDRYFHSFGFTGKDHWSAGFQHFWLAGRSKGHQQPYDDYCLELVAALEGKFAQLPDNRVNYAYQLDSGLYARFLRGMGEKDGVTRIEGKIARVELDGESGDIAALGLDGGRRIEGDLFLDCTGFRALLIEGALHAGYDDWTHWLPCDSAIALQTPNVRPPVPYTRAMAHDAGWQWRIPLQHRTGNGIVYCSRYLDHDAALERLLGNLEGEPLTPPNKIRFQTGARRKQWHRNCVAIGLSGGFMEPLESTSIHLIQRAVLRVIRMMPAQGRVSERDIAEFNEQQFQDMEQIRDFLILHYKVTDRRDSSFWRQCAAMEVPDSLTQKIELFRETGRVFRRNEELFAENSWVQVMMGQGIEPQSWHPIAEKLTDAELDKTLTHIREDVRRTVNGLPAHADYVARYCGAAEPAAA
